(19) United States
(12) Patent Application Publication
(10) Pub. No.: US 2022/0389077 A1
(43) Pub. Date: Dec. 8, 2022

(54) ALLOGENEIC CELL COMPOSITIONS AND METHODS OF USE

(71) Applicant: Poseida Therapeutics, Inc., San Diego, CA (US)

(72) Inventors: Eric M. OSTERTAG, San Diego, CA (US); Devon SHEDLOCK, San Diego, CA (US)

(21) Appl. No.: 17/273,030

(22) PCT Filed: Sep. 5, 2019
(86) PCT No.: PCT/US2019/049816

§ 371 Date: Mar. 3, 2021

Related U.S. Application Data
(60) Provisional application No. 62/815,880, filed on Mar. 8, 2019.
(60) Provisional application No. 62/815,334, filed on Mar. 7, 2019.
(60) Provisional application No. 62/744,073, filed on Oct. 10, 2018.
(60) Provisional application No. 62/727,498, filed on Sep. 5, 2018.

(51) Int. Cl. C07K 14/705; C07K 14/725; C12N 5/0783; C07K 14/74; A61K 35/17; A61K 45/06

(52) U.S. Cl. CPC C07K 14/70507; C07K 14/7051; C12N 5/0636; C07K 14/70539; A61K 35/17; C12N 2501/599; C07K 2319/03; C07K 2319/33; C07K 2319/02; C12N 2510/00; A61K 45/06

(57) ABSTRACT

Disclosed are chimeric stimulatory receptors (CSRs), cell compositions comprising CSRs, methods of making and methods of using same for the treatment of a disease or disorder in a subject.

### CROSS-REFERENCE TO RELATED APPLICATIONS

[0001] This application claims the priority to, and benefit of, U.S. Provisional Application No. 62/727,498, filed on Sep. 5, 2018, U.S. Provisional Application No. 62/744,073, filed on Oct. 10, 2018, U.S. Provisional Application No. 62/815,334, filed on Mar. 7, 2019, and U.S. Provisional Application No. 62/815,880, filed on Mar. 8, 2019. The contents of each of these applications are hereby incorporated by reference in their entireties.

### FIELD OF THE DISCLOSURE

[0002] The disclosure is directed to molecular biology, and more, specifically, to chimeric receptors, allogeneic cell compositions, methods of making and methods of using the same.

### INCORPORATION-BY-REFERENCE OF SEQUENCE LISTING

[0003] The contents of the file named “POTH-046_001WO_SequenceListing.txt”, which was created on Sep. 5, 2019, and is 55.7 MB in size are hereby incorporated by reference in their entirety.

### BACKGROUND OF THE INVENTION

[0004] There has been a long-felt but unmet need in the art for an allogeneic cell composition that overcomes the challenges presented by eliminating genes involved in a graft versus host response and host versus graft response. The disclosure provides allogeneic cell compositions, methods of making and methods of using these compositions which comprise non-naturally occurring structural improvements to restore responsiveness of allogeneic cells to environmental stimuli as well as reduce or prevent rejection by natural killer cell-mediated cytotoxicity.

### SUMMARY OF THE INVENTION

[0005] The present disclosure provides a non-naturally occurring chimeric stimulatory receptor (CSR) comprising: (a) an ectodomain comprising a activation component, wherein the activation component is isolated or derived from a first protein; (b) a transmembrane domain; and (c) an endodomain comprising at least one signal transduction domain, wherein the at least one signal transduction domain is isolated or derived from a second protein; wherein the first protein and the second protein are not identical.

[0006] The activation component can comprise a portion of one or more of a component of a T-cell Receptor (TCR), a component of a TCR complex, a component of a TCR co-receptor, a component of a TCR co-stimulatory protein, a component of a TCR inhibitory protein, a cytokine receptor, and a chemokine receptor to which an agonist of the activation component binds. The activation component can comprise a CD2 extracellular domain or a portion thereof to which an agonist binds.

[0007] The signal transduction domain can comprise one or more of a component of a human signal transduction domain, T-cell Receptor (TCR), a component of a TCR complex, a component of a TCR co-receptor, a component of a TCR co-stimulatory protein, a component of a TCR inhibitory protein, a cytokine receptor, and a chemokine receptor. The signal transduction domain can comprise a CD3 protein or a portion thereof. The CD3 protein can comprise a CD3ζ protein or a portion thereof.

[0008] The endodomain can further comprise a cytoplasmic domain. The cytoplasmic domain can be isolated or derived from a third protein. The first protein and the third protein can be identical. The ectodomain can further comprise a signal peptide. The signal peptide can be derived from a fourth protein. The first protein and the fourth protein can be identical. The transmembrane domain can be isolated or derived from a fifth protein. The first protein and the fifth protein can be identical.

[0009] In some aspects, the activation component does not bind a naturally-occurring molecule. In some aspects, the activation component binds a naturally-occurring molecule but the CSR does not transduce a signal upon binding of the activation component to a naturally-occurring molecule. In some aspects, the activation component binds to a non-naturally occurring molecule. In some aspects, the activation component does not bind a naturally-occurring molecule but binds a non-naturally occurring molecule. The CSR can selectively transduces a signal upon binding of the activation component to a non-naturally occurring molecule. In a preferred aspect, the present disclosure provides a non-naturally occurring chimeric stimulatory receptor (CSR) comprising: (a) an ectodomain comprising a signal peptide and an activation component, wherein the signal peptide comprises a CD2 signal peptide or a portion thereof and wherein the activation component comprises a CD2 extracellular domain or a portion thereof to which an agonist binds; (b) a transmembrane domain, wherein the transmembrane domain comprises a CD2 transmembrane domain or a portion thereof; and (c) an endodomain comprising a cytoplasmic domain and at least one signal transduction domain, wherein the cytoplasmic domain comprises a CD2 cytoplasmic domain or a portion thereof and wherein the at least one signal transduction domain comprises a CD3ζ protein or a portion thereof. In some aspects, the non-naturally CSR comprises an amino acid sequence at least 80%, at least 90%, at least 95% or at least 99% identical to SEQ ID NO:17062. In a preferred aspect, the non-naturally occurring CSR comprises an amino acid sequence of SEQ ID NO:17062.

[0010] The present disclosure also provides a non-naturally occurring chimeric stimulatory receptor (CSR) wherein the ectodomain comprises a modification. The modification can comprise a mutation or a truncation of the amino acid sequence of the activation component or the first protein when compared to a wild type sequence of the activation component or the first protein. The mutation or a truncation of the amino acid sequence of the activation component can comprise a mutation or truncation of a CD2 extracellular domain or a portion thereof to which an agonist binds. The mutation or truncation of the CD2 extracellular domain can reduce or eliminate binding with naturally occurring CD58. In some aspects, the CD2 extracellular domain comprising the mutation or truncation comprises an amino acid sequence at least 80%, at least 90%, at least 95% or at least 99% identical to SEQ ID NO:17119. In a preferred aspect, the CD2 extracellular domain comprising the mutation or truncation comprises an amino acid sequence of SEQ ID NO:17119.

[0011] In a preferred aspect, the present disclosure provides non-naturally occurring chimeric stimulatory receptor (CSR) comprising: (a) an ectodomain comprising a signal peptide and an activation component, wherein the signal peptide comprises a CD2 signal peptide or a portion thereof and wherein the activation component comprises a CD2 extracellular domain or a portion thereof to which an agonist binds and wherein the CD2 extracellular domain or a portion thereof to which an agonist binds comprises a mutation or truncation; (b) a transmembrane domain, wherein the transmembrane domain comprises a CD2 transmembrane domain or a portion thereof; and (c) an endodomain comprising a cytoplasmic domain and at least one signal transduction domain, wherein the cytoplasmic domain comprises a CD2 cytoplasmic domain or a portion thereof and wherein the at least one signal transduction domain comprises a CD3ζ protein or a portion thereof. In some aspects, the non-naturally CSR comprises an amino acid sequence at least 80%, at least 90%, at least 95% or at least 99% identical to SEQ ID NO:17118. In a preferred aspect, the non-naturally occurring CSR comprises an amino acid sequence of SEQ ID NO:17118.

[0012] The present disclosure provides a nucleic acid sequence encoding any CSR disclosed herein. The present disclosure provides a vector comprising a nucleic acid sequence encoding any CSR disclosed herein. The present disclosure provides a transposon comprising a nucleic acid sequence encoding any CSR disclosed herein.

[0013] The present disclosure provides a cell comprising any CSR disclosed herein. The present disclosure provides a cell comprising a nucleic acid sequence encoding any CSR disclosed herein. The present disclosure provides a cell comprising a vector comprising a nucleic acid sequence encoding any CSR disclosed herein. The present disclosure provides a cell comprising a transposon comprising a nucleic acid sequence encoding any CSR disclosed herein.

[0014] A modified cell disclosed herein can be an allogeneic cell or an autologous cell. In some preferred aspects, the modified cell is an allogeneic cell. In some preferred aspects, the modified cell is an allogeneic T-cell or a modified allogeneic CAR T-cell.

[0015] The present disclosure provides a composition comprising any CSR disclosed herein. The present disclosure provides a composition comprising a nucleic acid sequence encoding any CSR disclosed herein. The present disclosure provides a composition comprising a vector comprising a nucleic acid sequence encoding any CSR disclosed herein. The present disclosure provides a composition comprising a transposon comprising a nucleic acid sequence encoding any CSR disclosed herein. The present disclosure provides a composition comprising a modified cell disclosed herein or a composition comprising a plurality of modified cells disclosed herein.

[0016] The present disclosure provides a modified T lymphocyte (T-cell), comprising: (a) a modification of an endogenous sequence encoding a T-cell Receptor (TCR), wherein the modification reduces or eliminates a level of expression or activity of the TCR; and (b) a chimeric stimulatory receptor (CSR) comprising: (i) an ectodomain comprising an activation component, wherein the activation component is isolated or derived from a first protein; (ii) a transmembrane domain; and (iii) an endodomain comprising at least one signal transduction domain, wherein the at least one signal transduction domain is isolated or derived from a second protein; wherein the first protein and the second protein are not identical.

[0017] The modified T-cell can further comprise an inducible proapoptotic polypeptide. The modified T-cell can further comprise a modification of an endogenous sequence encoding Beta-2-Microglobulin (B2M), wherein the modification reduces or eliminates a level of expression or activity of a major histocompatibility complex (MHC) class I (MHC-I).

[0018] The modified T-cell can further comprise a non-naturally occurring polypeptide comprising an HLA class I histocompatibility antigen, alpha chain E (HLA-E) polypeptide. The non-naturally occurring polypeptide comprising a HLA-E polypeptide can further comprise a B2M signal peptide. The non-naturally occurring polypeptide comprising a HLA-E polypeptide can further comprise a B2M polypeptide. The non-naturally occurring polypeptide comprising an HLA-E polypeptide can further comprise a linker, wherein the linker is positioned between the B2M polypeptide and the HLA-E polypeptide. The non-naturally occurring polypeptide comprising an HLA-E polypeptide can further comprise a peptide and a B2M polypeptide. The non-naturally occurring polypeptide comprising an HLA-E can further comprise a first linker positioned between the B2M signal peptide and the peptide, and a second linker positioned between the B2M polypeptide and the peptide encoding the HLA-E.

[0019] The modified T-cell can further comprise a non-naturally occurring antigen receptor, a sequence encoding a therapeutic polypeptide, or a combination thereof. The non-naturally occurring antigen receptor can comprise a chimeric antigen receptor (CAR).

[0020] The CSR can be transiently expressed in the modified T-cell. The CSR can be stably expressed in the modified T-cell. The polypeptide comprising the HLA-E polypeptide can be transiently expressed in the modified T-cell. The polypeptide comprising the HLA-E polypeptide can be stably expressed in the modified T-cell. The inducible proapoptotic polypeptide can be transiently expressed in the modified T-cell. The inducible proapoptotic polypeptide can be stably expressed in the modified T-cell. The non-naturally occurring antigen receptor or a sequence encoding a therapeutic protein can be transiently expressed in the modified T-cell. The non-naturally occurring antigen receptor or a sequence encoding a therapeutic protein can be stably expressed in the modified T-cell.

[0021] The modified T-cell can be an autologous cell. The modified T-cell can be an allogeneic cell. The modified T-cell can be an early memory T cell, a stem cell-like T cell, a stem memory T cell (T_{SCM}), a central memory T cell (T_{CM}) or a stem cell-like T cell.

[0022] The present disclosure provides a composition comprising any modified T-cell disclosed herein. The present disclosure also provides a composition comprising a population of modified T lymphocytes (T-cells), wherein a plurality of the modified T-cells of the population comprise the CSR disclosed herein. The present disclosure also provides a composition comprising a population of T lymphocytes (T-cells), wherein a plurality of the T-cells of the population comprise the modified T-cell disclosed herein.

[0023] The present disclosure provides methods of treating a disease or disorder comprising administering to a subject in need thereof a therapeutically-effective amount of any composition disclosed herein; or a composition for use in the treatment of a disease or disorder. In one aspect, the composition is a modified T-cell or population of modified T-cells as disclosed herein. The present disclosure also a method of treating a disease or disorder comprising administering to a subject in need thereof a therapeutically-effective amount of a composition disclosed herein and at least one non-naturally occurring molecule that binds the CSR.

[0024] The present disclosure provides a method of producing a population of modified T-cells comprising, consisting essential of, or consisting of introducing into a plurality of primary human T-cells a composition comprising the CSR of the present disclosure or a sequence encoding the same to produce a plurality of modified T-cells under conditions that stably express the CSR within the plurality of modified T-cells and preserve desirable stem-like properties of the plurality of modified T-cells. The present disclosure provides a composition comprising a population of modified T-cells produced by the method. In some aspects, at least 5%, at least 10%, at least 15%, at least 20%, at least 25%, at least 30%, at least 35%, at least 40%, at least 45%, at least 50%, at least 55%, at least 60%, at least 65%, at least 70%, at least 75%, at least 80%, at least 85%, at least 90%, at least 95%, at least 96%, at least 97%, at least 98%, at least 99%, or 100% of the population comprising the CSR expresses one or more cell-surface marker(s) of a stem memory T cell (T_{SCM}) or a T_{SCM}-like cell; and wherein the one or more cell-surface marker(s) comprise CD45RA and CD62L. some aspects, at least 5%, at least 10%, at least 15%, at least 20%, at least 25%, at least 30%, at least 35%, at least 40%, at least 45%, at least 50%, at least 55%, at least 60%, at least 65%, at least 70%, at least 75%, at least 80%, at least 85%, at least 90%, at least 95%, at least 96%, at least 97%, at least 98%, at least 99%, or 100% of the population expresses one or more cell-surface marker(s) of a central memory T cell (T_{CM}) or a T_{CM}-like cell; and wherein the one or more cell-surface marker(s) comprise CD45RO and CD62L. The composition can be for use in the treatment of a disease or disorder. The present disclosure also provides for use of a composition produced by the method for the treatment of a disease or disorder. The present disclosure further provides a method of treating a disease or disorder comprising administering to a subject in need thereof a therapeutically-effective amount of the composition produced by the method. The method of treating can further comprising administering an activator composition to the subject to activate the population of modified T-cells in vivo, to induce cell division of the population of modified T-cells in vivo, or a combination thereof.

[0025] The present disclosure provides a method of producing a population of modified T-cells comprising, consisting essential of, or consisting of introducing into a plurality of primary human T-cells a composition comprising the CSR of the present disclosure or a sequence encoding the same to produce a plurality of modified T-cells under conditions that transiently express the CSR within the plurality of modified T-cells and preserve desirable stem-like properties of the plurality of modified T-cells. The present disclosure provides a composition comprising a population of modified T-cells produced by the method. In some aspects, at least 5%, at least 10%, at least 15%, at least 20%, at least 25%, at least 30%, at least 35%, at least 40%, at least 45%, at least 50%, at least 55%, at least 60%, at least 65%, at least 70%, at least 75%, at least 80%, at least 85%, at least 90%, at least 95%, at least 96%, at least 97%, at least 98%, at least 99%, or 100% of the population comprising the CSR expresses one or more cell-surface marker(s) of a stem memory T cell (T_{SCM}) or a T_{SCM}-like cell; and wherein the one or more cell-surface marker(s) comprise CD45RA and CD62L. some aspects, at least 5%, at least 10%, at least 15%, at least 20%, at least 25%, at least 30%, at least 35%, at least 40%, at least 45%, at least 50%, at least 55%, at least 60%, at least 65%, at least 70%, at least 75%, at least 80%, at least 85%, at least 90%, at least 95%, at least 96%, at least 97%, at least 98%, at least 99%, or 100% of the population expresses one or more cell-surface marker(s) of a central memory T cell (T_{CM}) or a T_{CM}-like cell; and wherein the one or more cell-surface marker(s) comprise CD45RO and CD62L. The composition can be for use in the treatment of a disease or disorder. The present disclosure also provides for use of a composition produced by the method for the treatment of a disease or disorder. The present disclosure further provides a method of treating a disease or disorder comprising administering to a subject in need thereof a therapeutically-effective amount of the composition produced by the method. In some aspects, the modified T-cells within the population of modified T-cells administered to the subject no longer express the CSR.

[0026] The present disclosure provides a method of expanding a population of modified T-cells comprising introducing into a plurality of primary human T-cells a composition comprising the CSR of the present disclosure or a sequence encoding the same to produce a plurality of modified T-cells under conditions that stably express the CSR within the plurality of modified T-cells and preserve desirable stem-like properties of the plurality of modified T-cells and contacting the cells with an activator composition to produce a plurality of activated modified T-cells, wherein expansion of the plurality of modified T-cells is at least two fold higher than the expansion of a plurality of wild-type T-cells not stably expressing the CSR under the same conditions. In some aspects, at least 5%, at least 10%, at least 15%, at least 20%, at least 25%, at least 30%, at least 35%, at least 40%, at least 45%, at least 50%, at least 55%, at least 60%, at least 65%, at least 70%, at least 75%, at least 80%, at least 85%, at least 90%, at least 95%, at least 96%, at least 97%, at least 98%, at least 99%, or 100% of the population comprising the CSR expresses one or more cell-surface marker(s) of a stem memory T cell (T_{SCM}) or a T_{SCM}-like cell; and wherein the one or more cell-surface marker(s) comprise CD45RA and CD62L. some aspects, at least 5%, at least 10%, at least 15%, at least 20%, at least 25%, at least 30%, at least 35%, at least 40%, at least 45%, at least 50%, at least 55%, at least 60%, at least 65%, at least 70%, at least 75%, at least 80%, at least 85%, at least 90%, at least 95%, at least 96%, at least 97%, at least 98%, at least 99%, or 100% of the population expresses one or more cell-surface marker(s) of a central memory T cell (T_{CM}) or a T_{CM}-like cell; and wherein the one or more cell-surface marker(s) comprise CD45RO and CD62L. The present disclosure provides a composition comprising a population of modified T-cells expanded by the method. The composition can be for use in the treatment of a disease or disorder. The present disclosure also provides for use of a composition expanded by the method for the treatment of a disease or disorder. The present disclosure further provides a method of treating a disease or disorder comprising administering to a subject in need thereof a therapeutically-effective amount of the composition expanded by the method. The method of treating can further comprising administering an activator composition to the subject to activate the population of modified T-cells in vivo, to induce cell division of the population of modified T-cells in vivo, or a combination thereof.

[0027] The present disclosure provides a method of expanding a population of modified T-cells comprising introducing into a plurality of primary human T-cells a composition comprising the CSR of the present disclosure or a sequence encoding the same to produce a plurality of modified T-cells under conditions that transiently express the CSR within the plurality of modified T-cells and preserve desirable stem-like properties of the plurality of modified T-cells and contacting the cells with an activator composition to produce a plurality of activated modified T-cells, wherein expansion of the plurality of modified T-cells is at least two fold higher than the expansion of a plurality of wild-type T-cells not transiently expressing the CSR under the same conditions. The present disclosure provides a composition comprising a population of modified T-cells expanded by the method. In some aspects, at least 5%, at least 10%, at least 15%, at least 20%, at least 25%, at least 30%, at least 35%, at least 40%, at least 45%, at least 50%, at least 55%, at least 60%, at least 65%, at least 70%, at least 75%, at least 80%, at least 85%, at least 90%, at least 95%, at least 96%, at least 97%, at least 98%, at least 99%, or 100% of the population comprising the CSR expresses one or more cell-surface marker(s) of a stem memory T cell (T_{SCM}) or a T_{SCM}-like cell; and wherein the one or more cell-surface marker(s) comprise CD45RA and CD62L. some aspects, at least 5%, at least 10%, at least 15%, at least 20%, at least 25%, at least 30%, at least 35%, at least 40%, at least 45%, at least 50%, at least 55%, at least 60%, at least 65%, at least 70%, at least 75%, at least 80%, at least 85%, at least 90%, at least 95%, at least 96%, at least 97%, at least 98%, at least 99%, or 100% of the population expresses one or more cell-surface marker(s) of a central memory T cell (T_{CM}) or a T_{CM}-like cell; and wherein the one or more cell-surface marker(s) comprise CD45RO and CD62L. The composition can be for use in the treatment of a disease or disorder. The present disclosure also provides for use of a composition expanded by the method for the treatment of a disease or disorder. The present disclosure further provides a method of treating a disease or disorder comprising administering to a subject in need thereof a therapeutically-effective amount of the composition expanded by the method. In some aspects, the modified T-cells within the population of modified T-cells administered to the subject no longer express the CSR.

[0028] Any of the above aspects can be combined with any other aspect.

[0029] Unless otherwise defined, all technical and scientific terms used herein have the same meaning as commonly understood by one of ordinary skill in the art to which this disclosure belongs. In the Specification, the singular forms also include the plural unless the context clearly dictates otherwise; as examples, the terms “a,” “an,” and “the” are understood to be singular or plural and the term “or” is understood to be inclusive. By way of example, “an element” means one or more element. Throughout the specification the word “comprising,” or variations such as “comprises” or “comprising,” will be understood to imply the inclusion of a stated element, integer or step, or group of elements, integers or steps, but not the exclusion of any other element, integer or step, or group of elements, integers or steps. About can be understood as within 10%, 9%, 8%, 7%, 6%, 5%, 4%, 3%, 2%, 1%, 0.5%, 0.1%, 0.05%, or 0.01% of the stated value. Unless otherwise clear from the context, all numerical values provided herein are modified by the term “about.”

[0030] Although methods and materials similar or equivalent to those described herein can be used in the practice or testing of the present disclosure, suitable methods and materials are described below. All publications, patent applications, patents, and other references mentioned herein are incorporated by reference in their entirety. The references cited herein are not admitted to be prior art to the claimed invention. In the case of conflict, the present Specification, including definitions, will control. In addition, the materials, methods, and examples are illustrative only and are not intended to be limiting. Other features and advantages of the disclosure will be apparent from the following detailed description and claims.

### BRIEF DESCRIPTION OF THE DRAWINGS

[0031] The patent or application file contains at least one drawing executed in color. Copies of this patent or patent application publication with color drawing(s) will be provided by the Office upon request and payment of the necessary fee.

[0032] FIG. 1 is a schematic diagram depicting a T-cell receptor (TCR) and co-receptors CD28 and CD2.

[0033] FIG. 2 is a schematic diagram depicting primary and secondary co-stimulation is delivered to T-cell via binding of agonist mAbs (anti-CD3, anti-CD28, and anti-CD2). Full T-cell activation critically depends on TCR engagement in conjunction with a second signal by co-stimulatory receptors that boost the immune response. Primary and secondary co-stimulation can be delivered to T-cell via treatment with and engagement of surface receptors with agonist mAbs (E.g. anti-CD3, anti-CD28, and anti-CD2).

[0034] FIG. 3 is a schematic diagram showing that, in absence of TCR, only secondary co-stimulation is delivered to T-cell via binding of agonist mAbs. Since full T-cell activation is critically dependent on primary stimulation via CD3ζ in conjunction with a second signal by co-stimulatory receptors, T cell activation and expansion is suboptimal and thus reduced.

[0035] FIG. 4 is a schematic diagram showing that, in absence of TCR, stimulation is enhanced with expression of Chimeric Stimulatory Receptors (CSRs). In the absence of TCR, but in the presence of surface-expressed CSR/s, primary and secondary co-stimulatory signals are delivered when T cell is treated with standard agonist mAbs. Since a fuller T-cell activation is achieved via CSR-mediated stimulatory signals, T cell activation and expansion is enhanced.

[0036] FIG. 5 is a schematic diagram depicting an exemplary CSR CD28z of the disclosure.

[0037] FIG. 6 is a schematic diagram depicting an exemplary CSR CD2z of the disclosure.

[0038] FIG. 7 is a schematic of a strategy for mutation of CSR CD2z to eliminate natural ligand (CD58) binding. A panel of CSR CD2z mutants was designed within the extracellular domain of CD2. The goal of this panel was to identify mutants that no longer bind CD58 but retain their receptivity to being bound by the anti-CD2 activator reagent. This may be desirable for two main reasons: 1) CD58 expression by activated T cells may interact with the wild type (WT) CD2z CSR and possibly interfere with the optimal performance of the CSR, and 2) since the WT CD2z CSR might function as a natural ligand CAR, it is possible that T cells expressing the CSR may mediate cytotoxic activity against CD58-expressing cells, including activated T cells. Thus, a mutant CD2z CSR that cannot interact with CD58 but retains its ability to bind activating anti-CD2 reagent for optimal cell expansion is desired.

[0039] FIG. 8 is a schematic diagram depicting an exemplary CSR CD2z-D111H of the disclosure. A D111H mutation is within the CD2 extracellular domain of the CSR CD2z-D111H construct.

[0040] FIGS. 9A-9B are a series of plots showing that piggyBac® delivery of CSR enhances the expansion of TCRb/b2M double-knockout CAR-T cells. Pan T cells isolated from normal donor blood were genetically modified using the piggyBac® DNA modification system in combination with the Cas-CLOVER™ gene-editing system. Cells were electroporated in a single reaction with a transposon encoding a CAR, selection gene and a CSR (either CD28z or CD2z), an mRNA encoding the super piggyBac™ transposase enzyme, an mRNA encoding Cas-CLOVER™, and multiple guide RNA (gRNA) targeting TCRb and b2M in order to knockout the TCR and MHCI (double-knockout; DKO). The cells were subsequently stimulated with agonist mAbs anti-CD2, anti-CD3 and anti-CD28, and were later selected for genetic modification over the course of a 16 day culture period. At the end of the initial culture period all T cells expressed the CAR, indicating successful selection for genetically-modified cells (data not shown). In the samples expressing either CD2z or CD28z CSR, a greater degree of expansion of the DKO cells was observed as a greater frequency of the CAR alone DKO cells (FIGS. 9A and 9B). In DKO CAR-T cell samples expressing either CD2z or CD28z CSR, at least a two fold expansion of the cells was observed in comparison to DKO CAR-T cells alone.

[0041] FIGS. 10A-10B are a series of plots showing that CSR CD2z or CD28z in purified DKO CAR-T cells results in enhanced expansion upon re-stimulation. After initial genetic modification and a first round of stimulation and expansion, cells from each group (Mock (WT CAR-T cells), DKO CAR-T cells, DKO CAR-T cells+CD2z CSR, and DKO CAR-T cells+CD28z CSR) were purified for TCR⁻MHCI⁻ cells using magnetic beads. The purified cells were then re-stimulated using anti-CD2, anti-CD3, and anti-CD28 agonist mAbs. At the end of the 14 day culture period, TCR and MHCI expression (A) as well as magnitude of cell population expansion (B) was determined. After this secondary expansion, all purified DKO cells, including those expressing either CD2z or CD28z CSR, were still extremely pure for DKO cells (>98.8% DKO). DKO CAR-T cells expressing either CD2z or CD28z CSR resulted in enhanced expansion when compared to those not expressing either CSR.

[0042] FIG. 11 is a graph showing that cytokine supplementation can further expand purified DKO CAR-T cells expressing CSR upon re-stimulation. After initial genetic modification and a first round of stimulation and expansion, cells expressing CSRs were purified for DKO cells using magnetic beads. The purified cells were then re-stimulated using anti-CD2, anti-CD3, and anti-CD28 agonist mAbs in the presence exogenous purified recombinant IL7 and IL15. At the end of the 14 day culture period, magnitude of cell population expansion was determined. After a secondary expansion, all purified DKO cells, including those expressing either CD2z or CD28z CSR, were still extremely pure for TCR⁻MHCI⁻ cells (>98.8% double knockout (data not shown)). In addition, cells grew robustly in the presence of IL7 and IL15, which was greater than that without supplementation. These data demonstrate that exogenous cytokines may be added to further expand WT CAR-T cells expressing CSR.

[0043] FIG. 12 is a graph showing that surface expression of CAR is not significantly affected by co-expression of CSR in DKO cells. After secondary expansion, cells (Mock (WT T cells), WT CAR-T cells, DKO CAR-T cells, DKO CAR-T cells+CD2z CSR, and DKO CAR-T cells+CD28z CSR) were stained for the surface-expression of CAR and compared to control WT CAR-T cells and Mock T cells. Expression of CD2z or CD28z CSR does not have a significant impact on expression of CAR molecule on the surface of T cells.

[0044] FIG. 13 is a graph showing that expression of CSRs does not significantly affect DKO CAR-T cell cytotoxicity in vitro. After secondary expansion, cells (Mock (WT T cells), WT CAR-T cells, DKO CAR-T cells, DKO CAR-T cells+CD2z CSR, and DKO CAR-T cells+CD28z CSR) were co-cultured with engineered K562-BCMA-Luciferase (eK562-Luc.BCMA) or negative control line K562-PSMA-Luciferase (eK562-Luc.PSMA) for 48 hours at 10:1, 3:1, or 1:1 E:T ratios. Luciferase signal was measured to determine cytotoxicity. Killing of eK562-Luc.PSMA is shown in dotted lines, while killing of eK562-Luc.BCMA is shown in solid lines. All CAR⁺ T cells expressed an anti-BCMA specific CAR. DKO CAR-T cells exhibit similar in vitro cytotoxicity as WT CAR-TCR cells. This activity is not significantly affected by CD2z or CD28z CSR co-expression.

[0045] FIG. 14 is a graph showing that expression of CSRs does not significantly affect DKO CAR-T cell secretion of IFNg in vitro. Supernatants from the 48 hour killing assay were assayed for secreted IFNg as a measure of antigen-specific functionality of the BCMA CAR T cells. All CAR-T cells, either with or without CD2z or CD28z CSR expression secrete IFNg in response to co-culture with target cells expressing BCMA (eK562-Luc.BCMA), but not those expressing an irrelevant target (eK562-Luc.PSMA).

[0046] FIG. 15 is a series of plots showing that expression of CSRs does not significantly affect DKO CAR-T cell proliferation in vitro. Mock (WT T-cells), WT CAR-T cells, DKO CAR-T cells, DKO CAR-T cells+CD2z CSR, and DKO CAR-T cells+CD28z CSR cells were labelled with Cell Trace Violet (CTV), which is diluted as cells proliferate. The cells were co-cultured for 5 days with eK562-Luc.PSMA or eK562-Luc.BCMA cells at a 1:2 E:T ratio. All CAR-T cells, either with or without CD2z or CD28z proliferate in response to target cells expressing BCMA (eK562-Luc.BCMA) but not those expressing an irrelevant antigen (eK562-Luc.PSMA).

[0047] FIG. 16 is a pair of graphs showing that the memory phenotype of DKO CAR-T is not significantly affected with CD2z CSR co-expression. WT CAR-T cells, DKO CAR-T cells, DKO CAR-T cells+CD2z, and DKO CAR-T cells+CD28z were stained for expression of surface CD45RA, CD45RO, and CD62L to define Tscm, Tcm, Tem, and Teff cells; Tscm (CD45RA⁺CD45RO⁻CD62L⁺), Tcm (CD45RA⁻CD45RO⁺CD62L⁺), Tem (CD45RA⁻CD45RO⁺CD62L⁻), Teff (CD45RA⁺CD45RO⁻CD62L⁻). WT and DKO CAR-T cells with or without CD2z are comprised predominantly of exceptionally high levels of favorable Tscm and Tcm cells. However, when CD28z is expressed in DKO CAR-T cells, the phenotype is significantly more differentiated, favoring Tcm and Tem cells. This phenotype may have a negative impact on the in vivo functionality of these CAR T cells since they appear to be more differentiated.

[0048] FIG. 17 is a series of graphs showing that the expression of activation/exhaustion markers in DKO CAR-T is not significantly affected with CD2z CSR co-expression. Mock (WT T cells), WT CAR-T cells, DKO CAR-T cells, DKO CAR-T cells+CD2z, and DKO CAR-T cells+CD28z were examined by flow cytometry for the expression of important exhaustion molecules Lag3, PD1, and Tim3. WT and DKO CAR-T cells with or without CD2z have little to no expression of exhaustion molecules when compared to mock T cells. However, expression of CD28z CSR in DKO CAR-T during the expansion process leads to significant upregulation of exhaustion markers Lag3, PD1, and Tim3. This phenotype may have a negative impact on the in vivo functionality of these CAR T cells since they appear to be more exhausted. By contrast, CD2z expression has little to no effect on the exhaustion phenotype of DKO CAR-T cells while significantly enhancing the expansion capability of the cells.

[0049] FIG. 18 is a graph showing that delivery of CSR enhances the expansion of CAR-T cells. CSRs were delivered to CAR-T cells either transiently by mRNA or stably by piggyBac®. Pan T cells isolated from the blood of a normal donor were genetically modified using the piggyBac® DNA modification system and the standard Poseida process. Cells were co-electroporated in a single reaction with mRNA encoding the Super piggyBac™ transposase enzyme (SPB), a transposon encoding a BCMA CAR and selection gene, along with an additional mRNA encoding a CSR (either CD28z or CD2z; resulting in transient expression) or a CD19 mRNA control, or, with a transposon encoding a BCMA CAR, selection gene and a CSR (either CD28z or CD2z; resulting in stable expression). The cells were subsequently stimulated with agonist mAbs anti-CD2, anti-CD3 and anti-CD28, and were later selected for genetic modification over the course of a 19 day culture period. At the end of the initial culture period all T cells expressed the CAR, indicating successful selection for genetically-modified cells (data not shown). Bars represent total live CAR-T cells in well and numbers indicate fold-enhancement of expansion above CAR-T cells produced in the absence of a CSR or a CD19 mRNA control. In the samples expressing either CD2z or CD28z CSR, either transiently or stably, a greater degree of expansion of the CAR-T cells.

[0050] FIG. 19 is a series of bar graphs showing that expression of CSRs does not significantly affect CAR-T cell cytotoxicity. CSRs were delivered to CAR-T cells either transiently by mRNA or stably by piggyBac®. Pan T cells isolated from the blood of a normal donor were genetically modified using the piggyBac® DNA modification system and the standard Poseida process. Cells were co-electroporated in a single reaction with mRNA encoding the Super piggyBac™ transposase enzyme (SPB), a transposon encoding a BCMA CAR and selection gene, along with an additional mRNA encoding a CSR (either CD28z or CD2z; resulting in transient expression), or, with a transposon encoding a BCMA CAR, selection gene and a CSR (either CD28z or CD2z; resulting in stable expression). The cells were subsequently stimulated with agonist mAbs anti-CD2, anti-CD3 and anti-CD28, and were later selected for genetic modification over the course of a 19 day culture period. At the end of the initial culture period all T cells expressed the CAR, indicating successful selection for genetically-modified cells (data not shown). To assess CAR-T cell ability to kill, cells were co-cultured with engineered K562-BCMA-Luciferase (eK562-Luc.BCMA) or negative control line K562-Luciferase (eK562-Luc) for 48 hours at 10:1, 3:1, or 1:1 E:T ratios. Luciferase signal was measured to determine cytotoxicity. Killing of eK562-Luc is shown in bar graph on left, while killing of eK562-Luc.BCMA is shown in bar graph on right. All CAR⁺ T cells expressed an anti-BCMA specific CAR and exhibited similar in vitro cytotoxicity against BCMA+ target cells. In summary, this activity was not significantly affected by transient or stable CSR co-expression.

[0051] FIG. 20 is a schematic diagram showing that, in presence of TCR, stimulation is enhanced with expression of Chimeric Stimulatory Receptors (CSRs). In the presence of surface-expressed CSR/s, either transiently or stably expressed, enhanced primary and secondary co-stimulatory signals are delivered when T cell is treated with reagents displaying agonist mAbs. In one aspect, this schematic diagram represents an autologous cell. Since a fuller T-cell activation is achieved via CSR-mediated stimulatory signals, T cell activation and expansion is enhanced.

[0052] FIG. 21 is a series of graphs showing that CSRs are expressed on the surface of T cells and do not lead to cellular activation in the absence of exogenous stimulation. Pan T cells from normal blood donors were stimulated with anti-CD3/anti-CD28 beads in standard T cell culture media, then rested. These cells were then electroporated (BTX ECM 830 electroporator @ 500V for 700 μs) with 10 μg of mRNA encoding either CD28 CSR, CD2 CSR, or wild-type CD19 control. Two days later the electroporated cells were examined by flow cytometry for surface-expression of each molecule and data are shown as stacked histograms. In addition, cell size (FSC-A) and CD69 expression was evaluated as a possible indication of cellular activation above the Mock electroporated control cells. Increased surface expression of CD28, CD2, and CD19 were detected in T cells electroporated either with CD28z CSR, CD2z CSR or CD19, respectively. Expression of these molecules on the surface of T cells did not intrinsically activate the cells in the absence of exogenous stimulation.

[0053] FIG. 22 is a series of line graphs showing that CSR molecules can be delivered transiently during manufacturing for the enhanced expansion of CAR-T cells. Pan T cells isolated from healthy donor blood were genetically modified using the piggyBac® DNA modification system in combination with the Cas-CLOVER™ gene-editing system (CC) for the production of allogeneic (Allo) CAR-T cells, or without CC gene-editing for the production of autologous (Auto) CAR-T cells; auto CAR-T cells were produced by nucleofection of an mRNA encoding the super piggyBac® transposase enzyme (SPB) and a transposon encoding a CAR, selection gene and a safety switch. For production of Allo CAR-T, cells were electroporated (EP) in a single reaction with an mRNA encoding the SPB enzyme, an mRNA encoding CC, multiple guide RNAs (gRNA) targeting TCRb and b2M for the knockout of TCR and MHCI, and a transposon encoding either a CAR, selection gene and the CSR CD2z, or a transposon encoding a CAR, selection gene and a safety switch that did not encode a CSR. For CAR-T cells that did not receive a CSR encoded in the transposon for stable integration, the CD2z CSR was provided to the cells transiently as an mRNA only once in the initial EP reaction, at varying amounts of 5 μg, 10 μg, and 20 μg of mRNA in a 100 μl EP reaction. Following EP, all cells were subsequently stimulated with a cocktail of agonist mAbs anti-CD2, anti-CD3 and anti-CD28, and were later selected for genetic modification over the course of a 19-day culture period using the selection gene. At the end of the initial culture period, all T cells expressed the CAR, indicating successful selection for genetically-modified cells (data not shown). Data for each is shown in line graph at various days of production. In the samples where the CD2z CSR was provided stably (as encoded in the transposon (Stable)) or transiently (as encoded in mRNA (mRNA)), a greater degree of expansion of the CAR-T cells was observed as compared to the CAR-T cells produced without a CSR. These data show that the CSR can be delivered transiently as mRNA during manufacturing for enhanced expansion of both autologous and allogeneic CAR-T products.

[0054] FIG. 23A is a bar graph showing CSR CD2z mutant staining data. A panel of CSR CD2z mutants was designed, constructed, and tested for surface expression and binding to several anti-CD2 antibody reagents. To do so, each mutant was synthesized, subcloned into an in-house mRNA production vector, and then high-quality mRNA was produced for each. K562 cells were electroporated with 9 μg of mRNA, and surface-expression of each molecule was analyzed by flow cytometry the next day and data are shown as bar graphs. Each molecule was stained with anti-CD2 activator reagent, anti-CD2 monoclonal antibody (clone TS1/8), or anti-CD2 polyclonal antibody reagent (goat anti-human CD2). Variable binding was observed for each construct and data are summarized in FIG. 23C.

[0055] FIG. 23B is a series of bar graphs showing CSR CD2z mutant degranulation data. The panel of CSR CD2z mutants was tested for the capability of mediating degranulation against CD58-positive cell targets. T cell degranulation is a surrogate of T cell killing that can be measured by FACS staining for intracellular CD107a expression following coculture with target cell lines expressing target antigen. Specifically, pan T cells from normal blood donors were stimulated with anti-CD3/anti-CD28 beads in standard T cell culture media, then rested. These cells were then electroporated (BTX ECM 830 electroporator @ 500V for 700 μs) with 9 μg of mRNA expressing CSR CD2z mutants and cultured overnight. The next day, the cells were cocultured for 4-6 hours in the presence of various target cell lines. Positive target cell lines included K562 cells or Rat2 cells that were electroporated or lipofected, respectively, with mRNA encoding human CD58, while negative controls were either Rat2 cells that were not electroporated or CSR CD2z mutant expressing T cells alone. Only T cells expressing CSR CD2z mutants that recognized surface-expressed human CD58 were capable of degranulating at levels above background. Little reactivity was observed for the D111H, K67R/Y110D, K67R/Q70K/Y110D/D111H, Delta K106-120, CD3z deletion and mock control, and data are summarized in FIG. 23C.

[0056] FIG. 23C is a summary of staining and degranulation data. Data from surface-expression and binding studies, as well as those from degranulation experiments for each CSR CD2z mutant is summarized in the table. Two candidates that are expressed on the surface and/or retain binding to the anti-CD2 activator reagent that do not mediate anti-CD58 degranulation activity are the D111H and K67R/Y1101D CSR CD2z mutants. Only the D111H mutant is strongly bound by all staining reagents on the cell surface while completely abrogating anti-CD58 degranulation activity.

[0057] FIG. 23D is a series of flow cytometry plots showing the expression of CD48, CD58 or CD59 on K562 and Rat2 cells. To confirm possible ligands for the CSR WT CD2z molecule, a panel of known and suspected ligands including human CD48, CD58, and CD59 were tested. Degranulation of engineered T cells was evaluated against the cell lines K562 and Rat2 that were made to overexpress the target ligands and confirmed for expression by FACS staining. Red histograms are unstained cells and blue histograms are cells that were electroporated/lipofected with mRNA and then stained for expression of the respective marker by FACS.

[0058] FIG. 23E is a bar graph showing that CSR CD2z recognizes human CD58, but not CD48 or CD59. To confirm possible ligands for the CSR WT CD2z molecule, a panel of known and suspected ligands including human CD48, CD58, and CD59 were tested. Degranulation of engineered T cells was evaluated against the cell lines K562 and Rat2 that were made to overexpress the target ligands and confirmed for expression by FACS staining. Cells were electroporated/lipofected with mRNA and then stained for expression of the respective marker by FACS. As a control, a BCMA CAR was included as well as a K562 cell line overexpressing BCMA. In addition, T cells transfected with GFP were also included as a control. T cell degranulation is a surrogate of T cell killing that can be measured by FACS staining for intracellular CD107a expression following coculture with target cell lines expressing target antigen. Pan T cells from normal blood donors were stimulated with anti-CD3/anti-CD28 beads in standard T cell culture media, then rested. These T cells were then electroporated with mRNA expressing CSR WT CD2z, BCMA CAR, or GFP and cultured overnight. The next day, the cells were cocultured for 4-6 hours in the presence of the various target cell lines that were electroporate/lipofected with mRNA encoding human CD48, CD58 or CD59, while negative controls were either K562 or Rat2 cells that were not electroporated/lipofected, or each of the electroporated T cells alone. T cells expressing either the CSR WT CD2z or BCMA CAR were capable of degranulating at levels above background when cocultured with cell lines overexpressing human CD58 or BCMA, respectively, and not against human CD48 or CD59. Little reactivity was observed for the T cells expressing GFP.

[0059] FIG. 24A is a bar graph showing that the delivery of CSR CD2z-D111H mutant enhances the expansion of Allo CAR-T cells. Pan T cells isolated from healthy donor blood were genetically modified using the piggyBac® DNA modification system in combination with the Cas-CLOVER™ gene-editing system (CC) for the production of allogeneic (Allo) CAR-T cells, or without CC gene-editing, as a control, for the production of autologous (Auto) CAR-T without a CSR (No CSR); auto CAR-T cells were produced by nucleofection of an mRNA encoding the super piggyBac™ transposase enzyme (SPB) and a transposon encoding a CAR, selection gene and a safety switch. For production of Allo CAR-T, cells were electroporated (EP) in a single reaction with an mRNA encoding the SPB enzyme, an mRNA encoding CC, multiple guide RNAs (gRNA) targeting TCRb and b2M for the knockout of TCR and MHCI, and a transposon encoding either a CAR, selection gene and either the WT or mutant (D111H) CSR CD2z, or a transposon encoding a CAR, selection gene and a safety switch that did not encode a CSR. For the latter, Allo CAR-T cells that did not receive a CSR encoded in the transposon for stable integration, the WT or mutant (D111H) CSR CD2z was provided to the cells transiently as an mRNA only once in the initial EP reaction. Following EP, all cells were subsequently stimulated with a cocktail of agonist mAbs anti-CD2, anti-CD3 and anti-CD28, and were later selected for genetic modification over the course of up to a 15-day culture period using the selection gene. At the end of the initial culture period, all T cells expressed the CAR, indicating successful selection for genetically-modified cells (data not shown), and then all non-edited TCR-positive cells were depleted via negative selection to yield a population of Allo CAR-T cells that were >99% TCR-negative (data not shown). All samples were performed in duplicate, except the Auto (No CSR) control, and data for peak expansion for each (day of peak expansion is displayed) is shown in bar graph where error bars represent standard deviation. In the samples where either the WT or mutant (D111H) CD2z was provided stably (as encoded in the transposon (Stable)) or transiently (as encoded in mRNA (mRNA)), a greater degree of expansion of the Allo CAR-T cells was observed as compared to the Allo CAR-T cells produced without a CSR.

[0060] FIG. 24B is a series of bar graphs showing that the delivery of CSR CD2z-D111H mutant does not inhibit gene editing. Pan T cells isolated from healthy donor blood were genetically modified using the piggyBac® DNA modification system in combination with the Cas-CLOVER™ gene-editing system (CC) to produce allogeneic (Allo) CAR-T cells. Cells were electroporated (EP) in a single reaction with an mRNA encoding the SPB enzyme, an mRNA encoding CC, multiple guide RNA (gRNA) targeting TCRb and b2M for the knockout of TCR and MHCI, and a transposon encoding either a CAR, selection gene and either the WT or mutant (D111H) CSR CD2z, or a transposon encoding a CAR, selection gene and a safety switch that did not encode a CSR. For the latter, cells that did not receive a CSR encoded in the transposon for stable integration, the WT or mutant (D111H) CSR CD2z was provided transiently as an mRNA only once in the initial EP reaction. Following EP, all cells were subsequently stimulated with a cocktail of agonist mAbs anti-CD2, anti-CD3 and anti-CD28, and were later selected for genetic modification over the course of up to a 14-day culture period using the selection gene. At the end of the initial culture period, all T cells expressed the CAR, indicating successful selection for genetically-modified cells (data not shown). All samples were performed in duplicate, and data is shown in bar graph where error bars represent standard deviation. In the samples where either the WT or mutant (D111H) CD2z was provided stably (as encoded in the transposon (Stable)) or transiently (as encoded in mRNA (mRNA)), a similar or greater degree of gene editing of the Allo CAR-T cells was observed as compared to the Allo CAR-T cells produced without a CSR.

[0061] FIG. 24C is a bar graph showing that the memory phenotype of Allo CAR-T is not significantly affected by delivery of CD2z CSRs. Allo CAR-T cells with no CSR and Allo CAR-Ts with CSR that was delivered either stably or transiently were stained for expression of surface CD45RA, CD45RO, and CD62L to define Tscm, Tcm, Tem, and Teff cells; Tscm (CD45RA⁺CD45RO⁻CD62L), Tcm (CD45RA⁻CD45RO⁺CD62L⁺), Tem (CD45RA⁻CD45RO⁺CD62L⁻), Teff (CD45RA⁻CD45RO⁻CD62L⁻). All samples were performed in duplicate, and data is shown in bar graph where error bars represent standard deviation. Delivery of CSRs did not dramatically affect the levels of favorable Tscm and Tcm cells in the products.

[0062] FIG. 25 is a schematic diagram depicting an exemplary HLA-bGBE composition of the disclosure.

[0063] FIG. 26 is a schematic diagram depicting an exemplary HLA-gBE composition of the disclosure.

[0064] FIG. 27 is a pair of graphs showing that expression of single-chain HLA-E diminishes NK cell-mediated cytotoxicity against HLA-deficient T cells. B2M and TCRαβ was knocked-out of T cells (Jurkat) using CRISPR. B2M/TCRαβ double-knockout (DKO) T cells were electroporated with mRNA encoding an HLA-E molecule (HLA-bGBE), expressed on a single chain with B2M and the peptide VMAPRETLIL (SEQ ID NO: 17127) (B2M/peptide/HLA-E). DKO T cells electroporated with varying amounts of mRNA encoding single chain HLA-E were used as targets for artificial antigen presenting cell (aAPC)-expanded NK cells in a 3 hour co-culture. % cytotoxicity was calculated based on the number of target cells remaining after 3 hours compared to target cells alone. These data demonstrate that surface expression of HLA-E in DKO T cells reduces the total level of cell killing by NK cells in a dose-dependent manner.

[0065] FIG. 28 is a listing of gRNA sequences (from top to bottom) and primer sequences (from top to bottom)

[0066] FIG. 29 is a series of flow cytometry plots showing that targeted knockout of endogenous HLA-ABC, but not HLA-E. Since we showed that surface expression of HLA-E in MHCI KO T cells can increase their resistance to NK cell-mediated cytotoxicity, we explored additional strategies beyond introduction of a single-chain HLA-E gene. To do so, multiple guide RNA (gRNA) were designed to disrupt the expression of the main targets of host versus graft (HvG), HLA-A, HLA-B and HLA-C, while minimizing disruption of endogenous HLA-E. Specifically, guides were designed to target a conserved region occurring in all the three MHCI protein targets, but not in HLA-E. Pan human T cells were electroporated with mRNA encoding CRISPR Cas9 in combination with various gRNAs and efficiency of MHCI knockout was measured by surface HLA-A and HLA-E expression. FACS analysis of HLA-A and HLA-E expression was performed after a single round of T cell expansion and data are displayed below. These data demonstrate that gene-editing technology can be used to target disruption of MHCI while retaining levels of endogenous HLA-E on the surface of gene-edited T cells.

[0067] FIG. 30 is a schematic diagram of the missing-self hypothesis of natural killer mediated toxicity towards MHCI-KO cells.

[0068] FIG. 31 is a schematic depiction of the Csy4-T2A-Clo051-G4Slinker-dCas9 construct map (Embodiment 2).

[0069] FIG. 32 is a schematic depiction of the pRT1-Clo051-dCas9 Double NLS construct map (Embodiment 1).

[0070] FIG. 33 is a schematic diagram showing an exemplary method for the production of allogeneic CAR-Ts of the disclosure.

[0071] FIG. 34A is a graph showing high efficiency gene editing of endogenous TCRa in proliferating Jurkat cells and in resting primary human pan T cells as an exemplary method for the production of allogeneic and universal CAR-Ts using Cas-CLOVER™ (an RNA-guided fusion protein comprising a dCas9-Clo051). Cas-CLOVER system disrupted TCRa expression in rapidly proliferating Jurkat T cells and non-dividing resting T cells at comparably high levels.

[0072] FIG. 34B is a series of flow cytometry graphs showing efficient gene editing of endogenous TCRa, TCRb, and B2M in resting primary human pan T cells using Cas-CLOVER™. Critical targets TCRa, TCRB, and B2M that mediate alloreactivity were efficiently edited by Cas-CLOVER in resting human T cells.

[0073] FIG. 35 is a series of flow cytometry plots showing that Cas-CLOVER can be multiplexed by co-delivering reagents for TCRβ and β2M into primary human T cells. TCRβ/β2M double knock-out (DKO) cells were further enriched using antibody-beads based purification, and purified cells were analyzed by FACS for downregulation of surface expressed CD3 and β2M.

[0074] FIG. 36 is a series of graphs demonstrating reduced alloreactivity after KO of TCR and MHCI. Alloreactivities of WT or DKO (TCR and MHCI) CAR-T cells was analyzed by mixed lymphocyte reaction (MLR) and IFNγ by ELISpot assay. On the left, WT or gene-edited DKO CAR-T cells were labeled with celltrace violet (CTV) and mixed at 1:1 ratio with irradiated peripheral blood mononuclear cells (PBMC)s and incubated for 12 days or 20 hr before analysis of proliferation or activation-induced secretion of IFNγ by ELISpot assay, respectively. WT or DKO CAR-T cells were incubated with PBMCs from either allogenic (Donor #1 PBMC and Donor #2 PBMC) or autologous (Autologous PBMC) donors at 1:1 ratio. After 12 days, CTV dye dilution was assessed by FACS and results showed significant proliferation of WT CAR-T cells when incubated with allogeneic PBMCs; proliferative rates of 40% and 39% by WT CAR-T cells was observed when cultured with allogeneic PBMCs from two different donors in comparison to only 2% when WT CAR-T cells were incubated with autologous PBMCs. On the other hand, DKO CAR-T cells did not proliferate when incubated with allogeneic PBMCs, demonstrating that KO of TCR and MHCI resulted in the elimination of graft-versus-host alloreactivity. This was also true in the short-term IFNγ by ELISpot assay (lower left) which showed that only WT CAR-T cells became activated and secreted IFNγ when incubated with allogeneic PBMCs, but not the DKO CAR-T cells. On the right, irradiated WT or DKO CAR-T cells were mixed at 1:1 ratio with PBMCs labeled with CFSE and incubated for 12 days or 20 hr before analysis of proliferation or activation-induced secretion of IFNγ by ELISpot assay, respectively. After 12 days, CFSE dye dilution was assessed by FACS and showed significant proliferation of PBMCs (most likely T cells) when incubated with allogeneic CAR-T cells; 37% and 9% of PBMCs proliferated in comparison to only 2% when incubated with autologous CAR-T cells. On the other hand, PBMCs did not proliferate above background when incubated with allogeneic CAR-T cells, demonstrating that KO of TCR and MHCI resulted in the elimination of host-versus-graft alloreactivity. This was also true in the short-term IFNγ by ELISpot assay (lower left) which showed that only WT CAR-T cells caused activation and secretion of IFNγ by PBMCs when incubated with allogeneic CAR-Ts, not the DKO CAR-T cells.

[0075] FIG. 37 is a series of graphs showing that DKO and WT CAR-Ts have similar CAR-expression and stem-like phenotypes. Gene editing does not affect CAR-T cell phenotype. BCMA CAR-expressing TCRβ/β2M DKO and WT T cells were analyzed for phenotype. CAR expression was comparable in WT and DKO. WT and DKO CAR-T cells were analyzed by FACS for expression of CD45RA and CD62L, markers for T stem cell memory (TSCM). These data demonstrate that gene editing of allo CAR-Ts does not significantly reduce the composition of memory CAR-T cells, retaining the exceptionally high and predominantly TSCM phenotype.

[0076] FIG. 38 is a series of graphs showing that DKO CAR-Ts are highly functional. Gene editing does not affect CAR-T cell functionality. BCMA CAR-expressing TCRβ/β2M DKO and WT T cells were analyzed for function. Proliferation against H929 (BCMA+) tumor lines was assessed by mixing CAR-T cells with H929 cells, incubated for 7 days, and analyzed for tumor-specific proliferation by FACS. Cytotoxicity and IFNg secretion against H929 (BCMA+) tumor lines was assessed by mixing CAR-T cells with H929 cells at various ratios, incubated for 24 hrs and analyzed for tumor-specific killing by FACS. Cytotoxicity data are normalized to the tumor cell only sample. These data show that gene editing to produce DKO CAR-T cells does not significantly affect their functional capacity.

[0077] FIG. 39A is a schematic diagram showing preclinical evaluation of the P-PSMA-101 transposon when delivered by a full-length plasmid (FLP) versus a nanotransposon (NT) at ‘stress’ doses using the Murine Xenograft Model. The murine xenograft model using a luciferase-expressing LNCaP cell line (LNCaP.luc) injected subcutaneously (SC) into NSG mice was utilized to assess in vivo anti-tumor efficacy of the P-PSMA-101 transposon as delivered by a full-length plasmid (FLP) or a nanotransposon (NT) at two different ‘stress’ doses (2.5×10\hat{ }6 or 4×10\hat{ }6) of total CAR-T cells from two different normal donors. All CAR-T cells were produced using piggyBac® (PB) delivery of P-PSMA-101 transposon using either FLP or NT delivery. Mice were injected in the axilla with LNCaP and treated when tumors were established (100-200 mm³ by caliper measurement). Mice were treated with two different ‘stress’ doses (2.5×10\hat{ }6 or 4×10\hat{ }6) of P-PSMA-101 CAR-Ts by IV injection for greater resolution in detecting possible functional differences in efficacy between transposon delivery by the FLP and the NT.

[0078] FIG. 39B are a series of graphs showing the tumor volume assessment of mice treated as described in FIG. 34A. Tumor volume assessment by caliper measurement for control mice (black), Donor #1 FLP mice (red), Donor #1 NT mice (blue), Donor #2 FLP mice (orange), and Donor #2 NT mice (green) as displayed as group averages with error bars (top) and individual mice (bottom). The y-axis shows the tumor volume (mm³) assessed by caliper measurement. The x-axis shows the number of days post T cell treatment. Delivered by NT, P-PSMA-101 transposon at a ‘stress’ dose demonstrated enhanced anti-tumor efficacy as measured by caliper in comparison to the FLP and control mice against established SC LNCaP.luc solid tumors.

### DETAILED DESCRIPTION OF THE INVENTION

[0079] The present disclosure provides a non-naturally occurring chimeric stimulatory receptor (CSR) comprising, consisting essential of, or consisting of: (a) an ectodomain comprising a activation component, wherein the activation component is isolated or derived from a first protein; (b) a transmembrane domain; and (c) an endodomain comprising at least one signal transduction domain, wherein the at least one signal transduction domain is isolated or derived from a second protein, wherein the first protein and the second protein are not identical.

[0080] The activation component can comprise, consist essential of, or consist of: one or more of a component of a human transmembrane receptor, a human cell-surface receptor, a T-cell Receptor (TCR), a component of a TCR complex, a component of a TCR co-receptor, a component of a TCR co-stimulatory protein, a component of a TCR inhibitory protein, a cytokine receptor, or a chemokine receptor. The activation component can comprise, consist essential of, or consist of: a portion of one or more of a component of a T-cell Receptor (TCR), a component of a TCR complex, a component of a TCR co-receptor, a component of a TCR co-stimulatory protein, a component of a TCR inhibitory protein, a cytokine receptor, or a chemokine receptor to which an agonist of the activation component binds.

[0081] The ectodomain can comprise, consist essential of, or consist of: a CD2 extracellular domain or a portion thereof to which an agonist binds or the ectodomain can comprise, consist essential of, or consist of: a CD28 extracellular domain or a portion thereof to which an agonist binds. The activation component can comprise, consist essential of, or consist of: a CD2 extracellular domain or a portion thereof to which an agonist binds or the activation component can comprise, consist essential of, or consist of: a CD28 extracellular domain or a portion thereof to which an agonist binds. The CD2 extracellular domain to which an agonist binds comprises, consists essential of, or consists of the amino acid sequence at least 95% identical to the amino acid sequence of SEQ ID NO: 17111. The CD2 extracellular domain to which an agonist binds comprises, consists essential of, or consists of the amino acid sequence at least 99% identical to the amino acid sequence of SEQ ID NO: 17111. The CD2 extracellular domain to which an agonist binds comprises, consists essential of, or consists of the amino acid sequence of SEQ ID NO: 17111. The CD28 extracellular domain to which an agonist binds comprises, consists essential of, or consists of the amino acid sequence at least 95% identical to the amino acid sequence of SEQ ID NO: 17099. The CD28 extracellular domain to which an agonist binds comprises, consists essential of, or consists of the amino acid sequence at least 99% identical to the amino acid sequence of SEQ ID NO: 17099. The CD28 extracellular domain to which an agonist binds comprises, consists essential of, or consists of the amino acid sequence of SEQ ID NO: 17099.

[0082] The signal transduction domain can comprise, consist essential of, or consist of: one or more of a component of a human signal transduction domain, T-cell Receptor (TCR), a component of a TCR complex, a component of a TCR co-receptor, a component of a TCR co-stimulatory protein, a component of a TCR inhibitory protein, a cytokine receptor, or a chemokine receptor. The second protein can comprise, consist essential of, or consist of: a CD3 protein or a portion thereof. The signal transduction domain can comprise, consist essential of, or consist of a CD3 protein or a portion thereof. The CD3 protein can comprise, consist essential of, or consist of a CD3ζ protein or a portion thereof. The CD3ζ protein comprises, consists essential of, or consists of the amino acid sequence at least 95% identical to the amino acid sequence of SEQ ID NO: 17102. The CD3ζ protein comprises, consists essential of, or consists of the amino acid sequence at least 99% identical to the amino acid sequence of SEQ ID NO: 17102. The CD3ζ protein comprises, consists essential of, or consists of the amino acid sequence of SEQ ID NO: 17102.

[0083] The endodomain of a CSR of the present disclosure can further comprise, consist essential of, or consist of a cytoplasmic domain. The cytoplasmic domain can be isolated or derived from a third protein. In some aspects, the first protein and the third protein of a CSR of the present disclosure are identical. The cytoplasmic domain can comprise, consist essential of, or consist of: a CD2 cytoplasmic domain or a portion thereof or the cytoplasmic domain can comprise, consist essential of, or consist of: a CD28 cytoplasmic domain or a portion thereof.

[0084] The CD2 cytoplasmic domain comprises, consists essential of, or consists of the amino acid sequence at least 95% identical to the amino acid sequence of SEQ ID NO: 17113. The CD2 cytoplasmic domain comprises, consists essential of, or consists of the amino acid sequence at least 99% identical to the amino acid sequence of SEQ ID NO: 17113. The CD2 cytoplasmic domain comprises, consists essential of, or consists of the amino acid sequence of SEQ ID NO: 17113. The CD28 cytoplasmic domain comprises, consists essential of, or consists of the amino acid sequence at least 95% identical to the amino acid sequence of SEQ ID NO: 17101. The CD28 cytoplasmic domain comprises, consists essential of, or consists of the amino acid sequence at least 99% identical to the amino acid sequence of SEQ ID NO: 17101. The CD28 cytoplasmic domain comprises, consists essential of, or consists of the amino acid sequence of SEQ ID NO: 17101.

[0085] The endodomain of a CSR of the present disclosure can further comprise, consist essential of, or consist of a signal peptide. The signal peptide can be isolated or derived from a fourth protein. In some aspects, the first protein and the fourth protein of a CSR of the present disclosure are identical. The signal peptide can comprise, consist essential of, or consist of: a CD2 signal peptide or a portion thereof; the signal peptide can comprise, consist essential of, or consist of: a CD28 signal peptide or a portion thereof or the signal peptide can comprise, consist essential of, or consist of: a CD8a signal peptide or a portion thereof. The CD2 signal peptide comprises, consists essential of, or consists of the amino acid sequence at least 95% identical to the amino acid sequence of SEQ ID NO: 17110. The CD2 signal peptide comprises, consists essential of, or consists of the amino acid sequence at least 99% identical to the amino acid sequence of SEQ ID NO: 17110. The CD2 signal peptide comprises, consists essential of, or consists of the amino acid sequence of SEQ ID NO: 17110. The CD28 signal peptide comprises, consists essential of, or consists of the amino acid sequence at least 95% identical to the amino acid sequence of SEQ ID NO: 17098. The CD28 signal peptide comprises, consists essential of, or consists of the amino acid sequence at least 99% identical to the amino acid sequence of SEQ ID NO: 17098. The CD28 signal peptide comprises, consists essential of, or consists of the amino acid sequence of SEQ ID NO: 17098. The CD8a signal peptide comprises, consists essential of, or consists of the amino acid sequence at least 95% identical to the amino acid sequence of SEQ ID NO: 17037. The CD8a signal peptide comprises, consists essential of, or consists of the amino acid sequence at least 99% identical to the amino acid sequence of SEQ ID NO: 17037. The CD8a signal peptide comprises, consists essential of, or consists of the amino acid sequence of SEQ ID NO: 17037.

[0086] The transmembrane domain of a CSR of the present disclosure can be isolated or derived from a fifth protein. In some aspects, the first protein and the fifth protein of a CSR of the present disclosure are identical. The transmembrane domain can comprise, consist essential of, or consist of: a CD2 transmembrane domain or a portion thereof or the transmembrane domain can comprise, consist essential of, or consist of: a CD28 transmembrane domain or a portion thereof. The CD2 transmembrane domain comprises, consists essential of, or consists of the amino acid sequence at least 95% identical to the amino acid sequence of SEQ ID NO: 17112. The CD2 transmembrane domain comprises, consists essential of, or consists of the amino acid sequence at least 99% identical to the amino acid sequence of SEQ ID NO: 17112. The CD2 transmembrane domain comprises, consists essential of, or consists of the amino acid sequence of SEQ ID NO: 17112. The CD28 transmembrane domain comprises, consists essential of, or consists of the amino acid sequence at least 95% identical to the amino acid sequence of SEQ ID NO: 17100. The CD28 transmembrane domain comprises, consists essential of, or consists of the amino acid sequence at least 99% identical to the amino acid sequence of SEQ ID NO: 17100. The CD28 transmembrane domain comprises, consists essential of, or consists of the amino acid sequence of SEQ ID NO: 17100.

[0087] In some aspects, the activation component of the CSR of the present disclosure does not bind or is incapable of binding a naturally-occurring molecule. In some aspects, the activation component of the CSR of the present disclosure binds or is capable of binding a naturally-occurring molecule and the CSR transduces a signal upon binding of the activation component to the naturally-occurring molecule. In other aspects, the activation component of the CSR of the present disclosure can bind a naturally-occurring molecule but the CSR does not transduce a signal upon binding of the activation component to a naturally-occurring molecule. In preferred aspects, the activation component of the CSR of the present disclosure binds or is capable of binding to a non-naturally occurring molecule. The activation component of the CSR of the present disclosure selectively transduces a signal upon binding of a non-naturally occurring molecule to the activation component. In one aspect, the naturally occurring molecule is an naturally occurring agonist/activating agent for the activation component of the CSR. The naturally occurring agonist/activating agent that can bind a CSR activation component can be any naturally occurring antibody or antibody fragment. The naturally occurring antibody or antibody fragment can be a naturally occurring anti-CD3 antibody or fragment thereof, an anti-CD2 antibody or fragment thereof, an anti-CD28 antibody or fragment thereof, or any combination thereof. In some aspects, the naturally occurring agonist/activating agent that can bind a CSR activation component can be one or more of an anti-human CD3 monospecific tetrameric antibody complex, an anti-human CD2 monospecific tetrameric antibody complex, an anti-human CD28 monospecific tetrameric antibody complex, or a combination thereof. In one aspect, the non-naturally occurring molecule is an non-naturally occurring agonist/activating agent for the activation component of the CSR. The non-naturally occurring agonist/activating agent that can bind a CSR activation component can be any non-naturally occurring antibody or antibody fragment. The non-naturally occurring antibody or antibody fragment can be a non-naturally occurring anti-CD3 antibody or fragment thereof, an anti-CD2 antibody or fragment thereof, an anti-CD28 antibody or fragment thereof, or any combination thereof. In some aspects, the non-naturally occurring agonist/activating agent that can bind a CSR activation component can be one or more of an anti-human CD3 monospecific tetrameric antibody complex, an anti-human CD2 monospecific tetrameric antibody complex, an anti-human CD28 monospecific tetrameric antibody complex, or a combination thereof. In some aspects, the non-naturally occurring agonist/activating agent that can bind a CSR activation component can be selected from the group consisting of anti-CD2 monoclonal antibody, BTI-322 (Przepiorka et al., Blood 92(11):4066-4071, 1998) and humanized anti-CD2 monoclonal antibody clone AFC-TAB-104 (Siplizumab)(Bissonnette et al. Arch. Dermatol. Res. 301(6):429-442, 2009).

[0088] In some aspects, the ectodomain of the CSR of the present disclosure can comprise a modification. The modification can comprise a mutation or a truncation in the amino acid sequence of the activation component or the first protein when compared to a wild type amino acid sequence of the activation component or the first protein. The mutation or a truncation in the amino acid sequence of the activation component or the first protein can comprise a mutation or truncation of a CD2 extracellular domain or a portion thereof to which an agonist binds. The mutation or truncation of the CD2 extracellular domain reduces or eliminates binding with naturally occurring CD58.

[0089] A reduction in binding is when at least 50%, at least 75%, at least 900%, at least 91%, at least 92%, at least 93%, at least 94%, at least 95%, at least 96%, at least 97%, at least 98%, or at least 99% of the binding ability of the mutated or truncated CD2 extracellular domain is reduced when compared to the naturally occurring wild-type counterpart. An elimination in binding is when 100% of the binding ability of the mutated or truncated CD2 extracellular domain is reduced when compared to the naturally occurring wild-type CD2 extracellular domain.

[0090] The mutated or truncated CD2 extracellular domain binds anti-CD2 activating agonists and anti-CD2 activating molecules but does not bind naturally occurring CD58. The mutated or truncated CD2 extracellular domain comprises, consists essential of, or consists of the amino acid sequence at least 80% identical to the amino acid sequence of SEQ ID NO: 17119. The mutated or truncated CD2 extracellular domain comprises, consists essential of, or consists of the amino acid sequence at least 85% identical to the amino acid sequence of SEQ ID NO: 17119. The mutated or truncated CD2 extracellular domain comprises, consists essential of, or consists of the amino acid sequence at least 90% identical to the amino acid sequence of SEQ ID NO: 17119. The mutated or truncated CD2 extracellular domain comprises, consists essential of, or consists of the amino acid sequence at least 95% identical to the amino acid sequence of SEQ ID NO: 17119. The mutated or truncated CD2 extracellular domain comprises, consists essential of, or consists of the amino acid sequence at least 99% identical to the amino acid sequence of SEQ ID NO: 17119. The mutated or truncated CD2 extracellular domain comprises, consists essential of, or consists of the amino acid sequence of SEQ ID NO: 17119. The CSR comprising the mutated or truncated CD2 extracellular domain comprises, consists essential of, or consists of the amino acid sequence at least 90% identical to the amino acid sequence of SEQ ID NO: 17118. The CSR comprising the mutated or truncated CD2 extracellular domain comprises, consists essential of, or consists of the amino acid sequence at least 95% identical to the amino acid sequence of SEQ ID NO: 17118. The CSR comprising the mutated or truncated CD2 extracellular domain comprises, consists essential of, or consists of the amino acid sequence at least 99% identical to the amino acid sequence of SEQ ID NO: 17118. The CSR comprising the mutated or truncated CD2 extracellular domain comprises, consists essential of, or consists of the amino acid sequence of SEQ ID NO: 17118.

[0091] The present disclosure also provides a non-naturally occurring chimeric stimulatory receptor (CSR) comprising, consisting essential of, or consisting of: (a) an ectodomain comprising a activation component, wherein the activation component is isolated or derived from a first protein and wherein the activation component binds to a non-naturally occurring molecule but does not bind a naturally-occurring molecule; (b) a transmembrane domain; and (c) an endodomain comprising at least one signal transduction domain, wherein the at least one signal transduction domain is isolated or derived from a second protein; wherein the first protein and the second protein are not identical.

[0092] The present disclosure also provides a non-naturally occurring chimeric stimulatory receptor (CSR) comprising, consisting essential of, or consisting of: (a) an ectodomain comprising a activation component, wherein the activation component is isolated or derived from a first protein; (b) a transmembrane domain; and (c) an endodomain comprising at least one signal transduction domain, wherein the at least one signal transduction domain is isolated or derived from a second protein; wherein the first protein and the second protein are not identical and wherein the CSR does not transduce a signal upon binding of a naturally-occurring molecule to the activation component.

[0093] The present disclosure also provides a non-naturally occurring chimeric stimulatory receptor (CSR) comprising, consisting essential of, or consisting of: (a) an ectodomain comprising a activation component, wherein the activation component is isolated or derived from a first protein; (b) a transmembrane domain; and (c) an endodomain comprising at least one signal transduction domain, wherein the at least one signal transduction domain is isolated or derived from a second protein; wherein the first protein and the second protein are not identical and wherein the CSR transduces a signal upon binding of a non-naturally-occurring molecule to the activation component.

[0094] The present disclosure also provides a non-naturally occurring chimeric stimulatory receptor (CSR) comprising, consisting essential of, or consisting of: (a) an ectodomain comprising a signal peptide and an activation component, wherein the signal peptide comprises a CD2 signal peptide or a portion thereof and wherein the activation component comprises a CD2 extracellular domain or a portion thereof to which an agonist binds; (b) a transmembrane domain, wherein the transmembrane domain comprises a CD2 transmembrane domain or a portion thereof; and (c) an endodomain comprising a cytoplasmic domain and at least one signal transduction domain, wherein the cytoplasmic domain comprises a CD2 cytoplasmic domain or a portion thereof and wherein the at least one signal transduction domain comprises a CD3ζ protein or a portion thereof.

[0095] The present disclosure also provides a non-naturally occurring chimeric stimulatory receptor (CSR) comprising, consisting essential of, or consisting of: (a) an ectodomain comprising a signal peptide comprising the amino acid sequence of SEQ ID NO: 17110 and an activation component comprising the amino acid sequence of SEQ ID NO: 17111; (b) a transmembrane domain of SEQ ID NO: 17112; and (c) an endodomain comprising a cytoplasmic domain comprising the amino acid sequence of SEQ ID NO: 17113 and at least one signal transduction domain comprising the amino acid sequence of SEQ ID NO: 17102. The non-naturally occurring chimeric stimulatory receptor (CSR) can comprise, consist essential of, or consist of an amino acid sequence at least 80% identical to SEQ ID NO:17062. The non-naturally occurring chimeric stimulatory receptor (CSR) can comprise, consist essential of, or consist of an amino acid sequence at least 85% identical to SEQ ID NO:17062. The non-naturally occurring chimeric stimulatory receptor (CSR) can comprise, consist essential of, or consist of an amino acid sequence at least 90% identical to SEQ ID NO:17062. The non-naturally occurring chimeric stimulatory receptor (CSR) can comprise, consist essential of, or consist of an amino acid sequence at least 95% identical to SEQ ID NO:17062. The non-naturally occurring chimeric stimulatory receptor (CSR) can comprise, consist essential of, or consist of an amino acid sequence at least 99% identical to SEQ ID NO:17062. The non-naturally occurring chimeric stimulatory receptor (CSR) can comprise, consist essential of, or consist of an amino acid sequence of SEQ ID NO:17062.

[0096] The present disclosure further provides a non-naturally occurring chimeric stimulatory receptor (CSR) comprising, consisting essential of, or consisting of: (a) an ectodomain comprising a signal peptide and an activation component, wherein the signal peptide comprises a CD2 signal peptide or a portion thereof and wherein the activation component comprises a mutation or truncation of a wild-type CD2 extracellular domain or a portion thereof to which an agonist binds; (b) a transmembrane domain, wherein the transmembrane domain comprises a CD2 transmembrane domain or a portion thereof; and (c) an endodomain comprising a cytoplasmic domain and at least one signal transduction domain, wherein the cytoplasmic domain comprises a CD2 cytoplasmic domain or a portion thereof and wherein the at least one signal transduction domain comprises a CD3ζ protein or a portion thereof. In one aspect, the mutation or truncation of the CD2 extracellular domain reduces or eliminates binding with naturally occurring CD58. In another aspect, the mutated or truncated CD2 extracellular domain binds anti-CD2 activating agonists and anti-CD2 activating molecules but does not bind naturally occurring CD58.

[0097] The present disclosure further provides a non-naturally occurring chimeric stimulatory receptor (CSR) comprising, consisting essential of, or consisting of: (a) an ectodomain comprising a signal peptide comprising the amino acid sequence of SEQ ID NO: 17110 and a activation component comprising the amino acid sequence of SEQ ID NO: 17119; (b) a transmembrane domain of SEQ ID NO: 17112; and (c) an endodomain comprising a cytoplasmic domain comprising the amino acid sequence of SEQ ID NO: 17113 and at least one signal transduction domain comprising the amino acid sequence of SEQ ID NO: 17102. The non-naturally occurring chimeric stimulatory receptor (CSR) can comprise, consist essential of, or consist of an amino acid sequence at least 80% identical to SEQ ID NO: 17118. The non-naturally occurring chimeric stimulatory receptor (CSR) can comprise, consist essential of, or consist of an amino acid sequence at least 85% identical to SEQ ID NO: 17118. The non-naturally occurring chimeric stimulatory receptor (CSR) can comprise, consist essential of, or consist of an amino acid sequence at least 90% identical to SEQ ID NO: 17118. The non-naturally occurring chimeric stimulatory receptor (CSR) can comprise, consist essential of, or consist of an acid sequence at least 95% identical to SEQ ID NO: 17118. The non-naturally occurring chimeric stimulatory receptor (CSR) can comprise, consist essential of, or consist of an acid sequence at least 99% identical to SEQ ID NO: 17118. The non-naturally occurring chimeric stimulatory receptor (CSR) can comprise, consist essential of, or consist of an acid sequence of SEQ ID NO: 17118.

[0098] The present disclosure also provides a nucleic acid sequence encoding an amino acid sequence of any chimeric stimulatory receptor (CSR) disclosed herein. The present disclosure also provides transposon, a vector, a donor sequence or a donor plasmid comprising, consisting essential of or consisting of a nucleic acid sequence encoding the amino acid sequence of any chimeric stimulatory receptor (CSR) disclosed herein. In one aspect, the vector can be a viral vector. In one aspect, a viral vector can be an an adenoviral vector, adeno-associated viral (AAV) vector, retroviral vector, lentiviral vector or a chimeric viral vector.

[0099] The present disclosure also provides a cell comprising, consisting essential of or consisting of any chimeric stimulatory receptor (CSR) disclosed herein. The present disclosure also provides a cell comprising, consisting essential of or consisting of a nucleic acid sequence encoding an amino acid sequence of any chimeric stimulatory receptor (CSR) disclosed herein. The present disclosure also provides a cell comprising, consisting essential of or consisting of a transposon, a vector, a donor sequence or a donor plasmid comprising, consisting essential of or consisting of a nucleic acid sequence encoding the amino acid sequence of any chimeric stimulatory receptor (CSR) disclosed herein. In one aspect, the vector can be a viral vector. In one aspect, a viral vector can be an an adenoviral vector, adeno-associated viral (AAV) vector, retroviral vector, lentiviral vector or a chimeric viral vector. A cell of the present disclosure comprising, consisting essential of or consisting of any chimeric stimulatory receptor (CSR) disclosed herein can be an allogeneic cell or an autologous cell. In some preferred embodiments, the cell is an allogeneic cell.

[0100] The present disclosure also provides a composition comprising, consisting essential of or consisting of any chimeric stimulatory receptor (CSR) disclosed herein. The present disclosure also provides a composition comprising, consisting essential of or consisting of a nucleic acid sequence encoding an amino acid sequence of any chimeric stimulatory receptor (CSR) disclosed herein. The present disclosure also provides a composition comprising, consisting essential of or consisting of a transposon, a vector, a donor sequence or a donor plasmid comprising, consisting essential of or consisting of a nucleic acid sequence encoding the amino acid sequence of any chimeric stimulatory receptor (CSR) disclosed herein. In one aspect, the vector can be a viral vector. In one aspect, a viral vector can be an an adenoviral vector, adeno-associated viral (AAV) vector, retroviral vector, lentiviral vector or a chimeric viral vector. The present disclosure also provides a composition comprising, consisting essential of or consisting of a cell or a plurality of cells comprising, consisting essential of or consisting of any chimeric stimulatory receptor (CSR) disclosed herein.

[0101] The present disclosure provides a modified cell comprising, consisting essential of, or consisting of a chimeric stimulatory receptor (CSR) comprising, consisting essential of, or consisting of: (i) an ectodomain comprising an activation component, wherein the activation component is isolated or derived from a first protein; (ii) a transmembrane domain; and (iii) an endodomain comprising at least one signal transduction domain, wherein the at least one signal transduction domain is isolated or derived from a second protein; wherein the first protein and the second protein are not identical.

[0102] The present disclosure also provides a modified cell comprising, consisting essential of, or consisting of (a) a chimeric stimulatory receptor (CSR) comprising: (i) an ectodomain comprising an activation component, wherein the activation component is isolated or derived from a first protein; (ii) a transmembrane domain; and (iii) an endodomain comprising at least one signal transduction domain, wherein the at least one signal transduction domain is isolated or derived from a second protein; wherein the first protein and the second protein are not identical; and (b) an inducible proapoptotic polypeptide.

[0103] The present disclosure also provides a modified cell comprising, consisting essential of, or consisting of: (a) a chimeric stimulatory receptor (CSR) comprising: (i) an ectodomain comprising an activation component, wherein the activation component is isolated or derived from a first protein; (ii) a transmembrane domain; and (iii) an endodomain comprising at least one signal transduction domain, wherein the at least one signal transduction domain is isolated or derived from a second protein; wherein the first protein and the second protein are not identical; (b) a sequence encoding an inducible proapoptotic polypeptide; and wherein the cell is a T-cell, (c) a modification of an endogenous sequence encoding a T-cell Receptor (TCR), wherein the modification reduces or eliminates a level of expression or activity of the TCR.

[0104] The present disclosure provides a modified cell comprising, consisting essential of, or consisting of: (a) a modification of an endogenous sequence encoding Beta-2-Microglobulin (B2M), wherein the modification reduces or eliminates a level of expression or activity of a major histocompatibility complex (MHC) class I (MHC-I); and (b) a non-naturally occurring sequence comprising an HLA class I histocompatibility antigen, alpha chain E (HLA-E) polypeptide.

[0105] The present disclosure provides a modified T lymphocyte (T-cell) comprising, consisting essential of, or consisting of: (a) a modification of an endogenous sequence encoding a T-cell Receptor (TCR), wherein the modification reduces or eliminates a level of expression or activity of the TCR; and (b) chimeric stimulatory receptor (CSR) comprising: (i) an ectodomain comprising an activation component, wherein the activation component is isolated or derived from a first protein; (ii) a transmembrane domain; and (iii) an endodomain comprising at least one signal transduction domain, wherein the at least one signal transduction domain is isolated or derived from a second protein; wherein the first protein and the second protein are not identical.

[0106] The present disclosure provides a modified T lymphocyte (T-cell) comprising, consisting essential of, or consisting of: (a) a modification of an endogenous sequence encoding a T-cell Receptor (TCR), wherein the modification reduces or eliminates a level of expression or activity of the TCR; (b) chimeric stimulatory receptor (CSR) comprising: (i) an ectodomain comprising an activation component, wherein the activation component is isolated or derived from a first protein; (ii) a transmembrane domain; and (iii) an endodomain comprising at least one signal transduction domain, wherein the at least one signal transduction domain is isolated or derived from a second protein; wherein the first protein and the second protein are not identical; and (c) a non-naturally occurring chimeric antigen receptor.

[0107] The present disclosure provides a modified T lymphocyte (T-cell) comprising, consisting essential of, or consisting of: (a) a modification of an endogenous sequence encoding a T-cell Receptor (TCR), wherein the modification reduces or eliminates a level of expression or activity of the TCR; (b) a modification of an endogenous sequence encoding Beta-2-Microglobulin (B2M), wherein the modification reduces or eliminates a level of expression or activity of a major histocompatibility complex (MHC) class I (MHC-I); and (c) a chimeric stimulatory receptor (CSR) comprising: (i) an ectodomain comprising an activation component, wherein the activation component is isolated or derived from a first protein; (ii) a transmembrane domain; and (iii) an endodomain comprising at least one signal transduction domain, wherein the at least one signal transduction domain is isolated or derived from a second protein; wherein the first protein and the second protein are not identical.

[0108] The present disclosure provides a modified T lymphocyte (T-cell) comprising, consisting essential of, or consisting of: (a) a modification of an endogenous sequence encoding a T-cell Receptor (TCR), wherein the modification reduces or eliminates a level of expression or activity of the TCR; (b) a modification of an endogenous sequence encoding Beta-2-Microglobulin (B2M), wherein the modification reduces or eliminates a level of expression or activity of a major histocompatibility complex (MHC) class I (MHC-I); (c) a chimeric stimulatory receptor (CSR) comprising: (i) an ectodomain comprising an activation component, wherein the activation component is isolated or derived from a first protein; (ii) a transmembrane domain; and (iii) an endodomain comprising at least one signal transduction domain, wherein the at least one signal transduction domain is isolated or derived from a second protein; wherein the first protein and the second protein are not identical; and (d) a non-naturally occurring chimeric antigen receptor.

[0109] The present disclosure also provides a modified T lymphocyte (T-cell) comprising, consisting essential of, or consisting of: (a) a modification of an endogenous sequence encoding a T-cell Receptor (TCR), wherein the modification reduces or eliminates a level of expression or activity of the TCR; (b) a modification of an endogenous sequence encoding Beta-2-Microglobulin (B2M), wherein the modification reduces or eliminates a level of expression or activity of a major histocompatibility complex (MHC) class I (MHC-I); (c) a non-naturally occurring sequence comprising an HLA class I histocompatibility antigen, alpha chain E (HLA-E); and (d) a chimeric stimulatory receptor (CSR) comprising: (i) an ectodomain comprising an activation component, wherein the activation component is isolated or derived from a first protein; (ii) a transmembrane domain; and (iii) an endodomain comprising at least one signal transduction domain, wherein the at least one signal transduction domain is isolated or derived from a second protein; wherein the first protein and the second protein are not identical.

[0110] The present disclosure also provides a modified T lymphocyte (T-cell) comprising, consisting essential of, or consisting of: (a) a modification of an endogenous sequence encoding a T-cell Receptor (TCR), wherein the modification reduces or eliminates a level of expression or activity of the TCR; (b) a modification of an endogenous sequence encoding Beta-2-Microglobulin (B2M), wherein the modification reduces or eliminates a level of expression or activity of a major histocompatibility complex (MHC) class I (MHC-I); (c) a non-naturally occurring sequence comprising an HLA class I histocompatibility antigen, alpha chain E (HLA-E); (d) a chimeric stimulatory receptor (CSR) comprising: (i) an ectodomain comprising an activation component, wherein the activation component is isolated or derived from a first protein; (ii) a transmembrane domain; and (iii) an endodomain comprising at least one signal transduction domain, wherein the at least one signal transduction domain is isolated or derived from a second protein; wherein the first protein and the second protein are not identical; and (e) a non-naturally occurring chimeric antigen receptor.

[0111] The present disclosure also provides a modified T lymphocyte (T-cell), consisting essential of, or consisting of: (a) a modification of an endogenous sequence encoding a T-cell Receptor (TCR), wherein the modification reduces or eliminates a level of expression or activity of the TCR; (b) a modification that reduces or eliminates a level of expression or activity of a HLA class I histocompatibility antigen, alpha chain A (HLA-A), HLA class I histocompatibility antigen, alpha chain B (HLA-B), HLA class I histocompatibility antigen, alpha chain C (HLA-C), or a combination thereof; and (c) a chimeric stimulatory receptor (CSR) comprising: (i) an ectodomain comprising an activation component, wherein the activation component is isolated or derived from a first protein; (ii) a transmembrane domain; and (iii) an endodomain comprising at least one signal transduction domain, wherein the at least one signal transduction domain is isolated or derived from a second protein; wherein the first protein and the second protein are not identical.

[0112] The present disclosure also provides a modified T lymphocyte (T-cell), consisting essential of, or consisting of: (a) a modification of an endogenous sequence encoding a T-cell Receptor (TCR), wherein the modification reduces or eliminates a level of expression or activity of the TCR; (b) a modification that reduces or eliminates a level of expression or activity of a HLA class I histocompatibility antigen, alpha chain A (HLA-A), HLA class I histocompatibility antigen, alpha chain B (HLA-B), HLA class I histocompatibility antigen, alpha chain C (HLA-C), or a combination thereof; (c) a non-naturally occurring sequence comprising an HLA class I histocompatibility antigen, alpha chain E (HLA-E); and (d) a chimeric stimulatory receptor (CSR) comprising: (i) an ectodomain comprising an activation component, wherein the activation component is isolated or derived from a first protein; (ii) a transmembrane domain; and (iii) an endodomain comprising at least one signal transduction domain, wherein the at least one signal transduction domain is isolated or derived from a second protein; wherein the first protein and the second protein are not identical.

[0113] A modified cell of the present disclosure (preferably a modified T-cell of the present disclosure) can further comprise, consist essential of, or consist of an inducible proapoptotic polypeptide. The inducible proapoptotic polypeptide comprises, consists essential of, or consists of the amino acid sequence at least 95% identical to the amino acid sequence of SEQ ID NO: 14641. The inducible proapoptotic polypeptide comprises, consists essential of, or consists of the amino acid sequence at least 99% identical to the amino acid sequence of SEQ ID NO: 14641. The inducible proapoptotic polypeptide comprises, consists essential of, or consists of the amino acid sequence of SEQ ID NO: 14641.

[0114] A modified cell of the present disclosure (preferably a modified T-cell of the present disclosure) can further comprise, consist essential of, or consist of a modification of an endogenous sequence encoding Beta-2-Microglobulin (B2M), wherein the modification reduces or eliminates a level of expression or activity of a major histocompatibility complex (MHC) class I (MHC-I). A reduction of a level of expression or activity is when at least 50%, at least 75%, at least 90%, at least 91%, at least 92%, at least 93%, at least 94%, at least 95%, at least 96%, at least 97%, at least 98%, or at least 99% of the expression of the MHC-I in a cell or the functional activity of the MHC-I in a cell is reduced when compared to the naturally occurring wild-type counterpart of the cell. A reduction of a level of expression or activity is when at least 50%, at least 75%, at least 90%, at least 91%, at least 92%, at least 93%, at least 94%, at least 95%, at least 96%, at least 97%, at least 98%, or at least 99% of the expression of the MHC-I in a T-cell or the functional activity of the MHC-I in a T-cell is reduced when compared to a naturally occurring wild-type T-cell. An elimination a level of expression or activity is when 100% of the expression of the MHC-I in a cell or the functional activity of the MHC-I in a cell is reduced when compared to the naturally occurring wild-type counterpart of the cell. An elimination a level of expression or activity is when 100% of the expression of the MHC-I in a T-cell or the functional activity of the MHC-I in a T-cell is reduced when compared to the naturally occurring wild-type T-cell.

[0115] A modified cell of the present disclosure (preferably a modified T-cell of the present disclosure) can further comprise, consist essential of, or consist of a non-naturally occurring polypeptide comprising an HLA class I histocompatibility antigen, alpha chain E (HLA-E). The HLA-E polypeptide comprises, consists essential of, or consists of the amino acid sequence at least 95% identical to the amino acid sequence of SEQ ID NO: 17131. The HLA-E polypeptide comprises, consists essential of, or consists of the amino acid sequence at least 99% identical to the amino acid sequence of SEQ ID NO: 17131. The HLA-E polypeptide comprises, consists essential of, or consists of the amino acid sequence of SEQ ID NO: 17131.

[0116] The non-naturally occurring polypeptide comprising a HLA-E can further comprise, consist essential of, or consist of a B2M signal peptide. The B2M signal peptide comprises, consists essential of, or consists of the amino acid sequence at least 95% identical to the amino acid sequence of SEQ ID NO: 17126. The B2M signal peptide comprises, consists essential of, or consists of the amino acid sequence at least 99% identical to the amino acid sequence of SEQ ID NO: 17131. The B2M signal peptide comprises, consists essential of, or consists of the amino acid sequence of SEQ ID NO: 17131.

[0117] The non-naturally occurring polypeptide comprising a HLA-E can further comprise, consist essential of, or consist of a B2M polypeptide. The B2M polypeptide comprises, consists essential of, or consists of the amino acid sequence at least 95% identical to the amino acid sequence of SEQ ID NO: 17129. The B2M polypeptide comprises, consists essential of, or consists of the amino acid sequence at least 99% identical to the amino acid sequence of SEQ ID NO: 17129. The B2M polypeptide comprises, consists essential of, or consists of the amino acid sequence of SEQ ID NO: 17129.

[0118] The non-naturally occurring polypeptide comprising a HLA-E can further comprise, consist essential of, or consist of a linker molecule (referred to herein as a linker). The non-naturally occurring polypeptide comprising a HLA-E can further comprise, consist essential of, or consist of a linker, wherein the linker is positioned between the B2M polypeptide and the HLA-E polypeptide. The linker comprises, consists essential of, or consists of the amino acid sequence at least 95% identical to the amino acid sequence of SEQ ID NO: 17130. The linker comprises, consists essential of, or consists of the amino acid sequence at least 99% identical to the amino acid sequence of SEQ ID NO: 17130. The linker comprises, consists essential of, or consists of the amino acid sequence of SEQ ID NO: 17130.

[0119] The non-naturally occurring polypeptide comprising a HLA-E can further comprise, consist essential of, or consist of a peptide and a B2M polypeptide. The peptide comprises, consists essential of, or consists of the amino acid sequence at least 95% identical to the amino acid sequence of SEQ ID NO: 17127. The peptide comprises, consists essential of, or consists of the amino acid sequence at least 99% identical to the amino acid sequence of SEQ ID NO: 17127. The peptide comprises, consists essential of, or consists of the amino acid sequence of SEQ ID NO: 17127.

[0120] The non-naturally occurring polypeptide comprising a HLA-E can further comprise, consist essential of, or consist of a first linker positioned between the B2M signal peptide and the peptide, and a second linker positioned between the B2M polypeptide and the HLA-E polypeptide. The first linker comprises, consists essential of, or consists of the amino acid sequence at least 95% identical to the amino acid sequence of SEQ ID NO: 17128. The first linker comprises, consists essential of, or consists of the amino acid sequence at least 99% identical to the amino acid sequence of SEQ ID NO: 17128. The first linker comprises, consists essential of, or consists of the amino acid sequence of SEQ ID NO: 17128. The second linker comprises, consists essential of, or consists of the amino acid sequence at least 95% identical to the amino acid sequence of SEQ ID NO: 17130. The second linker comprises, consists essential of, or consists of the amino acid sequence at least 99% identical to the amino acid sequence of SEQ ID NO: 17130. The second linker comprises, consists essential of, or consists of the amino acid sequence of SEQ ID NO: 17130.

[0121] In one aspect, the non-naturally occurring polypeptide comprising an HLA-E comprises, consists essential of, or consists of a B2M signal peptide, a peptide, a first linker, a B2M polypeptide, a second linker and an HLA-E polypeptide. The peptide can be positioned between the B2M signal peptide and the first linker, the B2M polypeptide can be positioned between the first linker and the second linker and the second linker can be positioned between the B2M polypeptide and the HLA-E polypeptide. The non-naturally occurring polypeptide comprising an HLA-E comprises, consists essential of, or consists of the amino acid sequence at least 95% identical to the amino acid sequence of SEQ ID NO: 17064. The non-naturally occurring polypeptide comprising an HLA-E comprises, consists essential of, or consists of the amino acid sequence at least 99% identical to the amino acid sequence of SEQ ID NO: 17064. The non-naturally occurring polypeptide comprising an HLA-E comprises, consists essential of, or consists of the amino acid sequence of SEQ ID NO: 17064. The non-naturally occurring polypeptide comprising an HLA-E can be encoded by the nucleic acid have the sequence of SEQ ID NO: 17065.

[0122] In one aspect, the non-naturally occurring polypeptide comprising an HLA-E comprises, consists essential of, or consists of a B2M signal peptide, a B2M polypeptide, a linker and an HLA-E polypeptide. The B2M polypeptide can be positioned between the B2M signal peptide and the linker, the linker can be positioned between the B2M polypeptide and the HLA-E polypeptide. The non-naturally occurring polypeptide comprising an HLA-E comprises, consists essential of, or consists of the amino acid sequence at least 95% identical to the amino acid sequence of SEQ ID NO: 17066. The non-naturally occurring polypeptide comprising an HLA-E comprises, consists essential of, or consists of the amino acid sequence at least 99% identical to the amino acid sequence of SEQ ID NO: 17066. The non-naturally occurring polypeptide comprising an HLA-E comprises, consists essential of, or consists of the amino acid sequence of SEQ ID NO: 17066. The non-naturally occurring polypeptide comprising an HLA-E can be encoded by the nucleic acid have the sequence of SEQ ID NO: 17067.

[0123] In one aspect, the non-naturally occurring polypeptide comprising an HLA-E comprises, consists essential of, or consists of a B2M signal peptide and an HLA-E polypeptide. The B2M signal peptide can be positioned before (e.g. 5′ in the context of a nucleic acid sequence or amino terminus in the context of an amino acid sequence) HLA-E polypeptide. The non-naturally occurring polypeptide comprising an HLA-E comprises, consists essential of, or consists of the amino acid sequence at least 95% identical to the amino acid sequence of SEQ ID NO: 17068. The non-naturally occurring polypeptide comprising an HLA-E comprises, consists essential of, or consists of the amino acid sequence at least 99% identical to the amino acid sequence of SEQ ID NO: 17068. The non-naturally occurring polypeptide comprising an HLA-E comprises, consists essential of, or consists of the amino acid sequence of SEQ ID NO: 17068. The non-naturally occurring polypeptide comprising an HLA-E can be encoded by the nucleic acid have the sequence of SEQ ID NO: 17069.

[0124] A modified cell of the present disclosure (preferably a modified T-cell of the present disclosure) can further comprise, consist essential of, or consist of a non-naturally occurring antigen receptor, a sequence encoding a therapeutic polypeptide, or a combination thereof. In a preferred aspect, the non-naturally occurring antigen receptor comprises, consists essential of or consists of a chimeric antigen receptor (CAR). The CAR comprise, consist essential of, or consist of (a) an ectodomain comprising an antigen recognition region, (b) a transmembrane domain, and (c) an endodomain comprising at least one costimulatory domain. The ectodomain of the CAR can further comprise, consist essential of, or consist of a signal peptide. The ectodomain of the CAR can further comprise, consist essential of, or consist of a hinge between the antigen recognition region and the transmembrane domain. The endodomain of the CAR can further comprise, consist essential of, or consist of a human CD3ζ endodomain. The at least one costimulatory domain of the CAR can further comprise, consist essential of, or consist of a human 4-1BB, CD28, CD40, ICOS, MyD88, OX-40 intracellular segment, or any combination thereof. In a preferred aspect, at least one costimulatory domain comprises a human CD28 and/or a 4-1BB costimulatory domain.

[0125] A modified cell of the present disclosure can be an immune cell or an immune cell precursor. The immune cell can be a lymphoid progenitor cell, a natural killer (NK) cell, a cytokine induced killer (CIK) cell, a T lymphocyte (T-cell), a B lymphocyte (B-cell) or an antigen presenting cell (APC). In preferred aspects, the immune cell is a T cell, an early memory T cell, a stem cell-like T cell, a stem memory T cell (T_{SCM}), a central memory T cell (T_{CM}) or a stem cell-like T cell. The immune cell precursor can a hematopoietic stem cell (HSC). The modified cell can be a stem cell, a differentiated cell, a somatic cell or an antigen presenting cell (APC). The modified cell can be an autologous cell or an allogeneic cell. In one aspect, the cell is a modified allogeneic T-cell. In another aspect, the cell is modified allogeneic T-cell expressing a chimeric antigen receptor (CAR), a CAR T-cell.

[0126] A modified cell of the present disclosure (preferably a modified T-cell of the present disclosure) can express a CSR of the present disclosure transiently or stably. In one aspect, a CSR of the present disclosure is transiently expressed in a modified cell of the present disclosure (preferably a modified T-cell of the present disclosure). In one aspect, a CSR of the present disclosure is stably expressed in a modified cell of the present disclosure (preferably a modified T-cell of the present disclosure).

[0127] A modified cell of the present disclosure (preferably a modified T-cell of the present disclosure) can express a non-naturally occurring polypeptide comprising the HLA-E of the present disclosure transiently or stably. In one aspect, a non-naturally occurring polypeptide comprising the HLA-E of the present disclosure is transiently expressed in a modified cell of the present disclosure (preferably a modified T-cell of the present disclosure). In one aspect, a non-naturally occurring polypeptide comprising the HLA-E of the present disclosure is stably expressed in a modified cell of the present disclosure (preferably a modified T-cell of the present disclosure).

[0128] A modified cell of the present disclosure (preferably a modified T-cell of the present disclosure) can express an inducible proapoptotic polypeptide of the present disclosure transiently or stably. In one aspect, an inducible proapoptotic polypeptide of the present disclosure is transiently expressed in a modified cell of the present disclosure (preferably a modified T-cell of the present disclosure). In a preferred aspect, an inducible proapoptotic polypeptide of the present disclosure is stably expressed in a modified cell of the present disclosure (preferably a modified T-cell of the present disclosure).

[0129] A modified cell of the present disclosure (preferably a modified T-cell of the present disclosure) can express a non-naturally occurring antigen receptor or a sequence encoding a therapeutic protein of the present disclosure transiently or stably. In one aspect, a non-naturally occurring antigen receptor or a sequence encoding a therapeutic protein of the present disclosure is transiently expressed in a modified cell of the present disclosure (preferably a modified T-cell of the present disclosure). In a preferred aspect, a non-naturally occurring antigen receptor or a sequence encoding a therapeutic protein of the present disclosure is stably expressed in a modified cell of the present disclosure (preferably a modified T-cell of the present disclosure).

[0130] In one aspect, a CSR of the present disclosure is stably expressed, the inducible proapoptotic polypeptide of the present disclosure is stably expressed and a non-naturally occurring antigen receptor or a sequence encoding a therapeutic protein is stably expressed in a modified cell of the present disclosure (preferably a modified T-cell of the present disclosure).

[0131] In one aspect, a CSR of the present disclosure is stably expressed, a non-naturally occurring polypeptide comprising the HLA-E of the present disclosure is stably expressed, the inducible proapoptotic polypeptide of the present disclosure is stably expressed and a non-naturally occurring antigen receptor or a sequence encoding a therapeutic protein is stably expressed in a modified cell of the present disclosure (preferably a modified T-cell of the present disclosure).

[0132] In one aspect, a CSR of the present disclosure is stably expressed, a non-naturally occurring polypeptide comprising the HLA-E of the present disclosure is transiently expressed, the inducible proapoptotic polypeptide of the present disclosure is stably expressed and a non-naturally occurring antigen receptor or a sequence encoding a therapeutic protein is stably expressed in a modified cell of the present disclosure (preferably a modified T-cell of the present disclosure).

[0133] In one aspect, a CSR of the present disclosure is transiently expressed, the inducible proapoptotic polypeptide of the present disclosure is stably expressed and the non-naturally occurring antigen receptor or a sequence encoding a therapeutic protein is stably expressed in a modified cell of the present disclosure (preferably a modified T-cell of the present disclosure).

[0134] In one aspect, a CSR of the present disclosure is transiently expressed, a non-naturally occurring polypeptide comprising the HLA-E of the present disclosure is transiently expressed, the inducible proapoptotic polypeptide of the present disclosure is stably expressed and a non-naturally occurring antigen receptor or a sequence encoding a therapeutic protein is stably expressed in a modified cell of the present disclosure (preferably a modified T-cell of the present disclosure).

[0135] In one aspect, a CSR of the present disclosure is transiently expressed, a non-naturally occurring polypeptide comprising the HLA-E of the present disclosure is stably expressed, the inducible proapoptotic polypeptide of the present disclosure is stably expressed and a non-naturally occurring antigen receptor or a sequence encoding a therapeutic protein is stably expressed in a modified cell of the present disclosure (preferably a modified T-cell of the present disclosure).

[0136] The present disclosure provides a modified cell (preferably a modified T-cell comprising, consisting essential of, or consisting of (a) a modification of an endogenous sequence encoding a T-cell Receptor (TCR), wherein the modification reduces or eliminates a level of expression or activity of the TCR; and (b) a sequence encoding a chimeric stimulatory receptor (CSR) comprising: (i) an ectodomain comprising an activation component, wherein the activation component is isolated or derived from a first protein; (ii) a transmembrane domain; and (iii) an endodomain comprising at least one signal transduction domain, wherein the at least one signal transduction domain is isolated or derived from a second protein; wherein the first protein and the second protein are not identical.

[0137] The modified cell further can further comprise, consist essential of or consist of a sequence encoding an inducible proapoptotic polypeptide. The modified cell can further comprise, consist essential of or consist of a sequence encoding a non-naturally occurring antigen receptor, a sequence encoding a therapeutic polypeptide, or a combination thereof. The non-naturally occurring antigen receptor can comprise, consist essential of or consist of a chimeric antigen receptor (CAR).

[0138] A transposon, a vector, a donor sequence or a donor plasmid can comprise, consist essential of or consist of the sequence encoding the CSR, the sequence encoding the inducible proapoptotic polypeptide, or a combination thereof. The transposon, the vector, the donor sequence or the donor plasmid can further comprise, consist essential of or consist of a sequence encoding a non-naturally occurring antigen receptor or a sequence encoding a therapeutic protein. The transposon, the vector, the donor sequence, or the donor plasmid can further comprise, consist essential of or consist of a sequence encoding a selection marker. The transposon can be a piggyBac® transposon, a piggy-Bac® like transposon, a Sleeping Beauty transposon, a Helraiser transposon, a Tol2 transposon or a TcBuster transposon. The sequence encoding the CSR can be transiently expressed in the cell. The sequence encoding the CSR can be stably expressed in the cell. The sequence encoding the inducible proapoptotic polypeptide can be stably expressed in the cell. The sequence encoding a non-naturally occurring antigen receptor or a sequence encoding a therapeutic protein is stably expressed in the cell. In some aspects, the sequence encoding the CSR can be transiently expressed in the cell and the sequence encoding the inducible proapoptotic polypeptide can be stably expressed in the cell. In some aspects, the sequence encoding the CSR can be stably expressed in the cell and the sequence encoding the inducible proapoptotic polypeptide can be stably expressed in the cell. In some aspects, the sequence encoding the CSR can be transiently expressed in the cell, the sequence encoding the inducible proapoptotic polypeptide can be stably expressed in the cell and sequence encoding a non-naturally occurring antigen receptor or a sequence encoding a therapeutic protein is stably expressed in the cell. In some aspects, the sequence encoding the CSR can be stably expressed in the cell, the sequence encoding the inducible proapoptotic polypeptide can be stably expressed in the cell and sequence encoding a non-naturally occurring antigen receptor or a sequence encoding a therapeutic protein is stably expressed in the cell. In one aspect, the vector can be a viral vector. In one aspect, a viral vector can be an an adenoviral vector, adeno-associated viral (AAV) vector, retroviral vector, lentiviral vector or a chimeric viral vector.

[0139] A first transposon, a first vector, a first donor sequence, or a first donor plasmid can comprise, consist essential of or consist of the sequence encoding the CSR. The first transposon, the first vector, the first donor sequence, or the first donor plasmid can further comprise, consist essential of or consist of a sequence encoding a first selection marker.

[0140] A second transposon, a second vector, a second donor sequence, or a second donor plasmid can comprise, consist essential of or consist of one or more of the sequence encoding the inducible proapoptotic polypeptide, the sequence encoding a non-naturally occurring antigen receptor, and the sequence encoding a therapeutic protein. The second transposon, the second vector, the second donor sequence, or the second donor plasmid can further comprise, consist essential of or consist of a sequence encoding a second selection marker. The first selection marker and the second selection marker are identical. The first selection marker and the second selection marker are not identical. The selection marker can comprise, consist essential of or consist of a cell surface marker. The selection marker can comprise, consist essential of or consist of a protein that is active in dividing cells and not active in non-dividing cells. The selection marker can comprise, consist essential of or consist of a metabolic marker.

[0141] In one aspect, the selection marker can comprise, consist essential of or consist of a dihydrofolate reductase (DHFR) mutein enzyme. The DHFR mutein enzyme can comprise, consist essential of or consist of the amino acid sequence of SEQ ID NO: 17012.

[0142] The DHFR mutein enzyme of SEQ ID NO: 17012 can further comprise, consist essential of or consist of a mutation at one or more of positions 80, 113, or 153. The amino acid sequence of the DHFR mutein enzyme of SEQ ID NO: 17012 can further comprise, consist essential of or consist of one or more of a substitution of a Phenylalanine (F) or a Leucine (L) at position 80; a substitution of a Leucine (L) or a Valine (V) at position 113, and a substitution of a Valine (V) or an Aspartic Acid (D) at position 153.

[0143] A modified cell of the present disclosure (preferably a modified T-cell of the present disclosure) can further comprise, consist essential of or consist of a gene editing composition. The gene editing composition can comprise, consist essential of or consist of a sequence encoding a DNA binding domain and a sequence encoding a nuclease protein or a nuclease domain thereof. The gene editing composition can be expressed transiently by the modified cell. The gene editing composition can be expressed stably by the modified cell.

[0144] The gene editing composition can comprise, consist essential of or consist of a sequence encoding a nuclease protein or a sequence encoding a nuclease domain thereof. The sequence encoding a nuclease protein or the sequence encoding a nuclease domain thereof can comprise, consist essential of or consist of a DNA sequence, an RNA sequence, or a combination thereof. The nuclease or the nuclease domain thereof can comprise, consist essential of or consist of one or more of a CRISPR/Cas protein, a Transcription Activator-Like Effector Nuclease (TALEN), a Zinc Finger Nuclease (ZFN), and an endonuclease. The CRISPR/Cas protein can comprise, consist essential of or consist of a nuclease-inactivated Cas (dCas) protein. The nuclease or the nuclease domain thereof can comprise, consist essential of or consist of a nuclease-inactivated Cas (dCas) protein and an endonuclease. The endonuclease can comprise, consist essential of or consist of a Clo051 nuclease or a nuclease domain thereof. The gene editing composition can comprise, consist essential of or consist of a fusion protein. The fusion protein can comprise, consist essential of or consist of a nuclease-inactivated Cas9 (dCas9) protein and a Clo051 nuclease or a Clo051 nuclease domain. The fusion protein can comprise, consist essential of or consist of the amino acid sequence of SEQ ID NO: 17013. The fusion protein is encoded by a nucleic acid comprising, consisting essential of or consisting of the sequence of SEQ ID NO: 17014. The fusion protein can comprise, consist essential of or consist of the amino acid sequence of SEQ ID NO: 17058. The fusion protein is encoded by a nucleic acid comprising, consisting essential of or consisting of the sequence of SEQ ID NO: 17059.

[0145] The gene editing composition can further comprise, consist essential of or consist of a guide sequence. The guide sequence can comprise, consist essential of or consist of an RNA sequence. In aspects when the modified cell is a T-cell, the guide RNA can comprise, consist essential of or consist of a sequence complementary to a target sequence encoding an endogenous TCR. The guide RNA can comprise, consist essential of or consist of a sequence complementary to a target sequence encoding a B2M polypeptide. The guide RNA can comprise, consist essential of or consist of a sequence complementary to a target sequence within a safe harbor site of a genomic DNA sequence.

[0146] The transposon, the vector, the donor sequence or the donor plasmid can further comprise, consist essential of or consist of a gene editing composition comprising a guide sequence and a sequence encoding a fusion protein comprising a sequence encoding an inactivated Cas9 (dCas9) and a sequence encoding a Clo051 nuclease or a nuclease domain thereof.

[0147] The first transposon, the first vector, the first donor sequence or the first donor plasmid can further comprise, consist essential of or consist of a gene editing composition comprising a guide sequence and a sequence encoding a fusion protein comprising a sequence encoding an inactivated Cas9 (dCas9) and a sequence encoding a Clo051 nuclease or a nuclease domain thereof.

[0148] The second transposon, the second vector, the second donor sequence or the second donor plasmid can further comprise, consist essential of or consist of a gene editing composition comprising a guide sequence and a sequence encoding a fusion protein comprising a sequence encoding an inactivated Cas9 (dCas9) and a sequence encoding a Clo051 nuclease or a nuclease domain thereof.

[0149] A third transposon, a third vector, a third donor sequence or a third donor plasmid can comprise, consist essential of or consist of a gene editing composition comprising a guide sequence and a sequence encoding a fusion protein comprising a sequence encoding an inactivated Cas9 (dCas9) and a sequence encoding a Clo051 nuclease or a nuclease domain thereof.

[0150] The Clo051 nuclease or a nuclease domain thereof can induce a single or double strand break in a target sequence. The donor sequence or a donor plasmid can integrate at a position of single or double strand break or at a position of cellular repair within a target sequence, or a combination thereof.

[0151] The present disclosure provides a composition comprising, consisting essential of, or consisting of a modified cell of the present disclosure (preferably a modified T-cell of the present disclosure).

[0152] The present disclosure provides a plurality of modified cells comprising any non-naturally occurring chimeric stimulatory receptor (CSR) disclosed herein and provides a plurality of modified cells comprising any modified cell disclosed herein. The plurality of modified cells can comprise, consist essential of, or consist of immune cells or an immune cell precursors. The plurality of immune cells can comprise, consist essential of, or consist of lymphoid progenitor cells, natural killer (NK) cells, cytokine induced killer (CIK) cells, T lymphocytes (T-cells), B lymphocytes (B-cells) or antigen presenting cells (APCs).

[0153] The present disclosure provides a composition comprising a population of modified cells, wherein a plurality of the modified cells of the population comprise any non-naturally occurring chimeric stimulatory receptor (CSR) disclosed herein and provides a composition comprising a population of modified cells, wherein a plurality of the modified cells of the population comprise any modified cell disclosed herein. The population of modified cells can comprise, consist essential of, or consist of immune cells or an immune cell precursors. The population of immune cells can comprise, consist essential of, or consist of lymphoid progenitor cells, natural killer (NK) cells, cytokine induced killer (CIK) cells, T lymphocytes (T-cells), B lymphocytes (B-cells) or antigen presenting cells (APCs). The composition can comprise a pharmaceutically-acceptable carrier.

[0154] The present disclosure provides a composition comprising a population of modified T lymphocytes (T-cells), wherein a plurality of the modified T-cells of the population comprise any non-naturally occurring chimeric stimulatory receptor (CSR) disclosed herein and provides a composition comprising a population of T lymphocytes (T-cells), wherein a plurality of the T-cells of the population comprise any modified T-cell disclosed herein. The composition can comprise a pharmaceutically-acceptable carrier.

[0155] Preferably, the present disclosure provides a composition comprising a population of T lymphocytes (T-cells), wherein a plurality of the T-cells of the population comprise a non-naturally occurring chimeric stimulatory receptor (CSR) comprising, consisting essential of, or consisting of: (a) an ectodomain comprising a activation component, wherein the activation component is isolated or derived from a first protein; (b) a transmembrane domain; and (c) an endodomain comprising at least one signal transduction domain, wherein the at least one signal transduction domain is isolated or derived from a second protein, wherein the first protein and the second protein are not identical. The composition can comprise a pharmaceutically-acceptable carrier. In some aspects, at least 5%, at least 10%, at least 15%, at least 20%, at least 25%, at least 30%, at least 35%, at least 40%, at least 45%, at least 50%, at least 55%, at least 60%, at least 65%, at least 70%, at least 75%, at least 80%, at least 85%, at least 90%, at least 95%, at least 96%, at least 97%, at least 98%, at least 99%, or 100% of the population comprise the CSR.

[0156] The plurality of the T-cells of the population can further comprise an inducible proapoptotic polypeptide. In some aspects, at least 5%, at least 10%, at least 15%, at least 20%, at least 25%, at least 30%, at least 35%, at least 40%, at least 45%, at least 50%, at least 55%, at least 60%, at least 65%, at least 70%, at least 75%, at least 80%, at least 85%, at least 90%, at least 95%, at least 96%, at least 97%, at least 98%, at least 99%, or 100% of the population comprise the inducible proapoptotic polypeptide.

[0157] The plurality of the T-cells of the population can further comprise a modification of an endogenous sequence encoding a T-cell Receptor (TCR), wherein the modification reduces or eliminates a level of expression or activity of the TCR. In some aspects, at least 5%, at least 10%, at least 15%, at least 20%, at least 25%, at least 30%, at least 35%, at least 40%, at least 45%, at least 50%, at least 55%, at least 60%, at least 65%, at least 70%, at least 75%, at least 80%, at least 85%, at least 90%, at least 95%, at least 96%, at least 97%, at least 98%, at least 99%, or 100% of the population comprise the modification of the endogenous sequence encoding the TCR, wherein the modification reduces or eliminates a level of expression or activity of the TCR.

[0158] The plurality of the T-cells of the population can further comprise a modification of an endogenous sequence encoding Beta-2-Microglobulin (B2M), wherein the modification reduces or eliminates a level of expression or activity of a major histocompatibility complex (MHC) class I (MHC-I). In some aspects, at least 5%, at least 10%, at least 15%, at least 20%, at least 25%, at least 30%, at least 35%, at least 40%, at least 45%, at least 50%, at least 55%, at least 60%, at least 65%, at least 70%, at least 75%, at least 80%, at least 85%, at least 90%, at least 95%, at least 96%, at least 97%, at least 98%, at least 99%, or 100% of the population comprise the modification of the endogenous sequence encoding B2M, wherein the modification reduces or eliminates a level of expression or activity of MHC-I.

[0159] The plurality of the T-cells of the population can further comprise a modification of an endogenous sequence encoding a T-cell Receptor (TCR), wherein the modification reduces or eliminates a level of expression or activity of the TCR and a modification of an endogenous sequence encoding Beta-2-Microglobulin (B2M), wherein the modification reduces or eliminates a level of expression or activity of a major histocompatibility complex (MHC) class I (MHC-I).

[0160] In some aspects, at least 5%, at least 10%, at least 15%, at least 20%, at least 25%, at least 30%, at least 35%, at least 40%, at least 45%, at least 50%, at least 55%, at least 60%, at least 65%, at least 70%, at least 75%, at least 800%, at least 85%, at least 90%, at least 95%, at least 96%, at least 97%, at least 98%, at least 99%, or 100% of the population comprise both modification of the endogenous sequence encoding the TCR, wherein the modification reduces or eliminates a level of expression or activity of the TCR and the modification of the endogenous sequence encoding B2M, wherein the modification reduces or eliminates a level of expression or activity of MHC-I.

[0161] The plurality of the T-cells of the population can further comprise a non-naturally occurring sequence comprising an HLA class I histocompatibility antigen, alpha chain E (HLA-E) polypeptide. In some aspects, at least 5%, at least 10%, at least 15%, at least 20%, at least 25%, at least 30%, at least 35%, at least 40%, at least 45%, at least 50%, at least 55%, at least 60%, at least 65%, at least 70%, at least 75%, at least 80%, at least 85%, at least 90%, at least 95%, at least 96%, at least 97%, at least 98%, at least 99%, or 100% of the population comprise the non-naturally occurring sequence comprising the HLA-E polypeptide.

[0162] The plurality of the T-cells of the population can further comprise a non-naturally occurring antigen receptor, a sequence encoding a therapeutic polypeptide, or a combination thereof. In some aspects, at least 5%, at least 10%, at least 15%, at least 20%, at least 25%, at least 30%, at least 35%, at least 40%, at least 45%, at least 50%, at least 55%, at least 60%, at least 65%, at least 70%, at least 75%, at least 800%, at least 85%, at least 90%, at least 95%, at least 96%, at least 97%, at least 98%, at least 99%, or 100% of the population comprise the non-naturally occurring antigen receptor, the sequence encoding a therapeutic polypeptide, or a combination thereof. In preferred aspects, the non-naturally occurring antigen receptor is a chimeric antigen receptor (CAR).

[0163] The plurality of the T-cells of the population can comprise an early memory T cell, a stem cell-like T cell, a stem memory T cell (T_{SCM}), a central memory T cell (T_{CM}) or a stem cell-like T cell. In some aspects, one or more of a stem cell-like T cell, a stem cell memory T cell (T_{SCM}) and a central memory T cell (T_{CM}) comprise at least 5%, at least 10%, at least 15%, at least 20%, at least 25%, at least 30%, at least 35%, at least 40%, at least 45%, at least 50%, at least 55%, at least 60%, at least 65%, at least 70%, at least 75%, at least 80%, at least 85%, at least 90%, at least 95%, at least 96%, at least 97%, at least 98%, at least 99%, or 100% of the population of modified T-cells.

[0164] In some aspects, at least 5%, at least 10%, at least 15%, at least 200%, at least 25%, at least 30%, at least 35%, at least 40%, at least 45%, at least 50%, at least 55%, at least 60%, at least 65%, at least 70%, at least 75%, at least 80%, at least 85%, at least 90%, at least 95%, at least 96%, at least 97%, at least 98%, at least 99%, or 100% of the population comprising the CSR expresses one or more cell-surface marker(s) of a stem memory T cell (T_{SCM}) or a T_{SCM}-like cell; and wherein the one or more cell-surface marker(s) comprise CD45RA and CD62L.

[0165] In some aspects, at least 5%, at least 10%, at least 15%, at least 20%, at least 25%, at least 30%, at least 35%, at least 40%, at least 45%, at least 50%, at least 55%, at least 60%, at least 65%, at least 70%, at least 75%, at least 80%, at least 85%, at least 90%, at least 95%, at least 96%, at least 97%, at least 98%, at least 99%, or 100% of the population expresses one or more cell-surface marker(s) of a central memory T cell (T_{CM}) or a T_{CM}-like cell; and wherein the one or more cell-surface marker(s) comprise CD45RO and CD62L.

[0166] In some aspects, at least 5%, at least 10%, at least 15%, at least 20%, at least 25%, at least 30%, at least 35%, at least 40%, at least 45%, at least 50%, at least 55%, at least 60%, at least 65%, at least 70%, at least 75%, at least 80%, at least 85%, at least 90%, at least 95%, at least 96%, at least 97%, at least 98%, at least 99%, or 100% of the population expresses one or more of CD127, CD45RO, CD95 and IL-2RO cell-surface marker(s).

[0167] The present disclosure provides compositions for use in the treatment of a disease or disorder disclosed herein or the use of a composition for the treatment of any disease or disorder disclosed herein. The present disclosure also provides methods of treating a disease or disorder comprising, consisting essential of, or consisting of administering to a subject in need thereof a therapeutically-effective amount of a composition disclosed herein. The compositions can comprise, consist essential of or consist of any of the modified cells or populations of modified cells disclosed herein. Preferably, any of the modified T-cells or CAR T-cells disclosed herein.

[0168] The present disclosure provides a method of producing a modified T-cell comprising, consisting essential of, or consisting of, introducing into a primary human T-cell a composition comprising a Chimeric Stimulator Receptor (CSR) of the present disclosure or a sequence encoding the same to produce a modified T-cell under conditions that stably express the CSR within the modified T-cell and preserve desirable stem-like properties of the modified T-cell. The primary human T-cell can be a resting primary human T-cell. The present disclosure provides a modified T-cell produced by the disclosed method. The present disclosure provides a method of administering the modified T-cell comprising the stably expressed CSR produced by the disclosed method. The present disclosure provides the method of administering the modified T-cell comprising the stably expressed CSR produced by the disclosed method to treat a disease or disorder.

[0169] The present disclosure provides a method of producing a population of modified T-cells comprising, consisting essential of, or consisting of, introducing into a plurality of primary human T-cells a composition comprising a Chimeric Stimulator Receptor (CSR) of the present disclosure or a sequence encoding the same to produce a plurality of modified T-cells under conditions that stably express the CSR within the plurality of modified T-cells and preserve desirable stem-like properties of the plurality of modified T-cells. The primary human T-cells can comprise resting primary human T-cells. The present disclosure provides a population of modified T-cells produced by the disclosed method. The present disclosure provides a method of administering the population of modified T-cells comprising the stably expressed CSR produced by the disclosed method. The present disclosure provides a method of administering the population of modified T-cells comprising the stably expressed CSR produced by the disclosed method to treat a disease or disorder.

[0170] The present disclosure provides a method of producing a modified T-cell comprising, consisting essential of, or consisting of, introducing into a primary human T-cell a composition comprising a Chimeric Stimulator Receptor (CSR) of the present disclosure or a sequence encoding the same to produce a modified T-cell under conditions that transiently express the CSR within the modified T-cell and preserve desirable stem-like properties of the modified T-cell. The primary human T-cell can be a resting primary human T-cell. The present disclosure provides a modified T-cell produced by the disclosed method. The present disclosure provides a method of administering the modified T-cell comprising the transiently expressed CSR produced by the disclosed method. In one aspect, the present disclosure provides a method of administering the modified T-cell produced by the disclosed method after the modified T-cell no longer expresses the CSR. The present disclosure provides a method of administering a modified T-cell comprising the transiently expressed CSR produced by the disclosed method to treat a disease or disorder. In one aspect, the present disclosure provides a method of administering the modified T-cell produced by the disclosed method after the modified T-cell no longer expresses the CSR to treat a disease or disorder.

[0171] The present disclosure provides a method of producing a population of modified T-cells comprising, consisting essential of, or consisting of, introducing into a plurality of primary human T-cells a composition comprising a Chimeric Stimulator Receptor (CSR) of the present disclosure or a sequence encoding the same to produce a plurality of modified T-cells under conditions that transiently express the CSR within the plurality of modified T-cells and preserve desirable stem-like properties of the plurality of modified T-cells. The primary human T-cells can comprise resting primary human T-cells. The present disclosure provides a population of modified T-cell produced by the disclosed method. The present disclosure provides a method of administering the population of modified T-cells comprising the transiently expressed CSR produced by the disclosed method. In one aspect, the present disclosure provides a method of administering the population of modified T-cells produced by the disclosed method after the plurality of T-cells no longer express the CSR. The present disclosure provides a method of administering the population of modified T-cells comprising the transiently expressed CSR produced by the disclosed method to treat a disease or disorder. In one aspect, the present disclosure provides a method of administering the population of modified T-cells produced by the disclosed method after the plurality of modified T-cells no longer express the CSR to treat a disease or disorder.

[0172] The method of producing a modified T-cell or producing a population of modified T-cells can further comprise introducing a modification of an endogenous sequence encoding a T-cell Receptor (TCR), wherein the modification reduces or eliminates a level of expression or activity of the TCR. The method of producing a modified T-cell or producing a population of modified T-cells can further comprise introducing a modification of an endogenous sequence encoding Beta-2-Microglobulin (B2M), wherein the modification reduces or eliminates a level of expression or activity of a major histocompatibility complex (MHC) class I (MHC-1). In some aspects, the method of producing a modified T-cell or producing a population of modified T-cells can further comprising introducing both a modification of an endogenous sequence encoding TCR, wherein the modification reduces or eliminates a level of expression or activity of the TCR and introducing a modification of an endogenous sequence encoding B2M, wherein the modification reduces or eliminates a level of expression or activity of MHC-1.

[0173] The method of producing a modified T-cell or producing a population of modified T-cells can further comprise introducing into the primary human T-cell or plurality of primary human T cells a composition comprising an antigen receptor, a therapeutic protein or a sequence encoding the same. In one aspect, the antigen receptor is a non-naturally occurring antigen receptor. In a preferred aspect, the method of producing a modified T-cell or producing a population of modified T-cells can further comprise introducing into the primary human T-cell or plurality of primary human T cells a composition comprising a Chimeric Antigen Receptor (CAR) or a sequence encoding the same. The method can further comprise introducing into the primary human T-cell or plurality of primary human T cells a composition comprising an inducible proapoptotic polypeptide or a sequence encoding the same. The method of producing a modified T-cell or producing a population of modified T-cells can further comprise introducing into the primary human T-cell or plurality of primary human T cells a composition comprising an antigen receptor, a therapeutic protein or a sequence encoding the same and a composition comprising an inducible proapoptotic polypeptide or a sequence encoding the same.

[0174] The method of producing a modified T-cell or producing a population of modified T-cells can further comprise contacting the modified T-cell or population of modified T-cells with an activator composition. The activator composition can comprise, consist essential of, or consist of one or more agonists or activating agents that can bind a CSR activation component of the modified T-cell or plurality of modified T-cells. The agonist/activating agent can be naturally occurring or non-naturally occurring. In preferred aspects, the agonist/activating agent is an antibody or antibody fragment. The agonist/activating agent can be one or more of an anti-CD3 antibody or fragment thereof, an anti-CD2 antibody or fragment thereof, an anti-CD28 antibody or fragment thereof, or any combination thereof. In some aspects, the agonist/activating agent that can be one or more of an anti-human CD3 monospecific tetrameric antibody complex, an anti-human CD2 monospecific tetrameric antibody complex, an anti-human CD28 monospecific tetrameric antibody complex, or a combination thereof. The agonist/activating can contact the modified T-cell or population of modified T-cells in vitro, ex vivo or in vivo. In a preferred aspect, the agonist/activating activates the modified T-cell or population of modified T-cells, induces cell division in the modified T-cell or population of modified T-cells, increases cell division (e.g., cell doubling time) in the modified T-cell or population of modified T-cells, increases fold expansion in the modified T-cell or population of modified T-cells, or any combination thereof.

[0175] The present disclosure provides a method of expanding a population of modified T-cells comprising, consisting essential of, or consisting of, introducing into a plurality of primary human T-cells a composition comprising a Chimeric Stimulator Receptor (CSR) of the present disclosure or a sequence encoding the same to produce a plurality of modified T-cells under conditions that stably express the CSR within the plurality of modified T-cells and preserve desirable stem-like properties of the plurality of modified T-cells and contacting the cells with an activator composition to produce a plurality of activated modified T-cells, wherein expansion of the plurality of modified T-cells is at least two fold higher than the expansion of a plurality of wild-type T-cells not stably expressing a CSR of the present disclosure under the same conditions. The method wherein the expansion of the plurality of modified T-cells is at least three fold, at least four fold, at least five fold, at least six fold, at least seven fold, at least eight fold, at least nine fold or at least 10 fold higher than the expansion of a plurality of wild-type T-cells not stably expressing a CSR of the present disclosure under the same conditions.

[0176] The present disclosure provides a method of expanding a population of modified T-cells comprising, consisting essential of, or consisting of, introducing into a plurality of primary human T-cells a composition comprising a Chimeric Stimulator Receptor (CSR) of the present disclosure or a sequence encoding the same to produce a plurality of modified T-cells under conditions that transiently express the CSR within the plurality of modified T-cells and preserve desirable stem-like properties of the plurality of modified T-cells and contacting the cells with an activator composition to produce a plurality of activated modified T-cells, wherein expansion of the plurality of modified T-cells is at least two fold higher than the expansion of a plurality of wild-type T-cells not transiently expressing a CSR of the present disclosure under the same conditions. The method wherein the expansion of the plurality of modified T-cells is at least three fold, at least four fold, at least five fold, at least six fold, at least seven fold, at least eight fold, at least nine fold or at least 10 fold higher than the expansion of a plurality of wild-type T-cells not transiently expressing a CSR of the present disclosure under the same conditions.

[0177] The activator composition of the methods of expanding a population of can comprise, consist essential of, or consist of one or more agonists or activating agents that can bind a CSR activation component of the modified T-cell or plurality of modified T-cells. The agonist/activating agent can be naturally occurring or non-naturally occurring. In preferred aspects, the agonist/activating agent is an antibody or antibody fragment. The agonist/activating agent can be one or more of an anti-CD3 antibody or fragment thereof, an anti-CD2 antibody or fragment thereof, an anti-CD28 antibody or fragment thereof, or any combination thereof. In some aspects, the agonist/activating agent that can be one or more of an anti-human CD3 monospecific tetrameric antibody complex, an anti-human CD2 monospecific tetrameric antibody complex, an anti-human CD28 monospecific tetrameric antibody complex, or a combination thereof.

[0178] The conditions can comprise culturing the modified T-cell or plurality of modified T-cells in a media comprising a sterol; an alkane; phosphorus and one or more of an octanoic acid, a palmitic acid, a linoleic acid, and an oleic acid. The culturing can be in vivo or ex vivo. The modified T-cell can be an allogeneic T-cell or the plurality of modified T-cells can be allogeneic T-cells. The modified T-cell can be an autologous T-cell or the plurality of modified T-cells can be autologous T-cells.

[0179] In some aspects, the media can comprise one or more of octanoic acid at a concentration of between 0.9 mg/kg to 90 mg/kg, inclusive of the endpoints; palmitic acid at a concentration of between 0.2 mg/kg to 20 mg/kg, inclusive of the endpoints; linoleic acid at a concentration of between 0.2 mg/kg to 20 mg/kg, inclusive of the endpoints; oleic acid at a concentration of 0.2 mg/kg to 20 mg/kg, inclusive of the endpoints; and a sterol at a concentration of about 0.1 mg/kg to 10 mg/kg, inclusive of the endpoints.

[0180] In some aspects, the media can comprise one or more of octanoic acid at a concentration of about 9 mg/kg, palmitic acid at a concentration of about 2 mg/kg, linoleic acid at a concentration of about 2 mg/kg, oleic acid at a concentration of about 2 mg/kg and a sterol at a concentration of about 1 mg/kg.

[0181] In some aspects, the media can comprise one or more of octanoic acid at a concentration of between 6.4 μmol/kg and 640 μmol/kg, inclusive of the endpoints; palmitic acid at a concentration of between 0.7 μmol/kg and 70 μmol/kg, inclusive of the endpoints; linoleic acid at a concentration of between 0.75 μmol/kg and 75 μmol/kg, inclusive of the endpoints; oleic acid at a concentration of between 0.75 μmol/kg and 75 μmol/kg, inclusive of the endpoints; and a sterol at a concentration of between 0.25 μmol/kg and 25 μmol/kg, inclusive of the endpoints.

[0182] In some aspects, the media can comprise one or more of octanoic acid at a concentration of about 64 μmol/kg, palmitic acid at a concentration of about 7 μmol/kg, linoleic acid at a concentration of about 7.5 μmol/kg, oleic acid at a concentration of about 7.5 μmol/kg and a sterol at a concentration of about 2.5 μmol/kg.

[0183] The present disclosure provides compositions comprising any modified T-cell produced by a method dislosed herein. The present disclosure provides compositions comprising any population of modified T-cell produced by a method dislosed herein. The present disclosure provides compositions comprising any modified T-cell expanded by a method dislosed herein. The present disclosure provides compositions comprising any population of modified T-cell expanded by a method dislosed herein.

[0184] The present disclosure provides compositions for use in the treatment of a disease or disorder disclosed herein or the use of a composition for the treatment of any disease or disorder disclosed herein. The present disclosure also provides methods of treating a disease or disorder comprising, consisting essential of, or consisting of administering to a subject in need thereof a therapeutically-effective amount of a composition disclosed herein and at least one non-naturally occurring molecule which binds to the activation component of a CSR disclosed herein. The compositions can comprise, consist essential of or consist of any of the modified cells or populations of modified cells disclosed herein. Preferably, any of the modified T-cells or CAR T-cells disclosed herein. Any non-naturally occurring molecule capable of binding to the activation component of the CSR of the present disclosure and selectively transducing a signal upon binding can be administered. Preferably, the non-naturally occurring molecule is an non-naturally CSR agonist/activating agent for the activation component. The non-naturally occurring agonist/activating agent that can bind a CSR activation component can be any non-naturally occurring antibody or antibody fragment. The non-naturally occurring antibody or antibody fragment can be a non-naturally occurring anti-CD3 antibody or fragment thereof, an anti-CD2 antibody or fragment thereof, an anti-CD28 antibody or fragment thereof, or any combination thereof. In some aspects, the non-naturally occurring agonist/activating agent that can bind a CSR activation component can be one or more of an anti-human CD3 monospecific tetrameric antibody complex, an anti-human CD2 monospecific tetrameric antibody complex, an anti-human CD28 monospecific tetrameric antibody complex, or a combination thereof. In some aspects, the non-naturally occurring agonist/activating agent that can bind an activation component can be selected from the group consisting of anti-CD2 monoclonal antibody, BTI-322 (Przepiorka et al., Blood 92(11):4066-4071, 1998) and humanized anti-CD2 monoclonal antibody clone AFC-TAB-104 (Siplizumab)(Bissonnette et al. Arch. Dermatol. Res. 301(6):429-442, 2009). In some aspects, administration of non-naturally occurring molecule capable of binding to the activation component of the CSR stimulates cell division of the modified cells in vivo. Thus, the present disclosure provides a method of stimulating cell division of a modified cell of the present disclosure in vivo by administering a non-naturally CSR agonist/activating agent for the activation component to a subject harboring the modified cell of the present disclosure.

[0185] In some aspects, the disease or disorder is a cell proliferation disease or disorder. In some aspects, the cell proliferation disease or disorder is cancer. The cancer can be a solid tumor cancer or a hematologic cancer. In some aspects, the solid tumor is prostate cancer or breast cancer. In preferred aspects, the prostate cancer is castrate-resistant prostate cancer. In some aspects, the hematologic cancer is multiple myeloma.

[0186] The modified cells or population of modified cells comprised within the disclosed compositions can be cultured in vitro or ex vivo prior to administration to a subject in need thereof. The modified cells can be allogenic modified cells or autologous modified cells. In some aspects, the cells are allogeneic modified T-cells or autologous modified T-cells. In some aspects, the cells are allogeneic modified CAR T-cells or autologous modified CAR T-cells. In some aspects, the cells are allogeneic modified CAR T-cells comprising a CSR of the present disclosure or autologous modified CAR T-cells comprising a CSR of the present disclosure.

[0187] The modified cell compositions or the compositions comprising populations of modified cells can be administered to the patient by any means known in the art. In some aspects, the composition is administered by systemic administration. In some aspects, the composition is administered by intravenous administration. The intravenous administration can be in an intravenous injection or an intravenous infusion. In some aspects, the composition is administered by local administration. In some aspects, the composition is administered by an intraspinal, intracerebroventricular, intraocular or intraosseous injection or infusion.

[0188] The therapeutically effective amount can be a single dose or multiple doses of modified cell compositions or the compositions comprising populations of modified cells. In some aspects, the therapeutically effective dose is a single dose and wherein the allogeneic cells of the composition engraft and/or persist for a sufficient time to treat the disease or disorder. In some aspects, the single dose is one of at least 2, 5, 10, 15, 20, 25, 30, 35, 40, 45, 50, 55, 60, 65, 70, 75, 80, 85, 90, 95, 100 or any number of doses in between that are manufactured simultaneously

[0189] In some aspects, the uses and methods for the treatment of a disease or disorder further provide that subjects do not develop graft v host (GvH) disease, host v graft (HvG) disease, or a combination thereof, following administration of modified cell compositions disclosed herein or the compositions comprising populations of modified cells disclosed herein.

[0190] Allogeneic cells of the disclosure are engineered to prevent adverse reactions to engraftment following administration to a subject. Allogeneic cells may be any type of cell.

[0191] In some embodiments of the composition and methods of the disclosure, allogeneic cells are stem cells. In some embodiments, allogeneic cells are derived from stem cells. Exemplary stem cells include, but are not limited to, embryonic stem cells, adult stem cells, induced pluripotent stem cells (iPSCs), multipotent stem cells, pluripotent stem cells, and hematopoetic stem cells (HSCs).

[0192] In some embodiments of the composition and methods of the disclosure, allogeneic cells are differentiated somatic cells.

[0193] In some embodiments of the composition and methods of the disclosure, allogeneic cells are immune cells. In some embodiments, allogeneic cells are T lymphocytes (T cells). In some embodiments, allogeneic cells are T cells that do not express one or more components of a naturally-occurring T-cell Receptor (TCR). In some embodiments, allogeneic cells are T cells that express a non-naturally occurring antigen receptor. Alternatively, or in addition, in some embodiments, allogeneic cells are T cells that express a non-naturally occurring Chimeric Stimulatory Receptor (CSR). In some embodiments, the non-naturally occurring CSR comprises or consists of a switch receptor. In some embodiments, the switch receptor comprises an extracellular domain, a transmembrane domain, and an intracellular domain. In some embodiments, the extracellular domain of the switch receptor binds to a TCR co-stimulatory molecule and transduces a signal to the intracellular space of the allogeneic cell that recapitulates TCR signaling or TCR co-stimulatory signaling.

### Chimeric Stimulatory Receptors (CSRs)

[0194] Adoptive cell compositions that are “universally” safe for administration to any patient requires a significant reduction or elimination of alloreactivity.

[0195] Towards this end, allogeneic cells of the disclosure are modified to interrupt expression or function of a T-cell Receptor (TCR) and/or a class of Major Histocompatibility Complex (MHC). The TCR mediates graft vs host (GvH) reactions whereas the MHC mediates host vs graft (HvG) reactions. In preferred embodiments, any expression and/or function of the TCR is eliminated in allogeneic cells of the disclosure to prevent T-cell mediated GvH that could cause death to the subject. Thus, in particularly preferred embodiments, the disclosure provides a pure TCR-negative allogeneic T-cell composition (e.g. each cell of the composition expresses at a level so low as to either be undetectable or non-existent).

[0196] In preferred embodiments, expression and/or function of MHC class I (MHC-I, specifically, HLA-A, HLA-B, and HLA-C) is reduced or eliminated in allogeneic cells of the disclosure to prevent HvG and, consequently, to improve engraftment of allogeneic cells of the disclosure in a subject. Improved engraftment of the allogeneic cells of the disclosure results in longer persistence of the cells, and, therefore, a larger therapeutic window for the subject. Specifically, in the allogeneic cells of the disclosure, expression and/or function of a structural element of MHC-I, Beta-2-Microglobulin (B2M), is reduced or eliminated in allogeneic cells of the disclosure.

[0197] The above strategies for generating an allogeneic cell of the disclosure induce further challenges. T Cell Receptor (TCR) knockout (KO) in T cells results in loss of expression of CD3-zeta (CD3z or CD3ζ), which is part of the TCR complex. The loss of CD3ζ in TCR-KO T-cells dramatically reduces the ability of optimally activating and expanding these cells using standard stimulation/activation reagents, including, but not limited to, agonist anti-CD3 mAb. When the expression or function of any one component of the TCR complex is interrupted, all components of the complex are lost, including TCR-alpha (TCRa), TCR-beta (TCRβ), CD3-gamma (CD3γ), CD3-epsilon (CD3ε), CD3-delta (CD3δ), and CD3-zeta (CD3ζ). Both CD3ε and CD3ζ are required for T cell activation and expansion. Agonist anti-CD3 mAbs typically recognize CD3ε and possibly another protein within the complex which, in turn, signals to CD3ζ. CD3ζ provides the primary stimulus for T cell activation (along with a secondary co-stimulatory signal) for optimal activation and expansion. Under normal conditions, full T-cell activation depends on the engagement of the TCR in conjunction with a second signal mediated by one or more co-stimulatory receptors (e.g. CD28, CD2, 4-1BBL, etc. . . . ) that boost the immune response. However, when the TCR is not present, T cell expansion is severely reduced when stimulated using standard activation/stimulation reagents, including agonist anti-CD3 mAb. In fact, T cell expansion is reduced to only 20-40% of the normal level of expansion when stimulated using standard activation/stimulation reagents, including agonist anti-CD3 mAb.

[0198] The disclosure provides a Chimeric Stimulatory Receptor (CSR) to deliver CD3z primary stimulation to allogeneic T cells in the absence of an endogenous TCR (and, consequently, an endogenous CD3ζ) when stimulated using standard activation/stimulation reagents, including agonist anti-CD3 mAb.

[0199] In the absence of an endogenous TCR, Chimeric Stimulatory Receptors (CSRs) of the disclosure provide a CD3ζ stimulus to enhance activation and expansion of allogeneic T cells. In other words, in the absence of an endogenous TCR, Chimeric Stimulatory Receptors (CSRs) of the disclosure rescue the allogeneic cell from an activation-based disadvantage when compared to non-allogeneic T-cells that express an endogenous TCR. In some embodiments, CSRs of the disclosure comprise an agonist mAb epitope extracellularly and a CD3ζ stimulatory domain intracellularly and, functionally, convert an anti-CD28 or anti-CD2 binding event on the surface into a CD3z signaling event in an allogeneic T cell modified to express the CSR. In some embodiments, a CSR comprises a wild type CD28 or CD2 protein and a CD3z intracellular stimulation domain, to produce CD28z CSR and CD2z CSR, respectively. In preferred embodiments, CD28z CSR and/or CD2z CSR further express a non-naturally occurring antigen receptor and/or a therapeutic protein. In preferred embodiments, the non-naturally occurring antigen receptor comprises a Chimeric Antigen Receptor.

[0200] The data provided herein demonstrate that modified allogeneic T cells of the disclosure comprising/expressing a CSR of the disclosure improve or rescue, the expansion of allogeneic T cells that no longer express endogenous TCR when compared to those cells that do not comprise/express a CSR of the disclosure.

[0201] A wildtype/natural human CD28 protein (NCBI: CD28_HUMAN; UniProt/Swiss-Prot: P10747.1) comprises or consists of the amino acid sequence of:

(SEQ ID NO: 17096)
MLRLLLALNLFPSIQVTGNKILVKQSPMLVAYDNAVNLSCKYSYNLFSRE
FRASLHKGLDSAVEVCVVYGNYSQQLQVYSKTGFNCDGKLGNESVTFYLQ
NLYVNQTDIYFCKIEVMYPPPYLDNEKSNGTIIHVKGKHLCPSPLFPGPS
KPFWVLVVVGGVLACYSLLVTVAFIIFWVRSKRSRLLHSDYMNMTPRRPG
PTRKHYQPYAPPRDFAAYRS

[0202] A nucleotide sequence encoding wildtype/natural CD28 protein (NCBI: CCDS2361.1) comprises or consists of the nucleotide sequence of:

(SEQ ID NO: 17097)
ATGCTCAGGCTGCTCTTGGCTCTCAACTTATTCCCTTCAATTCAAGTAAC
AGGAAACAAGATTTTGGTGAAGCAGTCGCCCATGCTTGTAGCGTACGACA
ATGCGGTCAACCTTAGCTGCAAGTATTCCTACAATCTCTTCTCAAGGGAG
TTCCGGGCATCCCTTCACAAAGGACTGGATAGTGCTGTGGAAGTCTGTGT
TGTATATGGGAATTACTCCCAGCAGCTTCAGGTTTACTCAAAACGGGGTT
CAACTGTGATGGGAAATTGGGCAATGAATCAGTGACATTCTACCTCCAGA
ATTTGTATGTTAACCAAACAGATATTTACTTCTGCAAAATTGAAGTTATG
TATCCTCCTCCTTACCTAGACAATGAGAAGAGCAATGGAACCATTATCCA
TGTGAAAGGGAAACACCTTTGTCCAAGTCCCCTATTTCCCGGACCTTCTA
AGCCCTTTTGGGTGCTGGTGGTGGTTGGTGGAGTCCTGGCTTGCTATAGC
TTGCTAGTAACAGTGGCCTTTATTATTTTCTGGGTGAGGAGTAAGAGGAG
CAGGCTCCTGCACAGTGACTACATGAACATGACTCCCCGCCGCCCCGGGC
CCACCCGCAAGCATTACCAGCCCTATGCCCCACCACGCGACTTCGCAGCC
TATCGCTCCTGA

[0203] An exemplary CSR CD28z protein of the disclosure comprises or consists of the amino acid sequence of (CD28 Signal peptide, CD28 Extracellular Domain, CD28 Transmembrane domain, CD28 Cytoplasmic Domain, CD3z Intracellular Domain):

(SEQ ID NO: 17060)
MLRLLLALNLFPSIQVTGNKILVKQSPMLVAYDNAVNLSCKYSYNLFSRE
FRASLHKGLDSAVEVCVVYGNYSQQLQVYSKTGFNCDGKLGNESVTFYLQ
NLYVNQTDIYFCKIEVMYPPPYLDNEKSNGTIIHVKGKHLCPSPLFPGPS
KPFWVLVVVGGVLACYSLLVTVAFIIFWV
RVKFSRSADAPAYKQGQNQLYN
ELNLGRREEYDVLDKRRGRDPEMGGKPRRKNPQEGLYNELQKDKMAEAYS
EIGMKGERRRGKGHDGLYQGLSTATKDTYDALHMQALPPR

### CD28 Signal Peptide:

(SEQ ID NO: 17098)
MLRLLLALNLFPSIQVTG

### CD28 Extracellular Domain:

(SEQ ID NO: 17099)
NKILVKQSPMLVAYDNAVNLSCKYSYNLFSREFRASLHKGLDSAVEVCVV
YGNYSQQLQVYSKTGFNCDGKLGNESVTFYLQNLYVNQTDIYFCKIEVMY
PPPYLDNEKSNGTIIHVKGKHLCPSPLFPGPSKP

### CD28 Transmembrane Domain:

(SEQ ID NO: 17100)
FWVLVVVGGVLACYSLLVTVAFIIFWV

### CD28 Cytoplasmic Domain:

(SEQ ID NO: 17101)
RSKRSRLLHSDYMNMTPRRPGPTRKHYQPYAPPRDFAAYRS

### CD3z Intracellular Domain:

(SEQ ID NO: 17102)
RVKFSRSADAPAYKQGQNQLYNELNLGRREEYDVLDKRRGRDPEMGGKPR
RKNPQEGLYNELQKDKMAEAYSEIGMKGERRRGKGHDGLYQGLSTATKDT
YDALHMQALPPR

[0209] An exemplary nucleotide sequence encoding a CSR CD28z protein of the disclosure comprises or consists of the nucleotide sequence of (CD28 Signal peptide, CD28 Extracellular Domain, CD28 Transmembrane domain, CD28 Cytoplasmic Domain, CD3z Intracellular Domain):

(SEQ ID NO: 17061)
ATGCTGAGACTGCTGCTGGCCCTGAATCTGTTCCCCAGCATCCAAGTGAC
CGGCAACAAGATCCTGGTCAAGCAGAGCCCTATGCTGGTGGCCTACGACA
ACGCCGTGAACCTGAGCTGCAAGTACAGCTACAACCTGTTCAGCAGAGAG
TTCCGGGCCAGCCTGCACAAAGGACTGGATTCTGCTGTGGAAGTGTGCGT
GGTGTACGGCAACTACAGCCAGCAGCTGCAGGTCTACAGCAAGACCGGCT
TCAACTGCGACGGCAAGCTGGGCAATGAGAGCGTGACCTTCTACCTGCAA
ACCTGTACGTGAACCAGACCGACATCTATTTCTGCAAGATCGAAGTGATG
TACCCGCCTCCTTACCTGGACAACGAGAAGTCCAACGGCACCATCATCCA
CGTGAAGGGCAAGCACCTGTGTCCTTCTGGACTGTTGGCCCGACCTAGCA
AGCCTTTCTGGGTGCTCGTTGTTGTTGGCGGCGTGCTGGCCTGTTATAGC
CTGCTGGTTACAGTGGCCTTCATCATCTTTTGGGTC

AGAGTGAAGTTCTCCAGATCCGCCGATGCTCCCGCCTATAAGCAGGGCCA
GAACCAGCTGTACAACGAGCTGAACCTGGGGAGAAGAGAAGAGTACGATG
TGCTGGACAAGCGGAGAGGCAGAGATCCTGAGATGGGCGGCAAGCCCAGA
CGGAAGAATCCTCAAGAGGGCCTGTACAATGAACTGCAGAAAGACAAGAT
GGCCGAGGCCTACAGCGAGATCGGAATGAAGGGCGAGCGCAGAAGAGGCA
AGGGACACGATGGACTGTACCAGGCCTGAGCACCGCCACCAAGGATACCT
ATGATGCCCTGCACATGCAGGCCCTGCCTCCAAGA

### CD28 Signal Peptide:

(SEQ ID NO: 17103)
ATGCTGAGACTGCTGCTGGCCCTGAATCTGTTCCCCAGCATCCAAGTGAC
CGGC

### CD28 Extracellular Domain:

(SEQ ID NO: 17104)
AACAAGATCCTGGTCAAGCAGAGCCCTATGCTGGTGGCCTACGACAACGC
CGTGAACCTGAGCTGCAAGTACAGCTACAACCTGTTCAGCAGAGAGTTCC
GGGCCAGCCTGCACAAAGGACTGGATTCTGCTGTGGAAGTGTGCGTGGTG
TACGGCAACTACAGCCAGCAGCTGCAGGTCTACAGCAAGACCGGCTTCAA
CTGCGACGGCAAGCTGGGCAATGAGAGCGTGACCTTCTACCTGCAAAACC
TGTACGTGAACCAGACCGACATCTATTTCTGCAAGATCGAAGTGATGTAC
CCGCCTCCTTACCTGGACAACGAGAAGTCCAACGGCACCATCATCCACGT
GAAGGGCAAGCACCTGTGTCCTTCTCCACTGTTCCCCGGACCTAGCAAGC
CT

### CD28 Transmembrane Domain:

(SEQ ID NO: 17105)
TTCTGGGTGCTCGTTCTTGTTGGCGGCCTGCTGGCCTGTTATAGCCTCCT
GCTTACAGTGGCCTTCATCATCTTTTGGGTC

### CD28 Cytoplasmic Domain:

(SEQ ID NO: 17106)
CGAAGCAAGCGGAGCCGGCTGCTGCACAGCGACTACATGAACATGACCCC
TAGACGGCCCGGACCAACCAGAAAGCACTACCAGCCTTACGCTCCTCCTA
GAGACTTCGCCGCCTACCGGTCC

### CD3z Intracellular Domain:

(SEQ ID NO: 17107)
AGAGTGAAGTTCTCCAGATCCGCCGATGCTCCCGCCTATAAGCAGGGCCA
GAACCAGCTGTACAACGAGCTGAACCTGGGGAGAAGAGAAGAGTACGATG
TGCTGGACAAGCGGAGAGGCAGAGATCCTGAGATGGGCGGCAAGCCCAGA
CGGAAGAATCCTCAAGAGGGCCTGTACAATGAACTGCAGAAAGACAAGAT
GGCCGAGGCCTACAGCGAGATCGGAATGAAGGGCGAGCGCAGAAGAGGCA
AGGGACACGATGGACTGTACCAGGGCCTGAGCACCGCCACCAAGGATACC
TATGATGCCCTGCACATGCAGGCCCTGCCTCCAAGA

[0215] A wildtype/natural human CD2 protein (NCBI: CD2_HUMAN; UniProt/Swiss-Prot: P06729.2) comprises or consists of the amino acid sequence of:

(SEQ ID NO: 17108)
MSFPCKFVASFLLIFNVSSKGAVSKEITNALETWGALGQDINLDIPSFQM
SDDIDDIKWEKTSDKKKIAQFRKEKETFKEKDTYKTFKNGTLKIKHLKTD
DQDIYKVSIYDTKGKNVLEKIFDLKIQERVSKPKISWTCINTTLTCEVMN
GTDPELNLYQDGKHLKLSQRVITHKWTTSLSAKFKCTAGNKVSKESSVEP
VSCPEKGLDIYLIIGICGGGSLLMVFVALLVFYITKRKKQRSRRNDEELE
TRAHRVATEERGRKPHQIPASTPQNPATSQHPPPPPPGHRSQAPSHRPPP
PGHRVQHQPQKRPPAPSGTQVHQQKGPPLPRPRVQPKPPHGAAENSLSPS
SN

[0216] A nucleotide sequence encoding wildtype/natural CD2 protein (NCBI: CCDS889.1) comprises or consists of the nucleotide sequence of:

(SEQ ID NO: 17109)
ATGAGCTTTCCATGTAAATTTGTAGCCAGCTTCCTTCTGATTTTCAATGT
TTCTTCCAAAGGTGCAGTCTCCAAAGAGATTACGAATGCCTTGGAAACCT
GGGGTGCCTTGGGTCAGGACATCAACTTGGACATTCCTAGTTTTCAAATG
AGTGATGATATTGACGATATAAAATGGGAAAAAACTTCAGACAAGAAAAA
GATTGCACAATTCAGAAAAGAGAAAGAGACTTTCAAGGAAAAAGATACAT
ATAAGCTATTTAAAAATGGAACTCTGAAAATTAAGCATCTGAAGACCGAT
GATCAGGATATCTACAAGGTATCAATATATGATACAAAAGGAAAAAATGT
GTTGGAAAAAATATTTGATTTGAAGATTCAAGAGAGGGTCTCAAAACCAA
AGATCTCCTGGACTTGTATCAACACAACCCTGACCTGTGAGGTAATGAAT
GGAACTGACCCCGAATTAAACCTGTATCAAGATGGGAAACATCTAAAACT
TTCTCAGAGGGTCATCACACACAAGTGGACCACCAGCCTGAGTGCAAAAT
TCAAGTGCACAGCAGGGAACAAAGTCAGCAAGGAATCCAGTGTCGAGCCT
GTCAGCTGTCCAGAGAAAGGTCTGGACATCTATCTCATCATTGGCATATG
TGGAGGAGGCAGCCTCTTGATGGTCTTTGTGGCACTGCTCGTTTTCTATA
TCACCAAAAGGAAAAAACAGAGGAGTCGGAGAAATGATGAGGAGCTGGAG
ACAAGAGCCCACAGAGTAGCTACTGAAGAAAGGGGCCGGAAGCCCCACCA
AATTCCAGCTTCAACCCCTCAGAATCCAGCAACTTCCCAACATCCTCCTC
CACCACCTGGTCATCGTTCCCAGGCACCTAGTCATCGTCCCCCGCCTCCT
GGACACCGTGTTCAGCACCAGCCTCAGAAGAGGCCTCCTGCTCCGTCGGG
CACACAAGTTCACCAGCAGAAAGGCCCGCCCCTCCCCAGACCTCGAGTTC
AGCCAAAACCTCCCCATGGGGCAGCAGAAAACTCATTGTCCCCTTCCTCT
AATTAA

[0217] An exemplary CSR CD2z protein of the disclosure comprises or consists of the amino acid sequence of (CD2 Signal peptide, CD2 Extracellular Domain, CD2 Transmembrane domain, CD2 Cytoplasmic Domain, CD3z Intracellular Domain):

(SEQ ID NO: 17062)
MSFPCKFVASFLLIFNVSSKGAVSKEITNALETWGALGQDINLDIPSFQM
SDDIDDIKWEKTSDKKKIAQFRKEKETFKEKDTYKLFKNGTLKIKHLKTD
DQDIYKVSIYDTKGKNVLEKIFDLKIQERVSKPKISWTCINTTLTCEVMN
GTDPELNLYQDGKHLKLSQRVITHKWTTSLSAKFKCTAGNKVSKESSVEP
VSCPEKGLDIYLIIGICGGGSLLMVFVALLVFYIT

RVKFSRSADAPAYKQGQN
QLYNELNLGRREEYDVLDKRRGRDPEMGGKPRRKNPQEGLYNELQKDKMA
EAYSEIGMKGERRRGKGHDGLYQGLSTATKDTYDALHMQALPPR

### CD2 Signal Peptide:

(SEQ ID NO: 17110)
MSFPCKEVASFLLIFNVSSKGAVS

### CD2 Extracellular Domain:

(SEQ ID NO: 17111)
KEITNALETWGALGQDINLDIPSFQMSDDIDDIKTNEKTSDKIKKIAQFR
KEKETFKEKDTYKLFKNGTLKIKHLKTDDQDIYKVSIYDTKGKNVLEKIF
DLKIQERVSKPKISWTCINTTLTCEVMNGTDPELNLYQDGKHLKLSQRVI
THKWTTSLSAKFKCTAGNKVSKESSVEPVSCPEKGLD

### CD2 Transmembrane Domain:

(SEQ ID NO: 17112)
IYLIIGICGGGSLLMVFVALLVFYIT

### CD2 Cytoplasmic Domain:

(SEQ ID NO: 17113)
KRKKQRSRRNDEELETRAERVATEERGRKPHQIPASTPQNPATSQHPPPP
PGHRSQAPSHRPPPPGHRVQHQPQKRPPAPSGTQVHQQKGPPLPRPRVQP
KPPHGAAENSLSPSSN

### CD3z Intracellular Domain:

(SEQ ID NO: 17102)
RVKFSRSADAPAYKQGQNQLYNELNLGRREEYDVLDKRRGRDPEMGGKPR
RKNPQEGLYNELQKDKMAEAYSEIGMKGERRRGKGHDGLYQGLSTATKDT
YDALHMQALPPR

[0223] The present disclosure provides a non-naturally occurring CSR CD2 protein comprising, consisting essential of, or consisting of an amino acid sequence at least 80%, at least 85%, at least 90%, at least 91%, at least 92%, at least 93%, at least 94%, at least 95%, at least 96%, at least 97%, at least 98%, at least 99% or 100% identical to SEQ ID NO:17062. The present disclosure provides a CD2 signal peptide comprising, consisting essential of, or consisting of an amino acid sequence at least 80%, at least 85%, at least 90%, at least 91%, at least 92%, at least 93%, at least 94%, at least 95%, at least 96%, at least 97%, at least 98%, at least 99% or 100% identical to SEQ ID NO:17110. The present disclosure provides a CD2 extracellular domain comprising, consisting essential of, or consisting of an amino acid sequence at least 80%, at least 85%, at least 90%, at least 91%, at least 92%, at least 93%, at least 94%, at least 95%, at least 96%, at least 97%, at least 98%, at least 99% or 100% identical to SEQ ID NO:17111. The present disclosure provides a CD2 transmembrande domain comprising, consisting essential of, or consisting of an amino acid sequence at least 80%, at least 85%, at least 90%, at least 91%, at least 92%, at least 93%, at least 94%, at least 95%, at least 96%, at least 97%, at least 98%, at least 99% or 100% identical to SEQ ID NO:17112. The present disclosure provides a CD2 cytoplasmic domain comprising, consisting essential of, or consisting of an amino acid sequence at least 80%, at least 85%, at least 90%, at least 91%, at least 92%, at least 93%, at least 94%, at least 95%, at least 96%, at least 97%, at least 98%, at least 99% or 100% identical to SEQ ID NO:17113. The present disclosure provides a CD3z intracellular domain comprising, consisting essential of, or consisting of an amino acid sequence at least 80%, at least 85%, at least 90%, at least 91%, at least 92%, at least 93%, at least 94%, at least 95%, at least 96%, at least 97%, at least 98%, at least 99% or 100% identical to SEQ ID NO:17102.

[0224] An exemplary nucleotide sequence encoding a CSR CD2z protein of the disclosure comprises or consists of the amino acid sequence of (CD2 Signal peptide, CD2 Extracellular Domain, CD2 Transmembrane domain CD2 Cytoplasmic Domain, CD3z Intracellular Domain):

(SEQ ID NO: 17063)
ATGAGCTTCCCTTGCAAGTTCGTGGCCAGCTTCCTGCTGATCTTCAACGT
GTCCTCTAAGGGCGCCGTGTCCAAAGAGATCACAAACGCCCTGGAAACCT
GGGGAGCCCTCGGCCAGGATATTAACCTGGACATCCCCAGCTTCCAGATG
AGCGACGACATCGATGACATCAAGTGGGAGAAAACCAGCGACAAGAAGAA
GATCGCCCAGTTCCGGAAAGAGAAAGAGACATTCAAAGAGAAGGACACCT
ACAAGCTGTTCAAGAACGGCACCCTGAAGATCAAGCACCTGAAAACCGAC
GACCAGGACATCTATAAGGTGTCCATCTACGACACCAAGGGCAAGAACGT
GCTGGAAAAGATCTTCGACCTCAAGATCCAAGAGCGGGTGTCCAAGCCTA
AGATCAGCTGGACCTGCATCAACACCACACTGACCTGCGAAGTGATGAAC
GGCACAGACCCCGAGCTGAACCTGTACCAGGATGGCAAACACCTGAAGCT
GAGCCAGCGCGTGATCACCCACAAGTGGACAACAAGCCTGAGCGCCAAGT
TCAAGTGCACCGCCGGAAACAAAGTGTCTAAAGAGTCCAGCGTCGAGCCC
GTGTCTTGCCCTGAAAAAGGACTGGACATCTACCTGATCATCGGCATCTG
TGGCGGCGGAAGCCTGCTGATGGTGTTTGTGGCTCTGCTGGTGTTCTACA
TCACC

AGAGTGAAGTTCAGCCGCAGCGCCGATGCTCCTGCCTATAAGCAGGGACA
GAACCAGCTGTACAACGAGCTGAATCTGGGGCGCAGAGAAGAGTACGATG
TGCTGGACAAGCGGAGAGGCAGAGATCCTGAGATGGGCGGCAAGCCCAGA
CGGAAGAATCCTCAAGAGGGCCTGTATAATGAGCTGCAGAAAGACAAGAT
GGCCGAGGCCTACAGCGAGATCGGAATGAAGGGCGAGCGCAGAAGAGGGL
AGGGACACGATGGACTGTATCAGGGCCTGAGCACCGCCACCAAGGATACC
TATGATGCCCTGCACATGCAGGCCCTGCCTAAGA

### CD2 Signal Peptide:

(SEQ ID NO: 17114)
ATGAGCTTCCCTTGCAAGTTCGTGGCCAGCTTCCTGCTGATCTTCAACGT
CTCCTCTAAGGGCGCCGTGTCC

### CD2 Extracellular Domain:

(SEQ ID NO: 17115)
AAAGAGATCACAAACGCCCTGGAAACCTGGGGAGCCCTCGGCCAGGATAT
TAACCTGGACATCCCCAGCTTCCAGATGAGCGACGACATCGATGACATCA
AGTGGGAGAAAACCAGCGACAAGAAGAAGATCGCCCAGTTCCGGAAAGAG
AAAGAGACATTCAAAGAGAAGGACACCTACAAGCTGTTCAAGAACGGCAC
CCTGAACATCAAGCACCTGAAAACCGACGACCAGGACATCTATAAGGTGT
CCATCTACGACACCAAGGGCAAGAACGTGCTGGAAAAGATCTTCGACCTC
AAGATCCAAGAGCGGGTGTCCAAGCCTAAGATCAGCTGGACCTGCATCAA
CACCACACTGACCTGCGAAGTGATGAACGGCACAGACCCCGAGCTGAACC
TCTACCAGGATGGCAAACACCTGAAGCTGAGCCAGCGCGTGATCACCCAC
AAGTCGACAACAAGCCTGAGCGCCAAGTTCAAGTGCACCGCCGGAAACAA
AGTGTCTAAAGAGTCCAGCGTCGAGCCCGTGTCTTGCCCTGAAAAAGGAC
TGGAC

### CD2 Transmembrane Domain:

(SEQ ID NO: 17116)
ATCTACCTGATCATCGGCATCTGTGGCGGCGGAAGCCTGCTGATGGTGTT
TGTGGCTCTGCTGGTGTTCTACATCACC

### CD2 Cytoplasmic Domain:

(SEQ ID NO: 17117)
AAGCGGAAGAAGCAGCGGAGCAGACGGAACGACGAGGAACTGGAAACACG
GGCCCATAGAGTGGCCACCGAGaAAAGAGGaAaAAAGCCCCACCAGATTC
CAGCCAGCACACCCCAGAATCCTGCCACCTCTCAACACCCTCCACCTCCA
CCTGGACACAGATCTCAGGCCCCATCTCACAGACCTCCACCACCTGGTCA
TCGGGTGCAGCACCAGCCTCAAAALGACCTCCTGCTCCTAGCGGCACACA
GGTGCACCAGCAAAAAGGACCTCCACTGCCTCGGCCTAGACTGCAGCCTA
AACCTCCTCATGGCGCCGCTGACAACAGCCTGTCTCCAAGCACCAAC

### CD3z Intracellular Domain:

(SEQ ID NO: 17107)
AGAGTGAAGTTCAGCCGCAGCGCCGATGCTCCTGCCTATAAGCAGGGACA
GAACCAGCTGTACAACGAGCTGAATCTGGGGCGCAGAGAAGAGTACGATG
TGCTGGACAAGCGGAGAGGCAGAGATCCTGAGATGGGCGGCAAGCCCAGA
CGGAAGAATCCTCAAGAGGGCCTGTATAATGAGCTGCAGAAAGACAAGAT
GGCCGAGGCCTACAGCGAGATCGGAATGAAGGGCGAGCGCAGAAGAGGCA
AGGGACACGATGGACTGTATCAGGGCCTGAGCACCGCCACCAAGGATACC
TATGATGCCCTGCACATGCAGGCCCTGCCTCCAAGA

[0230] An exemplary mutant CSR CD2z-D111H protein of the disclosure comprises or consists of the amino acid sequence of (CD2 Signal peptide, CD2 Extracellular domain with D111H mutation within the CD2 Extracellular domain, CD2 Transmembrane domain, CD2 Cytoplasmic domain, CD3z Intracellular domain):

(SEQ ID NO: 17118)
MSFPCKFVASFLLIFNVSSKGAVSKEITNALETWGALGQDINLDIPSFQM
SDDIDDIKWEKTSDKKKIAQFRKEKETFKEKDTYKLFKNGTLMIKHLKTD
DQDIYKVSIYHTKGKNVLEKIFDLKIQERVSKPKISWTCINTTLTCEVMN
GTDPELNLYQDGKHLKLSQRVITHKWTTSLSAKFKCTAGNKYSKESSVEP
VSCPEKGLDIYLIIGICGGGSLLMVEVALLVFYIT

RVKFSRADAPAYKQGQNQ
LYNELNLGRREEYDVLDKRRGRDPEMGGKPRRKNPQEGLYNELQKDKMAE
AYSEIGMKGERRRGKGHDGLYQGLSTATKDTYDALHMQALPPR

### CD2 Signal Peptide:

(SEQ ID NO: 17110)
MSFPCKFVASFLLIFNVSSKGAVS

CD2 Extracellular domain with D111H mutation within the CD2 Extracellular domain:

(SEQ ID NO: 17119)
KEITNALETWGALGQDINLDIPSFQMSDDIDDIKWEKTSDKKKIAQFRKE
KETFKEKDTYKLFKNGTLKIKHLKTDDQDIYKVSIYHTKGKNVLEKIFDL
KIQERVSKPKISWTCINTTLTCEVMNGTDPELNLYQDGKHLKLSQRVITH
KWTTSLSAKFKCTAGNKVSKESSVEPVSCPEKGL

### CD2 Transmembrane Domain:

(SEQ ID NO: 17112)
IYLIIGICGGGSLLMVFVALLVFYIT

### CD2 Cytoplasmic Domain:

(SEQ ID NO: 17113)
KRKKQRSRRNDEELETRAHRVATEERGRKPHQIPASTPQNPATSQHPPPP
PGHRSQAPSHRPPPPGHRVQHQPQKRPPAPSGTQVHQQKGPPLPRPRVQP
KPPHGAAENSLSPSSN

### CD3z Intracellular Domain:

(SEQ ID NO: 17102)
RVKFSRSADAPAYKQGQNQLYNELNLGRREEYDVLDKRRGRDPEMGGKPR
RKNPQEGLYNELQKDKMAEAYSEIGMKGERRRGKGHDGLYQGLSTATKDT
YDALHMQALPPR

[0235] The present disclosure provides a non-naturally occurring CSR CD2 protein comprising, consisting essential of, or consisting of an amino acid sequence at least 80%, at least 85%, at least 90%, at least 91%, at least 92%, at least 93%, at least 94%, at least 95%, at least 96%, at least 97%, at least 98%, at least 99% or 100% identical to SEQ ID NO:17118. The present disclosure provides a CD2 extracellular domain comprising, consisting essential of, or consisting of an amino acid sequence at least 80%, at least 85%, at least 90%, at least 91%, at least 92%, at least 93%, at least 94%, at least 95%, at least 96%, at least 97%, at least 98%, at least 99% or 100% identical to SEQ ID NO:17119.

[0236] An exemplary nucleotide sequence encoding a mutant CSR CD2z-D111H protein of the disclosure comprises or consists of the amino acid sequence of (CD2 Signal peptide, CD2 Extracellular domain with D111H mutation within the CD2 Extracellular domain, CD2 Transmembrane domain, CD2 Cytoplasmic domain, CD3z Intracellular domain):

(SEQ ID NO: 17120)
ATGAGCTTCCCTTGCAAGTTCGTGGCCAGCTTCCTGCTGATCTTCAACGT
GTCCTCTAAGGGCGCCGTGTCCAAAGAGATCACAAACGCCCTGGAAACCT
GGGGAGCCCTCGGCCAGGATATTAACCTGGACATCCCCAGCTTCCAGATG
AGCGACGACATCGATGACATCAAGTGGGAGAAAACCAGCGACAAGAAGAA
GATCGCCCAGTTCCGGAAAGAGAAAGAGACATTCAAAGAGAAGGACACCT
ACAAGCTGTTCAAGAACGGCACCCTGAAGATCAAGCACCTGAAAACCGAC
GACCAGGACATCTATAAGGTGTCCATCTACCACACCAAGGGCAAGAACGT
GCTGGAAAAGATCTTCGACCTCAAGATCCAAGAGCGGGTGTCCAAGCCTA
AGATCAGCTGGACCTGCATCAACACCACACTGACCTGCAAGTGATGAACG
GCACAGACCCCGAGCTGAACCTGTACCAGGATGGCAAACACCTGAAGCTG
AGCCAGCGCGTGATCACCCACAAGTGGACAACAAGCCTGAGCGCCAAGTT
CAAGTGCACCGCCGGAAACAAAGTGTCTAAAGAGTCCAGCGTCGAGCCCG
TGTCTTGCCCTGAAAAAGGACTGGACATCTACCTCATCATCGCCATCTGT
CGCGCCGGAAGCCTGCTGATCGTGTTTGTGGCTCTGCTGGTGTTCTACAT
CACC

AGAGTGAAGTTCAGCCGCAGCGCCGATGCTCCTCGCTATAAGCAGGGACA
GAACCAGCTGTACAACGAGCTGAATCTGGGGCGCAGAGAAGAGTACGATG
TGCTGGACAAGCGGAGAGGCAGAGATCCTGAGATGGGCGGCAAGCCCAGA
CGGAAGAATCCTCAAGAGGGCCTGTATAATGAGCTGCAGAAAGACAAGAT
GGCCGAGGCCTACAGCGAGATCGGAATGAAGGGCGAGCGCAGAAGAGGCA
AGGGACACGATGGACTGTATCAGGGCCTGAGCACCGCCACCAAGGATACC
TATGATCCCCTGCACATGCAGGCCCTGCCTCCAAGA

### CD2 Signal Peptide:

(SEQ ID NO: 17114)
ATGAGCTTCCCTTGCAAGTTCGTGGCCAGCTTCCTGCTGATCTTCAACGT
GTCCTCTAAGGGCGCCGTGTCC

CD2 Extracellular Domain with D111H Mutation within, the CD12 Extracellular Domain:

(SEQ ID NO: 17121)
AAAGAGATCACAAACGCCCTGGAAACCTGGGGAGCCCTCGGCCAGGATAT
TAACCTGGACATCCCCAGCTTCCAGATGAGCGACGACATCGATGACATCA
AGTGGGAGAAAACCAGCGACAAGAAGAAGATCGCCCAGTTCCGGAAAGAG
AAAGAGACATTCAAAGAGAAGGACACCTACAAGCTGTTCAAGAACGGCAC
CCTGAAGATCAAGCACCTGAAAACCGACGACCAGGACATCTATAAGGTGT
CCATCTACCACACCAAGGGCAAGAACGTGCTGGAAAAGATCTTCGACCTC
AAGATCCAAGAGCGGGTGTCCAAGCCTAAGATCAGCTGGACCTGCATCAA
CACCACACTGACCTGCGAAGTGATGAACGGCACAGACCCCGAGCTGAACC
TGTACCAGGATGGCAAACACCTGAAGCTGAGCCAGCGCGTGATCACCCAC
AAGTGGACAACAAGCCTGAGCGCCAAGTTCAAGTGCACCGCCGGAAACAA
AGTGTCTAAAGAGTCCAGCGTCGAGCCCGTGTCTTGCCCTGAAAAAGGAC
TGGAC

### CD2 Transmembrane Domain:

(SEQ ID NO: 17116)
ATCTACCTGATCATCGGCATCTGTGGCGGCGGAAGCCTGCTGATGGTGTT
TGTGGTCTGCTGGTGTTCTACATCACC

### CD2 Cytoplasmic Domain:

(SEQ ID NO: 17117)
AAGCGGAAGAAGCAGCGGAGCAGACGGAACGACGAGGAACTGGAAACACG
GGCCCATAGAGTGGCCACCGAGGAAAGAGGCAGAAAGCCCCACCAGATTC
CAGCCAGCACACCCCAGAATCCTGCCACCTCTCAACACCCTCCACCTCCA
CCTGGACACAGATCTCAGGCCCCATCTCACAGACCTCCACCACCTGGTCA
TCGGGTGCAGCACCAGCCTCAGAAAAGACCTCCTGCTCCTAGCGGCACAC
AGGTGCACCAGCAAAAAGGACCTCCACTGCCTCGGCCTAGAGTGCAGCCT
AAACCTCCTCATGGCGCCGCTGAGAACAGCCTGTCTCCAAGCAGCAAC

### CD3z Intracellular Domain:

(SEQ ID NO: 17107)
AGAGTGAAGTTCAGCCGCAGCGCCGATGCTCCTGCCTATAAGCAGGGACA
GAACCAGCTGTACAACGAGCTGAATCTGGGGCGCAGAGAAGAGTACGATG
TGCTGGACAAGCGGAGAGGCAGAGATCCTGAGATGGGCGGCAAGCCCAGA
CGGAAGAATCCTCAAGAGGGCCTGTATAATGAGCTGCAGAAAGACAAGAT
GGCCGAGGCCTACAGCGAGATCGGAATGAAGGGCGAGCGCAGAAGAGGCA
AGGGACACGATGGACTGTATCAGGGCCTGAGCACCGCCACCAAGGATACC
TATGATGCCCTGCACATGCAGGCCCTGCCTCCAAGA

### Endogenous TCR Knock-Out

[0241] Gene editing compositions of the disclosure, including but not limited to, RNA-guided fusion proteins comprising dCas9-Clo051, may be used to target and decrease or eliminate expression of an endogenous T-cell receptor of an allogeneic cell of the disclosure. In preferred embodiments, the gene editing compositions of the disclosure target and delete a gene, a portion of a gene, or a regulatory element of a gene (such as a promoter) encoding an endogenous T-cell receptor of an allogeneic cell of the disclosure.

[0242] Nonlimiting examples of primers (including a T7 promoter, genome target sequence, and gRNA scaffold) for the generation of guide RNA (gRNA) templates for targeting and deleting TCR-alpha (TCR-α) are provided in Table 10.

TABLE 10
Target sequences underlined

| Name | Sequence | SEQ ID NO: |
|---|---|---|
| TCRa- | TAATACGACTCACTATA GCTGGTACACGGCAGGGTCA | 16821 |
| gRNA-WT | GTTTTAGAGCTAGAAATAG | |
| 1 | | |
| TCRa- | TAATACGACTCACTATA GAGAATCAAAATCGGTGAAT | 16822 |
| gRNA-WT | | |
| 2 | | |
| TCRa- | TAATACGACTCACTATA GTGCTAGACATGAGGTCTA | 16823 |
| gRNA--WT | | |
| 4 | | |
| TCRa- | TAATACGACTCACTATAG GCTGGTACACGGCAGGGTCA | 16824 |
| gRNA--WT | | |
| 1-2G | | |
| TCRa- | TAATACGACTCACTATA GAGAATCAAAATCGGTGAAT | 16825 |
| gRNA-WT | GTTTTAGAGCTAGAAATAG | |
| 2 | | |
| TCRa- | TAATACGACTCACTATA GGATTTAGAGTCTCTCAGC | 16826 |
| gRNA-WT | GTTTTAGAGCTAGAAATAG | |
| 3 | | |
| TCRa- | TAATACGACTCACTATA GTGCTAGACATGAGGTCTA | 16827 |
| gRNA-WT | GTTTTAGAGCTAGAAATAG | |
| 4 | | |
| TCRa- | TAATACGACTCACTATA GACACCTTCTTCCCCAGCCC | 16828 |
| gRNA-WT | GTTTTAGAGCTAGAAATAG | |
| 5 | | |
| TCRa- | TAATACGACTCACTATA g tggaataatgctgttgttga | 16829 |
| gRNA- | GTTTTAGAGCTAGAAATAG | |
| NG1-L | | |
| TCRa- | TAATACGACTCACTATA g catcacaggaactttctaaa | 16830 |
| gRNA- | GTTTTAGAGCTAGAAATAG | |
| NG2-L | | |
| TCRa- | TAATACGACTCACTATA gtaaaaccaagaggccacag | 16831 |
| gRNA- | GTTTTAGAGCTAGAAATAG | |
| NG3-L | | |
| TCRa- | TAATACGACTCACTATA g acccggccactttcaggagg | 16832 |
| gRNA- | GTTTTAGAGCTAGAAATAG | |
| NG4-L | | |
| TCRa- | TAATACGACTCACTATA gattaaacccggccactttc | 16833 |
| gRNA- | GTTTTAGAGCTAGAAATAG | |
| NG5-L | | |
| TCRa- | TAATACGACTCACTATA g agcccaggtaagggcagctt | 16834 |
| gRNA- | GTTTTAGAGCTAGAAATAG | |
| NG1-R | | |
| TCRa- | TAATACGACTCACTATA g agctttgaaacaggtaagac | 16835 |
| gRNA- | GTTTTAGAGCTAGAAATAG | |
| NG2-1-R | | |
| TCRa- | TAATACGACTCACTATA gctttgaaacaggtaagaca | 16836 |
| gRNA- | GTTTTAGAGCTAGAAATAG | |
| NG2-2-R | | |
| TCRa- | TAATACGACTCACTATA g tttcaaaacctgtcagtgat | 16837 |
| gRNA- | GTTTTAGAGCTAGAAATAG | |
| NG3-R | | |
| TCRa- | TAATACGACTCACTATA g ctgcggctgtggtccagctg | 16838 |
| gRNA- | GTTTTAGAGCTAGAAATAG | |
| NG4-R | | |
| TCRa- | TAATACGACTCACTATA gctgtggtccagctgaggtg | 16839 |
| gRNA- | GTTTTAGAGCTAGAAATAG | |
| NG5-1-R | | |
| TCRa- | TAATACGACTCACTATA g ctgtggtccagctgaggtga | 16840 |
| gRNA- | GTTTTAGAGCTAGAAATAG | |
| NG5-2-R | | |
| TCRa- | TAATACGACTCACTATA g tgtggtccagctgaggtgag | 16841 |
| gRNA- | GTTTTAGAGCTAGAAATAG | |
| NG5-3-R | | |
| TCRa- | TAATACGACTCACTATA gtgtggtccagctgaggtgag | 16842 |
| gRNA- | GTTTTAGAGCTAGAAATAG | |
| NG5-3-Rb | | |

[0243] Nonlimiting examples of primers for the generation of guide RNA (gRNA) templates for targeting and deleting TCR-beta (TCR-β) are provided in Table 11.

TABLE 11
Target sequences underlined

| Name | Sequence | SEQ ID NO: |
|---|---|---|
| TCRb- | TAATACGACTCACTATA GGCTGCTCCTTCTAGGGGCTG | 16843 |
| gRNA-WT | GTTTTAGAGCTAGAAATAG | |
| 1 | | |
| TCRb- | TAATACGACTCACTATA GGCAGTATCTGGAGTCATTG | 16844 |
| gRNA-WT | GTTTTAGAGCTAAATAG | |
| 2 | | |
| TCRb- | TAATACGACTCACTATA GGCCTCGGCGCTGACGATCT | 16845 |
| gRNA-WT | | |
| 3 | | |
| TCRb- | TAATACGACTCACTATA GGCTCTCGGAGAATGACGAG | 16846 |
| gRNA-WT | | |
| 5 | | |
| TCRb- | TAATACGACTCACTATA GGCCTCGGCGCTGACGATCT | 16847 |
| gRNA-WT | GTTTTAGAGCTAGAAATAG | |
| 3 | | |
| TCRb- | TAATACGACTCACTATA GGAGAATGACGAGTGGACCC | 16848 |
| gRNA-WT | GTTTTAGAGCTAGAAATAG | |
| 4 | | |
| TCRb- | TAATACGACTCACTATA GGCTCTCGGAGAATGACGAG | 16849 |
| gRNA-WT | GTTTTAGAGCTAGAAATAG | |
| 5 | | |
| TCRb- | TAATACGACTCACTATA G CAAACACAGCGACCTCGGGT | 16850 |
| gRNA- | GTTTTAGAGCTAGAAATAG | |
| NC1-L | | |
| TCRb- | TAATACGACTCACTATA G TGGCTCAAACACAGCGACCT | 16851 |
| gRNA- | GTTTTAGAGCTAGAAATAG | |
| NG2-L | | |
| TCRb- | TAATACGACTCACTATA G AGGGCGGGCTGCTCCTTGAG | 16852 |
| gRNA- | GTTTTAGAGCTAGAAATAG | |
| NG3-L | | |
| TCRb- | TAATACGACTCACTATA GTATCTGGAGTCATTGAGGG | 16853 |
| gRNA- | GTTTAGAGCTAGAAATAG | |
| NG4-L | | |
| TCRb- | TAATACGACTCACTATA G ACTGGACTTGACAGCGGAAG | 16854 |
| gRNA- | GTTTTAGAGCTAGAAATAG | |
| NG5-L | | |
| TCRb- | TAATACGACTCACTATA G AGAGATCTCCCACACCCAAA | 16855 |
| gRNA- | GTTTTAGAGCTAGAAATAG | |
| NG1-R | | |
| TCRb- | TAATACGACTCACTATA G CCACACCCAAAGGCCACAC | 16856 |
| gRNA- | GTTTTAGAGCTAGAAATAG | |
| NG2-R | | |
| TCRb- | TAATACGACTCACTATA G ACTGCCTGAGCAGCCGCCTG | 16857 |
| gRNA- | GTTTTAGAGCTAGAAATAG | |
| NG3-R | | |
| TCRb- | TAATACGACTCACTATA G TGAGGGTCTCGGCCACCTTC | 16858 |
| gRNA- | GTTTTAGAGCTAGAAATAG | |
| NG4-R | | |
| TCRb- | TAATACGACTCACTATA G ATGACGAGTGGACCCAGGAT | 16859 |
| gRNA- | GTTTTAGAGCTAGAAATAG | |
| NG5-R | | |
| TCRb- | TAATACGACTCACTATA G TGGCTCAAACACAGCGACCT | 16860 |
| gRNA- | GTTTTAGAGCTAGAAATAG | |
| NG6-L | | |
| TCRb- | TAATACGACTCACTATA G CCACACCCAAAAGGCCACAC | 16861 |
| gRNA- | GTTTTAGAGCTAGAAATAG | |
| NG6-R | | |

[0244] Nonlimiting examples of primers for the generation of guide RNA (gRNA) templates for targeting and deleting beta-2-microglobulin (β2M) are provided in Table 12.

TABLE 12
Target sequences underlined

| Primer | | | |
|---|---|---|---|
| No. | Name | Sequence | SEQ ID NO: |
| 1 | B2- | TAATACGACTCACTATAG AGACAGGTGACGGTCCCTGC | 16862 |
| | Prom- | GTTTTAGAGCTAGAAATAG | |
| | NG1-R | | |
| 2 | B2- | TAATACGACTCACTATA GCAGTGCCAGGTTAGAGAGA | 16863 |
| | Prom- | GTTTTAGAGCTAGAAATAG | |
| | NG1-L | | |
| 3 | B2- | TAATACGACTCACTATA GAAGTTGACTTACTGAAGAA | 16864 |
| | Ex2- | GTTTTAGAGCTAGAAATAG | |
| | NG-R | | |
| 4 | B2- | TAATACGACTCACTATA G ACCCAGACACATACAATTC | 16865 |
| | Ex2- | GTTTTAGAGCTAGAAATAG | |
| | NG-L | | |
| 5 | B2- | TAATACGACTCACTATA G TCACGTCATCCAGCAGAGAA | 16866 |
| | Ex2- | GTTTTAGAGCTAGAAATAG | |
| | NG2-R | | |
| 6 | B2- | TAATACGACTCACTATA gatattcctcagGTACTCCA | 16867 |
| | Ex2- | GTTTTAGAGCTAGAAATAG | |
| | NG2-L | | |
| 7 | b2MEx1 | TAATACGACTCACTATA GGCCACGGAGCGAGACATCT | 16868 |
| | NG- | GTTTTAGAGCTAGAAATAG | |
| | left | | |
| 8 | b2MEH1 | TAATACGACTCACTATAG ACTCTCTCTTTCTGGCCTGG | 16869 |
| | NG- | GTTTTAGAGCTAGAAATAG | |
| | right | | |
| 9 | b2M- | TAATACGACTCACTATAG GAGAGAGAATTGAAAAAG | 16870 |
| | gRNA | GTTTTAGAGCTAGAAATAG | |
| | WT Ex2 | | |

### Endogenous MHC Knock-Out

[0245] Gene editing compositions of the disclosure, including but not limited to, RNA-guided fusion proteins comprising dCas9-Clo051, may be used to target and decrease or eliminate expression of an endogenous MHCI, MHCIL, or MHC activator of an allogeneic cell of the disclosure. In preferred embodiments, the gene editing compositions of the disclosure target and delete a gene, a portion of a gene, or a regulatory element of a gene (such as a promoter) encoding one or more components of an endogenous MHCI, MHCII, or MHC activator of an allogeneic cell of the disclosure.

[0246] Nonlimiting examples of guide RNAs (gRNAs) for targeting and deleting MHC activators are provided in Tables 13 and 14.

TABLE 13

| | Reagent/ | | SEQ ID | Right Target | SEQ ID |
|---|---|---|---|---|---|
| Gene | Type | Left Target Sequence | NO: | Sequence | NO |
| C2TA | C2TA | CATCGCTGTTAAaAAGCTCC | 16871 | CTACCACTTCTATGACCAGA | 16880 |
| | exon 4 | | | | |
| | NG | | | | |
| | C2TA | GGCCCTCCAGCTGGGAGTCC | 16872 | CAGTAAGTTTGTGGTGGGTG | 16881 |
| | exon6 | | | | |
| | NG | | | | |
| RFXANK | RFXANK | GGGTCTGCTGGGTCTGGATG | 16873 | GGACCCTGAAGACCCCGGAG | 16882 |
| | exon1 | | | | |
| | NG1 | | | | |
| | RFXANK | GTTCTGAGGCAGGGGTCTGC | 16874 | CCCGGAGAGGAGGCTGCAGA | 16883 |
| | exon1 | | | | |
| | NG2 | | | | |
| RFXAP | RFXAP | CCCGCCCCAACGCTGCCCCC | 16875 | CTGTGCGAAGGGGCCGGGGA | 16884 |
| | Exon 1 | | | | |
| | NG1 | | | | |
| | RFXAP | CCTTCGCACAGGTACCTAAG | 16876 | AGAGGAGGCTGGGGAGGACG | 16885 |
| | Exon 1 | | | | |
| | NG2 | | | | |
| RFX5 | RFX5 | GTCTTGGGGCTCTTAGCATC | 16877 | CCCAGGTGGTGCTGAGGCTG | 16886 |
| | exon 1 | | | | |
| | NG1 | | | | |
| | RFX5 | ACGGCCTTGCTGTGGGGAAG | 16878 | GGGATCCTGGTAAGTGTGTT | 16887 |
| | exon 2 | | | | |
| | NG2 | | | | |
| | RFX5 | TCTGATGATCTTGCCAAAGT | 16879 | ATCAAAGCTCGAAGGCTTGG | 16888 |
| | exon5 | | | | |
| | NG3 | | | | |

TABLE 14

| | | | | SEQ | | SEQ | | SEQ |
|---|---|---|---|---|---|---|---|---|
| | Reagent/ | Exon or | NG-Left Target | ID | NG-Right Target | ID | Target sequence | ID |
| Gene | Type | region | Sequence | NO: | Sequence | NO. | (if WT crispr) | NO |
| Beta2- | B2- | promoter | GCAGTGCCAGGTTAGAGAGA | 16889 | AGACAGGTGACGGTCCCTGC | 16913 | | |
| MG | Promoter- | | | | | | | |
| | NG1 | | | | | | | |
| | B2- | promoter | CAAGCCAGCGACGCAGTGCC | 16890 | CCTGCGGGCCTTGTCCTGAT | 16914 | | |
| | Promoter- | | | | | | | |
| | NG2 | | | | | | | |
| | B2- | promoter | CCAATCAGGACAAGGCCCGC | 15891 | TATAAGTGGAGGCGTCGCGC | 16915 | | |
| | Promoter- | | | | | | | |
| | NG3 | | | | | | | |
| | B2-Ex2- | exon 2 | ACCCAGACACATAGCAATTC | 16892 | GAAGTTGACTTACTGAAGAA | 16916 | | |
| | NG | | | | | | | |
| | B2-Ex2- | exon 2 | gatattcctcagGTACTCCA | 16893 | TCACGTCATCCAGCAGAGAA | 16917 | | |
| | NG2 | | | | | | | |
| | B2-Ex1-NG | exon 1 | GGCCACGGAGCGAGACATCT | 16894 | ACTCTCTCTTTCTGGCCTGG | 16918 | | |
| | WT-B2MG- | | | | | | GGAGAGAGAATTGAAAAAG | 16937 |
| | exon2 | | | | | | | |
| | WT-B3MC- | cuts in | | | | | GGGCCTTGTCCTGATGGC | 16938 |
| | promoter- | promoter | | | | | | |
| | 4 | region Y | | | | | | |
| | WT-B2MG- | cuts in | | | | | GGCACTGCGTCGCTGGCT | 16939 |
| | promoter- | promoter | | | | | | |
| | 5 | region | | | | | | |
| C2TA | C2TA | exon 4 | CATCGCTGTTAAGAAGCTCC | 16895 | CTACCACTTCTATGACCAGA | 16919 | | |
| | exon 4 | | | | | | | |
| | NG | | | | | | | |
| | C2TA | exon 4 | GGTCCATCTGGTCATAGAAG | 16896 | AGATTGAGCTCTACTCAGGT | 16920 | | |
| | exon4 | | | | | | | |
| | NG2 | | | | | | | |
| | C2TA | exon6 | GGCCCTCCAGCTGGGAGTCC | 16897 | CAGTAAGTTTGTGGTGGGTG | 16921 | | |
| | exon6 | | | | | | | |
| | NG | | | | | | | |
| | C2TA | exon 4 | | | | | GGTCCATCTGGTCATAGAAG | 16940 |
| | exon4- | | | | | | | |
| | WT | | | | | | | |
| | C2TA | exon 6 | | | | | GGAGTCCTGGAAGACATAC | 16941 |
| | exon6- | | | | | | | |
| | WT | | | | | | | |
| | C2TA | exon 6 | CCTTGCTCAGGCCCTCCAGC | 16898 | TGTGGTGGGTGGGGAGGTCT | 16922 | | |
| | exon6 | | | | | | | |
| | NG2 | | | | | | | |
| RFXANK | RFXANK | exon 1 | GGGTCTGCTGGGTCTGGATG | 16899 | GGACCCTGAAGACCCCGGAG | 16923 | | |
| | exon1 | | | | | | | |
| | NG1 | | | | | | | |
| | RFXANK | exon 1 | GTTCTGAGGaAGGGGTCTGC | 16900 | CCCGGAGAGGAGGCTGCAGA | 16924 | | |
| | exon1 | | | | | | | |
| | NG2 | | | | | | | |
| | RFXANK | exon 2 | TGAGAGTGGTGGAGTGCTTC | 16901 | GAACGAGGTGTCAGCTCTGC | 16925 | | |
| | exon2 | | | | | | | |
| | NG1 | | | | | | | |
| | RFXANK | exon 2 | CTCGTTCCCTCGCTGCCGGT | 16902 | GGCCACCCTAGACTGTGAGT | 16926 | | |
| | Exon2 | | | | | | | |
| | NG2 | | | | | | | |
| | RFXANK- | exon 1 | | | | | GGTCCCaAAGTTCTGAGGC | 16942 |
| | WT- | | | | | | | |
| | exon1-3 | | | | | | | |
| | RFXANK- | exon 1 | | | | | GGCAGGGGTCTGCTGGGTC | 16943 |
| | WT- | | | | | | | |
| | exon1-4 | | | | | | | |
| RFXAP | RFXAP | exon 1 | CCCGCCCCAACGCTGCCCCC | 16903 | CTGTGCGAAGGGGCCGGGGA | 16927 | | |
| | Exon 1 | | | | | | | |
| | NG1 | | | | | | | |
| | RFXAP | exon 1 | CCTTCGCACAGGTACCTAAC | 16904 | AGAGGAGGCTGGGGAGGACG | 16928 | | |
| | Exon 1 | | | | | | | |
| | NG2 | | | | | | | |
| | RFXAP | exon 1 | CAGCCGGGGCTAGGGCCGCG | 16905 | CTTGGCGCCAGCCTCGGTGG | 16929 | | |
| | Exon1 | | | | | | | |
| | NG3 | | | | | | | |
| | RFXAP | exon 1 | GCCGCGGCCGCCACCGAGGC | 16906 | CTAGTGATGCAACCCTGTGC | 16930 | | |
| | Exon1 | | | | | | | |
| | NG4 | | | | | | | |
| | RFXAP | exon 1 | GCCGCGCTCTCGCCTCCCCC | 16907 | GAGGACGAGGAGACTCACTC | 16931 | | |
| | Exon1 | | | | | | | |
| | NG5 | | | | | | | |
| | WT- | exon 1 | | | | | GGCCCCCGGGGGCAGCGTT | 16944 |
| | RFXAP- | | | | | | | |
| | ex1-3 | | | | | | | |
| | WT- | exon 1 | | | | | GGTACCTGTGCGAAGGGGC | 16945 |
| | RFXAP- | | | | | | | |
| | ex1-4 | | | | | | | |
| RFX5 | RFX5 | exon 1 | GTCTTGGGGCTCTTAGCATC | 16908 | CCCAGGTGGTGCTGAGGCTG | 16932 | | |
| | exon1 | | | | | | | |
| | NG1 | | | | | | | |
| | RFX5 | exon 2 | ACGGCCTTGCTGTGGGGAAG | 16909 | GGGATCCTGGTAAGTGTGTT | 16933 | | |
| | exon2 | | | | | | | |
| | NG2 | | | | | | | |
| | RFX5 | exon 5 | TCTGATGATCTTGCCAAAGT | 16910 | ATCAAAGCTCGAAGGCTTGG | 16934 | | |
| | exon5 | | | | | | | |
| | NG3 | | | | | | | |
| | RFX5 | | GTCTTGGGGCTCTTAGCATC | 16911 | CCCCAGGTGGTGCTGAGGCT | 16935 | | |
| | exon1 | | | | | | | |
| | NG2 | | | | | | | |
| | RFX5 | | AGGCTCATCTTCTGCCATCC | 16912 | ACTGGGGGAAGGGCCCCCCC | 16936 | | |
| | exon1 | | | | | | | |
| | NG3 | | | | | | | |
| | WT- | Exon 1 | | | | | GGGAAGGGCCCCCCCAGG | 16946 |
| | RFX5- | | | | | | | |
| | ex1-4 | | | | | | | |
| | WT- | Exon 5 | | | | | GCCTTCGAGCTTTGATGTC | 16947 |
| | RFX5- | | | | | | | |
| | ex5-5 | | | | | | | |

### Engineered HLA-E Compositions

[0247] MHCI knockout (KO) renders cells resistant to killing by T cells, but also makes them susceptible to natural killer (NK) cell-mediated cytotoxicity (“Missing-self hypothesis”) (see FIG. 30). It is hypothesized that NK rejection would reduce the in vivo efficacy and/or persistence of these KO cells in a therapeutic setting, such as allogeneic (allo) CAR-T therapy. Retention of MHCI on the surface of allo CAR-T cells would render them susceptible to killing by host T cells, as observed in the classic mixed lymphocyte reaction (MLR) experiment. It is estimated that up to 10% of a person's T cells are specific to foreign MHC, which would mediate the rejection of foreign cells and tissues. A targeted KO of MHCI, specifically HLA-A. B and C, which can be achieved by targeted KO of B2M, results in a loss of additional HLA molecules including HLA-E. Loss of HLA-E, for example, renders the KO cells more susceptible to NK cell-mediated cytotoxicity due to the “Missing-self Hypothesis”. NK-mediated cytotoxicity against missing-self cells is a defense mechanism against pathogens that downregulate MHC on the surface of infected cells to evade detection and killing by cells of the adaptive immune system.

[0248] Two strategies are contemplated by the disclosure for engineering allo (MHCI-neg) T cells (including CAR-T cells) more resistant to NK cell-mediated cytotoxicity. In some embodiments, a sequence encoding a molecule (such as single-chain HLA-E) that reduces or prevents NK killing is introduced or delivered to an allogeneic cell. Alternatively, or in addition, gene editing methods of the disclosure retain certain endogenous HLA molecules (such as endogenous HLA-E). For example, the first approach involves piggyBac® (PB) delivery of a single-chain (sc)HLA-E molecule to B2M KO T cells.

[0249] The second approach uses a gene editing composition with guide RNAs selective for HLA-A, HLA-B and HLA-C, but not, for example, HLA-E or other molecules that are protective against natural-killer cell mediated cytotoxicity for MHCI KO cells.

[0250] Alternative or additional molecules to HLA-E that are protective against NK cell-mediated cytotoxicity include, but are not limited to, CD47, interferon alpha/beta receptor 1 (IFNAR1), human IFNAR1, interferon alpha/beta receptor 2 (IFNAR2), human IFNAR2, HLA-G1, HLA-G2, HLA-G3. HLA-G4, HLA-G5, HLA-G6, HLA-G7, human carcino embryonic antigen-related cell adhesion molecule 1 (CEACAM1), viral hemoagglutinins, CD48, LLT1 (also referred to as C-type lectin domain family 2 member (CLC2D)), ULBP2, ULBP3, and sMICA or a variant thereof.

[0251] An exemplary CD47 protein of the disclosure comprises or consists of the amino acid sequence of (Signal peptide, Extracellular, TM, Cytoplasmic):

(SEQ ID NO: 17016)
MWPINAALLGSACCGSAQLLFNKTKSVEFTFCNDTVVIPCFVTNMEAQNT
TEVYVKWKFKGRDIYTFDGALNKSTVPTDFSSAKIEVSQLLKGDASIKMD
KSDAVSHTGNYTCEVTELTREGETIIELKYRVVSWFSPNENI

KFVAS
NQKTIQPPRKAVEEPLNAFKESKGMMNDE

[0252] An exemplary INFAR1 protein of the disclosure comprises or consists of the amino acid sequence of (Signal peptide. Extracellular, TM, Cytoplasmic):

(SEQ ID NO: 17017)
MMVVLLGATTLVLVAVAPWVLSAAAGGKNLKSPQKVEVDIIDDNFILRWN
RSDESVGNVTFSFDYQKTGMDNWIKLSGCQNITSTKCNFSSLKLNVYEEI
KLRIRAEKENTSSWYEVDSFTPFRKAQIGPPEVHLEAEDKAIVIHISPGT
KDSVMWALDGLSFTYSLVIWKNSSGVEERIENIYSRHKIYKLSPETTYCL
KVKAALLTSWKIGVSPVHCIKTTVENELPPPENIEVSVQNQNYVLKWDYT
YANMTFQVQWLHAFLKRNPGNHLYKWQIPDCENVKTTQCVFPQNVFQKGI
YLLRVQASDGNNTSFWSEEIKFDTEIQAFLLPPVFNIRSLSDSFHIYIGA
PKQSGNTPVIQDYPLIYEIIFWENTSNAEKRIIEKKTDVTVPNLKPLTVY
CVKARAHTMDEKLNKSSVFSDAVCEKTKPGNTSK
KVFLRCINYVFFPSLKPSSSIDEYFSEQ
PLKNLLSTSEEQIEKCFIIENISTIATVEETNQTDEDHKKYSSQTSQDSG
NYSNEDESESKTSEELQQDFV.

[0253] An exemplary INFAR2 protein of the disclosure comprises or consists of the amino acid sequence of (Signal peptide, Extracellular, TM, Cytoplasmic):

(SEQ ID NO: 17018)
MLLSQNAFIERSLNLVLMVYISLVEGISYDSPDYTDESCTFKISLRNFRS
ILSWELKNHSIVPTHYTLLYTIMSKPEDLKVVKNCANTTRSFCDLTDEWR
STHEAYVTVLEGFSGNTTLFSCSHNEWLAIDMSFEPPEFEIVGFTNHINV
MVKFTSIVEEELQFDLSLVIEEQSEGIVKKHKPEIKGNMSGNFTYIIDKL
IPNTNYCVSVYLEHSDEQAVIKSPLKCTLLPPGQESESAESAK
KWIGYICLRNSLPKVLNFHNFLAWPFPN
LPPLEAMDMVEVIYINRKKKVWDYNYDDESDSDTEAAPRTSGGGYTMHGL
TVRPLGQASATSTESQLIDPESEEEPDLPEVDVELPTMPKDSPQQLELLS
GPCERRKSPLQDPFPEEDYSSTEGSGGRITFNVDLNSVFLRVLDDEDSDD
LEAPLMLSSHLEEMVDPEDPDNVQSNHLLASGEGTQPTFTSPSSEGLWSE
DAPSDQSDTSESDVDLGDGYIMR.

[0254] An exemplary HLA-G1 protein of the disclosure comprises or consists of the amino acid sequence of (Alpha chain 1, Alpha chain 2, Alpha chain 3):

(SEQ ID NO: 17019)
MVVMAPRTLFLLLSGALTLTETWAGSHSMRYFSAAVSRPGRGEPRFIAMG
YVDDTQFVRFDSDSACPRMEPRAPWVEQEGPEYWEEETRNTKAHAQTDRM
NLQTLRGYYNQSEASSHTLQWMIGCDLGSDGRLLRGYEQYAYDGKDYLAL
NEDLRSWTAADTAAQISKRKCEAANVAEQRRAYLEGTCVEWLHRYLENGK
EMLQRADPPKTHVTHHPVFDYEATLRCWALGFYPAEIILTWQRDGEDQTQ
DVELVETRPAGDGTFQKWAAVVVPSGEEQRYTCHVQHEGLPEPLMLRWKQ
SSLPTIPIMGIVAGLVVLAAVVTGAAVAAVLWRKKSSD.

[0255] An exemplary HLA-G2 protein of the disclosure comprises or consists of the amino acid sequence of (Alpha chain 1, Alpha chain 2, Alpha chain 3):

(SEQ ID NO: 17020)
MVVMAPRTLFLLLSGALTLTETWAGSHSMRYFSAAVSRPGRGEPRFIAMG
YVDDTQFVRFDSDSACPRMEPRAPWVEQEGPEYWEEETRNTKAHAQTDRM
NLQTLRGYYNQSEADPPKTHVTHHPVFDYEATLRCWALGFYPAEIILTWQ
RDGEDQTQDVELVETRPAGDGTFQKWAAVVVPSGEEQRYTCHVQHEGLPE
PLMLRWKQSSLPTIPIMGIVAGLVVLAAVVTGAAVAAVLWRKKSSD.

[0256] An exemplary HLA-G3 protein of the disclosure comprises or consists of the amino acid sequence of (Alpha chain 1, Alpha chain 2, Alpha chain 3):

(SEQ ID NO: 17021)
MVVMAPRTLFLLLSGALTLTETWAGSHSMRYFSAAVSRPGRGEPRFIAMG
YVDDTQFVRFDSDSACPRMEPRAPWVEQEGPEYWEEETRNTKAHAQTDRM
NLQTLRGYYNQSEAKQSSLPTIPIMGIVAGLVVLAAVVTGAAVAAVLWRK
KSSD.

[0257] An exemplary HLA-G4 protein of the disclosure comprises or consists of the amino acid sequence of (Alpha chain 1, Alpha chain 2, Alpha chain 3):

(SEQ ID NO: 17022)
MVVMAPRTLFLLSGALTLTETWAGSHSMRYFSAAVSRPGRGEPRFIAMGY
VDDTQFVRFDSDSACPRMEPRAPWVEQEGPEYWEEETRNTKAHAQTDRMN
LQTLRGYYNQSEASSHTLQWMIGCDLGSDGRLLRGYEQYAYDGKDLALNE
DLRSWTAADTAAQISKRKCEAANVAEQRRAYLEGTCVEWLHRYLENGKEM
LQRAKQSSLPTIPIMGIVAGLVVLAAVVTGAAVAAVLWRKKSSD.

[0258] An exemplary HLA-G5 protein of the disclosure comprises or consists of the amino acid sequence of (Alpha chain 1, Alpha chain 2, Alpha chain 3, intron 4):

(SEQ ID NO: 17023)
MVVMAPRTLFLLSGALTLTETWAGSHSMRYFSAAVSRPGRGEPRFIAMGY
VDDTQFVRFDSDSACPRMEPRAPWVEQEGPEYWEEETRNTKAHAQTDRMN
LQTLRGYYNQSEASSHTLQWMIGCDLGSDGRLLRGYEQYAYDGKDLALNE
DLRSWTAADTAAQISKRKCEAANVAEQRRAYLEGTCVEWLHRYLENGKEM
LQRADPPKTHVTHHPVFDYEATLRCWALGFYPAEIILTWQRDGEDQTQDV
ELVETRPAGDGTFQKWAAVVVPSGEEQRYTCHVQHEGLPEPLMLRW
.

[0259] An exemplary HLA-G5 protein of the disclosure comprises or consists of the amino acid sequence of (Alpha chain 1, Alpha chain 2. Alpha chain 3, intron 4):

(SEQ ID NO: 17024)
MVVMAPRTLFLLLSGALTLTETWAGSHSMRYFSAAVSRPGRGEPRFIAMG
YVDDTQFVRFDSDSACPRMEPRAPWVEQEGPEYWEEETRNTKAHAQTDRM
NLQTLRGYYNQSEADPPKTHVTHHPVFDYEATLRCWALGFYPAEIILTWQ
RDGEDQTQDVELVETRPAGDGTFQKWAAVVVPSGEEQRYTCHVQHEGLPE
PLMLRW .

[0260] An exemplary HLA-G5 protein of the disclosure comprises or consists of the amino acid sequence of (Alpha chain 1, Alpha chain 2, Alpha chain 3, intron 2):

(SEQ ID NO: 17025)
MVVMAPRTLFLLLSGALTLTETWAGSHSMRYFSAAVSRPGRGEPRFIAMG
YVDDTQFVRFDSDSACPRMEPRAPWVEQEGPEYWEEETRNTKAHAQTDRM
NLQTLRGYYNQSEA .

[0261] An exemplary CEACAM1 protein of the disclosure comprises or consists of the amino acid sequence of (Extracellular, TM, Cytoplasmic):

(SEQ ID NO: 17026)
MGHLSAPLHRVRVPWQGLLLTASLLTFWNPPTTAQLTTESMPFNVAEGKE
VLLLVHNLPQQLFGYSWYKGERVDGNRQIVGYAIGTQQATPGPANSGRET
IYPNASLLIQNVTQNDTGFYTLQVIKSDLVNEEATGQFHVYPELPKPSIS
SNNSNPVEDKDAVAFTCEPETQDTTYLWWINNQSLPVSPRLQLSNGNRTL
TLLSVTRNDTGPYECEIQNPVSANRSDPVTLNVTYGPDTPTISPSDTYYR
PGANLSLSCYAASNPPAQYSWLINGTFQQSTQELFIPNITVNNSGSYTCH
ANNSVTGCNRTTVKTIIVTELSPVVAKPQIKASKTTVTGDKDSVNLTCST
NDTGISIRWFFKNQSLPSSERMKLSQGNTTLSINPVKREDAGTYWCEVFN
PISKNQSKPIMLNVNYNALPQENGLSPGAIAGIVIGVVALVALIAVALAC
FLHFGKTGRASDQRDLTEHKPSVSNHTQDHSNDPPNKMNEVTYSTLNFEA
QQPTQPTSASPSLTATEIIYSEVKKQ.

[0262] An exemplary viral hemagglutinin protein of the disclosure comprises or consists of the amino acid sequence of (HA for Influenza A virus (A/NewCaledonia/20/1999(H1N1): TM):

(SEQ ID NO: 17027)
MKAKLLVLLCTFTATYADTICIGYHANNSTDTVDTVLEKNVTVIHSVNLL
EDSHNGKLCLLKGIAPLQLGNCSVAGWILGNPECELLISKESWSYIVETP
NPENGTCYPGYFADYEELREQLSSVSSFERFEIFPKESSWPNHTVTGVSA
SCSHNGKSSFYRNLLWLTGKNGLYPNLSKSYVNNKEKEVLVLWGVHHPPN
IGNQRALYHTENAYVSVVSSHYSRRFTPEIAKRPKVRDQEGRINYYWTLL
EPGDTIIFEANGNLIAPWYAFALSRGFGSGIITSNAPMDECDAKCQTPQG
AINSSLPFQNVHPVTIFECPKYVRSAKLRMVTGLRNIPSIQSRGLFGAIA
GFIEGGWTGMVDGWYGYHHQNEQGSGYAADQKSTQNAINGITNKVNSVIE
KMNTQFTAVGKEFNKLERRMENLNKKVDDGFLDIQTYNAELLVLLENERT
LDFHDSNVKNLYEKVKSQLKNNAKEIGNGCFEFYHKCNNECMESVKNGTY
DYPKYSEESKLNREKIDGVKLESMGVYQILAIYSTVASSLVLLVSLAGIS
FWMCSNGSLQCRICI.

[0263] An exemplary CD48 protein of the disclosure comprises or consists of the amino acid sequence of (Signal peptide, Chain, Pro peptide removed in mature form):

(SEQ ID NO: 17028)
MCSRGWDSCLALELLLLPLSLLVTSIQGHLVHMTVVSGSNVTLNISESLP
ENYKQLTWFYTFDQKIVEWDSRKSKYFESKFKGRVRLDPQSGALYISKVQ
KEDNSTYIMRVLKKTGNEQEWKIKLQVLDPVPKPVIKIEKIEDMDDNCYL
KLSCVIPGESVNYTWYGDKRPFPKELQNSVLETTLMPHNYSRCYTCQVSN
SVSSKNGTVCLSPPCTLARSFGVEWIASWLVVTVPTILGLLLT.

[0264] An exemplary LLT1 protein of the disclosure comprises or consists of the amino acid sequence of (Cytoplasmic, TM. Extracellular):

(SEQ ID NO: 17029)
MHDSNNVEKDITPSELPANPGCLHSKEHSIKATLIWRLFFLIMFLTIIVC
GMVAALSAIRANCHQEPSVCLQAACPESWIGFQRKCFYFSDDTKNWTSSQ
RFCDSQDADLAQVESFQELNFLLRYKGPSDHWIGISREQGQPWKWINGTE
WTRQFPILGAGECAYLNDKGASSARHYTERKWICSKSDIHV.

[0265] An exemplary ULBP2 protein of the disclosure comprises or consists of the amino acid sequence of (also known as NKG2D ligand; Genbank ACCESSION No. AAQ89028):

```
(SEQ ID NO: 17030)
    1 maaaaatkil lclpllllls gwsragradp hslcyditvi pkfrpgprwc avqgqvdekt
  61 flhydcgnkt vtpvsplgkk invttawkaq npvlrevvdi lteqlrdiql enytpkeplt
121 lqarmsceqk aeghssgswq fsfdggifll fdsekrmwtt vhpgarkmke kewndkvvam
181 sfhyfsmgdc igwledflmg mdstlepsag aplamssgtt qlratattli lcclliilpc
241 filpgi.
```

[0266] An exemplary ULBP3 protein of the disclosure comprises or consists of the amino acid sequence of (also known as NKG2D ligand; Genbank ACCESSION No. NP 078794):

```
(SEQ ID NO: 17031)
    1 maaaaspail prlailpyll fdwsgtgrad ahslwynfti ihlprhgqqw cevqsqvdqk
  61 nfisydcgsd kvlsmghlee qlyatdawgk qlemlrevgq rlrleladte ledftpsgpl
121 tlqvrmscec eadgyirgsw qfsfdgrkfl lfdsnnrkwt vvhagarrmk ekwekdsglt
181 tffkmvsmrd ckswlrdflm hrkkrlepta pptmapglaq kpaiattlsp wsfliilcfi
241 lpgi.
```

[0267] An exemplary sMICA protein of the disclosure comprises or consists of the amino acid sequence of (Signal Peptide Portion of Extracellular domain, TM and cytoplasmic domain) (Genbank Accession No. Q29983):

```
(SEQ ID NO: 17032)
    1 mglgpvflll agifpfappg aaaephslry nltvlswdgs vqsgfltevh ldgqpflrcd
  61 rqkcrakpqg qwaedvlgnk twdretrdlt gngkdlrmtl ahikdqkegl hslqeirvce
121 ihednstrss qhfvydgelf isqnletkew tmpqssraqt iamnvrnflk edamktkthy
181 hamhadclqe irrylksgvv lrrtvppmvn vtrseasegn itvtcrasgf ypwnitlswr
241 qdgvslshdt qqwgdvlpdg ngtyqtwvat ricqgeeqrf tcymehsgnh sthpvpsgkv
301 lvlqshwqtf hvsavaaaai fviiifyvrc ckkktsaaeg pelvslqvld qhpvgtsdhr
361 datglgfqpl msdlgstgst ega.
```

[0268] An exemplary sMICA protein of the disclosure comprises or consists of the amino acid sequence of (Alpha-1 Alpha-2, Alpha-3):

```
(SEQ ID NO: 17033)
    1 mglgpvflll agifpfappg aaaephslry nltvlswdgs vqsgfltevh ldgqpflrcd
  61 rqkcrakpqg qwaedvlgnk twdretrdlt gngkdlrmtl ahikdqkegl hslqeirvce
121 ihednstrss qhfvydgelf isqnletkew tmpqssraqt iamnvrnflk edamktkthy
181 hamhadclqe irrylksgvv lrrtvppmvn vtrseasegn itvtcrasgf ypwnitlswr
241 qdgvslshdt qqwgdvlpdg ngtyqtwvat ricqgeeqrf tcymehsgnh sthpvpsgkv
301 lvlqshwqtf hvsavaaaai fviiifyvrc ckkktsaaeg pelvslqvld qhpvgtsdhr
361 datglgfqpl msdlgstgst ega.
```

[0269] An exemplary sMICA protein of the disclosure comprises or consists of the amino acid sequence of (Signal peptide; Alpha-1. Alpha-2, Alpha-3):

```
(SEQ ID NO: 170734)
    ephsiry nltvlswdgs vqsqfltevh ldgqpflrcd
  61 rqkcrakpqq qwaedvignk twdretrdlt gngkdlrmtl ahikdqkegl hslqeirvce
121 ihednstrss qhfyydgelf lsqnletkew tmpqssraqt l thy
181 hamhadclqe lrrylksgvv lrrtvppmvn vtrseasegn itvtcrasgt ypwnitlswr
241 qdgvslshdt qqwgdvlpdg ngtyqtwvat ricqgeeqrf tcymehsgnh sthpvpsgkv
301 lvlqshw.
```

[0270] An exemplary sMICA protein of the disclosure comprises or consists of the amino acid sequence of (Signal peptide):

(SEQ ID NO: 17035)
EPHSLRYNLTVLSWDGSVQSGFL
TEVHLDGQPFLRCDRQKCRAKPQGQWAEDVLGNKTWDRETRDLTGNGKL
DLRMTLAHIKLDQKEGLHSLQEIRVCEIHEDNSTRSSQHFYYNGELFLS
QNLETKEWTMPQSSRAQTLTHYHAMHADCLQELRRYLKSGVVLRRTVPP
MVDVTRSEASEGNITVTCRASGFYPWNITLSWRQDGVSLSHDTQQWGDV
LPDGNGTYQTWVATRICQGEEQRFTCYMEHSGNHSTHPVPSGKVLVLQS
HW.

[0271] An exemplary bGBE Trimer (270G and 484S) protein of the disclosure comprises or consists of the amino acid sequence of:

(SEQ ID NO: 16972)
MSRSVALAVLALLSLSGLEAVMAPRTLILGGGGSGGGGSGGGGSIQRTP
KIQVYSRHPAENGKSNFLNCYVSGFHPSDIEVDLLKNGERIEKVEHSDL
SFSKDWSFYLLYYTEFTPTEKDEYACRVNHVTLSUKIVKWDRDMGGGGS
GGGGSGGGGSGGGGSGSHSLKYFHTSVSRPGRGEPRFISVGYVDDTQFV
RFDNDAASPRMVPRAPWMEQEGSEYWDRETRSARDTAQIFRVNLRTLRG
YYNQSEAGSHTLQWMHGCELGPDGRFLRGYEQFAYDGKDYLTLNEDLRS
WTAVDTAAQISEQKSNDASEAEHQRAYLEDTCVEWLHKYLEKGKETLLH
LEPPKTHVTHHPISDHEATLRCWALGFYPAETILTWQQDGEGHTQDTEL
VETRPAGDGTFQKWAAVVVPSGEEQRYTCHVQHEGLPEPVTLRWKPASQ
PTIPIVGIIAGLVLLGSVVSGAVVAAVIWRKKSSGGKGGSY KAEWSDS
AQGSESHSL*.

[0272] An exemplary bGBE Trimer (270G and 484S) protein of the disclosure comprises or consists of the nucleic acid sequence of;

(SEQ ID NO: 16973)
atgtctcgcagcgtggccctggccgtgctggccctgctgtccctgtctggc
ctggaggccgtgatggccccccggaccctgatcctgggaggaggaggcagc
ggcggaggaggctccggaggcggcggctctatccagcgcacacctaagatc
caggtgtattctcggcacccagccgagaacggcaagagcaacttcctgaat
tgctacgtgagcggctttcacccttccgacatcgaggtggatctgctgaag
aatggcgagagaatcgagaaggtggagcactccgacctgagcttctccaag
gattggtctttttatctgctgtactataccgagtttacccctacagagaag
gacgagtacgcctgtcgcgtgaaccacgtgacactgtcccagccaaagatc
gtgaagtgggaccgggatatgggcggcggcggctctggcggcggcggcagc
ggcggcggcggctccggaggaggcggctctggcagccactccctgaagtat
ttccacacctctgtgagccggccaggcagaggagagccacggttcatctct
gtgggctacgtggacgatacacagttcgtgaggtttgacaatgatgccgcc
agcccaagaatggtgcctagggccccatggatggagcaggagggcagcgag
tattgggacagggagacccggagcgccagagacacagcacagattttccgg
gtgaacctgagaaccctgaggggctactataatcagtccgaggccggctct
cacacactccagtggatgcacggatgcgagctgggaccagatggccgcttc
ctgcggggctacgagcagtttgcctatgacggcaaggattacctgaccctg
aacgaggacctgagatcctggaccgccgtggatacagccgcccagatcagc
gagcagaagtccaatgacgcatctgaggcagagcaccagagggcatatctg
gaggatacctgcgtggagtggctgcacaagtacctggagaagggcaaggag
acactgctgcacctggagccccctaagacccacgtgacacaccacccaatc
agcgaccacgaggccaccctgaggtgttgggcactgggcttctatcccgcc
gagatcaccctgacatggcagcaggacggagagggacacacccaggataca
gagctggtggagaccaggcccgccggcgatggcacatttcagaagtgggcc
gccgtggtggtgccttccggagaggagcagagatacacctgtcacgtgcag
cacgagggactgccagagccagtgaccctgaggtggaagcctgccagccag
cccacaatccctatcgtgggaatcatcgcaggcctggtgctgctgggctct
gtggtgagcggagcagtggtggccgccgtgatctggcggaagaagagcagc
ggaggcaagggaggctcctact caaggcagagtggagcgactccgcccag
ggctctgagagccactccctgtga.

[0273] An exemplary bGBE Trimer (270R and 484S) protein of the disclosure comprises or consists of the amino acid sequence of:

(SEQ ID NO: 16974)
MSRSVALAVLALLSLSGLEAVMAPRILILGGGGSGGGGSGGGGSIQRTPKI
QVYSRHPAENGKSNFLNCYVSGFHPSDIEVDLLKNGERIEKVEHSDLSFSK
DWSFYLLYYTEFTPTEKDEYACRVNHVTLSQPKIVKWDRDMGGGGSGGGGS
GGGGSGGGGSGSHSLKYFHTSVSRPGRGEPRFISVGYVDDTQFVREDNDAA
SPRMVPRAPWMEQEGSEYWDRETRSARDTAQIFRVNLRTLRGYYNQSEAGS
HTLQWMHGCELGPDRRELRGYEQFAYDGKDYLTLNEDLRSWTAVDTAAQIS
EQKSNDASEAEHQRAYLEDTCVEWLHKYLEKGKETLLHLEPPKTHVTHHPI
SDHEATLRCWALGFYPAEITLTWQQDGEGHTQDTELVETRPAGDGTFQKWA
AVVVPSGEEQRYTCHVQHEGLPEPVTLRWKPASQPTIPIVGIIAGLVLLGS
VVSGAVVAAVIWRKKSSGGKGGSY KAEWSDSAQGSESHSL*.

[0274] An exemplary bGBE Trimer (270R and 484S) protein of the disclosure comprises or consists of the nucleic acid sequence of:

(SEQ ID NO: 16975)
atgtctcgcagcgtggccctggccgtgctggccctgctgtccctgtctggc
ctggaggccgtgatggccccccggaccctgatcctgggaggaggaggcagc
ggcggaggaggctccggaggcggcggctctatccagcgcacacctaagatc
caggtgtattctcggcacccagccgagaacggcaagagcaacttcctgaat
tgctacgtgagcggctttcacccttccgacatcgaggtggatctgctgaag
aatggcgagagaatcgagaaggtggagcactccgacctgagcttctccaag
gattggtctttttatctgctgtactataccgagtttacccctacagagaag
gacgagtacgcctgtcgcgtgaaccacgtgacactgtcccagccaaagatc
gtgaagtgggaccaggatatgggcggcggcggctctggcggcggcggcagc
ggcggcggcggctccggaggaggcggctctggcagccactccctgaagtat
ttccacacctctgtgagccggccaggcagaggagagccacggttcatctct
gtgggctacgtggacgatacacagttcgtgaggtttgacaatgatgccgcc
agcccaagaatggtgcctagggccccatggatggagcaggagggcagcgag
tattgggacagggagacccggagcgccagagacacagcacagattttccgg
gtgaacctgagaaccctgaggggctactataatcagtccgaggccggctct
cacacactccagtggatgcacggatgcgagctgggaccagatcgccgcttc
ctgcggggctacgagcagtttgcctatgacggcaaggattacctgaccctg
aacgaggacctgagatcctggaccgccgtggatdcagccgcccagatcagc
gagcagaagtccaatgacgcatctgaggcagagcaccagagggcatatctg
gaggatacctgcgtggagtggctgcacaagtacctggagaagggcaaggag
acactgctgcacctggagccccctaagacccacgtgacacaccacccaatc
agcgaccacgaggccaccctgaggtgttgggcactgggcttctatcccgcc
gagatcaccctgacatggcagcaggacggagagggacacacccaggataca
gagctggtggagaccaggcccgccggcgatggcacatttcagaagtgggcc
gccgtggtggtgccttccggagaggagcagagatacacctgtcacgtgcag
cacgagggactgccagagccagtgaccctgaggtggaagcctgccagccag
cccacaatccctatcgtgggaatcatcgcaggcctggtgctgctgggctct
gtggtgagcggagcagtggtggccgccgtgatctggcggaagaagagcagc
ggaggcaagggaggctcctact caaggcagagtggagcgactccgcccag
ggctctgagagccactccctgtga.

[0275] An exemplary gBE Dimer (R and S) protein of the disclosure comprises or consists of the amino acid sequence of:

(SEQ ID NO: 16976)
MSRSVALAVLALLSLSGLEAIQRTPKIQVYSRHPAENGKSNFLNCYVSGFH
PSDIEVDLLKNGERIEKVEHSDLSFSKDWSFYLLYYTEFTPTEKDEYACRV
NHVTLSQPKIVKWDRDMGGGGSGGGGSGGGGSGGGGSGSHSLKYFHTSVSR
PGRGEPRFISVGYVDDTQFVRFDNDAASPRMVPRAPWMEQESGEYWDRETR
SARDTAQIFRVNLRTLRGYYNQSEAGSHTLQWMHGCELGPDRRFLRGYEQF
AYDGKDYLTLNEDLRSWTAVDTAAQISEQKSNDASEAEHQRAYLEDTCVEW
LHKYLEKGKETLLHLEPPKTHVTHHPISDHEATLRCWALGFYPAEITLTWQ
QDGEGHTQDTELVETRPAGDGTFQKWAAVVVPSGEEQRYTCHVQHEGLPEP
VTLRWKPASQPTIPIVGIIAGLVLLGSVVSGAVVAAVIWRKKSSGGKGGSY
KAEWSDSAQGSESHSL.

[0276] An exemplary gBE Dimer (R and S) protein of the disclosure comprises or consists of the nucleic acid sequence of:

(SEQ ID NO: 16977)
ATGAGCAGATCTCTGGCCCTGGCTGTTCTGGCTCTGCTCTCTCTCTCTGCC
CTCGAAGCCATCCAGCGGACCCCTAAGATCCAGGTGTACAGCAGACACCCC
GCCGAGAACGGCAAGAGCAACTTCCTGAACTGCTACGTGTCCGGCTTTCAC
CCCAGCGACATTGAGGTGGACCTGCTCAAGAACGGCGAGCGGATCGAGAAG
GTGGAACACACCGATCTGAGCTTCAGCAAGGACTGGTCCTTCTACCTGCTG
TACTACACCGAGTTCACCCCTACCGAGAAGGACGAGTACGCCTGCAGAGTG
AACCACGTGACACTGAGCCAGCCTAAGATCCTGAAGTGGGACAGAGATATG
GGCGGAGGCGCATCTGGTGGCGGAGGAAGTGGCGGCGGAGGATCTGGCGGT
GGTGGTTCTGGATCTCACAGCCTGAAGTACTTTCACACCTCCGTGTCCAGA
CCTGGCAGAGGCGAGCCTAGATTCATCAGCGTGGGCTACGTGGACGACACC
CAGTTCGTCAGATTCGACAACGACGCCGCCTCTCCTCGGATCGTTCCTAGA
GCACCCTGGATGGAACAAGAGGGCAGCGAGTACTGGGATCGCGAGACAAGA
AGCGCCAGAGACACACCCCAGATCTTCCGCGTGAACCTGAGAACCCTGCGG
GGCTACTACAATCAGTCTGAGGCCGGCTCTCACACCCTGCAGTGGATGCAT
CGATGTGAACTGGGCCCCGACAGACGGTTCCTGAGAGGGTATGAGCAGTTC
GCCTACGACGGCAAGGACTACCTGACACTGAACGAGGACCTGAGAAGCTGG
ACCGGCGTGGATACAGCCGCTCAGATCAGCGAGCAGAAGTCTAACGACGCC
AGCGAGGCCGAACACCAGAGAGCCTATCTGGAAGATACCTGCGTGGAATGG
CTGCACAAGTACCTGGAAAAGGGCAAAGAGACACTGCTGCACCTGGAACCT
CCAAAGACACATGTGACCCACCATCCTATCAGCGACCACGAGGCCACACTG
AGATGTTGGGCCCTGGGCTTTTACCCTGCCGAGATCACACTGACATGGCAG
GAGGATGGCGAGGGCCACACACAGGATACAGAGCTGGTGGAAACAAGACCT
GCCGGCGACGGCACCTTCCAGAAATGGGCTGCTGTGGTTGTGCCCAGCGGC
GAGGAACAGAGATACACCTGTCACGTGCAGCACGAGGGACTGCCTGAACCT
GTCACTCTGAGATGGAAGCCTGCCAGCCAGCCAACAATCCCCATCGTGGGA
ATCATTGCCGGCCTGGTGCTGCTGGGATCTGTGGTTTCTGGTGCTCTGGTG
GCCGCCGTGATTTGGAGAAAGAAGTCCTCTGGCGGCAAAGGCGGCTCCTAC
AAGGCCGAGTGGAGCGATTCTGCCCAGGGCTCTGAAAGCCACAGCCTG
TAGATAA.

[0277] An exemplary gBE Dimer (G and S) protein of the disclosure comprises or consists of the amino acid sequence of:

(SEQ ID NO: 16978)
DLLKNGERIEKVEHSDLSFSKDWSFYLLYYTEFTPTEKDEYACRVNHVTLS
QPKIVKWDRDMGGGGSGGGGSGGGGSGGGGSGSHSLKYFHTSVSRPGRGEP
RFISVGYVDDTQFVRFDNDAASPRMVPRAPWMEQESGEYWDRETRSARDTA
QIFRVNLRTLRGYYNQSEAGSHTLQWMHGCELGPDGRFLRGYEQFAYDGKD
YLTLNEDLRSWTAVDTAAQISEQKSNDASEAEHQRAYLEDTCVEWLHKYLE
KGKETLLHLEPPKTHVTHHPISDHEATLRCWALGFYPAEITLTWQQDGEGH
TQDTELVETRPAGDGTFQKWAAVVVPSGEEQRYTCHVQHEGLPEPVTLRWK
PASQPTIPIVGIIAGLVLLGSVVSGAVVAAVIWRKKSSGGKGGSY KAEWS
DSAQGSESHSL

[0278] An exemplary gBE Dimer (G and S) protein of the disclosure comprises or consists of the amino acid sequence of:

(SEQ ID NO: 16979)
ATGAGCAGATCTCTGGCCCTGGCTGTTCTGGCTCTGCTCTCTCTCTCTGCC
CTCGAAGCCATCCAGCGGACCCCTAAGATCCAGGTGTACAGCAGACACCCC
GCCGAGAACGGCAAGAGCAACTTCCTGAACTGCTACGTGTCCGGCTTTCAC
CCCAGCGACATTGAGGTGGACCTGCTCAAGAACGGCGAGCGGATCGAGAAG
GTGGAACACACCGATCTGAGCTTCAGCAAGGACTGGTCCTTCTACCTGCTG
TACTACACCGAGTTCACCCCTACCGAGAAGGACGAGTACGCCTGCAGAGTG
AACCACGTGACACTGAGCCAGCCTAAGATCCTGAAGTGGGACAGAGATATG
GGCGGAGGCGCATCTGGTGGCGGAGGAAGTGGCGGCGGAGGATCTGGCGGT
GGTGGTTCTGGATCTCACAGCCTGAAGTACTTTCACACCTCCGTGTCCAGA
CCTGGCAGAGGCGAGCCTAGATTCATCAGCGTGGGCTACGTGGACGACACC
CAGTTCGTCAGATTCGACAACGACGCCGCCTCTCCTCGGATCGTTCCTAGA
GCACCCTGGATGGAACAAGAGGGCAGCGAGTACTGGGATCGCGAGACAAGA
AGCGCCAGAGACACACCCCAGATCTTCCGCGTGAACCTGAGAACCCTGCGG
GGCTACTACAATCAGTCTGAGGCCGGCTCTCACACCCTGCAGTGGATGCAT
GGATGTGAACTGGGCCCCGACAGACAGTTCCTGAGAGGGTATGAGCAGTTC
GCCTACGACGGCAAGGACTACCTGACACTGAACGAGGACCTGAGAAGCTGG
ACCGGCGTGGATACAGCCGCTCAGATCAGCGAGCAGAAGTCTAACGACGCC
AGCGAGGCCGAACACCAGAGAGCCTATCTGGAAGATACCTGCGTGGAATGG
CTGCACAAGTACCTGGAAAAGGGCAAAGAGACACTGCTGCACCTGGAACCT
CCAAAGACACATGTGACCCACCATCCTATCAGCGACCACGAGGCCACACTG
AGATGTTGGGCCCTGGGCTTTTACCCTGCCGAGATCACACTGACATGGCAG
GAGGATGGCGAGGGCCACACACAGGATACAGAGCTGGTGGAAACAAGACCT
GCCGGCGACGGCACCTTCCAGAAATGGGCTGCTGTGGTTGTGCCCAGCGGC
GAGGAACAGAGATACACCTGTCACGTGCAGCACGAGGGACTGCCTGAACCT
GTCACTCTGAGATGGAAGCCTGCCAGCCAGCCAACAATCCCCATCGTGGGA
ATCATTGCCGGCCTGGTGCTGCTGGGATCTGTGGTTTCTGGTGCTCTGGTG
GCCGCCGTGATTTGGAGAAAGAAGTCCTCTGGCGGCAAAGGCGGCTCCTAC
AAGGCCGAGTGGAGCGATTCTGCCCAGGGCTCTGAAAGCCACAGCCTG
TAGATAA.

[0279] A wildtype/natural human HLA-E protein (NCBI: HLAE_HUMAN; UniProt/Swiss-Prot: P13747.4) comprises or consists of the amino acid sequence of:

(SEQ ID NO: 17122)
MVDGTLLLLLSEALALTQTWAGSHSLFYFHTSVSRPGRGEPRFISVGYVDD
TQFVRFDNDAASPRMVPRAPWMEQEGSEYWDRETRSARDTAQIFRVNLRTL
RGYYNQSEAGSHTLQWMHGCELGPDGRFLRGYEQFAYDGKDYLTLNEDLRS
WTAVDTAAQISEQKSNDASEAEHQRAYLEDTCVEWLHKLEKGKETLLHLEP
PKTHVTHHPISDHEATLRCWALGFYPAEITLTWQQDGEGHTQDTELVETRP
AGDGTFQKWAAVVVPSGEEQRYTCHVQHEGLPEPVTLRWKPASQPTIPIVG
IIAGLVLLGSVVSGAVVAAVIWRKKSSGGKGGSYSKAEWSDSAQGSESHSL

[0280] A nucleotide sequence encoding wildtype/natural HLA-E protein (NCBI: CCDS34379.1) comprises or consists of the nucleotide sequence of:

(SEQ ID NO: 17123)
ATGGTAGATGGAACCCTCCTTTTACTCCTCTCGGAGGCCCTGGCCCTTACC
CAGACCTGGGCGGGCTCCCACTCCTTGAAGTATTTCCACACTTCCGTGTCC
CGGCCCGGCCGCGGGGAGCCCCGCTTCATCTCTGTGGGCTACGTGGACGAC
ACCCAGTTCGTGCGCTTCGACAACGACGCCGCGAGTCCGAGGATGGTGCCG
CGGGCGCCGTGGATGGAGCAGGAGGGGTCAGAGTATTGGGACCGGGAGACA
CGGAGCGCCAGGGACACCGCACAGATTTTCCGAGTGAATCTGCGGACGCTG
CGCGGCTACTACAATCAGAGCGAGGCCGGGTCTCACACCCTGCAGTGGATG
CATGGCTGCGAGCTGGGGCCCGACGGGCGCTTCCTCCGCGGGTATGAACAG
TTCGCCTACGACGGCAAGGATTATCTCACCCTGAATGAGGACCTGCGCTCC
TGGACCGCGGTGGACACGGCGGCTCAGATCTCCGAGCAAAAGTCAAATGAT
GCCTCTGAGGCGGAGCACCAGACACCCTACCTGGAAGACACATGCGTGGAG
TGGCTCCACAAATACCTGGAGAAGGGGAAGGAGACGCTGCTTCACCTGGAG
CCCCCAAAGACACACGTGACTCACCACCCCATCTCTGACCATGAGGCCACC
CTGAGGTGCTGGGCCCTGGGCTTCTACCCTGCGGAGATCACACTGACCTGG
CAGCAGCATGGGGAGGGCCATACCCAGGACACGGAGCTCGTGGAGACCAGG
CCTGCAGGGGATGGAACCTTCCAGAAGTGGGCAGCTGTGGTGGTGCCTTCT
GGAGAGGAGCAGAGATACACGTGCCATGTGCAGCATGAGGGGCTACCCGAG
CCCGTCACCCTGAGATGGAAGCCGGCTTCCCAGCCCACCATCCCCATCGTG
GGCATCATTGCTGGCCTGGTTCTCCTTGGATCTGTGGTCTCTGGAGCTGTG
GTTGCTGCTGTGATATGGAGGAAGAAGAGCTCAGGTGGAAAAGGAGGGAGC
TACTCTAAGGCTGAGTGGAGCGACAGTGCCCAGGGGTCTGAGTCTCACAGC
TTGTAA

[0281] An exemplary WT HLA-E Monomer (R and S) protein of the disclosure comprises or consists of the amino acid sequence of.

(SEQ ID NO: 16980)
MSRSVALAVLALLSLSGLEAGSHSLKYFHTSVSRPGRGEPRFISVGYVDDT
QFVRFDNDAASPRMVPRAPWMEQEGSEYWDRETRSARDTAQIFRVNLRTLR
GYYNQSEAGSHTLQWHGCELGPDRRFLRGYEQFAYDGKDYLTLNEDLRSWT
AVDTAAQISEQKSNDASEAEHQRAYLEDTCVEWLHKYLEKGKETLLHLEPP
KTHVTHHPISDHEATLRCWALGFYPAEITLTWQQDGEGHTQDTELVETRPA
GDGTFQKWAAVVVPSGEEQRYTCHVQHEGLPEPVTLRWKPASQPTIPTVGI
IAGLVLLGSVVSGAVVAAVIWRKKSSGGKGGSY KAEWSDSAQGSESHSL

[0282] An exemplary WT HLA-E Monomer (R and S) protein of the disclosure comprises or consists of the nucleic acid sequence of:

(SEQ ID NO: 16981)
ATGAGCAGATCTGTGGCCCTGGCTGTTCTGGCTCTGCTGTCTCTGTCTGGA
CTGGAAGCCGGCAGCCACAGCCTGAAGTACTTTCACACCAGCGTGTCCAGA
CCTGGCAGAGGCGAGCCTAGATTCATCAGCGTGGGCTACGTGGACGACACC
CAGTTCGTCAGATTCGACAACGACGCCGCCTCTCCTCGGATGGTTCCTAGA
GCACCCTGGATGGAACAAGAGGGCAGCGAGTACTGGGACAGAGAGACAAGA
AGCGCCAGAGACACAGCCCAGATCTTCAGAGTGAACCTGCGGACCCTGCGG
GGCTACTACAATCAGTCTGAAGCCGGCTCTCACACCCTGCAGTGGATGCAC
GGATGTGAACTGGGCCCCGACAGAAGATTCCTGAGAGGCTACGAGCAGTTC
GCCTACGACGGCAAGGACTACCTGACACTGAACGAGGACCTGAGAAGCTGG
ACCGCCGTGGATACAGCCGCTCAGATCAGCGAGCAGAAGTCTAACGACGCC
TCTGAGGCCGAACACCAGAGAGCCTACCTGGAAGATACCTGCGTGGAATGG
CTGCACAAGTACCTGGAAAAGGGCAAAGAGACACTGCTGCACCTGGAACCT
CCAAAGACACACGTGACCCACCATCCTATCAGCGACCACGAGGCCACACTG
AGATGTTGGGCCCTGGGCTTTTACCCCGCCGAGATCACACTGACATGGCAG
CAGGATGGCGAGGGCCACACACAGGATACAGAGCTGGTGGAAACAAGACCT
GCCGGCGACGGCACCTTCCAGAAATGGGCTGCTGTGGTGGTTCCCAGCGGC
GAGGAACAGAGATACACCTGTCACGTGCAGCACGAGGGACTGCCTGAACCT
GTGACACTGAGGTGGAAGCCTGCCAGCCAGCCTACAATCCCCATCGTGGGA
ATCATTGCCGGCCTGGTGCTGCTGGGATCTGTGGTTTCTGGTGCAGTGGTG
GCCGCCGTGATCTGGCGGAAAAAAAGCTCAGGCGGCAAAGGCGGCTCCTAC
AAAGCCGAGTGGAGCGATTCTGCCCAGGGCTCTGAAAGCCACTCTCTG
TAGATAA.

[0283] An exemplary WT HLA-E Monomer (G and S) protein of the disclosure comprises or consists of the nucleic acid sequence of:

(SEQ ID NO: 16982)
MSRSVALAVLALLSLSGLEAGSHSLKYFHTSVSRPGRGEPRFISVGYVDDT
QFVRFDNDAASPRKVPRAPWMFQEGSEYWDRETRSARDTAQIFRVNLRTLR
GYYNQSEAGSHTLQWMHGCELGPDGRFLRGYEQFAYDGKDYLTLNEDLRSW
TAVDTAAQISEQKSNDASEAEHQRAYLEDICVEWLHKYLEKGKETLLHLEP
PKTHVTHHPISDHEATLRCWALGFYPAEITLTWQQDGEGHTQDTELVETRP
AGDGTFQKWAAVVVPSGEEQRYTCHVQHEGLPEPVTLRWKPASQPTTPIVG
IIAGLVLLGSVVSGAVVAAVIWRKKSSGGKGGSY KAEWSDSAQGSESHS
L.

[0284] An exemplary WT HLA-E Monomer (G and S) protein of the disclosure comprises or consists of the nucleic acid sequence of:

(SEQ ID NO: 16983)
ATGAGCAGATCTGTGGCCCTGGCTGTTCTGGCTCTGCTGTCTCTGTCTGGA
CTGGAAGCCGGCAGCCACAGCCTGAAGTACTTTCACACCAGCGTGTCCAGA
CCTGGCAGAGGCGAGCCTAGATTCATCAGCGTGGGCTACGTGGACGACACC
CAGTTCGTCAGATTCGACAACGACGCCGCCTCTCCTCGGATGGTTCCTAGA
GCACCCTGGATGGAACAAGAGGGCAGCGAGTACTGGGACAGAGAGACAAGA
AGCGCCAGAGACACAGCCCAGATCTTCAGAGTGAACCTGCGGACCCTGCGG
GGCTACTACAATCAGTCTGAAGCCGGCTCTCACACCCTGCAGTGGATGCAC
GGATGTGAACTGGGCCCCGACGGAAGATTCCTGAGAGGCTACGAGCAGTTC
GCCTACGACGGCAAGGACTACCTGACACTGAACGAGGACCTGAGAAGCTGG
ACCGCCGTGGATACAGCCGCTCAGATCAGCGAGCAGAAGTCTAACGACGCC
TCTGAGGCCGAACACCAGAGAGCCTACCTGGAAGATACCTGCGTGGAATGG
CTGCACAAGTACCTGGAAAAGGGCAAAGAGACACTGCTGCACCTGGAACCT
CCAAAGACACACGTGACCCACCATCCTATCAGCGACCACGAGGCCACACTG
AGATGTTGGGCCCTGGGCTTTTACCCCGCCGAGATCACACTGACATGGCAG
GAGGATGGCGAGGGCCACACACAGGATACAGAGCTGGTGGAAACAAGACCT
GCCGGCGACGGCACCTTCCAGAAATGGGCTGCTGTGGTGGTTCCCAGCGGC
GAGGAACAGAGATACACCTGTCACGTGCAGCACGAGGGACTGCCTGAACCT
GTGACACTGAGGTGGAAGCCTGCCAGCCAGCCTACAATCCCCATCGTGGGA
ATCATTGCCGGCCTGGTGCTGCTGGGATCTGTGGTTTCTGGTGCAGTGGTG
GCCGCCGTGATCTGGCGGAAAAAAAGCTCAGGCGGCAAAGGCGGCTCCTAC
AAAGCCGAGTGGAGCGATTCTGCCCAGGGCTCTGAAAGCCACTCTCTG
TAGATAA.

[0285] A wildtype/natural human B2M protein (NCBI: B2MG_HUMAN; UniProt/Swiss-Prot: P61769.1) comprises or consists of the amino acid sequence of:

(SEQ ID NO: 17124)
MSRSVALAVLALLSLSGLEAIQRTPKIQVYSRHPAENGKSNFLNCYVSGFH
PSDIEVDLLKNGERIEKVEHSDLSFSKDWSFYLLYYTEFTPTEKDEYACRV
NHVILSQPKIVKWDRDM

[0286] A nucleotide sequence encoding wildtype/natural B2M protein (NCBI: CCDS10113.1) comprises or consists of the nucleotide sequence of:

(SEQ ID NO: 17125)
ATGTCTCGCTCCGTGGCCTTAGCTGTGCTCGCGCTACTCTCTCTTTCTGGC
CTGGAGGCTATCCAGCGTACTCCAAAGATTCAGGTTTACTCACGTCATCCA
GCAGAGAATGGAAAGTCAAATTTCCTGAATTGCTATGTGTCTGGGTTTCAT
CCATCCGACATTGAAGTTGACTTACTGAAGAATGGAGAGAGAATTGAAAAA
GTGGAGCATTCAGACTTGTCTTTCAGCAAGGACTGGTCTTTCTATCTCTTG
TACTACACTGAATTCACCCCCACTGAAAAAGATGAGTATGCCTGCCGTGTG
AACCATGTGACTTTGTCACAGCCCAAGATAGTTAAGTGGGATCGAGACATG
TAA

[0287] An exemplary HLA-bGBE (Single Chain Trimer) protein of the disclosure comprises or consists of the amino acid sequence of (B2M Signal peptide, peptide, Linker, B2M domain, Linker, HLA-E peptide):

(SEQ ID NO: 17064)
MSRSVALAVLALLSLSGLEAVMAPRTLILGGGGSGGGGS

GGGGSGGGGSGGGGSGGGGSGSHSLKYFHT
SVSRPGRGEPRFISVGYVDDTQFVREDNDAASPRMVPRAPWMEQEGSEY
WDRETRSARDTAQIFRVNLRTLRGYYNQSEAGSHTLQWMHGCELGPDGR
FLRGYEQFAYDGKDYLTLNEDLRSWTAVDTAAQISEQKSNDASEAEHQR
AYLEDTCVEWLHKYLEKGKETLLHLEPPKTHVTHHPISDHEATLRCWAL
GFYPAEITLTWQQDGEGHTQDTELVETRPAGDGTFQKWAAVVVPSGEEQV
RYTCHVQHEGLPEPVTLRWKPASQPTIPTVGIIAGLVLLGSVVSGAVVA
AVIWRKKSSGGKGGSYSKAEWSDSAQGSESHSL

### B2M Signal Peptide

(SEQ ID NO: 17126)
MSRSVALAVLALLSLSGLEA

### Peptide:

(SEQ ID NO: 17127)
VMAPRTLIL

### Linker:

(SEQ ID NO: 17128)
GGGGSGGGGSGGGGS

### B2M Domain:

(SEQ ID NO: 17129)
[sequence omitted]

### Linker:

(SEQ ID NO: 17130)
GGGGSGGGGSGGGGSGGGGS

### HLA-E Peptide:

(SEQ ID NO: 17131)
GSHSLKYFHTSVSRPGRGEPRFISVGYVDDTQFVRFDNDAASPRMVPRAP
WMEQEGSEYWDRETRSARDTAQIFRVNLRTLRGYYNQSEAGSHTLQWMHG
CELGPDGRFLRGYEQFAYDGKDYLTLNEDLRSWTAVDTAAQISEQKSNDA
SEAEHQRAYLEDTCVEWLHKYLEKGKETLLHLEPPKTHVTHHPISDHEAT
LRCWALGFYPAEITLTWQQDGEGHTQDTELVETRPAGDGTFQKWAAVVVP
SGEEQRYTCHVQHEGLPEPVTLRWKPASQPTIPIVGIIAGLVLLGSVVSG
AVVAAVIWRKKSSGGKGGSYSKAEWSDSAQGSESHSL

[0294] An exemplary nucleotide sequence encoding a HLA-bGBE (Single Chain Trimer) protein of the disclosure comprises or consists of the nucleotide sequence of (B2M Signal peptide, peptide, Linker, B2M domain, Linker, HLA-E peptide):

(SEQ ID NO: 17065)
ATGTCTCGCAGCGTGGCCCTGGCCGTGCTGGCCCTGCTGTCCCTGTCTGG
CCTGGAGGCCGTGATGGCCCCCCGGACCCTGATCCTGGGAGGAGGAGGCA
GCCCCGGAGGAGGCTCCGGAGGCGGCGGCTCT

GGCGGCGGCGGCTCTGGCGGCGGCGGCAGCGGCG
GCGGCGGCTCCGGAGGAGGCGGCTCTGGCAGCCACTCCCTGAAGTATTTC
CACACCTCTGTGAGCCGGCCAGGCAGAGGAGAGCCACGGTTCATCTCTGT
GGGCTACGTGGACGATACACAGTTCGTGAGGTTTGACAATGATGCCGCCA
GCCCAAGAATGGTGCCTAGGGCCCCATGGATGGAGCAGGAGGGCAGCGAG
TATTGGGACAGGGAGACCCGGAGCGCCAGAGACACAGCACAGATTTTCCG
GGTGAACCTGAGAACCCTGAGGGGOTACTATAATCAGTCCGAGGCCGGCT
CTCACACACTCCAGTGGATGCACGGATGCGAGCTGGGACCAGATGGCCGC
TTCCTGCGGGGCTACGAGCAGTTTGCCTATGACGGCAAGGATTACCTGAC
CCTGAACGAGGACCTGAGATOCTGGACCGCCGTGGATACAGCCGCCCAGA
TCAGCGAGCAGAAGTCCAATGACGCATCTGAGGCAGAGCACCAGAGGGCA
TATCTGGAGGATACCTGCGTGGAGTGGCTGCACAAGTACCTGGAGAAGGG
CAAGGAGACACTGOTGCACCTGGAGCCCCCTAAGACCCACGTGACACACC
ACCCAATCAGCGACCACGAGGCCACCCTGAGGTGTTGGGCACTGGGCTTC
TATCCCGCCGAGATCACCCTGACATGGCAGCAGGACGGAGAGGGACACAC
CCAGGATACAGAGCTGGTGGAGACCAGGCCCGCCGGCGATGGCACATTTC
AGAAGTGGGCCGCCGTGGTGGTGCCTTCCGGAGAGGAGCAGAGATACACC
TGTCACGTGCAGCACGAGGGACTGOCAGAGCCAGTGACCCTGAGGTGGAA
GCCTGCCAGCCAGCCCACAATCCCTATCGTGGGAATCATCGCAGGCCTGG
TGCTGCTGGGCTCTGTGGTGAGCGGAGCAGTGGTGGCCGCCGTGATCTGG
CGGAAGAAGAGCAGCGGAGGCAAGGGAGGCTCCTACTCCAAGGCAGAGTG
GAGCGACTCCGCCCAGGGCTCTGAGAGCCACTCCCTGTGA

### B2M Signal Peptide:

(SEQ ID NO: 17132)
ATGTCTCGCAGCGTGGCCCTGGCCGTGCTGGCCCTGCTGTCCCTGTCTGG
CCTGGAGGCC

### Peptide:

(SEQ ID NO: 17133)
GTGATGGCCCCCCGGACCCTGATCCTG

### Linker:

(SEQ ID NO: 17134)
GGAGGAGGAGGCAGCGGCGGAGGAGGCTCCGGAGGCGGCGGCTCT

### B2M Domain:

(SEQ ID NO: 17135)
ATCCAGCGCACACCTAAGATCCAGGTGTATTCTCGGCACCCAGCCGAGAA
CGGCAAGAGCAACTTCCTGAATTGCTACGTGAGCGCCTTTCACCCTTCCG
ACATCGAGGTGGATCTGCTGAAGAATGGCGAGAGAATCGAGAAGGTGGAG
CACTCCGACCTCAGCTTCTCCAAGGATTCGTCTTTTTATCTGCTGTACTA
TACCGAGTTTACCCCTACAGAGAAGGACGAGTACGCCTGTCGCGTGAACC
ACGTGACACTGTCCCAGCCAAAGATCGTGAAGTGGGACCGGGATATG

### Linker:

(SEQ ID NO: 17136)
GGCGGCGGCGGCTCTGGCGGCGGCGGCAGCGGCGGCGGCGGCTCCGGAGG
AGGCGGCTCT

### HLA-A Peptide:

(SEQ ID NO: 17137)
GGCAGCCACTCCCTGAAGTATTTCCACACCTCTGTGAGCCGGCCAGGCAG
AGGAGAGCCACGGTTCATCTCTGTGGGCTACGTGGACGATACACAGTTCG
TGAGGTTTGACAATGATGCCGCCAGCCCAAGAATGGTGCCTAGGGCCCCA
TGGATGGAGCAGGAGGGCAGCGAGTATTGGGACAGGGAGACCCGGAGCGC
CAGAGACACAGCACAGATTTTCCGGGTGAACCTGAGAACCCTGAGGGGCT
ACTATAATCAGTCCGAGGCCGGCTCTCACACACTCCAGTGGATGCACGGA
TGCGAGCTGGGACCAGATGGCCGCTTCCTGCGGGGCTACGAGCAGTTTGC
CTATGACGGCAAGGATTACCTGACCCTGAACGAGGACCTGAGATCCTGGA
CCGCCGTGGATACAGCCGCCCAGATCAGCGAGCAGAAGTCCAATGACGCA
TCTGAGGCAGAGCACCAGAGGGCATATCTGGAGGATACCTGCGTGGAGTG
GCTGCACAAGTACCTGGAGAAGGGCAAGGAGACACTGCTGCACCTGGAGC
CCCCTAAGACCCACGTGACACACCACCCAATCAGCGACCACGAGGCCACC
CTGAGGTGTTGGGCACTGGGCTTCTATCCCGCCGAGATCACCCTGACATG
GCAGCAGGACGGAGAGGGACACACCCAGGATACAGAGCTGGTGGAGACCA
GGCCCGCCGGCGATGGCACATTTCAGAAGTGGGCCGCCGTGGTGGTGCCT
TCCGGAGAGGAGCAGAGATACACCTGTCACGTGCAGCACGAGGGACTGCC
AGAGCCAGTGACCCTGAGGTGGAAGCCTGCCAGCCAGCCCACAATCCCTA
TCGTGGGAATCATCGCAGGCCTGGTGCTGCTGGGCTCTGTGGTGAGCGGA
GCAGTGGTGGCCGCCGTGATCTGGCGGAAGAAGAGCAGCGGAGGCAAGGG
AGGCTCCTACTCCAAGGCAGAGTGGAGCGACTCCGCCCAGGGCTCTGAGA
GCCACTCCCTGTGA

[0301] An exemplary HLA-gBE (Single Chain Dimer) protein of the disclosure comprises or consists of the amino acid sequence of (B2M Signal peptide, B2M domain, Linker, HLA-E peptide):

(SEQ ID NO: 17066)
MSRSVALAVLALLSLSGLEAIQRTPKIQVYSRHPAENGKSNFLNCYVSGF
HPSDIEVDLLKNGERIEKVEHSDLSFSKDWSFYLLYYTEFTPTEKDEYAC
RVNHVTLSQPKIVKWDRDMGGGGSGGGGSGGGGSGGGGSGSHSLKYFHTS
VSRTGRGEPRFISVGYVDDTQFVREDNDAASPRMVPRAPWMEQEGSEYWD
RETRSARDTAQIFRVNLRTLRGYYNQSEAGSHTLQWMHGCELGPDRRFLR
GYEQFAYDGKDYLTLNEDLRSWTAVDTAAQISEQKSNDASEAEHQRAYLE
DTCVEWLHKYLEKGKETLLHLEPPKTHVTHHPISDHEATLRCWALGFYPA
EITLTWQQDGEGHTQDTELVETRPAGDGTFQKWAAVVVPSGEEQRYTCHV
QHEGLPEPVTLRWKPASQPTIPIVGIIAGLVLLGSVVSGAVVAAVIWRKK
SSGGKGGSYYKAEWSDSAQGSESHSL

### B2M Signal Peptide

(SEQ ID NO: 17126)
MSRSVALAVLALLSLSGLEA

### B2M Domain:

(SEQ ID NO: 17129)
[sequence omitted]

### Linker:

(SEQ ID NO: 17130)
GGGGSGGGGSGGGGSGGGGS

### HLA-E Peptide:

(SEQ ID NO: 17131)
GSHSLKYFHTSVSRPGRGEPRFISVGYVDDTQFVRFDNDAASPRMVPRAP
WMEQEGSEYWDRETRSARDTAQIFRVNLRTLRGYYNQSEAGSHTLQWMHG
CELGPDRRFLRGYEQFAYDGKDYLTLNEDLRSWTAVDTAAQISEQNSNDA
SEAEHQRAYLEDTCVEWLHKYLEKGKETLLHLEPPKTHVTHHPISDHEAT
LRCWALGFYPAEITLTWQQDGEGHTQDTELVETRPAGDGTFQKWAAVVVP
SGEEQRYTCHVQHEGLPEPVTLRWKPASQPTIPIVGIIAGLVLLGSVVSG
AVVAAVIWRKKSSGGKGGSYYKAEWSDSAQGSESHSL

[0306] An exemplary nucleotide sequence encoding a HLA-gBE (Single Chain Dimer) protein of the disclosure comprises or consists of the nucleotide sequence of (B2M Signal peptide, B2M domain, Linker, HLA-E peptide):

(SEQ ID NO: 17067)
ATGAGCAGATCTGTGGCCCTGGCTGTTCTGGCTCTGCTGTCTCTGTCTGG
CCTGGAAGCCATCCAGCGGACCCCTAAGATCCAGGTGTACAGCAGACACC
CCGCCGAGAACGGCAAGAGCAACTTCCTGAACTGCTACGTGTCCGGCTTT
CACCCCAGCGACATTGAGGTGGACCTGCTGAAGAACGGCGAGCGGATCGA
GAAGGTGGAACACAGCGATCTGAGCTTCAGCAAGGACTGGTCCTTCTACC
TGCTGTACTACACCGAGTTCACCCCTACCGAGAAGGACGAGTACGCCTGC
AGAGTGAACCACGTGACACTGAGCCAGCCTAAGATCGTGAAGTGGGACAG
AGATATGGGCGGAGGCGGATCTGGTGGCGGAGGAAGTGGCGGCGGAGGAT
CTGGCGGTGGTGGTTCTGGATCTCACAGCCTGAAGTACTTTCACACCTCC
GTGTCCAGACCTGGCAGAGGCGAGCCTAGATTCATCAGCGTGGGCTACGT
GGACGACACCCAGTTCGTCAGATTCGACAACGACGCCGCCTCTCCTCGGA
TGGTTCCTAGAGCACCCTGGATGGAACAAGAGGGCAGCGAGTACTGGGAT
CGCGAGACAAGAAGCGCCAGAGACACAGCCCAGATCTTCCGCGTGAACCT
GAGAACCCTGCGGGGCTACTACAATCAGTCTGAGGCCGGCTCTCACACCC
TGCAGTGGATGCATGGATGTGAACTGGGCCCCGACAGACGGTTCCTGAGA
GGCTATGAGCAGTTCGCCTACGACGGCAAGGACTACCTGACACTGAACGA
GGACCTGAGAAGCTGGACCGCCGTGGATACAGCCGCTCAGATCAGCGAGC
AGAAGTCTAACGACGCCAGCGAGGCCGAACACCAGAGAGCCTATCTGGAA
GATACCTGCGTGGAATGGCTGCACAAGTACCTGGAAAAGGGCAAAGAGAC
ACTGCTGCACCTGGAACCTCCAAAGACACATGTGACCCACCATCCTATCA
GCGACCACGAGGCCACACTGAGATGTTGGGCCCTGGGCTTTTACCCTGCC
GAGATCACACTGACATGGCAGCAGGATGGCGAGGGCCACACACAGGATAC
AGAGCTGGTGGAAACAAGACCTGCCGGCGACGGCACCTTCCAGAAATGGG
CTGCTGTGGTTGTGCCCAGCGGCGAGGAACAGAGATACACCTGTCACGTG
CAGCACGAGGGACTGCCTGAACCTGTGACTCTGAGATGGAAGCCTGCCAG
CCAGCCAACAATCCCCATCGTGGGAATCATTGCCGGCCTGGTGCTGCTGG
GATCTGTGGTTTCTGGTGCTGTGGTGGCCGCCGTGATTTGGAGAAAGAAG
TCCTCTGGCGGCAAAGGCGGCTCCTACTATAAGGCCGAGTGGAGCGATTC
TGCCCAGGGCTCTGAAAGCCACAGCCTGTGA

### B2M Signal Peptide:

(SEQ ID NO: 17132)
ATGAGCAGATCTGTGGCCCTGGCTGTTCTGGCTCTGCTGTCTCTGTCTGG
CCTGGAAGCC

### B2M Domain:

(SEQ ID NO: 17135)
ATCCAGCGGACCCCTAAGATCCAGGTGTACAGCAGACACCCCGCCGAGAA
CGGCAAGAGCAACTTCCTGAACTGCTACGTGTCCGGCTTTCACCCCAGCG
ACATTGAGGTGGACCTGCTGAAGAACGGCGAGCGGATCGAGAAGGTGGAA
CACAGCGATCTGAGCTTCAGCAAGGACTGGTCCTTCTACCTGCTGTACTA
CACCGAGTTCACCCCTACCGAGAAGGACGAGTACGCCTGCAGAGTGAACC
ACGTGACACTGAGCCAGCCTAAGATCGTGAAGTGGGACAGAGATATG

### Linker:

(SEQ ID NO: 17136)
GGCGGAGGCGGATCTGGTGGCGGAGGAAGTGGCGGCGGAGGATCTGGCGG
TGGTGGTTCT

### HLA-E Peptide:

(SEQ ID NO: 17137)
GGATCTCACAGCCTGAAGTACTTTCACACCTCCGTGTCCAGACCTGGCAG
AGGCGAGCCTAGATTCATCAGCGTGGGCTACGTGGACGACACCCAGTTCG
TCAGATTCGACAACGACGCCGCCTCTCCTCGGATGGTTCCTAGAGCACCC
TGGATGGAACAAGAGGGCAGCGAGTACTGGGATCGCGAGACAAGAAGCGC
CAGAGACACAGCCCAGATCTTCCGCGTGAACCTGAGAACCCTGCGGGGCT
ACTACAATCAGTCTGAGGCCGGCTCTCACACCCTGCAGTGGATGCATGGA
TGTGAACTGGGCCCCGACAGACGGTTCCTGAGAGGCTATGAGCAGTTCGC
CTACGACGGCAAGGACTACCTGACACTGAACGAGGACCTGAGAAGCTGGA
CCGCCGTGGATACAGCCGCTCAGATCAGCGAGCAGAAGTCTAACGACGCC
AGCGAGGCCGAACACCAGAGAGCCTATCTGGAAGATACCTGCGTGGAATG
GCTGCACAAGTACCTGGAAAAGGGCAAAGAGACACTGCTGCACCTGGAAC
CTCCAAAGACACATGTGACCCACCATCCTATCAGCGACCACGAGGCCACA
CTGAGATGTTGGGCCCTGGGCTTTTACCCTGCCGAGATCACACTGACATG
GCAGCAGGATGGCGAGGGCCACACACAGGATACAGAGCTGGTGGAAACAA
GACCTGCCGGCGACGGCACCTTCCAGAAATGGGCTGCTGTGGTTGTGCCC
AGCGGCGAGGAACAGAGATACACCTGTCACGTGCAGCACGAGGGACTGCC
TGAACCTGTGACTCTGAGATGGAAGCCTGCCAGCCAGCCAACAATCCCCA
TCGTGGGAATCATTGCCGGCCTGGTGCTGCTGGGATCTGTGGTTTCTGGT
GCTGTGGTGGCCGCCGTGATTTGGAGAAAGAAGTCCTCTGGCGGCAAAGG
CGGCTCCTACTATAAGGCCGAGTGGAGCGATTCTGCCCAGGGCTCTGAAA
GCCACAGCCTGTGA

[0311] An exemplary HLA-bE (Monomer) protein of the disclosure comprises or consists of the amino acid sequence of (B2M Signal peptide, HLA-E peptide):

(SEQ ID NO: 17068)
MSRSVALAVLALLSLSGLEAGSHSLKYFHTSVSRPGRGEPRFISVGYVDD
TQFVRFDNDAASPRMVPRAPWMEQEGSEYWDRETRSARDTAQIFRVNLRT
LRGYYNQSEAGSHTLQWMHGCELGPDRRFLRGYEQFAYDGKDYLTLNEDL
RSWTAVDTAAQISEQKSNDASEAEHQRAYLEDTCVEWLHKYLEKGKETLL
HLEPPKTHVTHHPISDHEATLRCWALGFYPAEITLTWQQDGEGHTQDTEL
VETRPAGDGTFQKWAAVVVPSGEEQRYTCHVQHEGLPEPVTLRWKPASQP
TIPIVGIIAGLVLLGSWSGAWAAVIWRKKSSGGKGGSYYKAEWSDSAQGS
ESHSL

### B2M Signal Peptide:

(SEQ ID NO: 17126)
MSRSVALAVLALLSLSGLEA

### HLA-E Peptide:

(SEQ ID NO: 17131)
GSHSLKYFHTSVSRPGRGEPRFISVGYVDDTQFVRFDNDAASPRMVPRAP
WMEQEGSEYWDRETRSARDTAQIFRVNLRTLRGYYNQSEAGSHTLQWMHG
CELGPDRRFLRGYEQFAYDGKDYLTLNEDLRSWTAVDTAAQISEQKSNDA
SEAEHQRAYLEDTCVEWLHKYLEKGKETLLHLEPPKTHVTHHPISDHEAT
LRCWALGFYPAEITLTWQQDGEGHTQDTELVETRPAGDGTFQKWAAVVVP
SGEEQRYTCHVQHEGLPEPVTLRWKPASQPTIPIVGIIAGLVLLGSVVSG
AVVAAVIWRKKSSGGKGGSYYKAEWSDSAQGSESHSL

[0314] An exemplary nucleotide sequence encoding a HLA-bE (Monomer) protein of the disclosure comprises or consists of the nucleotide sequence of (B2M Signal peptide, HLA-E peptide):

(SEQ ID NO: 17069)
ATGTCTCGCAGCGTGGCCCTGGCCGTGCTGGCCCTGCTGTCCCTGTCTGG
CCTGGAGGCCGGCAGCCACTCCCTGAAGTATTTCCACACCTCTGTGAGCC
GGCCAGGCAGAGGAGAGCCACGGTTCATCTCTGTGGGCTACGTGGACGAT
ACACAGTTCGTGAGGTTTGACAATGATGCCGCCAGCCCAAGAATGGTGCC
TAGGGCCCCATGGATGGAGCAGGAGGGCAGCGAGTATTGGGACAGGGAGA
CCCGGAGCGCCAGAGACACAGCACAGATTTTCCGGGTGAACCTGAGAACC
CTGAGGGGCTACTATAATCAGTCCGAGGCCGGCTCTCACACACTCCAGTG
GATGCACGGATGCGAGCTGGGACCAGATCGCCGCTTCCTGCGGGGCTACG
AGCAGTTTGCCTATGACGGCAAGGATTACCTGACCCTGAACGAGGACCTG
AGATCCTGGACCGCCGTGGATACAGCCGCCCAGATCAGCGAGCAGAAGTC
CAATGACGCATCTGAGGCAGAGCACCAGAGGGCATATCTGGAGGATACCT
GCGTGGAGTGGCTGCACAAGTACCTGGAGAAGGGCAAGGAGACACTGCTG
CACCTGGAGCCCCCTAAGACCCACGTGACACACCACCCAATCAGCGACCA
CGAGGCCACCCTGAGGTGTTGGGCACTGGGCTTCTATCCCGCCGAGATCA
CCCTGACATGGCAGCAGGACGGAGAGGGACACACCCAGGATACAGAGCTG
GTGGAGACCAGGCCCGCCGGCGATGGCACATTTCAGAAGTGGGCCGCCGT
GGTGGTGCCTTCCGGAGAGGAGCAGAGATACACCTGTCACGTGCAGCACG
AGGGACTGCCAGAGCCAGTGACCCTGAGGTGGAAGCCTGCCAGCCAGCCC
ACAATCCCTATCGTGGGAATCATCGCAGGCCTGGTGCTGCTGGGCTCTGT
GGTGAGCGGAGCAGTGGTGGCCGCCGTGATCTGGCGGAAGAAGAGCAGCG
GAGGCAAGGGAGGCTCCTACTATAAGGCAGAGTGGAGCGACTCCGCCCAG
GGCTCTGA

### B2M Signal Peptide:

(SEQ ID NO: 17132)
ATGTCTCGCAGCGTGGCCCTGGCCGTGCTGGCCCTGCTGTCCCTGTCTGG
CCTGGAGGCC

### HLA-E Peptide:

(SEQ ID NO: 17137)
GGCAGCCACTCCCTGAAGTATTTCCACACCTCTGTGAGCCGGCCAGGCAG
AGGAGAGCCACGGTTCATCTCTGTGGGCTACGTGGACGATACACAGTTCG
TGAGGTTTGACAATGATGCCGCCAGCCCAAGAATGGTGCCTAGGGCCCCA
TGGATGGAGCAGGAGGGCAGCGAGTATTGGGACAGGGAGACCCGGAGCGC
CAGAGACACAGCACAGATTTTCCGGGTGAACCTGAGAACCCTGAGGGGCT
ACTATAATCAGTCCGAGGCCGGCTCTCACACACTCCAGTGGATGCACGGA
TGCGAGCTGGGACCAGATCGCCGCTTCCTGCGGGGCTACGAGCAGTTTGC
CTATGACGGCAAGGATTACCTGACCCTGAACGAGGACCTGAGATCCTGGA
CCGCCGTGGATACAGCCGCCCAGATCAGCGAGCAGAAGTCCAATGACGCA
TCTGAGGCAGAGCACCAGAGGGCATATCTGGAGGATACCTGCGTGGAGTG
GCTGCACAAGTACCTGGAGAAGGGCAAGGAGACACTGCTGCACCTGGAGC
CCCCTAAGACCCACGTGACACACCACCCAATCAGCGACCACGAGGCCACC
CTGAGGTGTTGGGCACTGGGCTTCTATCCCGCCGAGATCACCCTGACATG
GCAGCAGGACGGAGAGGGACACACCCAGGATACAGAGCTGGTGGAGACCA
GGCCCGCCGGCGATGGCACATTTCAGAAGTGGGCCGCCGTGGTGGTGCCT
TCCGGAGAGGAGCAGAGATACACCTGTCACGTGCAGCACGAGGGACTGCC
AGAGCCAGTGACCCTGAGGTGGAAGCCTGCCAGCCAGCCCACAATCCCTA
TCGTGGGAATCATCGCAGGCCTGGTGCTGCTGGGCTCTGTGGTGAGCGGA
GCAGTGGTGGCCGCCGTGATCTGGCGGAAGAAGAGCAGCGGAGGCAAGGG
AGGCTCCTACTATAAGGCAGAGTGGAGCGACTCCGCCCAGGGCTCTGA

### Immune and Immune Precursor Cells

[0317] In certain embodiments, immune cells of the disclosure comprise lymphoid progenitor cells, natural killer (NK) cells, T lymphocytes (T-cell), stem memory T cells (T_{SCM} cells), central memory T cells (T_{CM}), stem cell-like T cells, B lymphocytes (B-cells), myeloid progenitor cells, neutrophils, basophils, eosinophils, monocytes, macrophages, platelets, erythrocytes, red blood cells (RBCs), megakaryocytes or osteoclasts.

[0318] In certain embodiments, immune precursor cells comprise any cells which can differentiate into one or more types of immune cells. In certain embodiments, immune precursor cells comprise multipotent stem cells that can self renew and develop into immune cells. In certain embodiments, immune precursor cells comprise hematopoietic stem cells (HSCs) or descendants thereof. In certain embodiments, immune precursor cells comprise precursor cells that can develop into immune cells. In certain embodiments, the immune precursor cells comprise hematopoietic progenitor cells (HPCs).

### Hematopoietic Stem Cells (HSCs)

[0319] Hematopoietic stem cells (HSCs) are multipotent, self-renewing cells. All differentiated blood cells from the lymphoid and myeloid lineages arise from HSCs. HSCs can be found in adult bone marrow, peripheral blood, mobilized peripheral blood, peritoneal dialysis effluent and umbilical cord blood.

[0320] HSCs of the disclosure may be isolated or derived from a primary or cultured stem cell. HSCs of the disclosure may be isolated or derived from an embryonic stem cell, a multipotent stem cell, a pluripotent stem cell, an adult stem cell, or an induced pluripotent stem cell (iPSC).

[0321] Immune precursor cells of the disclosure may comprise an HSC or an HSC descendent cell. Exemplary HSC descendent cells of the disclosure include, but are not limited to, multipotent stem cells, lymphoid progenitor cells, natural killer (NK) cells, T lymphocyte cells (T-cells), B lymphocyte cells (B-cells), myeloid progenitor cells, neutrophils, basophils, eosinophils, monocytes, and macrophages.

[0322] HSCs produced by the methods of the disclosure may retain features of “primitive” stem cells that, while isolated or derived from an adult stem cell and while committed to a single lineage, share characteristics of embryonic stem cells. For example, the “primitive” HSCs produced by the methods of the disclosure retain their “sternness” following division and do not differentiate. Consequently, as an adoptive cell therapy, the “primitive” HSCs produced by the methods of the disclosure not only replenish their numbers, but expand in vivo. “Primitive” HSCs produced by the methods of the disclosure may be therapeutically-effective when administered as a single dose. In some embodiments, primitive HSCs of the disclosure are CD34+. In some embodiments, primitive HSCs of the disclosure are CD34+ and CD38−. In some embodiments, primitive HSCs of the disclosure are CD34+, CD38− and CD90+. In some embodiments, primitive HSCs of the disclosure are CD34+, CD38−, CD90+ and CD45RA−. In some embodiments, primitive HSCs of the disclosure are CD34+, CD38−, CD90+, CD45RA−, and CD49f+. In some embodiments, the most primitive HSCs of the disclosure are CD34+, CD38−, CD90+, CD45RA−, and CD49f+.

[0323] In some embodiments of the disclosure, primitive HSCs, HSCs, and/or HSC descendent cells may be modified according to the methods of the disclosure to express an exogenous sequence (e.g. a chimeric antigen receptor or therapeutic protein). In some embodiments of the disclosure, modified primitive HSCs, modified HSCs, and/or modified HSC descendent cells may be forward differentiated to produce a modified immune cell including, but not limited to, a modified T cell, a modified natural killer cell and/or a modified B-cell of the disclosure.

### T Cells

[0324] Modified T cells of the disclosure may be derived from modified hematopoietic stem and progenitor cells (HSPCs) or modified HSCs.

[0325] Unlike traditional biologics and chemotherapeutics, modified-T cells of the disclosure possess the capacity to rapidly reproduce upon antigen recognition, thereby potentially obviating the need for repeat treatments. To achieve this, in some embodiments, modified-T cells of the disclosure not only drive an initial response, but also persist in the patient as a stable population of viable memory T cells to prevent potential relapses. Alternatively, in some embodiments, when it is not desired, modified-T cells of the disclosure do not persist in the patient.

[0326] Intensive efforts have been focused on the development of antigen receptor molecules that do not cause T cell exhaustion through antigen-independent (tonic) signaling, as well as of a modified-T cell product containing early memory T cells, especially stem cell memory (T_{SCM}) or stem cell-like T cells. Stem cell-like modified-T cells of the disclosure exhibit the greatest capacity for self-renewal and multipotent capacity to derive central memory (T_{CM}) T cells or T_{CM} like cells, effector memory (T_{EM}) and effector T cells (T_{E}), thereby producing better tumor eradication and long-term modified-T cell engraftment. A linear pathway of differentiation may be responsible for generating these cells: Naïve T cells (T_{N})>T_{SCM}>T_{CM}>T_{EM}>T_{E}>T_{TE}, whereby T_{N} is the parent precursor cell that directly gives rise to T_{SCM}, which then, in turn, directly gives rise to T_{CM}, etc. Compositions of T cells of the disclosure may comprise one or more of each parental T cell subset with T_{SCM} cells being the most abundant (e.g. T_{SCM}>T_{CM}>T_{EM}>T_{E}>T_{TE}).

[0327] In some embodiments of the methods of the disclosure, the immune cell precursor is differentiated into or is capable of differentiating into an early memory T cell, a stem cell like T-cell, a Naïve T cells (T_{N}), a T_{SCM}, a T_{CM}, a T_{EM}, a T_{E}, or a T_{TE} In some embodiments, the immune cell precursor is a primitive HSC, an HSC, or a HSC descendent cell of the disclosure.

[0328] In some embodiments of the methods of the disclosure, the immune cell is an early memory T cell, a stem cell like T-cell, a Naïve T cells (T_{N}), a T_{SCM}, a T_{CM}, a T_{EM}, a T_{E}, or a T_{TE}.

[0329] In some embodiments of the methods of the disclosure, the immune cell is an early memory T cell.

[0330] In some embodiments of the methods of the disclosure, the immune cell is a stem cell like T-cell.

[0331] In some embodiments of the methods of the disclosure, the immune cell is a T_{SCM}.

[0332] In some embodiments of the methods of the disclosure, the immune cell is a T_{CM}.

[0333] In some embodiments of the methods of the disclosure, the methods modify and/or the methods produce a plurality of modified T cells, wherein at least 2%, 5%, 10%, 15%, 20%, 25%, 309%, 35%, 40%, 45%, 50%, 60%, 65%, 70%, 75%, 80%, 85%, 90%, 95%, 99% or any percentage in between of the plurality of modified T cells expresses one or more cell-surface marker(s) of an early memory T cell. In certain embodiments, the plurality of modified early memory T cells comprises at least one modified stem cell-like T cell. In certain embodiments, the plurality of modified early memory T cells comprises at least one modified T_{SCM}. In certain embodiments, the plurality of modified early memory T cells comprises at least one modified T_{CM}.

[0334] In some embodiments of the methods of the disclosure, the methods modify and/or the methods produce a plurality of modified T cells, wherein at least 2%, 5%, 10%, 15%, 20%, 25%, 30%, 35%, 40%, 45%, 50%, 60%, 65%, 70%, 75%, 80%, 85%, 90%, 95%, 99% or any percentage in between of the plurality of modified T cells expresses one or more cell-surface marker(s) of a stem cell-like T cell. In certain embodiments, the plurality of modified stem cell-like T cells comprises at least one modified T_{SCM}. In certain embodiments, the plurality of modified stem cell-like T cells comprises at least one modified T_{CM}.

[0335] In some embodiments of the methods of the disclosure, the methods modify and/or the methods produce a plurality of modified T cells, wherein at least 2%, 5%, 10%, 15%, 20%, 25%, 30%, 35%, 40%, 45%, 50%, 60%, 65%, 70%, 75%, 80%, 85%, 90%, 95%, 99% or any percentage in between of the plurality of modified T cells expresses one or more cell-surface marker(s) of a stem memory T cell (T_{SCM}). In certain embodiments, the cell-surface markers comprise CD62L and CD45RA. In certain embodiments, the cell-surface markers comprise one or more of CD62L, CD45RA, CD28. CCR7, CD127, CD45RO, CD95, CD95 and IL-2Rβ. In certain embodiments, the cell-surface markers comprise one or more of CD45RA, CD95, IL-2Rβ, CCR7, and CD62L.

[0336] In some embodiments of the methods of the disclosure, the methods modify and/or the methods produce a plurality of modified T cells, wherein at least 2%, 5%, 10%, 15%, 20%, 25%, 30%, 35%, 40%, 45%, 50%, 60%, 65%, 70%, 75%, 80%, 85%, 90%, 95%, 99% or any percentage in between of the plurality of modified T cells expresses one or more cell-surface marker(s) of a central memory T cell (T_{CM}). In certain embodiments, the cell-surface markers comprise one or more of CD45RO, CD95, IL-2Rβ, CCR7, and CD62L.

[0337] In some embodiments of the methods of the disclosure, the methods modify and/or the methods produce a plurality of modified T cells, wherein at least 2%, 5%, 10%, 15%, 20%, 25%, 30%, 35%, 40%, 45%, 50%, 60%, 65%, 70%, 75%, 80%, 85%, 90%, 95%, 99% or any percentage in between of the plurality of modified T cells expresses one or more cell-surface marker(s) of a naïve T cell (T_{N}). In certain embodiments, the cell-surface markers comprise one or more of CD45RA, CCR7 and CD62L.

[0338] In some embodiments of the methods of the disclosure, the methods modify and/or the methods produce a plurality of modified T cells, wherein at least 2%, 5%, 10%, 15%, 20%, 25%, 30%, 35%, 40%, 45%, 50%, 60%, 65%, 70%, 75%, 80%, 85%, 90%, 95%, 99% or any percentage in between of the plurality of modified T cells expresses one or more cell-surface marker(s) of an effector T-cell (modified T_{EFF}). In certain embodiments, the cell-surface markers comprise one or more of CD45RA, CD95, and IL-2Rβ.

[0339] In some embodiments of the methods of the disclosure, the methods modify and/or the methods produce a plurality of modified T cells, wherein at least 2%, 5%, 10%, 15%, 20%, 25%, 30%, 35%, 40%, 45%, 50%, 60%, 65%, 70%, 75%, 80%, 85%, 90%, 95%, 99% or any percentage in between of the plurality of modified T cells expresses one or more cell-surface marker(s) of a stem cell-like T cell, a stem memory T cell (T_{SCM}) or a central memory T cell (T_{CM}).

[0340] In some embodiments of the methods of the disclosure, a buffer comprises the immune cell or precursor thereof. The buffer maintains or enhances a level of cell viability and/or a stem-like phenotype of the immune cell or precursor thereof, including T-cells. In certain embodiments, the buffer maintains or enhances a level of cell viability and/or a stem-like phenotype of the primary human T cells prior to the nucleofection. In certain embodiments, the buffer maintains or enhances a level of cell viability and/or a stem-like phenotype of the primary human T cells during the nucleofection. In certain embodiments, the buffer maintains or enhances a level of cell viability and/or a stem-like phenotype of the primary human T cells following the nucleofection. In certain embodiments, the buffer comprises one or more of KCl, MgCl₂, ClNa, Glucose and Ca(NO₃)₂ in any absolute or relative abundance or concentration, and, optionally, the buffer further comprises a supplement selected from the group consisting of HEPES, Tris/HCl, and a phosphate buffer. In certain embodiments, the buffer comprises 5 mM KCl, 15 mM MgCl₂, 90 mM ClNa, 10 mM Glucose and 0.4 mM Ca(NO₃)₂. In certain embodiments, the buffer comprises 5 mM KCl, 15 mM MgCl₂, 90 mM ClNa, 10 mM Glucose and 0.4 mM Ca(NO₃)₂ and a supplement comprising 20 mM HEPES and 75 mM Tris/ICI. In certain embodiments, the buffer comprises 5 mM KCl, 15 mM MgCl₂, 90 mM ClNa, 10 mM Glucose and 0.4 mM Ca(NO₃)₂ and a supplement comprising 40 mM Na₂HPO₄/NaH₂PO₄ at pH 7.2. In certain embodiments, the composition comprising primary human T cells comprises 100 μl of the buffer and between 5×10⁶ and 25×10⁶ cells. In certain embodiments, the composition comprises a scalable ratio of 250×10⁶ primary human T cells per milliliter of buffer or other media during the introduction step.

[0341] In some embodiments of the methods of the disclosure, the methods comprise contacting an immune cell of the disclosure, including a T cell of the disclosure, and a T-cell expansion composition. In some embodiments of the methods of the disclosure, the step of introducing a transposon and/or transposase of the disclosure into an immune cell of the disclosure may further comprise contacting the immune cell and a T-cell expansion composition. In some embodiments, including those in which the introducing step of the methods comprises an electroporation or a nucleofection step, the electroporation or a nucleofection step may be performed with the immune cell contacting T-cell expansion composition of the disclosure.

[0342] In some embodiments of the methods of the disclosure, the T-cell expansion composition comprises, consists essentially of or consists of phosphorus; one or more of an octanoic acid, a palmitic acid, a linoleic acid, and an oleic acid; a sterol; and an alkane.

[0343] In certain embodiments of the methods of producing a modified T cell of the disclosure, the expansion supplement comprises one or more cytokine(s). The one or more cytokine(s) may comprise any cytokine, including but not limited to, lymphokines. Exemplary lympokines include, but are not limited to, interleukin-2 (IL-2), interleukin-3 (IL-3), interleukin-4 (IL-4), interleukin-5 (IL-5), interleukin-6 (IL-6), interleukin-7 (IL-7), interleukin-15 (IL-15), interleukin-21 (IL-21), granulocyte-macrophage colony-stimulating factor (GM-CSF) and interferon-gamma (INFγ). The one or more cytokine(s) may comprise IL-2.

[0344] In some embodiments of the methods of the disclosure, the T-cell expansion composition comprises human serum albumin, recombinant human insulin, human transferrin, 2-Mercaptoethanol, and an expansion supplement. In certain embodiments of this method, the T-cell expansion composition further comprises one or more of octanoic acid, nicotinamide, 2,4,7,9-tetramethyl-5-decyn-4,7-diol (TMDD), diisopropyl adipate (DIPA), n-butyl-benzenesulfonamide, 1,2-benzenedicarboxylic acid, bis(2-methylpropyl) ester, palmitic acid, linoleic acid, oleic acid, stearic acid hydrazide, oleamide, a sterol and an alkane. In certain embodiments of this method, the T-cell expansion composition further comprises one or more of octanoic acid, palmitic acid, linoleic acid, oleic acid and a sterol. In certain embodiments of this method, the T-cell expansion composition further comprises one or more of octanoic acid at a concentration of between 0.9 mg/kg to 90 mg/kg, inclusive of the endpoints; palmitic acid at a concentration of between 0.2 mg/kg to 20 mg/kg, inclusive of the endpoints; linoleic acid at a concentration of between 0.2 mg/kg to 20 mg/kg, inclusive of the endpoints; oleic acid at a concentration of 0.2 mg/kg to 20 mg/kg, inclusive of the endpoints; and a sterol at a concentration of about 0.1 mg/kg to 10 mg/kg, inclusive of the endpoints. In certain embodiments of this method, the T-cell expansion composition further comprises one or more of octanoic acid at a concentration of about 9 mg/kg, palmitic acid at a concentration of about 2 mg/kg, linoleic acid at a concentration of about 2 mg/kg, oleic acid at a concentration of about 2 mg/kg and a sterol at a concentration of about 1 mg/kg. In certain embodiments of this method, the T-cell expansion composition further comprises one or more of octanoic acid at a concentration of between 6.4 μmol/kg and 640 μmol/kg, inclusive of the endpoints; palmitic acid at a concentration of between 0.7 μmol/kg and 70 μmol/kg, inclusive of the endpoints; linoleic acid at a concentration of between 0.75 μmol/kg and 75 μmol/kg, inclusive of the endpoints; oleic acid at a concentration of between 0.75 μmol/kg and 75 μmol/kg, inclusive of the endpoints; and a sterol at a concentration of between 0.25 μmol/kg and 25 μmol/kg, inclusive of the endpoints. In certain embodiments of this method, the T-cell expansion composition further comprises one or more of octanoic acid at a concentration of about 64 μmol/kg, palmitic acid at a concentration of about 7 μmol/kg, linoleic acid at a concentration of about 7.5 μmol/kg, oleic acid at a concentration of about 7.5 μmol/kg and a sterol at a concentration of about 2.5 μmol/kg.

[0345] In certain embodiments, the T-cell expansion composition comprises one or more of human serum albumin, recombinant human insulin, human transferrin, 2-Mercaptoethanol, and an expansion supplement to produce a plurality of expanded modified T-cells, wherein at least 2% of the plurality of modified T-cells expresses one or more cell-surface marker(s) of an early memory T cell, a stem cell-like T cell, a stem memory T cell (T_{SCM}) and/or a central memory T cell (T_{CM}). In certain embodiments, the T-cell expansion composition comprises or further comprises one or more of octanoic acid, nicotinamide, 2,4,7,9-tetramethyl-5-decyn-4,7-diol (TMDD), diisopropyl adipate (DIPA), n-butyl-benzenesulfonamide, 1,2-benzenedicarboxylic acid, bis(2-methylpropyl) ester, palmitic acid, linoleic acid, oleic acid, stearic acid hydrazide, oleamide, a sterol and an alkane. In certain embodiments, the T-cell expansion composition comprises one or more of octanoic acid, palmitic acid, linoleic acid, oleic acid and a sterol (e.g. cholesterol). In certain embodiments, the T-cell expansion composition comprises one or more of octanoic acid at a concentration of between 0.9 mg/kg to 90 mg/kg, inclusive of the endpoints; palmitic acid at a concentration of between 0.2 mg/kg to 20 mg/kg, inclusive of the endpoints; linoleic acid at a concentration of between 0.2 mg/kg to 20 mg/kg, inclusive of the endpoints; oleic acid at a concentration of 0.2 mg/kg to 20 mg/kg, inclusive of the endpoints; and a sterol at a concentration of about 0.1 mg/kg to 10 mg/kg, inclusive of the endpoints (wherein mg/kg=parts per million). In certain embodiments, the T-cell expansion composition comprises one or more of octanoic acid at a concentration of about 9 mg/kg, palmitic acid at a concentration of about 2 mg/kg, linoleic acid at a concentration of about 2 mg/kg, oleic acid at a concentration of about 2 mg/kg, and a sterol at a concentration of about 1 mg/kg (wherein mg/kg=parts per million). In certain embodiments, the T-cell expansion composition comprises one or more of octanoic acid at a concentration of 9.19 mg/kg, palmitic acid at a concentration of 1.86 mg/kg, linoleic acid at a concentration of about 2.12 mg/kg, oleic acid at a concentration of about 2.13 mg/kg, and a sterol at a concentration of about 1.01 mg/kg (wherein mg/kg=parts per million). In certain embodiments, the T-cell expansion composition comprises octanoic acid at a concentration of 9.19 mg/kg, palmitic acid at a concentration of 1.86 mg/kg, linoleic acid at a concentration of 2.12 mg/kg, oleic acid at a concentration of about 2.13 mg/kg, and a sterol at a concentration of 1.01 mg/kg (wherein mg/kg=parts per million). In certain embodiments, the T-cell expansion composition comprises one or more of octanoic acid at a concentration of between 6.4 μmol/kg and 640 μmol/kg, inclusive of the endpoints; palmitic acid at a concentration of between 0.7 μmol/kg and 70 μmol/kg, inclusive of the endpoints; linoleic acid at a concentration of between 0.75 μmol/kg and 75 μmol/kg, inclusive of the endpoints; oleic acid at a concentration of between 0.75 μmol/kg and 75 μmol/kg, inclusive of the endpoints; and a sterol at a concentration of between 0.25 μmol/kg and 25 μmol/kg, inclusive of the endpoints. In certain embodiments, the T-cell expansion composition comprises one or more of octanoic acid at a concentration of about 64 μmol/kg, palmitic acid at a concentration of about 7 μmol/kg, linoleic acid at a concentration of about 7.5 μmol/kg, oleic acid at a concentration of about 7.5 μmol/kg and a sterol at a concentration of about 2.5 μmol/kg. In certain embodiments, the T-cell expansion composition comprises one or more of octanoic acid at a concentration of about 63.75 μmol/kg, palmitic acid at a concentration of about 7.27 μmol/kg, linoleic acid at a concentration of about 7.57 μmol/kg, oleic acid at a concentration of about 7.56 μmol/kg and a sterol at a concentration of about 2.61 μmol/kg. In certain embodiments, the T-cell expansion composition comprises octanoic acid at a concentration of about 63.75 μmol/kg, palmitic acid at a concentration of about 7.27 μmol/kg, linoleic acid at a concentration of about 7.57 μmol/kg, oleic acid at a concentration of 7.56 μmol/kg and a sterol at a concentration of 2.61 μmol/kg.

[0346] As used herein, the terms “supplemented T-cell expansion composition” or “T-cell expansion composition” may be used interchangeably with a media comprising one or more of human serum albumin, recombinant human insulin, human transferrin, 2-Mercaptoethanol, and an expansion supplement at 37° C. Alternatively, or in addition, the terms “supplemented T-cell expansion composition” or “T-cell expansion composition” may be used interchangeably with a media comprising one or more of phosphorus, an octanoic fatty acid, a palmitic fatty acid, a linoleic fatty acid and an oleic acid. In certain embodiments, the media comprises an amount of phosphorus that is 10-fold higher than may be found in, for example, Iscove's Modified Dulbecco's Medium ((IMDM); available at ThermoFisher Scientific as Catalog number 12440053).

[0347] As used herein, the terms “supplemented T-cell expansion composition” or “T-cell expansion composition” may be used interchangeably with a media comprising one or more of human serum albumin, recombinant human insulin, human transferrin, 2-Mercaptoethanol, Iscove's MDM, and an expansion supplement at 37° C. Alternatively, or in addition, the terms “supplemented T-cell expansion composition” or “T-cell expansion composition” may be used interchangeably with a media comprising one or more of the following elements: boron, sodium, magnesium, phosphorus, potassium, and calcium. In certain embodiments, the terms “supplemented T-cell expansion composition” or “T-cell expansion composition” may be used interchangeably with a media comprising one or more of the following elements present in the corresponding average concentrations: boron at 3.7 mg/L, sodium at 3000 mg/L, magnesium at 18 mg/L, phosphorus at 29 mg/L, potassium at 15 mg/L and calcium at 4 mg/L.

[0348] As used herein, the terms “supplemented T-cell expansion composition” or “T-cell expansion composition” may be used interchangeably with a media comprising one or more of human serum albumin, recombinant human insulin, human transferrin, 2-Mercaptoethanol, and an expansion supplement at 37° C. Alternatively, or in addition, the terms “supplemented T-cell expansion composition” or “T-cell expansion composition” may be used interchangeably with a media comprising one or more of the following components: octanoic acid (CAS No. 124-07-2), nicotinamide (CAS No. 98-92-0), 2,4,7,9-tetramethyl-5-decyn-4,7-diol (TMDD) (CAS No. 126-86-3), diisopropyl adipate (DIPA) (CAS No. 6938-94-9), n-butyl-benzenesulfonamide (CAS No. 3622-84-2), 1,2-benzenedicarboxylic acid, bis(2-methylpropyl) ester (CAS No. 84-69-5), palmitic acid (CAS No. 57-10-3), linoleic acid (CAS No. 60-33-3), oleic acid (CAS No. 112-80-1), stearic acid hydrazide (CAS No. 4130-54-5), oleamide (CAS No. 3322-62-1), sterol (e.g., cholesterol) (CAS No. 57-88-5), and alkanes (e.g., nonadecane) (CAS No. 629-92-5). In certain embodiments, the terms “supplemented T-cell expansion composition” or “T-cell expansion composition” may be used interchangeably with a media comprising one or more of the following components: octanoic acid (CAS No. 124-07-2), nicotinamide (CAS No. 98-92-0), 2,4,7,9-tetramethyl-5-decyn-4,7-diol (TMDD) (CAS No. 126-86-3), diisopropyl adipate (DIPA) (CAS No. 6938-94-9), n-butyl-benzenesulfonamide (CAS No. 3622-84-2), 1,2-benzenedicarboxylic acid, bis(2-methylpropyl) ester (CAS No. 84-69-5), palmitic acid (CAS No. 57-10-3), linoleic acid (CAS No. 60-33-3), oleic acid (CAS No. 112-80-1), stearic acid hydrazide (CAS No. 4130-54-5), oleamide (CAS No. 3322-62-1), sterol (e.g., cholesterol) (CAS No. 57-88-5), alkanes (e.g., nonadecane) (CAS No. 629-92-5), and phenol red (CAS No. 143-74-8). In certain embodiments, the terms “supplemented T-cell expansion composition” or “T-cell expansion composition” may be used interchangeably with a media comprising one or more of the following components: octanoic acid (CAS No. 124-07-2), nicotinamide (CAS No. 98-92-0), 2,4,7,9-tetramethyl-5-decyn-4,7-diol (TMDD) (CAS No. 126-86-3), diisopropyl adipate (DIPA) (CAS No. 6938-94-9), n-butyl-benzenesulfonamide (CAS No. 3622-84-2), 1,2-benzenedicarboxylic acid, bis(2-methylpropyl) ester (CAS No. 84-69-5), palmitic acid (CAS No. 57-10-3), linoleic acid (CAS No. 60-33-3), oleic acid (CAS No. 112-80-1), stearic acid hydrazide (CAS No. 4130-54-5), oleamide (CAS No. 3322-62-1), phenol red (CAS No. 143-74-8) and lanolin alcohol.

[0349] In certain embodiments, the terms “supplemented T-cell expansion composition” or “T-cell expansion composition” may be used interchangeably with a media comprising one or more of human serum albumin, recombinant human insulin, human transferrin, 2-Mercaptoethanol, and an expansion supplement at 37° C. Alternatively, or in addition, the terms “supplemented T-cell expansion composition” or “T-cell expansion composition” may be used interchangeably with a media comprising one or more of the following ions: sodium, ammonium, potassium, magnesium, calcium, chloride, sulfate and phosphate.

[0350] As used herein, the terms “supplemented T-cell expansion composition” or “T-cell expansion composition” may be used interchangeably with a media comprising one or more of human serum albumin, recombinant human insulin, human transferrin, 2-Mercaptoethanol, and an expansion supplement at 37° C. Alternatively, or in addition, the terms “supplemented T-cell expansion composition” or “T-cell expansion composition” may be used interchangeably with a media comprising one or more of the following free amino acids: histidine, asparagine, serine, glutamate, arginine, glycine, aspartic acid, glutamic acid, threonine, alanine, proline, cysteine, lysine, tyrosine, methionine, valine, isoleucine, leucine, phenylalanine and tryptophan. In certain embodiments, the terms “supplemented T-cell expansion composition” or “T-cell expansion composition” may be used interchangeably with a media comprising one or more of the following free amino acids in the corresponding average mole percentages: histidine (about 1%), asparagine (about 0.5%), serine (about 1.5%), glutamine (about 67%), arginine (about 1.5%), glycine (about 1.5%), aspartic acid (about 1%), glutamic acid (about 2%), threonine (about 2%), alanine (about 1%), proline (about 1.5%), cysteine (about 1.5%), lysine (about 3%), tyrosine (about 1.5%), methionine (about 1%), valine (about 3.5%), isoleucine (about 3%), leucine (about 3.5%), phenylalanine (about 1.5%) and tryptophan (about 0.5%). In certain embodiments, the terms “supplemented T-cell expansion composition” or “T-cell expansion composition” may be used interchangeably with a media comprising one or more of the following free amino acids in the corresponding average mole percentages: histidine (about 0.78%), asparagine (about 0.4%), serine (about 1.6%), glutamine (about 67.01%), arginine (about 1.67%), glycine (about 1.72%), aspartic acid (about 1.00%), glutamic acid (about 1.93%), threonine (about 2.38%), alanine (about 1.11%), proline (about 1.49%), cysteine (about 1.65%), lysine (about 2.84%), tyrosine (about 1.62%), methionine (about 0.85%), valine (about 3.45%), isoleucine (about 3.14%), leucine (about 3.3%), phenylalanine (about 1.64%) and tryptophan (about 0.37%).

[0351] As used herein, the terms “supplemented T-cell expansion composition” or “T-cell expansion composition” may be used interchangeably with a media comprising one or more of human serum albumin, recombinant human insulin, human transferrin, 2-Mercaptoethanol, Iscove's MDM, and an expansion supplement at 37° C. Alternatively, or in addition, the terms “supplemented T-cell expansion composition” or “T-cell expansion composition” may be used interchangeably with a media comprising one or more of phosphorus, an octanoic fatty acid, a palmitic fatty acid, a linoleic fatty acid and an oleic acid. In certain embodiments, the media comprises an amount of phosphorus that is 10-fold higher than may be found in, for example, Iscove's Modified Dulbecco's Medium ((IMDM); available at ThermoFisher Scientific as Catalog number 12440053).

[0352] In certain embodiments, the terms “supplemented T-cell expansion composition” or “T-cell expansion composition” may be used interchangeably with a media comprising one or more of octanoic acid, palmitic acid, linoleic acid, oleic acid and a sterol (e.g. cholesterol). In certain embodiments, the terms “supplemented T-cell expansion composition” or “T-cell expansion composition” may be used interchangeably with a media comprising one or more of octanoic acid at a concentration of between 0.9 mg/kg to 90 mg/kg, inclusive of the endpoints; palmitic acid at a concentration of between 0.2 mg/kg to 20 mg/kg, inclusive of the endpoints; linoleic acid at a concentration of between 0.2 mg/kg to 20 mg/kg, inclusive of the endpoints; oleic acid at a concentration of 0.2 mg/kg to 20 mg/kg, inclusive of the endpoints; and a sterol at a concentration of about 0.1 mg/kg to 10 mg/kg, inclusive of the endpoints (wherein mg/kg=parts per million). In certain embodiments, the terms “supplemented T-cell expansion composition” or “T-cell expansion composition” may be used interchangeably with a media comprising one or more of octanoic acid at a concentration of about 9 mg/kg, palmitic acid at a concentration of about 2 mg/kg, linoleic acid at a concentration of about 2 mg/kg, oleic acid at a concentration of about 2 mg/kg, and a sterol at a concentration of about 1 mg/kg (wherein mg/kg=parts per million). In certain embodiments, the terms “supplemented T-cell expansion composition” or “T-cell expansion composition” may be used interchangeably with a media comprising one or more of octanoic acid at a concentration of 9.19 mg/kg, palmitic acid at a concentration of 1.86 mg/kg, linoleic acid at a concentration of about 2.12 mg/kg, oleic acid at a concentration of about 2.13 mg/kg, and a sterol at a concentration of about 1.01 mg/kg (wherein mg/kg=parts per million). In certain embodiments, the terms “supplemented T-cell expansion composition” or “T-cell expansion composition” may be used interchangeably with a media comprising one or more of octanoic acid at a concentration of 9.19 mg/kg, palmitic acid at a concentration of 1.86 mg/kg, linoleic acid at a concentration of 2.12 mg/kg, oleic acid at a concentration of about 2.13 mg/kg, and a sterol at a concentration of 1.01 mg/kg (wherein mg/kg=parts per million). In certain embodiments, the terms “supplemented T-cell expansion composition” or “T-cell expansion composition” may be used interchangeably with a media comprising one or more of octanoic acid at a concentration of between 6.4 μmol/kg and 640 μmol/kg, inclusive of the endpoints; palmitic acid at a concentration of between 0.7 μmol/kg and 70 μmol/kg, inclusive of the endpoints; linoleic acid at a concentration of between 0.75 μmol/kg and 75 μmol/kg, inclusive of the endpoints; oleic acid at a concentration of between 0.75 μmol/kg and 75 μmol/kg, inclusive of the endpoints; and a sterol at a concentration of between 0.25 μmol/kg and 25 μmol/kg, inclusive of the endpoints. In certain embodiments, the terms “supplemented T-cell expansion composition” or “T-cell expansion composition” may be used interchangeably with a media comprising one or more of octanoic acid at a concentration of about 64 μmol/kg, palmitic acid at a concentration of about 7 μmol/kg, linoleic acid at a concentration of about 7.5 μmol/kg, oleic acid at a concentration of about 7.5 μmol/kg and a sterol at a concentration of about 2.5 μmol/kg.

[0353] In certain embodiments, the terms “supplemented T-cell expansion composition” or “T-cell expansion composition” may be used interchangeably with a media comprising one or more of octanoic acid at a concentration of about 63.75 μmol/kg, palmitic acid at a concentration of about 7.27 μmol/kg, linoleic acid at a concentration of about 7.57 μmol/kg, oleic acid at a concentration of about 7.56 μmol/kg and a sterol at a concentration of about 2.61 μmol/kg. In certain embodiments, the terms “supplemented T-cell expansion composition” or “T-cell expansion composition” may be used interchangeably with a media comprising one or more of octanoic acid at a concentration of about 63.75 μmol/kg, palmitic acid at a concentration of about 7.27 μmol/kg, linoleic acid at a concentration of about 7.57 μmol/kg, oleic acid at a concentration of 7.56 μmol/kg and a sterol at a concentration of 2.61 μmol/kg.

[0354] In certain embodiments of the methods of producing a modified T cell (e.g. a stem cell-like T cell, a T_{SCM} and/or a T_{CM}) of the disclosure, the method comprises contacting a modified T cell and an inhibitor of the PI3K-Akt-mTOR pathway. Modified T-cells of the disclosure, including modified stem cell-like T cells, T_{SCM} and/or Tem of the disclosure, may be incubated, cultured, grown, stored, or otherwise, combined at any step in the methods of the procedure with a growth medium comprising one or more inhibitors a component of a PI3K pathway. Exemplary inhibitors a component of a PI3K pathway include, but are not limited to, an inhibitor of GSK3β such as TWS119 (also known as GSK 3B inhibitor XII; CAS Number 601514-19-6 having a chemical formula C₁₈H₁₄N₄O₂). Exemplary inhibitors of a component of a PI3K pathway include, but are not limited to, bb007 (BLUEBIRDBIO™). Additional Exemplary inhibitors of a component of a PI3K pathway include, but are not limited to, an allosteric Akt inhibitor VIII (also referred to as Akti-1/2 having Compound number 10196499), ATP competitive inhibitors (Orthosteric inhibitors targeting the ATP-binding pocket of the protein kinase B (Akt)), Isoquinoline-5-sulfonamides (H-8, H-89, and NL-71-101), Azepane derivatives (A series of structures derived from (−)-balanol), Aminofurazans (GSK690693), Heterocyclic rings (7-azaindole, 6-phenylpurine derivatives, pyrrolo[2,3-d]pyrimidine derivatives, CCT128930, 3-aminopyrrolidine, anilinotriazole derivatives, spiroindoline derivatives. AZD5363, ipatasertib (GDC-0068, RG7440), A-674563, and A-443654), Phenylpyrazole derivatives (AT7867 and AT13148), Thiophenecarboxamide derivatives (Afuresertib (GSK2110183), 2-pyrimidyl-5-amidothiophene derivative (DC120), uprosertib (GSK2141795)), Allosteric inhibitors (Superior to orthosteric inhibitors providing greater specificity, reduced side-effects and less toxicity), 2,3-diphenylquinoxaline analogues (2,3-diphenylquinoxaline derivatives, triazolo[3,4-f][1,6]naphthyridin-3(2H)-one derivative (MK-2206)), Alkylphospholipids (Edelfosine (1-O-octadecyl-2-O-methyl-rac-glycero-3-phosphocholine, ET-18-OCH₃) ilmofosine (BM 41.440), miltefosine (hexadecylphosphocholine, HePC), perifosine (D-21266), erucylphosphocholine (ErPC), erufosine (ErPC3, erucylphosphohomocholine), Indole-3-carbinol analogues (Indole-3-carbinol, 3-chloroacetylindole, diindolylmethane, diethyl 6-methoxy-5,7-dihydroindolo[2,3-b]carbazole-2,10-dicarboxylate (SR13668), OSU-A9), Sulfonamide derivatives (PH-316 and PHT-427), Thiourea derivatives (PIT-1, PIT-2, DM-PIT-1, N-[(1-methyl-1H-pyrazol-4-yl)carbonyl]-N′-(3-bromophenyl)-thiourea), Purine derivatives (Triciribine (TCN, NSC 154020), triciribine mono-phosphate active analogue (TCN-P), 4-amino-pyrido[2,3-d]pyrimidine derivative API-1, 3-phenyl-3H-imidazo[4,5-b]pyridine derivatives, ARQ 092), BAY 1125976, 3-methyl-xanthine, quinoline-4-carboxamide and 2-[4-(cyclohexa-1,3-dien-1-yl)-1H-pyrazol-3-yl]phenol, 3-oxo-tirucallic acid, 3α- and 3β-acetoxy-tirucallic acids, acetoxy-tirucallic acid, and irreversible inhibitors (antibiotics, Lactoquinomycin, Frenolicin B, kalafungin, medermycin, Boc-Phe-vinyl ketone, 4-hydroxynonenal (4-HNE), 1,6-naphthyridinone derivatives, and imidazo-1,2-pyridine derivatives).

[0355] In certain embodiments of the methods of producing a modified T cell (e.g. a stem cell-like T cell, a T_{SCM} and/or a T_{CM}) of the disclosure, the method comprises contacting a modified T cell and an inhibitor of T cell effector differentiation. Exemplary inhibitors of T cell effector differentiation include, but are not limited to, a BET inhibitor (e.g. JQ1, a hienotriazolodiazepine) and/or an inhibitor of the BET family of proteins (e.g. BRD2, BRD3, BRD4, and BRDT).

[0356] In certain embodiments of the methods of producing a modified T cell (e.g. a stem cell-like T cell, a T_{SCM} and/or a T_{CM}) of the disclosure, the method comprises contacting a modified T cell and an agent that reduces nucleo-cytoplasmic Acetyl-CoA. Exemplary agents that reduce nucleo-cytoplasmic Acetyl-CoA include, but are not limited to, 2-hydroxy-citrate (2-HC) as well as agents that increase expression of Acss1.

[0357] In certain embodiments of the methods of producing a modified T cell (e.g. a stem cell-like T cell, a TSCM and/or a TCM) of the disclosure, the method comprises contacting a modified T cell and a composition comprising a histone deacetylase (HDAC) inhibitor. In some embodiments, the composition comprising an HDAC inhibitor comprises or consists of valproic acid, Sodium Phenylbutyrate (NaPB) or a combination thereof. In some embodiments, the composition comprising an HDAC inhibitor comprises or consists of valproic acid. In some embodiments, the composition comprising an HDAC inhibitor comprises or consists of Sodium Phenylbutyrate (NaPB).

[0358] In certain embodiments of the methods of producing a modified T cell (e.g. a stem cell-like T cell, a T_{SCM} and/or a T_{CM}) of the disclosure, the activation supplement may comprise one or more cytokine(s). The one or more cytokine(s) may comprise any cytokine, including but not limited to, lymphokines. Exemplary lympokines include, but are not limited to, interleukin-2 (IL-2), interleukin-3 (IL-3), interleukin-4 (IL-4), interleukin-5 (IL-5), interleukin-6 (IL-6), interleukin-7 (IL-7), interleukin-15 (IL-15), interleukin-21 (IL-21), granulocyte-macrophage colony-stimulating factor (GM-CSF) and interferon-gamma (INFγ). The one or more cytokine(s) may comprise IL-2.

[0359] In certain embodiments of the methods of producing a modified T cell (e.g. a stem cell-like T cell, a T_{SCM} and/or a T_{CM}) of the disclosure, the activation supplement may comprise one or more activator complexes. Exemplary and nonlimiting activator complexes may comprise a monomeric, dimeric, trimeric or tetrameric antibody complex that binds one or more of CD3, CD28, and CD2. In some embodiments, the activation supplement comprises or consists of an activator complex that comprises a human, a humanized or a recombinant or a chimeric antibody. In some embodiments, the activation supplement comprises or consists of an activator complex that binds CD3 and CD28. In some embodiments, the activation supplement comprises or consists of an activator complex that binds CD3, CD28 and CD2.

### Natural Killer (NK) Cells

[0360] In certain embodiments, the modified immune or immune precursor cells of the disclosure are natural killer (NK) cells. In certain embodiments, NK cells are cytotoxic lymphocytes that differentiate from lymphoid progenitor cells.

[0361] Modified NK cells of the disclosure may be derived from modified hematopoietic stem and progenitor cells (HSPCs) or modified HSCs.

[0362] In certain embodiments, non-activated NK cells are derived from CD3-depleted leukopheresis (containing CD14/CD19/CD56+ cells).

[0363] In certain embodiments, NK cells are electroporated using a Lonza 4D nucleofector or BTX ECM 830 (500V, 700 usec pulse length, 0.2 mm electrode gap, one pulse). All Lonza 4D nucleofector programs are contemplated as within the scope of the methods of the disclosure.

[0364] In certain embodiments, 5×10E6 cells were electroporated per electroporation in 100 μL P3 buffer in cuvettes. However, this ratio of cells per volume is scalable for commercial manufacturing methods.

[0365] In certain embodiments. NK cells were stimulated by co-culture with an additional cell line. In certain embodiments, the additional cell line comprises artificial antigen presenting cells (aAPCs). In certain embodiments, stimulation occurs at day 1, 2, 3, 4, 5, 6, or 7 following electroporation. In certain embodiments, stimulation occurs at day 2 following electroporation.

[0366] In certain embodiments, NK cells express CD56.

### B Cells

[0367] In certain embodiments, the modified immune or immune precursor cells of the disclosure are B cells. B cells are a type of lymphocyte that express B cell receptors on the cell surface. B cell receptors bind to specific antigens.

[0368] Modified B cells of the disclosure may be derived from modified hematopoietic stem and progenitor cells (HSPCs) or modified HSCs.

[0369] In certain embodiments, HSPCs are modified using the methods of the disclosure, and then primed for B cell differentiation in presence of human IL-3, Flt3L, TPO, SCF, and G-CSF for at least 3 days, at least 4 days, at least 5 days, at least 6 days or at least 7 days. In certain embodiments, HSPCs are modified using the methods of the disclosure, and then primed for B cell differentiation in presence of human IL-3, Flt3L, TPO, SCF, and G-CSF for 5 days.

[0370] In certain embodiments, following priming, modified HSPC cells are transferred to a layer of feeder cells and fed bi-weekly, along with transfer to a fresh layer of feeders once per week. In certain embodiments, the feeder cells are MS-5 feeder cells.

[0371] In certain embodiments, modified HSPC cells are cultured with MS-5 feeder cells for at least 7, 14, 21, 28, 30, 33, 35, 42 or 48 days. In certain embodiments, modified HSPC cells were cultured with MS-5 feeder cells for 33 days.

### Inducible Proapoptotic Polypeptides

[0372] Inducible proapoptotic polypeptides of the disclosure are superior to existing inducible polypeptides because the inducible proapoptotic polypeptides of the disclosure are far less immunogenic. While inducible proapoptotic polypeptides of the disclosure are recombinant polypeptides, and, therefore, non-naturally occurring, the sequences that are recombined to produce the inducible proapoptotic polypeptides of the disclosure do not comprise non-human sequences that the host human immune system could recognize as “non-self” and, consequently, induce an immune response in the subject receiving an inducible proapoptotic polypeptide of the disclosure, a cell comprising the inducible proapoptotic polypeptide or a composition comprising the inducible proapoptotic polypeptide or the cell comprising the inducible proapoptotic polypeptide.

[0373] The disclosure provides inducible proapoptotic polypeptides comprising a ligand binding region, a linker, and a proapoptotic peptide, wherein the inducible proapoptotic polypeptide does not comprise a non-human sequence. In certain embodiments, the non-human sequence comprises a restriction site. In certain embodiments, the proapoptotic peptide is a caspase polypeptide. In certain embodiments, the caspase polypeptide is a caspase 9 polypeptide. In certain embodiments, the caspase 9 polypeptide is a truncated caspase 9 polypeptide. Inducible proapoptotic polypeptides of the disclosure may be non-naturally occurring.

[0374] Caspase polypeptides of the disclosure include, but are not limited to, caspase 1, caspase 2, caspase 3, caspase 4, caspase 5, caspase 6, caspase 7, caspase 8, caspase 9, caspase 10, caspase 11, caspase 12, and caspase 14. Caspase polypeptides of the disclosure include, but are not limited to, those caspase polypeptides associated with apoptosis including caspase 2, caspase 3, caspase 6, caspase 7, caspase 8, caspase 9, and caspase 10. Caspase polypeptides of the disclosure include, but are not limited to, those caspase polypeptides that initiate apoptosis, including caspase 2, caspase 8, caspase 9, and caspase 10. Caspase polypeptides of the disclosure include, but are not limited to, those caspase polypeptides that execute apoptosis, including caspase 3, caspase 6, and caspase 7.

[0375] Caspase polypeptides of the disclosure may be encoded by an amino acid or a nucleic acid sequence having one or more modifications compared to a wild type amino acid or a nucleic acid sequence. The nucleic acid sequence encoding a caspase polypeptide of the disclosure may be codon optimized. The one or more modifications to an amino acid and/or nucleic acid sequence of a caspase polypeptide of the disclosure may increase an interaction, a cross-linking, a cross-activation, or an activation of the caspase polypeptide of the disclosure compared to a wild type amino acid or a nucleic acid sequence. Alternatively, or in addition, the one or more modifications to an amino acid and/or nucleic acid sequence of a caspase polypeptide of the disclosure may decrease the immunogenicity of the caspase polypeptide of the disclosure compared to a wild type amino acid or a nucleic acid sequence.

[0376] Caspase polypeptides of the disclosure may be truncated compared to a wild type caspase polypeptide. For example, a caspase polypeptide may be truncated to eliminate a sequence encoding a Caspase Activation and Recruitment Domain (CARD) to eliminate or minimize the possibility of activating a local inflammatory response in addition to initiating apoptosis in the cell comprising an inducible caspase polypeptide of the disclosure. The nucleic acid sequence encoding a caspase polypeptide of the disclosure may be spliced to form a variant amino acid sequence of the caspase polypeptide of the disclosure compared to a wild type caspase polypeptide. Caspase polypeptides of the disclosure may be encoded by recombinant and/or chimeric sequences. Recombinant and/or chimeric caspase polypeptides of the disclosure may include sequences from one or more different caspase polypeptides. Alternatively, or in addition, recombinant and/or chimeric caspase polypeptides of the disclosure may include sequences from one or more species (e.g. a human sequence and a non-human sequence). Caspase polypeptides of the disclosure may be non-naturally occurring.

[0377] The ligand binding region of an inducible proapoptotic polypeptide of the disclosure may include any polypeptide sequence that facilitates or promotes the dimerization of a first inducible proapoptotic polypeptide of the disclosure with a second inducible proapoptotic polypeptide of the disclosure, the dimerization of which activates or induces cross-linking of the proapoptotic polypeptides and initiation of apoptosis in the cell.

[0378] The ligand-binding (“dimerization”) region may comprise any polypeptide or functional domain thereof that will allow for induction using an endogenous or non-naturally occurring ligand (i.e. and induction agent), for example, a non-naturally occurring synthetic ligand. The ligand-binding region may be internal or external to the cellular membrane, depending upon the nature of the inducible proapoptotic polypeptide and the choice of ligand (i.e. induction agent). A wide variety of ligand-binding polypeptides and functional domains thereof, including receptors, are known. Ligand-binding regions of the disclosure may include one or more sequences from a receptor. Of particular interest are ligand-binding regions for which ligands (for example, small organic ligands) are known or may be readily produced. These ligand-binding regions or receptors may include, but are not limited to, the FKBPs and cyclophilin receptors, the steroid receptors, the tetracycline receptor, and the like, as well as “non-naturally occurring” receptors, which can be obtained from antibodies, particularly the heavy or light chain subunit, mutated sequences thereof, random amino acid sequences obtained by stochastic procedures, combinatorial syntheses, and the like. In certain embodiments, the ligand-binding region is selected from the group consisting of a FKBP ligand-binding region, a cyclophilin receptor ligand-binding region, a steroid receptor ligand-binding region, a cyclophilin receptors ligand-binding region, and a tetracycline receptor ligand-binding region.

[0379] The ligand-binding regions comprising one or more receptor domain(s) may be at least about 50 amino acids, and fewer than about 350 amino acids, usually fewer than 200 amino acids, either as the endogenous domain or truncated active portion thereof. The binding region may, for example, be small (<25 kDa, to allow efficient transfection in viral vectors), monomeric, nonimmunogenic, have synthetically accessible, cell permeable, nontoxic ligands that can be configured for dimerization.

[0380] The ligand-binding regions comprising one or more receptor domain(s) may be intracellular or extracellular depending upon the design of the inducible proapoptotic polypeptide and the availability of an appropriate ligand (i.e. induction agent). For hydrophobic ligands, the binding region can be on either side of the membrane, but for hydrophilic ligands, particularly protein ligands, the binding region will usually be external to the cell membrane, unless there is a transport system for internalizing the ligand in a form in which it is available for binding. For an intracellular receptor, the inducible proapoptotic polypeptide or a transposon or vector comprising the inducible proapoptotic polypeptide may encode a signal peptide and transmembrane domain 5′ or 3′ of the receptor domain sequence or may have a lipid attachment signal sequence 5′ of the receptor domain sequence. Where the receptor domain is between the signal peptide and the transmembrane domain, the receptor domain will be extracellular.

[0381] Antibodies and antibody subunits, e.g., heavy or light chain, particularly fragments, more particularly all or part of the variable region, or fusions of heavy and light chain to create high-affinity binding, can be used as a ligand binding region of the disclosure. Antibodies that are contemplated include ones that are an ectopically expressed human product, such as an extracellular domain that would not trigger an immune response and generally not expressed in the periphery (i.e., outside the CNS/brain area). Such examples, include, but are not limited to low affinity nerve growth factor receptor (LNGFR), and embryonic surface proteins (i.e., carcinoembryonic antigen). Yet further, antibodies can be prepared against haptenic molecules, which are physiologically acceptable, and the individual antibody subunits screened for binding affinity. The cDNA encoding the subunits can be isolated and modified by deletion of the constant region, portions of the variable region, mutagenesis of the variable region, or the like, to obtain a binding protein domain that has the appropriate affinity for the ligand. In this way, almost any physiologically acceptable haptenic compound can be employed as the ligand or to provide an epitope for the ligand. Instead of antibody units, endogenous receptors can be employed, where the binding region or domain is known and there is a useful or known ligand for binding.

[0382] For multimerizing the receptor, the ligand for the ligand-binding region/receptor domains of the inducible proapoptotic polypeptides may be multimeric in the sense that the ligand can have at least two binding sites, with each of the binding sites capable of binding to a ligand receptor region (i.e. a ligand having a first binding site capable of binding the ligand-binding region of a first inducible proapoptotic polypeptide and a second binding site capable of binding the ligand-binding region of a second inducible proapoptotic polypeptide, wherein the ligand-binding regions of the first and the second inducible proapoptotic polypeptides are either identical or distinct). Thus, as used herein, the term “multimeric ligand binding region” refers to a ligand-binding region of an inducible proapoptotic polypeptide of the disclosure that binds to a multimeric ligand. Multimeric ligands of the disclosure include dimeric ligands. A dimeric ligand of the disclosure may have two binding sites capable of binding to the ligand receptor domain. In certain embodiments, multimeric ligands of the disclosure are a dimer or higher order oligomer, usually not greater than about tetrameric, of small synthetic organic molecules, the individual molecules typically being at least about 150 Da and less than about 5 kDa, usually less than about 3 kDa. A variety of pairs of synthetic ligands and receptors can be employed. For example, in embodiments involving endogenous receptors, dimeric FK506 can be used with an FKBP12 receptor, dimerized cyclosporin A can be used with the cyclophilin receptor, dimerized estrogen with an estrogen receptor, dimerized glucocorticoids with a glucocorticoid receptor, dimerized tetracycline with the tetracycline receptor, dimerized vitamin D with the vitamin D receptor, and the like. Alternatively, higher orders of the ligands, e.g., trimeric can be used. For embodiments involving non-naturally occurring receptors, e.g., antibody subunits, modified antibody subunits, single chain antibodies comprised of heavy and light chain variable regions in tandem, separated by a flexible linker, or modified receptors, and mutated sequences thereof, and the like, any of a large variety of compounds can be used. A significant characteristic of the units comprising a multimeric ligand of the disclosure is that each binding site is able to bind the receptor with high affinity, and preferably, that they are able to be dimerized chemically. Also, methods are available to balance the hydrophobicity, hydrophilicity of the ligands so that they are able to dissolve in serum at functional levels, yet diffuse across plasma membranes for most applications.

[0383] Activation of inducible proapoptotic polypeptides of the disclosure may be accomplished through, for example, chemically induced dimerization (CID) mediated by an induction agent to produce a conditionally controlled protein or polypeptide. Proapoptotic polypeptides of the disclosure not only inducible, but the induction of these polypeptides is also reversible, due to the degradation of the labile dimerizing agent or administration of a monomeric competitive inhibitor.

[0384] In certain embodiments, the ligand binding region comprises a FK506 binding protein 12 (FKBP12) polypeptide. In certain embodiments, the ligand binding region comprises a FKBP12 polypeptide having a substitution of valine (V) for phenylalanine (F) at position 36 (F36V). In certain embodiments, in which the ligand binding region comprises a FKBP12 polypeptide having a substitution of valine (V) for phenylalanine (F) at position 36 (F36V), the induction agent may comprise AP1903, a synthetic drug (CAS Index Name: 2-Piperidinecarboxylic acid, 1-[(2S)-1-oxo-2-(3,4,5-trimethoxyphenyl)butyl]-, 1,2-ethanediylbis[imino(2-oxo-2,1-ethanediyl)oxy-3,1-phenylene[(1R)-3-(3,4-dimethoxyphenyl)propylidene]]ester, [2S-[1(R*),2R*[S*[S*[1(R*),2R*]]]]]-(9Cl) CAS Registry Number: 195514-63-7; Molecular Formula: C78H98N4O20; Molecular Weight: 1411.65)). In certain embodiments, in which the ligand binding region comprises a FKBP12 polypeptide having a substitution of valine (V) for phenylalanine (F) at position 36 (F36V), the induction agent may comprise AP20187 (CAS Registry Number: 195514-80-8 and Molecular Formula: C82H107N5O20). In certain embodiments, the induction agent is an AP20187 analog, such as, for example, AP1510. As used herein, the induction agents AP20187, AP1903 and AP1510 may be used interchangeably.

[0385] AP1903 API is manufactured by Alphora Research Inc. and AP1903 Drug Product for Injection is made by Formatech Inc. It is formulated as a 5 mg/mL solution of AP1903 in a 25% solution of the non-ionic solubilizer Solutol HS 15 (250 mg/mL, BASF). At room temperature, this formulation is a clear, slightly yellow solution. Upon refrigeration, this formulation undergoes a reversible phase transition, resulting in a milky solution. This phase transition is reversed upon re-warming to room temperature. The fill is 2.33 mL in a 3 mL glass vial (approximately 10 mg AP1903 for Injection total per vial). Upon determining a need to administer AP1903, patients may be, for example, administered a single fixed dose of AP1903 for Injection (0.4 mg/kg) via IV infusion over 2 hours, using a non-DEHP, non-ethylene oxide sterilized infusion set. The dose of AP1903 is calculated individually for all patients, and is not be recalculated unless body weight fluctuates by ≥10%. The calculated dose is diluted in 100 mL in 0.9% normal saline before infusion. In a previous Phase I study of AP1903, 24 healthy volunteers were treated with single doses of AP1903 for Injection at dose levels of 0.01, 0.05, 0.1, 0.5 and 1.0 mg/kg infused IV over 2 hours. AP1903 plasma levels were directly proportional to dose, with mean Cmax values ranging from approximately 10-1275 ng/mL over the 0.01-1.0 mg/kg dose range. Following the initial infusion period, blood concentrations demonstrated a rapid distribution phase, with plasma levels reduced to approximately 18, 7, and 1% of maximal concentration at 0.5, 2 and 10 hours post-dose, respectively. AP1903 for Injection was shown to be safe and well tolerated at all dose levels and demonstrated a favorable pharmacokinetic profile. Iuliucci J D. et al., J Clin Pharmacol. 41: 870-9, 2001.

[0386] The fixed dose of AP1903 for injection used, for example, may be 0.4 mg/kg intravenously infused over 2 hours. The amount of AP1903 needed in vitro for effective signaling of cells is 10-100 nM (1600 Da MW). This equates to 16-160 μg/L or ^{˜}0.016-1.6 μg/kg (1.6-160 μg/kg). Doses up to 1 mg/kg were well-tolerated in the Phase I study of AP1903 described above. Therefore, 0.4 mg/kg may be a safe and effective dose of AP1903 for this Phase I study in combination with the therapeutic cells.

[0387] The amino acid and/or nucleic acid sequence encoding ligand binding of the disclosure may contain sequence one or more modifications compared to a wild type amino acid or nucleic acid sequence. For example, the amino acid and/or nucleic acid sequence encoding ligand binding region of the disclosure may be a codon-optimized sequence. The one or more modifications may increase the binding affinity of a ligand (e.g. an induction agent) for the ligand binding region of the disclosure compared to a wild type polypeptide. Alternatively, or in addition, the one or more modifications may decrease the immunogenicity of the ligand binding region of the disclosure compared to a wild type polypeptide. Ligand binding regions of the disclosure and/or induction agents of the disclosure may be non-naturally occurring.

[0388] Modified cells, transposons and/or vectors of the disclosure may comprise an inducible proapoptotic polypeptide comprising (a) a ligand binding region, (b) a linker, and (c) a proapoptotic polypeptide, wherein the inducible proapoptotic polypeptide does not comprise a non-human sequence. In certain embodiments, the non-human sequence comprises a restriction site. In certain embodiments, the ligand binding region may be a multimeric ligand binding region. Inducible proapoptotic polypeptides of the disclosure may also be referred to as an “iC9 safety switch”. In certain embodiments, modified cells and/or transposons of the disclosure may comprise an inducible caspase polypeptide comprising (a) a ligand binding region, (b) a linker, and (c) a caspase polypeptide, wherein the inducible proapoptotic polypeptide does not comprise a non-human sequence. In certain embodiments, modified cells and/or transposons of the disclosure may comprise an inducible caspase polypeptide comprising (a) a ligand binding region, (b) a linker, and (c) a caspase polypeptide, wherein the inducible proapoptotic polypeptide does not comprise a non-human sequence. In certain embodiments, transposons of the disclosure may comprise an inducible caspase polypeptide comprising (a) a ligand binding region, (b) a linker, and (c) a truncated caspase 9 polypeptide, wherein the inducible proapoptotic polypeptide does not comprise a non-human sequence. In certain embodiments of the inducible proapoptotic polypeptides, inducible caspase polypeptides or truncated caspase 9 polypeptides of the disclosure, the ligand binding region may comprise a FK506 binding protein 12 (FKBP12) polypeptide. In certain embodiments, the amino acid sequence of the ligand binding region that comprise a FK506 binding protein 12 (FKBP12) polypeptide may comprise a modification at position 36 of the sequence. The modification may be a substitution of valine (V) for phenylalanine (F) at position 36 (F36V).

[0389] In certain embodiments, the FKBP12 polypeptide is encoded by an amino acid sequence comprising

(SEQ ID NO: 14635)
GVQVETISPGDGRTFPKRGQTCVVHYTGMLEDGKKVDSSRDRNKPFKFMLG
KQEVIRGWEEGVAQMSVGQRAKILTISPDYAYGATGHPGIIPPHATLVFDV
ELLKLE.

[0390] In certain embodiments, the FKBP12 polypeptide is encoded by a nucleic acid sequence comprising GGGGTCCAGGTCGAGACTATTTCACCAGGGGATGGGCGAACATTCCAAAAAGG GGCCAGACTTGCGTCGTGCATTACACCGGGATGCTGGAGGACGGGAAGAAAGTG GACAGCTCCAGGGATCGCAACAAGCCCTTCAAGTTCATGCTGGGAAAGCAGGAA GTGATCCGAGGATGGGAGGAAGGCGTGGCACAGATGTCAGTCGGCCAGCGGGC CAAACTGACCATTAGCCCTGACTACGCTTATGGAGCAACAGGCCACCCAGGGAT CATTCCCCCTCATGCCACCCTGGTCTTCGAT GTGGAACTGCTGAAGCTGGAG (SEQ ID NO: 14636). In certain embodiments, the induction agent specific for the ligand binding region may comprise a FK506 binding protein 12 (FKBP12) polypeptide having a substitution of valine (V) for phenylalanine (F) at position 36 (F36V) comprises AP20187 and/or API903, both synthetic drugs.

[0391] In certain embodiments of the inducible proapoptotic polypeptides, inducible caspase polypeptides or truncated caspase 9 polypeptides of the disclosure, the linker region is encoded by an amino acid comprising GGGGS (SEQ ID NO: 14637) or a nucleic acid sequence comprising GGAGGAGGAGGATCC (SEQ ID NO: 14638). In certain embodiments, the nucleic acid sequence encoding the linker does not comprise a restriction site.

[0392] In certain embodiments of the truncated caspase 9 polypeptides of the disclosure, the truncated caspase 9 polypeptide is encoded by an amino acid sequence that does not comprise an arginine (R) at position 87 of the sequence. Alternatively. or in addition, in certain embodiments of the inducible proapoptotic polypeptides, inducible caspase polypeptides or truncated caspase 9 polypeptides of the disclosure, the truncated caspase 9 polypeptide is encoded by an amino acid sequence that does not comprise an alanine (A) at position 282 the sequence. In certain embodiments of the inducible proapoptotic polypeptides, inducible caspase polypeptides or truncated caspase 9 polypeptides of the disclosure, the truncated caspase 9 polypeptide is encoded by an amino acid comprising GFGDVGALESLRGNADLAYILSMEPCGHCLIINNVNFCRESGLRTRTGSNIDCEKLRR RFSSLHFMVEVKGDLTAKKMVLALLELAQQDHGALDCCVVVILSHGCQASHLQFPG AVYGTDGCPVSVEKIVNIFNGTSCPSLGGKPKLFFIQACGGEQKDHGFEVASTSPEDE SPGSNPEPDATPFQEGLRTFDQLDAISSLPTPSDIFVSYSTFPGFVSWRDPKSGSWYVE TLDDIFEQWAHSEDLQSLLLRVANAVSVKGIYKQMPGCFNFLRKKLFFKTS (SEQ ID NO: 14639) or a nucleic acid sequence comprising

(SEQ ID NO: 14640)
TTTGGGGACGTGGGGGCCCTGGAGTCTCTGCGAGGAAATGCCGATCTGGCT
TACATCCTGAGCATGGAACCCTGCGGCCACTGTCTGATCATTAACAATGTG
AACTTCTGCAGAGAAAGCGGACTGCGAACACGGACTGGCTCCAATATTGAC
TGTGAGAAGCTGCGGAGAAGGTTCTCTAGTCTGCACTTTATGGTCGAAGTG
AAAGGGGATCTGACCGCCAAGAAAATGGTGCTGGCCCTGCTGGAGCTGGCT
CAGCAGGACCATGGAGCTCTGGATTGCTGCGTGGTCGTGATCCTGTCCCAC
GGGTGCCAGGCTTCTCATCTGCAGTTCCCCGGAGCAGTGTACGGAACAGAC
GGCTGTCCTGTCAGCGTGGAGAAGATCGTCAACATCTTCAACGGCACTTCT
TGCCCTAGTCTGGGGGGAAAGCCAAAACTGTTCTTTATCCAGGCCTGTGGC
GGGGAACAGAAAGATCACGGCTTCGAGGTGGCCAGCACCAGCCCTGAGGAC
GAATCACCAGGGAGCAACCCTGAACCAGATGCAACTCCATTCCAGGAGGGA
CTGAGGACCTTTGACCAGCTGGATGCTATCTCAAGCCTGCCCACTCCTAGT
GACATTTTCGTGTCTTACAGTACCTTCCCAGGCTTTGTCTCATGGCGCGAT
CCCAAGTCAGGGAGCTGGTACGTGGAGACACTGGACGACATCTTTGAACAG
TGGGCCCATTCAGAGGACCTGCAGAGCCTGCTGCTGCGAGTGGCAAACGCT
GTCTCTGTGAAGGGCATCTACAAACAGATGCCCGGGTGCTTCAATTTTCTG
AGAAAGAAACTGTTCTTTAAGACTTCC.

[0393] In certain embodiments of the inducible proapoptotic polypeptides, wherein the polypeptide comprises a truncated caspase 9 polypeptide, the inducible proapoptotic polypeptide is encoded by an amino acid sequence comprising GVQVETISPGDGRTFPKRGQTCVVHYTGMLEDGKKVDSSRDRNKPFKFMLGKQEVI RGWEEGVAQMSVGQRAKLTISPDYAYGATGHPGIIPPHATLVFDVELLKLEGGGGS GFGDVGALESLRGNADLAYILSMEPCGHCLIINNVNFCRESGLRTRTGSNIDCEKLRR RFSSLHFMVEVKGDLTAKKMVLALLELAQQDHGALDCCVVVILSHGCQASHLQFPG AVYGTDGCPVSVEKIVNIFNGTSCPSLGGKPKLFFIQACGGEQKDHGFEVASTSPEDE SPGSNPEPDATPFQEGLRTFDQLDAISSLPTPSDIFVSYSTFPGFVSWRDPKSGSWYVE TLDDIFEQWAHSEDLQSLLLRVANAVSVKGIYKQMPGCFNFLRKKLFFKTS (SEQ ID NO: 14641) or the nucleic acid sequence comprising

(SEQ ID NO: 14642)
ggggtccaggtcgagactatttcaccaggggatgggcgaacatttccaaaa
aggggccagacttgcgtcgtgcattacaccgggatgctggaggacgggaag
aaagtggacagctccagggatcgcaacaagcccttcaagacatgctgggaa
agcaggaagtgatccgaggatgggaggaaggcgtggcacagatgtcagtcg
gccagcgggccaaactgaccattagccctgactacgcttatggagcaacag
gccacccagggatcattccccctcatgccaccctggtcttcgatgtggaac
tgctgaagctggagggaggaggaggatccggatttggggacgtgggggccc
tggagtctctgcgaggaaatgccgatctggcttacatcctgagcatggaac
cctgcggccactgtctgatcattaacaatatgaacactgcagagaaagcag
actgcgaacacggactgactccaatattgactgtgagaagagcggagaagg
actctagtctgcactttatggtcgaagtgaaaggggatctgaccgccaaga
aaatggtgctggccctgctggagctggctcagcaggaccatggagctctgg
attgctgcgtggtcgtgatcctgtcccacgggtgccaggcttctcatctgc
agttccccggagcagtgtacggaacagacggctgtcctgtcagcgtggaga
agatcgtcaacatatcaacggcacttcttgccctagtctggggggaaagcc
aaaactgttctttaccaggcctgtagcggggaacagaaagatcacggcttc
gaggtggccagcaccagccagaggacgaatcaccagggagcaaccctgaac
cagatgcaactccattccaggagggactgaggacctttgaccagctggatg
ctatctcaagcctgcccactcctagtgacattttcgtgtcttacagtacca
cccaggctttgtctcatggcgcgatcccaagtcagggagctggtacgtgga
gacactggacgacatctttgaacagtgggcccattcagaggacctgcagag
cctgctgagcgagtggcaaacgctatctctgtgaagggcatctacaaacag
atgcccgggtgcttcaattttctgagaaagaaactgttcataagacttcc.

[0394] Inducible proapoptotic polypeptides of the disclosure may be expressed in a cell under the transcriptional regulation of any promoter capable of initiating and/or regulating the expression of an inducible proapoptotic polypeptide of the disclosure in that cell. The term “promoter” as used herein refers to a promoter that acts as the initial binding site for RNA polymerase to transcribe a gene. For example, inducible proapoptotic polypeptides of the disclosure may be expressed in a mammalian cell under the transcriptional regulation of any promoter capable of initiating and/or regulating the expression of an inducible proapoptotic polypeptide of the disclosure in a mammalian cell, including, but not limited to native, endogenous, exogenous, and heterologous promoters. Preferred mammalian cells include human cells. Thus, inducible proapoptotic polypeptides of the disclosure may be expressed in a human cell under the transcriptional regulation of any promoter capable of initiating and/or regulating the expression of an inducible proapoptotic polypeptide of the disclosure in a human cell, including, but not limited to, a human promoter or a viral promoter. Exemplary promoters for expression in human cells include, but are not limited to, a human cytomegalovirus (CMV) immediate early gene promoter, a SV40 early promoter, a Rous sarcoma virus long terminal repeat, β-actin promoter, a rat insulin promoter and a glyceraldehyde-3-phosphate dehydrogenase promoter, each of which may be used to obtain high-level expression of an inducible proapoptotic polypeptide of the disclosure. The use of other viral or mammalian cellular or bacterial phage promoters which are well known in the art to achieve expression of an inducible proapoptotic polypeptide of the disclosure is contemplated as well, provided that the levels of expression are sufficient for initiating apoptosis in a cell. By employing a promoter with well-known properties, the level and pattern of expression of the protein of interest following transfection or transformation can be optimized.

[0395] Selection of a promoter that is regulated in response to specific physiologic or synthetic signals can permit inducible expression of the inducible proapoptotic polypeptide of the disclosure. The ecdysone system (Invitrogen, Carlsbad, Calif.) is one such system. This system is designed to allow regulated expression of a gene of interest in mammalian cells. It consists of a tightly regulated expression mechanism that allows virtually no basal level expression of a transgene, but over 200-fold inducibility. The system is based on the heterodimeric ecdysone receptor of Drosophila, and when ecdysone or an analog such as muristerone A binds to the receptor, the receptor activates a promoter to turn on expression of the downstream transgene high levels of mRNA transcripts are attained. In this system, both monomers of the heterodimeric receptor are constitutively expressed from one vector, whereas the ecdysone-responsive promoter, which drives expression of the gene of interest, is on another plasmid. Engineering of this type of system into a vector of interest may therefore be useful. Another inducible system that may be useful is the Tet-Off™ or Tet-On™ system (Clontech, Palo Alto, Calif.) originally developed by Gossen and Bujard (Gossen and Bujard, Proc. Natl. Acad. Sci. USA, 89:5547-5551, 1992; Gossen et al., Science, 268:1766-1769, 1995). This system also allows high levels of gene expression to be regulated in response to tetracycline or tetracycline derivatives such as doxycycline. In the Tet-On™ system, gene expression is turned on in the presence of doxycycline, whereas in the Tet-Off™ system, gene expression is turned on in the absence of doxycycline. These systems are based on two regulatory elements derived from the tetracycline resistance operon of E. coli: the tetracycline operator sequence (to which the tetracycline repressor binds) and the tetracycline repressor protein. The gene of interest is cloned into a plasmid behind a promoter that has tetracycline-responsive elements present in it. A second plasmid contains a regulatory element called the tetracycline-controlled transactivator, which is composed, in the Tet-Off™ system, of the VP16 domain from the herpes simplex virus and the wild-type tetracycline repressor. Thus, in the absence of doxycycline, transcription is constitutively on. In the Tet-On™ system, the tetracycline repressor is not wild type and in the presence of doxycycline activates transcription. For gene therapy vector production, the Tet-Off™ system may be used so that the producer cells could be grown in the presence of tetracycline or doxycycline and prevent expression of a potentially toxic transgene, but when the vector is introduced to the patient, the gene expression would be constitutively on.

[0396] In some circumstances, it is desirable to regulate expression of a transgene in a gene therapy vector. For example, different viral promoters with varying strengths of activity are utilized depending on the level of expression desired. In mammalian cells, the CMV immediate early promoter is often used to provide strong transcriptional activation. The CMV promoter is reviewed in Donnelly, J. J., et al., 1997. Annu. Rev. Immunol. 15:617-48. Modified versions of the CMV promoter that are less potent have also been used when reduced levels of expression of the transgene are desired. When expression of a transgene in hematopoietic cells is desired, retroviral promoters such as the LTRs from MLV or MMTV are often used. Other viral promoters that are used depending on the desired effect include SV40, RSV LTR, HIV-1 and HIV-2 LTR, adenovirus promoters such as from the E1A, E2A, or MLP region, AAV LTR, HSV-TK, and avian sarcoma virus.

[0397] In other examples, promoters may be selected that are developmentally regulated and are active in particular differentiated cells. Thus, for example, a promoter may not be active in a pluripotent stem cell, but, for example, where the pluripotent stem cell differentiates into a more mature cell, the promoter may then be activated.

[0398] Similarly tissue specific promoters are used to effect transcription in specific tissues or cells so as to reduce potential toxicity or undesirable effects to non-targeted tissues. These promoters may result in reduced expression compared to a stronger promoter such as the CMV promoter, but may also result in more limited expression, and immunogenicity (Bojak, A., et al., 2002. Vaccine. 20:1975-79; Cazeaux, N., et al., 2002. Vaccine 20:3322-31). For example, tissue specific promoters such as the PSA associated promoter or prostate-specific glandular kallikrein, or the muscle creatine kinase gene may be used where appropriate.

[0399] Examples of tissue specific or differentiation specific promoters include, but are not limited to, the following: B29 (B cells); CD14 (monocytic cells); CD43 (leukocytes and platelets); CD45 (hematopoietic cells); CD68 (macrophages); desmin (muscle); elastase-1 (pancreatic acinar cells); endoglin (endothelial cells); fibronectin (differentiating cells, healing tissues); and Flt-1 (endothelial cells); GFAP (astrocytes).

[0400] In certain indications, it is desirable to activate transcription at specific times after administration of the gene therapy vector. This is done with such promoters as those that are hormone or cytokine regulatable. Cytokine and inflammatory protein responsive promoters that can be used include K and T kininogen (Kageyama et al., (1987) J. Biol. Chem., 262, 2345-2351), c-fos, TNF-alpha, C-reactive protein (Arcone, et al., (1988) Nucl. Acids Res., 16(8), 3195-3207), haptoglobin (Oliviero et al., (1987) EMBO J., 6, 1905-1912), serum amyloid A2, C/EBP alpha, IL-1, IL-6 (Poli and Cortese, (1989) Proc. Nat'l Acad. Sci. USA, 86, 8202-8206), Complement C3 (Wilson et al., (1990) Mol. Cell. Biol., 6181-6191), IL-8, alpha-1 acid glycoprotein (Prowse and Baumann, (1988) Mol Cell Biol, 8, 42-51), alpha-1 antitrypsin, lipoprotein lipase (Zechner et al., Mol. Cell. Biol., 2394-2401, 1988), angiotensinogen (Ron, et al., (1991) Mol. Cell. Biol., 2887-2895), fibrinogen, c-jun (inducible by phorbol esters, TNF-alpha, UV radiation, retinoic acid, and hydrogen peroxide), collagenase (induced by phorbol esters and retinoic acid), metallothionein (heavy metal and glucocorticoid inducible), Stromelysin (inducible by phorbol ester, interleukin-1 and EGF), alpha-2 macroglobulin and alpha-1 anti-chymotrypsin. Other promoters include, for example, SV40, MMTV, Human Immunodeficiency Virus (MV), Moloney virus, ALV, Epstein Barr virus, Rous Sarcoma virus, human actin, myosin, hemoglobin, and creatine.

[0401] It is envisioned that any of the above promoters alone or in combination with another can be useful depending on the action desired. Promoters, and other regulatory elements, are selected such that they are functional in the desired cells or tissue. In addition, this list of promoters should not be construed to be exhaustive or limiting; other promoters that are used in conjunction with the promoters and methods disclosed herein.

### Antigen Receptors

[0402] In some embodiments of the compositions and methods of the disclosure, a modified autologous cell of the disclosure comprises an antigen receptor.

[0403] In some embodiments of the compositions and methods of the disclosure, a vector comprises a sequence encoding a chimeric antigen receptor or a portion thereof. Exemplary vectors of the disclosure include, but are not limited to, viral vectors, non-viral vectors, plasmids, nanoplasmids, minicircles, transposition systems, liposomes, polymersomes, micelles, and nanoparticles.

[0404] In some embodiments of the compositions and methods of the disclosure, a transposon comprises a sequence encoding a chimeric antigen receptor or a portion thereof. In some embodiments, the transposon is integrated onto a genomic sequence of an autologous cell by a transposase.

[0405] In some embodiments of the compositions and methods of the disclosure, a donor oligonucleotide or a donor plasmid comprises a sequence encoding a chimeric antigen receptor or a portion thereof. In some embodiments, the donor oligonucleotide or the donor plasmid are entirely or partially integrated into a chromosomal sequence of an autologous cell following a single or double-strand break and, optionally, cell-mediated repair.

[0406] Exemplary antigen receptors include non-naturally occurring transmembrane proteins that bind an antigen at a site in an extacellular domain and transduce or induce an intracellular signal through an intracellular domain.

[0407] In some embodiments, non-naturally occurring antigen receptors include, but are not limited to, recombinant, variant, chimeric, or synthetic T-cell Receptors (TCRs). In some embodiments, variant TCRs contain one or more sequence variations in either a nucleotide or amino acid sequence encoding the TCR when compared to a wild type TCR. In some embodiments, a synthetic TCR comprises at least one synthetic or modified nucleic acid or amino acid encoding the TCR. In some embodiments, a recombinant and/or chimeric TCR is encoded by a nucleic acid or amino acid sequence that either across its entire length or a portion thereof, is non-naturally occurring because the sequence is isolated or derived from one or more source sequences.

[0408] In some embodiments, non-naturally occurring antigen receptors include, but are not limited to, chimeric antigen receptors.

### Chimeric Antigen Receptors

[0409] In some embodiments of the compositions and methods of the disclosure, a modified autologous cell of the disclosure comprises a chimeric antigen receptor.

[0410] In some embodiments of the compositions and methods of the disclosure, a transposon comprises a sequence encoding a chimeric antigen receptor or a portion thereof.

[0411] Chimeric antigen receptors (CARs) of the disclosure may comprise (a) an ectodomain comprising an antigen recognition region, (b) a transmembrane domain, and (c) an endodomain comprising at least one costimulatory domain. In certain embodiments, the ectodomain may further comprise a signal peptide. Alternatively, or in addition, in certain embodiments, the ectodomain may further comprise a hinge between the antigen recognition region and the transmembrane domain. In certain embodiments of the CARs of the disclosure, the signal peptide may comprise a sequence encoding a human CD2, CD3δ, CD3ε, CD3γ, CD3ζ, CD4, CD8α, CD19, CD28, 4-1BB or GM-CSFR signal peptide. In certain embodiments of the CARs of the disclosure, the signal peptide may comprise a sequence encoding a human CD8αsignal peptide. In certain embodiments, the transmembrane domain may comprise a sequence encoding a human CD2, CD3δ, CD3ε, CD3γ, CD3ζ, CD4, CD8α, CD19, CD28, 4-1BB or GM-CSFR transmembrane domain. In certain embodiments of the CARs of the disclosure, the transmembrane domain may comprise a sequence encoding a human CD8α transmembrane domain. In certain embodiments of the CARs of the disclosure, the endodomain may comprise a human CD3ζ endodomain.

[0412] In certain embodiments of the CARs of the disclosure, the at least one costimulatory domain may comprise a human 4-1BB, CD28, CD40, ICOS, MyD88, OX-40 intracellular segment, or any combination thereof. In certain embodiments of the CARs of the disclosure, the at least one costimulatory domain may comprise a CD28 and/or a 4-1BB costimulatory domain. In certain embodiments of the CARs of the disclosure, the hinge may comprise a sequence derived from a human CD8α, IgG4, and/or CD4 sequence. In certain embodiments of the CARs of the disclosure, the hinge may comprise a sequence derived from a human CD8α sequence.

[0413] The CD28 costimulatory domain may comprise an amino acid sequence comprising RVKFSRSADAPAYKQGQNQLYNELNLGRREEYDVLDKRRGRDPEMGGKPRRKNPQ EGLYNELQKDKMAEAYSEIGMKGERRRGKGHDGLYQGLSTATKDTYDALHMQALP PR (SEQ ID NO: 14477) or a sequence having at least 70%, 80%, 90%, 95%, or 99% identity to the amino acid sequence comprising RVKFSRSADAPAYKQGQNQLYNELNLGRREEYDVLDKRRGRDPEMGGKPRRKNPQ EGLYNELQKDKMAEAYSEIGMKGERRRGKGHDGLYQGLSTATKDTYDALHMQALP PR (SEQ ID NO: 14477). The CD28 costimulatory domain may be encoded by the nucleic acid sequence comprising cgcgtgaagtttagtcgatcagcagatgccccagcttacaaacagggacagaaccagctgtataacgagctgaatctgggccgccga gaggaatatgacgtgctggataagcggagaggacgcgaccccgaaatgggaggcaagcccaggcgcaaaaaccctcaggaagg cctgtataacgagctgcagaaggacaaaatggcagaagcctattctgagatcggcatgaagggggagcgacggagaggcaaagg gcacgatgggctgtaccagggactgagcaccgccacaaaggacacctatgatgctctgcatatgcaggcactgcctccaagg (SEQ ID NO: 14478). The 4-1BB costimulatory domain may comprise an amino acid sequence comprising KRGRKKLLYIFKQPFMRPVQTTQEEDGCSCRFPEEEEGGCEL (SEQ ID NO: 14479) or a sequence having at least 70%, 80%, 90%, 95%, or 99% identity to the amino acid sequence comprising KRGRKKLLYIFKQPFMRPVQTTQEEDGCSCRFPEEEEGGCEL (SEQ ID NO: 14479). The 4-1BB costimulatory domain may be encoded by the nucleic acid sequence comprising aagagaggcaggaagaaactgctgtatattitcaaacagcccttcatgcgccccgtgcagactacccaggaggaagacgggtgctcc tgtcgattccctgaggaagaggaaggcgggtgtgagctg (SEQ ID NO: 14480). The 4-1BB costimulatory domain may be located between the transmembrane domain and the CD28 costimulatory domain.

[0414] In certain embodiments of the CARs of the disclosure, the hinge may comprise a sequence derived from a human CD8α, IgG4, and/or CD4 sequence. In certain embodiments of the CARs of the disclosure, the hinge may comprise a sequence derived from a human CD8α sequence. The hinge may comprise a human CD8α amino acid sequence comprising TTTPAPRPPTPAPTIASQPLSLRPEACRPAAGGAVHTRGLDFACD (SEQ ID NO: 14481) or a sequence having at least 70%, 80%, 90%, 95%, or 99% identity to the amino acid sequence comprising TTTPAPRPPTPAPTIASQPLSLRPEACRPAAGGAVHTRGLDFACD (SEQ ID NO: 14481). The human CD8α hinge amino acid sequence may be encoded by the nucleic acid sequence comprising actaccacaccagcacctagaccaccaactccagctccaaccatcgcgagtcagcccctgagtctgagacctgaggcctgcaggcc agctgcaggaggagctgtgcacaccaggggcctggacttcgcctgcgac (SEQ ID NO: 14482).

### SFv

[0415] The disclosure provides single chain variable fragment (scFv) compositions and methods for use of these compositions to recognize and bind to a specific target protein. ScFv compositions comprise a heavy chain variable region and a light chain variable region of an antibody. ScFv compositions may be incorporated into an antigen recognition region of a chimeric antigen receptor of the disclosure. ScFvs are fusion proteins of the variable regions of the heavy (VH) and light (VL) chains of immunoglobulins, and the VH and VL domains are connected with a short peptide linker. ScFvs retain the specificity of the original immunoglobulin, despite removal of the constant regions and the introduction of the linker. An exemplary linker comprises a sequence of GGGGSGTGSGGGGS (SEQ ID NO: 14483).

### Centyrins

[0416] Centyrins of the disclosure specifically bind to an antigen. Chimeric antigen receptors of the disclosure comprising one or more Centyrins that specifically bind an antigen may be used to direct the specificity of a cell, (e.g. a cytotoxic immune cell) towards the specific antigen.

[0417] Centyrins of the disclosure may comprise a protein scaffold, wherein the scaffold is capable of specifically binding an antigen. Centyrins of the disclosure may comprise a protein scaffold comprising a consensus sequence of at least one fibronectin type III (FN3) domain, wherein the scaffold is capable of specifically binding an antigen. The at least one fibronectin type III (FN3) domain may be derived from a human protein. The human protein may be Tenascin-C. The consensus sequence may comprise LPAPKNLVVSEVTEDSLRLSWTAPDAAFDSFLIQYQESEKVGEAINLTVPGSERSYDL TGLKPGTEYTVSIYGVKGGHRSNPLSAEFTT (SEQ ID NO: 14488) or MLPAPKNLVVSEVTEDSLRLSWTAPDAAFDSFLIQYQESEKVGEAINLTVPGSERSY DLTGLKPGTEYTVSIYGVKGGHRSNPLSAEFTT (SEQ ID NO: 14489). The consensus sequence may comprise an amino sequence at least 74% identical to LPAPKNLVVSEVTEDSLRLSWTAPDAAFDSFLIQYQESEKVGEAINLTVPGSERSYDL TGLKPGTEYTVSIYGVKGGHRSNPLSAEFTT (SEQ ID NO: 14488) or MLPAPKNLVVSEVTEDSLRLSWTAPDAAFDSFLIQYQESEKVGEAINLTVPGSERSY DLTGLKPGTEYTVSIYGVKGGHRSNPLSAEFTT (SEQ ID NO: 14489). The consensus sequence may encoded by a nucleic acid sequence comprising atgctgcctgcaccaaagaacctggtggtgtctcatgtgacagaggatagtgccagactgtcatggactgctcccgacgcagccttcg atagttttatcatcgtgtaccgggagaacatcgaaaccggcgaggccattgtcctgacagtgccagggtccgaacgctcttatgacctg acagatctgaagcccggaactgagtactatgtgcagatcgccggcgtcaaaggaggcaatatcagcttccctctgtccgcaatcttcac caca (SEQ ID NO: 14490). The consensus sequence may be modified at one or more positions within (a) a A-B loop comprising or consisting of the amino acid residues TEDS (SEQ ID NO: 14491) at positions 13-16 of the consensus sequence; (b) a B-C loop comprising or consisting of the amino acid residues TAPDAAF (SEQ ID NO: 14492) at positions 22-28 of the consensus sequence; (c) a C-D loop comprising or consisting of the amino acid residues SEKVGE (SEQ ID NO: 14493) at positions 38-43 of the consensus sequence; (d) a D-E loop comprising or consisting of the amino acid residues GSER (SEQ ID NO: 14494) at positions 51-54 of the consensus sequence; (e) a E-F loop comprising or consisting of the amino acid residues GLKPG (SEQ ID NO: 14495) at positions 60-64 of the consensus sequence; (f) a F-G loop comprising or consisting of the amino acid residues KGGHRSN (SEQ ID NO: 14496) at positions 75-81 of the consensus sequence; or (g) any combination of (a)-(f). Centyrins of the disclosure may comprise a consensus sequence of at least 5 fibronectin type III (FN3) domains, at least 10 fibronectin type III (FN3) domains or at least 15 fibronectin type III (FN3) domains. The scaffold may bind an antigen with at least one affinity selected from a K_{D} of less than or equal to 10⁻⁹M, less than or equal to 10⁻¹⁰M, less than or equal to 10⁻¹¹M, less than or equal to 10⁻¹²M, less than or equal to 10⁻¹³M, less than or equal to 10⁻¹⁴M, and less than or equal to 10⁻¹⁵M. The K_{D} may be determined by surface plasmon resonance.

[0418] The term “antibody mimetic” is intended to describe an organic compound that specifically binds a target sequence and has a structure distinct from a naturally-occurring antibody. Antibody mimetics may comprise a protein, a nucleic acid, or a small molecule. The target sequence to which an antibody mimetic of the disclosure specifically binds may be an antigen. Antibody mimetics may provide superior properties over antibodies including, but not limited to, superior solubility, tissue penetration, stability towards heat and enzymes (e.g. resistance to enzymatic degradation), and lower production costs. Exemplary antibody mimetics include, but are not limited to, an affibody, an afflilin, an affimer, an affitin, an alphabody, an anticalin, and avimer (also known as avidity multimer), a DARPin (Designed Ankyrin Repeat Protein), a Fynomer, a Kunitz domain peptide, and a monobody.

[0419] Affibody molecules of the disclosure comprise a protein scaffold comprising or consisting of one or more alpha helix without any disulfide bridges. Preferably, affibody molecules of the disclosure comprise or consist of three alpha helices. For example, an affibody molecule of the disclosure may comprise an immunoglobulin binding domain. An affibody molecule of the disclosure may comprise the Z domain of protein A.

[0420] Affilin molecules of the disclosure comprise a protein scaffold produced by modification of exposed amino acids of, for example, either gamma-B crystallin or ubiquitin. Affilin molecules functionally mimic an antibody's affinity to antigen, but do not structurally mimic an antibody. In any protein scaffold used to make an affilin, those amino acids that are accessible to solvent or possible binding partners in a properly-folded protein molecule are considered exposed amino acids. Any one or more of these exposed amino acids may be modified to specifically bind to a target sequence or antigen.

[0421] Affimer molecules of the disclosure comprise a protein scaffold comprising a highly stable protein engineered to display peptide loops that provide a high affinity binding site for a specific target sequence. Exemplary affimer molecules of the disclosure comprise a protein scaffold based upon a cystatin protein or tertiary structure thereof. Exemplary affimer molecules of the disclosure may share a common tertiary structure of comprising an alpha-helix lying on top of an anti-parallel beta-sheet.

[0422] Affitin molecules of the disclosure comprise an artificial protein scaffold, the structure of which may be derived, for example, from a DNA binding protein (e.g. the DNA binding protein Sac7d). Affitins of the disclosure selectively bind a target sequence, which may be the entirety or part of an antigen. Exemplary affitins of the disclosure are manufactured by randomizing one or more amino acid sequences on the binding surface of a DNA binding protein and subjecting the resultant protein to ribosome display and selection. Target sequences of affitins of the disclosure may be found, for example, in the genome or on the surface of a peptide, protein, virus, or bacteria. In certain embodiments of the disclosure, an affitin molecule may be used as a specific inhibitor of an enzyme. Affitin molecules of the disclosure may include heat-resistant proteins or derivatives thereof.

[0423] Alphabody molecules of the disclosure may also be referred to as Cell-Penetrating Alphabodies (CPAB). Alphabody molecules of the disclosure comprise small proteins (typically of less than 10 kDa) that bind to a variety of target sequences (including antigens). Alphabody molecules are capable of reaching and binding to intracellular target sequences. Structurally, alphabody molecules of the disclosure comprise an artificial sequence forming single chain alpha helix (similar to naturally occurring coiled-coil structures). Alphabody molecules of the disclosure may comprise a protein scaffold comprising one or more amino acids that are modified to specifically bind target proteins. Regardless of the binding specificity of the molecule, alphabody molecules of the disclosure maintain correct folding and thermostability.

[0424] Anticalin molecules of the disclosure comprise artificial proteins that bind to target sequences or sites in either proteins or small molecules. Anticalin molecules of the disclosure may comprise an artificial protein derived from a human lipocalin. Anticalin molecules of the disclosure may be used in place of, for example, monoclonal antibodies or fragments thereof. Anticalin molecules may demonstrate superior tissue penetration and thermostability than monoclonal antibodies or fragments thereof. Exemplary anticalin molecules of the disclosure may comprise about 180 amino acids, having a mass of approximately 20 kDa. Structurally, anticalin molecules of the disclosure comprise a barrel structure comprising antiparallel beta-strands pairwise connected by loops and an attached alpha helix. In preferred embodiments, anticalin molecules of the disclosure comprise a barrel structure comprising eight antiparallel beta-strands pairwise connected by loops and an attached alpha helix.

[0425] Avimer molecules of the disclosure comprise an artificial protein that specifically binds to a target sequence (which may also be an antigen). Avimers of the disclosure may recognize multiple binding sites within the same target or within distinct targets. When an avimer of the disclosure recognize more than one target, the avimer mimics function of a bi-specific antibody. The artificial protein avimer may comprise two or more peptide sequences of approximately 30-35 amino acids each. These peptides may be connected via one or more linker peptides. Amino acid sequences of one or more of the peptides of the avimer may be derived from an A domain of a membrane receptor. Avimers have a rigid structure that may optionally comprise disulfide bonds and/or calcium. Avimers of the disclosure may demonstrate greater heat stability compared to an antibody.

[0426] DARPins (Designed Ankyrin Repeat Proteins) of the disclosure comprise genetically-engineered, recombinant, or chimeric proteins having high specificity and high affinity for a target sequence. In certain embodiments, DARPins of the disclosure are derived from ankyrin proteins and, optionally, comprise at least three repeat motifs (also referred to as repetitive structural units) of the ankyrin protein. Ankyrin proteins mediate high-affinity protein-protein interactions. DARPins of the disclosure comprise a large target interaction surface.

[0427] Fynomers of the disclosure comprise small binding proteins (about 7 kDa) derived from the human Fyn SH3 domain and engineered to bind to target sequences and molecules with equal affinity and equal specificity as an antibody.

[0428] Kunitz domain peptides of the disclosure comprise a protein scaffold comprising a Kunitz domain. Kunitz domains comprise an active site for inhibiting protease activity. Structurally, Kunitz domains of the disclosure comprise a disulfide-rich alpha+beta fold. This structure is exemplified by the bovine pancreatic trypsin inhibitor. Kunitz domain peptides recognize specific protein structures and serve as competitive protease inhibitors. Kunitz domains of the disclosure may comprise Ecallantide (derived from a human lipoprotein-associated coagulation inhibitor (LACI)).

[0429] Monobodies of the disclosure are small proteins (comprising about 94 amino acids and having a mass of about 10 kDa) comparable in size to a single chain antibody. These genetically engineered proteins specifically bind target sequences including antigens. Monobodies of the disclosure may specifically target one or more distinct proteins or target sequences. In preferred embodiments, monobodies of the disclosure comprise a protein scaffold mimicking the structure of human fibronectin, and more preferably, mimicking the structure of the tenth extracellular type III domain of fibronectin. The tenth extracellular type III domain of fibronectin, as well as a monobody mimetic thereof, contains seven beta sheets forming a barrel and three exposed loops on each side corresponding to the three complementarity determining regions (CDRs) of an antibody. In contrast to the structure of the variable domain of an antibody, a monobody lacks any binding site for metal ions as well as a central disulfide bond. Multispecific monobodies may be optimized by modifying the loops BC and FG. Monobodies of the disclosure may comprise an adnectin.

### VHH

[0430] In certain embodiments, the CAR comprises a single domain antibody (SdAb). In certain embodiments, the SdAb is a VHH.

[0431] The disclosure provides chimeric antigen receptors (CARs) comprising at least one VHH (a VCAR). Chimeric antigen receptors of the disclosure may comprise more than one VHH. For example, a bi-specific VCAR may comprise two VHHs that specifically bind two distinct antigens.

[0432] VHH proteins of the disclosure specifically bind to an antigen. Chimeric antigen receptors of the disclosure comprising one or more VHHs that specifically bind an antigen may be used to direct the specificity of a cell, (e.g. a cytotoxic immune cell) towards the specific antigen.

[0433] At least one VHH protein or VCAR of the disclosure can be optionally produced by a cell line, a mixed cell line, an immortalized cell or clonal population of immortalized cells, as well known in the art. See, e.g., Ausubel, et al., ed., Current Protocols in Molecular Biology, John Wiley & Sons, Inc., NY, N.Y. (1987-2001); Sambrook, et al., Molecular Cloning: A Laboratory Manual, 2nd Edition, Cold Spring Harbor. N.Y. (1989); Harlow and Lane, Antibodies, a Laboratory Manual, Cold Spring Harbor, N.Y. (1989); Colligan, et al., eds., Current Protocols in Immunology, John Wiley & Sons, Inc., NY (1994-2001); Colligan et al., Current Protocols in Protein Science, John Wiley & Sons, NY, N.Y., (1997-2001).

[0434] Amino acids from a VHH protein can be altered, added and/or deleted to reduce immunogenicity or reduce, enhance or modify binding, affinity, on-rate, off-rate, avidity, specificity, half-life, stability, solubility or any other suitable characteristic, as known in the art.

[0435] Optionally, VHH proteins can be engineered with retention of high affinity for the antigen and other favorable biological properties. To achieve this goal, the VHH proteins can be optionally prepared by a process of analysis of the parental sequences and various conceptual engineered products using three-dimensional models of the parental and engineered sequences. Three-dimensional models are commonly available and are familiar to those skilled in the art. Computer programs are available which illustrate and display probable three-dimensional conformational structures of selected candidate sequences and can measure possible immunogenicity (e.g., Immunofilter program of Xencor, Inc. of Monrovia. Calif.). Inspection of these displays permits analysis of the likely role of the residues in the functioning of the candidate sequence, i.e., the analysis of residues that influence the ability of the candidate VHH protein to bind its antigen. In this way, residues can be selected and combined from the parent and reference sequences so that the desired characteristic, such as affinity for the target antigen(s), is achieved. Alternatively, or in addition to, the above procedures, other suitable methods of engineering can be used.

[0436] Screening VHH for specific binding to similar proteins or fragments can be conveniently achieved using nucleotide (DNA or RNA display) or peptide display libraries, for example, in vitro display. This method involves the screening of large collections of peptides for individual members having the desired function or structure. The displayed nucleotide or peptide sequences can be from 3 to 5000 or more nucleotides or amino acids in length, frequently from 5-100 amino acids long, and often from about 8 to 25 amino acids long. In addition to direct chemical synthetic methods for generating peptide libraries, several recombinant DNA methods have been described. One type involves the display of a peptide sequence on the surface of a bacteriophage or cell. Each bacteriophage or cell contains the nucleotide sequence encoding the particular displayed peptide sequence. The VHH proteins of the disclosure can bind human or other mammalian proteins with a wide range of affinities (KD). In a preferred embodiment, at least one VHH of the present disclosure can optionally bind to a target protein with high affinity, for example, with a KD equal to or less than about 10⁻⁷ M, such as but not limited to, 0.1-9.9 (or any range or value therein)×10⁻⁸, 10⁻⁹, 10⁻¹⁰, 10⁻¹¹, 10⁻¹², 10⁻¹³, 10⁻¹⁴, 10⁻¹⁵ or any range or value therein, as determined by surface plasmon resonance or the Kinexa method, as practiced by those of skill in the art.

[0437] The affinity or avidity of a VHH or a VCAR for an antigen can be determined experimentally using any suitable method. (See, for example, Berzofsky, et al., “Antibody-Antigen Interactions,” In Fundamental Immunology, Paul, W. E., Ed., Raven Press: New York, N.Y. (1984); Kuby, Janis Immunology, W.H. Freeman and Company: New York, N.Y. (1992); and methods described herein). The measured affinity of a particular VHH-antigen or VCAR-antigen interaction can vary if measured under different conditions (e.g., salt concentration, pH). Thus, measurements of affinity and other antigen-binding parameters (e.g., KD, Kon, Koff) are preferably made with standardized solutions of VHH or VCAR and antigen, and a standardized buffer, such as the buffer described herein.

[0438] Competitive assays can be performed with the VHH or VCAR of the disclosure in order to determine what proteins, antibodies, and other antagonists compete for binding to a target protein with the VHH or VCAR of the present disclosure and/or share the epitope region. These assays as readily known to those of ordinary skill in the art evaluate competition between antagonists or ligands for a limited number of binding sites on a protein. The protein and/or antibody is immobilized or insolubilized before or after the competition and the sample bound to the target protein is separated from the unbound sample, for example, by decanting (where the protein/antibody was preinsolubilized) or by centrifuging (where the protein/antibody was precipitated after the competitive reaction). Also, the competitive binding may be determined by whether function is altered by the binding or lack of binding of the VHH or VCAR to the target protein, e.g., whether the VCAR molecule inhibits or potentiates the enzymatic activity of, for example, a label. ELISA and other functional assays may be used, as well known in the art.

### VH

[0439] In certain embodiments, the CAR comprises a single domain antibody (SdAb). In certain embodiments, the SdAb is a VH.

[0440] The disclosure provides chimeric antigen receptors (CARs) comprising a single domain antibody (VCARs). In certain embodiments, the single domain antibody comprises a VH. In certain embodiments, the VH is isolated or derived from a human sequence. In certain embodiments, VH comprises a human CDR sequence and/or a human framework sequence and a non-human or humanized sequence (e.g. a rat Fc domain). In certain embodiments, the VH is a fully humanized VH. In certain embodiments, the VH s neither a naturally occurring antibody nor a fragment of a naturally occurring antibody. In certain embodiments, the VH is not a fragment of a monoclonal antibody. In certain embodiments, the VH is a UniDab™ antibody (TeneoBio).

[0441] In certain embodiments, the VH is fully engineered using the UniRat™ (TeneoBio) system and “NGS-based Discovery” to produce the VH. Using this method, the specific VH are not naturally-occurring and are generated using fully engineered systems. The VH are not derived from naturally-occurring monoclonal antibodies (mAbs) that were either isolated directly from the host (for example, a mouse, rat or human) or directly from a single clone of cells or cell line (hybridoma). These VHs were not subsequently cloned from said cell lines. Instead, VH sequences are fully-engineered using the UniRat™ system as transgenes that comprise human variable regions (VH domains) with a rat Fc domain, and are thus human/rat chimeras without a light chain and are unlike the standard mAb format. The native rat genes are knocked out and the only antibodies expressed in the rat are from transgenes with VH domains linked to a Rat Fc (UniAbs). These are the exclusive Abs expressed in the UniRat. Next generation sequencing (NGS) and bioinformatics are used to identify the full antigen-specific repertoire of the heavy-chain antibodies generated by UniRat™ after immunization. Then, a unique gene assembly method is used to convert the antibody repertoire sequence information into large collections of fully-human heavy-chain antibodies that can be screened in vitro for a variety of functions. In certain embodiments, fully humanized VH are generated by fusing the human VH domains with human Fcs in vitro (to generate a non-naturally occurring recombinant VH antibody). In certain embodiments, the VH are fully humanized, but they are expressed in vivo as human/rat chimera (human VH, rat Fc) without a light chain. Fully humanized VHs are expressed in vivo as human/rat chimera (human VH, rat Fc) without a light chain are about 80 kDa (vs 150 kDa).

[0442] VCARs of the disclosure may comprise at least one VH of the disclosure. In certain embodiments, the VH of the disclosure may be modified to remove an Fc domain or a portion thereof. In certain embodiments, a framework sequence of the VH of the disclosure may be modified to, for example, improve expression, decrease immunogenicity or to improve function.

[0443] As used throughout the disclosure, the singular forms “a,” “and,” and “the” include plural referents unless the context clearly dictates otherwise. Thus, for example, reference to “a method” includes a plurality of such methods and reference to “a dose” includes reference to one or more doses and equivalents thereof known to those skilled in the art, and so forth.

[0444] The term “about” or “approximately” means within an acceptable error range for the particular value as determined by one of ordinary skill in the art, which will depend in part on how the value is measured or determined, e.g., the limitations of the measurement system. For example, “about” can mean within 1 or more standard deviations. Alternatively, “about” can mean a range of up to 20%, or up to 10%, or up to 5%, or up to 1% of a given value. Alternatively, particularly with respect to biological systems or processes, the term can mean within an order of magnitude, preferably within 5-fold, and more preferably within 2-fold, of a value. Where particular values are described in the application and claims, unless otherwise stated the term “about” meaning within an acceptable error range for the particular value should be assumed.

[0445] The disclosure provides isolated or substantially purified polynucleotide or protein compositions. An “isolated” or “purified” polynucleotide or protein, or biologically active portion thereof, is substantially or essentially free from components that normally accompany or interact with the polynucleotide or protein as found in its naturally occurring environment. Thus, an isolated or purified polynucleotide or protein is substantially free of other cellular material or culture medium when produced by recombinant techniques, or substantially free of chemical precursors or other chemicals when chemically synthesized. Optimally, an “isolated” polynucleotide is free of sequences (optimally protein encoding sequences) that naturally flank the polynucleotide (i.e., sequences located at the 5′ and 3′ ends of the polynucleotide) in the genomic DNA of the organism from which the polynucleotide is derived. For example, in various embodiments, the isolated polynucleotide can contain less than about 5 kb, 4 kb, 3 kb, 2 kb, 1 kb, 0.5 kb, or 0.1 kb of nucleotide sequence that naturally flank the polynucleotide in genomic DNA of the cell from which the polynucleotide is derived. A protein that is substantially free of cellular material includes preparations of protein having less than about 30%, 20%, 10%, 5%, or 1% (by dry weight) of contaminating protein. When the protein of the disclosure or biologically active portion thereof is recombinantly produced, optimally culture medium represents less than about 30%, 20%, 10%, 5%, or 1% (by dry weight) of chemical precursors or non-protein-of-interest chemicals.

[0446] The disclosure provides fragments and variants of the disclosed DNA sequences and proteins encoded by these DNA sequences. As used throughout the disclosure, the term “fragment” refers to a portion of the DNA sequence or a portion of the amino acid sequence and hence protein encoded thereby. Fragments of a DNA sequence comprising coding sequences may encode protein fragments that retain biological activity of the native protein and hence DNA recognition or binding activity to a target DNA sequence as herein described. Alternatively, fragments of a DNA sequence that are useful as hybridization probes generally do not encode proteins that retain biological activity or do not retain promoter activity. Thus, fragments of a DNA sequence may range from at least about 20 nucleotides, about 50 nucleotides, about 100 nucleotides, and up to the full-length polynucleotide of the disclosure.

[0447] Nucleic acids or proteins of the disclosure can be constructed by a modular approach including preassembling monomer units and/or repeat units in target vectors that can subsequently be assembled into a final destination vector. Polypeptides of the disclosure may comprise repeat monomers of the disclosure and can be constructed by a modular approach by preassembling repeat units in target vectors that can subsequently be assembled into a final destination vector. The disclosure provides polypeptide produced by this method as well nucleic acid sequences encoding these polypeptides. The disclosure provides host organisms and cells comprising nucleic acid sequences encoding polypeptides produced this modular approach.

[0448] The term “antibody” is used in the broadest sense and specifically covers single monoclonal antibodies (including agonist and antagonist antibodies) and antibody compositions with polyepitopic specificity. It is also within the scope hereof to use natural or synthetic analogs, mutants, variants, alleles, homologs and orthologs (herein collectively referred to as “analogs”) of the antibodies hereof as defined herein. Thus, according to one embodiment hereof, the term “antibody hereof” in its broadest sense also covers such analogs. Generally, in such analogs, one or more amino acid residues may have been replaced, deleted and/or added, compared to the antibodies hereof as defined herein.

[0449] “Antibody fragment”, and all grammatical variants thereof, as used herein are defined as a portion of an intact antibody comprising the antigen binding site or variable region of the intact antibody, wherein the portion is free of the constant heavy chain domains (i.e. CH2, CH3, and CH4, depending on antibody isotype) of the Fc region of the intact antibody. Examples of antibody fragments include Fab, Fab′, Fab′-SH, F(ab′)₂, and Fv fragments; diabodies; any antibody fragment that is a polypeptide having a primary structure consisting of one uninterrupted sequence of contiguous amino acid residues (referred to herein as a “single-chain antibody fragment” or “single chain polypeptide”), including without limitation (1) single-chain Fv (scFv) molecules (2) single chain polypeptides containing only one light chain variable domain, or a fragment thereof that contains the three CDRs of the light chain variable domain, without an associated heavy chain moiety and (3) single chain polypeptides containing only one heavy chain variable region, or a fragment thereof containing the three CDRs of the heavy chain variable region, without an associated light chain moiety; and multispecific or multivalent structures formed from antibody fragments. In an antibody fragment comprising one or more heavy chains, the heavy chain(s) can contain any constant domain sequence (e.g. CHI in the IgG isotype) found in a non-Fc region of an intact antibody, and/or can contain any hinge region sequence found in an intact antibody, and/or can contain a leucine zipper sequence fused to or situated in the hinge region sequence or the constant domain sequence of the heavy chain(s). The term further includes single domain antibodies (“sdAB”) which generally refers to an antibody fragment having a single monomeric variable antibody domain, (for example, from camelids). Such antibody fragment types will be readily understood by a person having ordinary skill in the art.

[0450] “Binding” refers to a sequence-specific, non-covalent interaction between macromolecules (e.g., between a protein and a nucleic acid). Not all components of a binding interaction need be sequence-specific (e.g., contacts with phosphate residues in a DNA backbone), as long as the interaction as a whole is sequence-specific.

[0451] The term “comprising” is intended to mean that the compositions and methods include the recited elements, but do not exclude others. “Consisting essentially of” when used to define compositions and methods, shall mean excluding other elements of any essential significance to the combination when used for the intended purpose. Thus, a composition consisting essentially of the elements as defined herein would not exclude trace contaminants or inert carriers. “Consisting of shall mean excluding more than trace elements of other ingredients and substantial method steps. Embodiments defined by each of these transition terms are within the scope of this disclosure.

[0452] The term “epitope” refers to an antigenic determinant of a polypeptide. An epitope could comprise three amino acids in a spatial conformation, which is unique to the epitope. Generally, an epitope consists of at least 4, 5, 6, or 7 such amino acids, and more usually, consists of at least 8, 9, or 10 such amino acids. Methods of determining the spatial conformation of amino acids are known in the art, and include, for example, x-ray crystallography and two-dimensional nuclear magnetic resonance.

[0453] As used herein, “expression” refers to the process by which polynucleotides are transcribed into mRNA and/or the process by which the transcribed mRNA is subsequently being translated into peptides, polypeptides, or proteins. If the polynucleotide is derived from genomic DNA, expression may include splicing of the mRNA in a eukaryotic cell.

[0454] “Gene expression” refers to the conversion of the information, contained in a gene, into a gene product. A gene product can be the direct transcriptional product of a gene (e.g., mRNA, tRNA, rRNA, antisense RNA, ribozyme, shRNA, micro RNA, structural RNA or any other type of RNA) or a protein produced by translation of an mRNA. Gene products also include RNAs which are modified, by processes such as capping, polyadenylation, methylation, and editing, and proteins modified by, for example, methylation, acetylation, phosphorylation, ubiquitination, ADP-ribosylation, myristilation, and glycosylation.

[0455] “Modulation” or “regulation” of gene expression refers to a change in the activity of a gene. Modulation of expression can include, but is not limited to, gene activation and gene repression.

[0456] The term “operatively linked” or its equivalents (e.g., “linked operatively”) means two or more molecules are positioned with respect to each other such that they are capable of interacting to affect a function attributable to one or both molecules or a combination thereof.

[0457] Non-covalently linked components and methods of making and using non-covalently linked components, are disclosed. The various components may take a variety of different forms as described herein. For example, non-covalently linked (i.e., operatively linked) proteins may be used to allow temporary interactions that avoid one or more problems in the art. The ability of non-covalently linked components, such as proteins, to associate and dissociate enables a functional association only or primarily under circumstances where such association is needed for the desired activity. The linkage may be of duration sufficient to allow the desired effect.

[0458] A method for directing proteins to a specific locus in a genome of an organism is disclosed. The method may comprise the steps of providing a DNA localization component and providing an effector molecule, wherein the DNA localization component and the effector molecule are capable of operatively linking via a non-covalent linkage.

[0459] The term “scFv” refers to a single-chain variable fragment. scFv is a fusion protein of the variable regions of the heavy (VH) and light chains (VL) of immunoglobulins, connected with a linker peptide. The linker peptide may be from about 5 to 40 amino acids or from about 10 to 30 amino acids or about 5, 10, 15, 20, 25, 30, 35, or 40 amino acids in length. Single-chain variable fragments lack the constant Fc region found in complete antibody molecules, and, thus, the common binding sites (e.g., Protein G) used to purify antibodies. The term further includes a scFv that is an intrabody, an antibody that is stable in the cytoplasm of the cell, and which may bind to an intracellular protein.

[0460] The term “single domain antibody” means an antibody fragment having a single monomeric variable antibody domain which is able to bind selectively to a specific antigen. A single-domain antibody generally is a peptide chain of about 110 amino acids long, comprising one variable domain (VH) of a heavy-chain antibody, or of a common IgG, which generally have similar affinity to antigens as whole antibodies, but are more heat-resistant and stable towards detergents and high concentrations of urea. Examples are those derived from camelid or fish antibodies. Alternatively, single-domain antibodies can be made from common murine or human IgG with four chains.

### Methods of Gene Delivery

[0461] In some embodiments of the methods of the disclosure, a composition comprises a scalable ratio of 250×10⁶ primary human T cells per milliliter of buffer or other media during a delivery or an introduction step.

[0462] In some embodiments of the methods of the disclosure, a composition is delivered or introduced to a cell by electroporation or nucleofection. In some embodiments, a delivery or introduction step comprises electroporation or nucleofection.

[0463] In some embodiments of the methods of the disclosure, a composition is delivered or introduced to a cell by a method other than electroporation or nucleofection.

[0464] In some embodiments of the methods of the disclosure, a composition is delivered or introduced by one or more of topical delivery, adsorption, absorption, electroporation, spin-fection, co-culture, transfection, mechanical delivery, sonic delivery, vibrational delivery, magnetofection or by nanoparticle-mediated delivery. In some embodiments, a delivery or introduction step comprises one or more of topical delivery, adsorption, absorption, electroporation, spin-fection, co-culture, transfection, mechanical delivery, sonic delivery, vibrational delivery, magnetofection or by nanoparticle-mediated delivery.

[0465] In some embodiments of the methods of the disclosure, a composition is delivered or introduced by liposomal transfection, calcium phosphate transfection, fugene transfection, and dendrimer-mediated transfection. In some embodiments, a delivery or introduction step comprises one or more of liposomal transfection, calcium phosphate transfection, fugene transfection, and dendrimer-mediated transfection.

[0466] In some embodiments of the methods of the disclosure, a composition is delivered or introduced by mechanical transfection comprises cell squeezing, cell bombardment, or gene gun techniques. In some embodiments, a delivery or introduction step comprises one or more of mechanical transfection comprises cell squeezing, cell bombardment, or gene gun techniques.

[0467] In some embodiments of the methods of the disclosure, a composition is delivered or introduced by nanoparticle-mediated transfection comprises liposomal delivery, delivery by micelles, and delivery by polymerosomes. In some embodiments, a delivery or introduction step comprises one or more of liposomal delivery, delivery by micelles, and delivery by polymerosomes.

### Construction of Nucleic Acids

[0468] The isolated nucleic acids of the disclosure can be made using (a) recombinant methods, (b) synthetic techniques, (c) purification techniques, and/or (d) combinations thereof, as well-known in the art.

[0469] The nucleic acids can conveniently comprise sequences in addition to a polynucleotide of the present disclosure. For example, a multi-cloning site comprising one or more endonuclease restriction sites can be inserted into the nucleic acid to aid in isolation of the polynucleotide. Also, translatable sequences can be inserted to aid in the isolation of the translated polynucleotide of the disclosure. For example, a hexa-histidine marker sequence provides a convenient means to purify the proteins of the disclosure. The nucleic acid of the disclosure, excluding the coding sequence, is optionally a vector, adapter, or linker for cloning and/or expression of a polynucleotide of the disclosure.

[0470] Additional sequences can be added to such cloning and/or expression sequences to optimize their function in cloning and/or expression, to aid in isolation of the polynucleotide, or to improve the introduction of the polynucleotide into a cell. Use of cloning vectors, expression vectors, adapters, and linkers is well known in the art. (See, e.g., Ausubel, supra; or Sambrook, supra).

### Recombinant Methods for Constructing Nucleic Acids

[0471] The isolated nucleic acid compositions of this disclosure, such as RNA, cDNA, genomic DNA, or any combination thereof, can be obtained from biological sources using any number of cloning methodologies known to those of skill in the art. In some embodiments, oligonucleotide probes that selectively hybridize, under stringent conditions, to the polynucleotides of the present disclosure are used to identify the desired sequence in a cDNA or genomic DNA library. The isolation of RNA, and construction of cDNA and genomic libraries are well known to those of ordinary skill in the art. (See, e.g., Ausubel, supra; or Sambrook, supra).

### Nucleic Add Screening and Isolation Methods

[0472] A cDNA or genomic library can be screened using a probe based upon the sequence of a polynucleotide of the disclosure. Probes can be used to hybridize with genomic DNA or cDNA sequences to isolate homologous genes in the same or different organisms. Those of skill in the art will appreciate that various degrees of stringency of hybridization can be employed in the assay; and either the hybridization or the wash medium can be stringent. As the conditions for hybridization become more stringent, there must be a greater degree of complementarity between the probe and the target for duplex formation to occur. The degree of stringency can be controlled by one or more of temperature, ionic strength, pH and the presence of a partially denaturing solvent, such as formamide. For example, the stringency of hybridization is conveniently varied by changing the polarity of the reactant solution through, for example, manipulation of the concentration of formamide within the range of 0% to 50%. The degree of complementarity (sequence identity) required for detectable binding will vary in accordance with the stringency of the hybridization medium and/or wash medium. The degree of complementarity will optimally be 100%, or 70-100%, or any range or value therein. However, it should be understood that minor sequence variations in the probes and primers can be compensated for by reducing the stringency of the hybridization and/or wash medium.

[0473] Methods of amplification of RNA or DNA are well known in the art and can be used according to the disclosure without undue experimentation, based on the teaching and guidance presented herein.

[0474] Known methods of DNA or RNA amplification include, but are not limited to, polymerase chain reaction (PCR) and related amplification processes (see, e.g., U.S. Pat. Nos. 4,683,195, 4,683,202, 4,800,159, 4,965,188, to Mullis, et al.; U.S. Pat. Nos. 4,795,699 and 4,921,794 to Tabor, et al; U.S. Pat. No. 5,142,033 to Innis; U.S. Pat. No. 5,122,464 to Wilson, et al.; U.S. Pat. No. 5,091,310 to Innis; U.S. Pat. No. 5,066,584 to Gyllensten, et al; U.S. Pat. No. 4,889,818 to Gelfand, et al; U.S. Pat. No. 4,994,370 to Silver, et al; U.S. Pat. No. 4,766,067 to Biswas; U.S. Pat. No. 4,656,134 to Ringold) and RNA mediated amplification that uses anti-sense RNA to the target sequence as a template for double-stranded DNA synthesis (U.S. Pat. No. 5,130,238 to Malek, et al, with the tradename NASBA), the entire contents of which references are incorporated herein by reference. (See, e.g., Ausubel, supra; or Sambrook, supra.)

[0475] For instance, polymerase chain reaction (PCR) technology can be used to amplify the sequences of polynucleotides of the disclosure and related genes directly from genomic DNA or cDNA libraries. PCR and other in vitro amplification methods can also be useful, for example, to clone nucleic acid sequences that code for proteins to be expressed, to make nucleic acids to use as probes for detecting the presence of the desired mRNA in samples, for nucleic acid sequencing, or for other purposes. Examples of techniques sufficient to direct persons of skill through in vitro amplification methods are found in Berger, supra, Sambrook, supra, and Ausubel, supra, as well as Mullis, et al., U.S. Pat. No. 4,683,202 (1987); and Innis, et al., PCR Protocols A Guide to Methods and Applications, Eds., Academic Press Inc., San Diego, Calif. (1990). Commercially available kits for genomic PCR amplification are known in the art. See, e.g., Advantage-GC Genomic PCR Kit (Clontech). Additionally, e.g., the T4 gene 32 protein (Boehringer Mannheim) can be used to improve yield of long PCR products.

### Synthetic Methods for Constructing Nucleic Acids

[0476] The isolated nucleic acids of the disclosure can also be prepared by direct chemical synthesis by known methods (see, e.g., Ausubel, et al., supra). Chemical synthesis generally produces a single-stranded oligonucleotide, which can be converted into double-stranded DNA by hybridization with a complementary sequence, or by polymerization with a DNA polymerase using the single strand as a template. One of skill in the art will recognize that while chemical synthesis of DNA can be limited to sequences of about 100 or more bases, longer sequences can be obtained by the ligation of shorter sequences.

### Recombinant Expression Cassettes

[0477] The disclosure further provides recombinant expression cassettes comprising a nucleic acid of the disclosure. A nucleic acid sequence of the disclosure, for example, a cDNA or a genomic sequence encoding a CARTyrin of the disclosure, can be used to construct a recombinant expression cassette that can be introduced into at least one desired host cell. A recombinant expression cassette will typically comprise a polynucleotide of the disclosure operably linked to transcriptional initiation regulatory sequences that will direct the transcription of the polynucleotide in the intended host cell. Both heterologous and non-heterologous (i.e., endogenous) promoters can be employed to direct expression of the nucleic acids of the disclosure.

[0478] In some embodiments, isolated nucleic acids that serve as promoter, enhancer, or other elements can be introduced in the appropriate position (upstream, downstream or in the intron) of a non-heterologous form of a polynucleotide of the disclosure so as to up or down regulate expression of a polynucleotide of the disclosure. For example, endogenous promoters can be altered in vivo or in vitro by mutation, deletion and/or substitution.

### Vectors and Host Cells

[0479] The disclosure also relates to vectors that include isolated nucleic acid molecules of the disclosure, host cells that are genetically engineered with the recombinant vectors, and the production of at least one sequence by recombinant techniques, as is well known in the art. See, e.g., Sambrook, et al., supra; Ausubel, et al., supra, each entirely incorporated herein by reference.

[0480] For example, the PB-EF1a vector may be used. The vector comprises the following nucleotide sequence:

(SEQ ID NO: 17036)
tgtacatagattaaccctagaaagataatcatattgtgacgtacgttaaagataatcatgcgtaaaattgacgcatgtgtt
ttatcggtctgtatatcgaggtttatttattaatttgatagatattaagattattatatttacacttacatactaataata
aattcaacaaacaatttatttatgtttatttatttattaaaaaaaaacaaaaactcaaaatttcttctataaagtaacaaa
acttttatcgaatacctgcagcccgggggatgcagagggacagcccccccccaaagcccccagggatgtaattacgtccct
cccccgctagggggcagcagcgagccgcccggggctccgctccggtccggcgctccccccgcatccccgagccggcagcgt
gcggggacagcccgggcacggggaaggtggcacgggatcgctttcctctgaacgcttctcgctgctcagcctgcagacacc
tggggggatacggggaaaagttgactgtgcctttcgatcgaaccatggacagttagctttgcaaagatggataaagtttta
aacagagaggaatctttgcagctaatggaccttctaggtcttgaaaggagtgggaattggctccggtgcccgtcagtgggc
agagcgcacatcgcccacagtccccgagaagttggggggaggggtcggcaattgaaccggtgcctagagaaggtggcgcgg
ggtaaactgggaaagtgatgtcgtgtactggctccgcctttttcccgagggtgggggagaaccgtatataagtgcagtagt
cgccgtgaacgttctttttcgcaacgggtttgccgccagaacacaggtaagtgccgtgtgtggttcccgcgggcctggcct
ctttacgggttatggcccttgcgtgccttgaattacttccacctggctgcagtacgtgattcttgatcccgagcttcgggt
tggaagtgggtgggagagttcgaggccttgcgcttaaggagccccttcacctcgtgatgagttgagacctggcctgggcac
tggaaccgccgcgtgcgaatctggtggcaccttcgcgcctgtctcgctgctttcgataagtctctagccatttaaaatttt
tgatgacctgctgcgacgctttttttctggcaagatagtcttgtaaatgcgggccaagatctgcacactggtatttcggtt
tttggggccgcgggcgggcgacggggcccgtgcgtcccaacgcacatgttcggcgaggcggggcctgcgagcgcggccacc
gagaatcggacgggggtagtacaagctggccggcctgctctggtgcctggcctcgcgccgccgtgtatcgccccgccctgg
gcggcaaggctggcccggtcggcaccagttgcgtgagcggaaagatggccgcttcccggccctgctgcagggagctcaaaa
tggaggacgcggcgctcgggagagcgggcgggtgagtcacccacacaaaggaaaagggcctttccgtcctcagccgtcgct
tcatgtgactccacggagtaccgggcgccgtccaggcacctcgattagttctcgagcattggagtacgtcgtattagattg
gggagaggggttttatgcgatggagatccccacactgagtgggtggagactgaagttaggccagcttggcacttgatgtaa
ttctccttggaatttgccctttttgagtttggatcttggttcattctcaagcctcagacagtggttcaaagtttttttctt
ccatttcaggtgtcgtgagaattctaatacgactcactatagggtgtgctgtctcatcattttggcaaagattggccacca
agcttgtcctgcaggaggatcgacgcactagacgggcggccgctccggatccacgggtaccgatcacatatgcctttaatt
aaacactagttctatagtgtcacctaaattccattagtgagggttaatggccgtaggccgccagaattgggtccagacatg
ataagatacattgatgagtttggacaaaccacaactagaatgcagtgaaaaaaatgctttatttgtgaaatttgtgatgct
attgctttatttgtaaccattataagctgcaataaacaagttaacaacaacaattgcattcattttatgtttcaggttcag
ggggaggtgtgggaggttttttcggactctaggacctgcgcatgcgcttggcgtaatcatggtcatagctgtttcctgttt
tccccgtatccccccaggtgtctgcaggctcaaagagcagcgagaagcgttcagaggaaagcgatcccgtgccaccttccc
cgtgcccgggctgtccccgcacgctgccggctcggggatgcggggggagcgccggaccggagcggagccccgggcggctcg
ctgctgccccctagcgggggagggacgtaattacatccctgggggctttgggggggggctgtccactcaccgcggtggagc
tccagcattgttcgaattggagccccccctcgagggtatcgatgatatctataacaagaaaatatatatataataagttat
cacgtaagtagaacatgaaataacaatataattatcgtatgagttaaatcttaaaagtcacgtaaaagataatcatgcgtc
attttgactcacgcggtcgttatagttcaaaatcagtgacacttaccgcattgacaagcacgcctcacgggagctccaagc
ggcgactgagatgtcctaaatgcacagcgacggattcgcgctatttagaaagagagagcaatatttcaagaatgcatgcgt
caattttacgcagactatctttctagggttaatctagctagccttaagggcgcctattgcgttgcgctcactgcccgcttt
ccagtcgggaaacctgtcgtgccagctgcattaatgaatcggccaacgcgcggggagaggcggtttgcgtattgggcgcta
tccgcttcctccctcactgactcgctgcgctcggtcgttcggctgcggcgagcggtatcagctcactcaaaggcggtaata
cggttatccacagaatcaggggataacgcaggaaagaacataaccaaaatcccttaacgtgagtatcatccactgagcgtc
agaccccgtagaaaagatcaaaggatcttcttgagatcattttttctgcgcgtaatctgagcttgcaaacaaaaaaaccac
cgctaccagcggtggtttgtttgccggatcaagagctaccaactctttttccgaaggtaactggcttcagcagagcgcaga
taccaaatactgttcttctagtgtagccgtagttaggccaccacttcaagaactctgtagcacccctacatacctcgctag
ctaatcctgttaccagtggetgagccagtggcgataagtcgtgtcttaccgggttggactcaagacgatagttaccggtaa
ggcgcacggtcgggctgaacggggggttcgtgcacagcccagcttggagcgaacgacctacaccgaactgagatacctaca
gcgtgagctatgagaaagcgccacgcttcccgaagggagaaaggcggacaggtatccggtaagcggcagggtcggaacagg
agagcgcacgagggagatccagggggaaacgcctggtatctttatagtcctgtcgggtttcgccacctctgacttgagcgt
cgatttttgtgatgtcgtcaggggguggagcctatggaaaaacgccagcaacgcggcctttttacggttcctggccttttg
ctggccttttgctcacatgagattatcaaaaaggatcttcacctagatcatttaaattaaaaatgaagttttaaatcaatc
taaagtatatatgagtaaacttggtctgacagtcagaagaactcgtcaagaaggcgatagaaggcaatgcgctgcgaatcg
ggagcggcgataccgtaaagcacgaggaagcggtcagcccattcgccgccaagctatcagcaatatcacgggtagccaacg
ctatgtcagatagcggtccgccacacccagccggccacagtcgatgaatccagaaaagcggccatatccaccatgatattc
ggcaagcatgcatcgccatgggtcacgacgagatcctcgccgtcgggcatgctcgccttgagcctggcgaacagttcggct
ggcgcgagcccctgatgctcttcatccagatcatcctgatcgacaagaccggcttccatccgagtacgtgctcgctcgatg
cgatgtttcgcttggtggtcgaatgggcaggtagccggatcaagcgtatgcagccgccgcattgcatcagccatgatggat
actttctcggcaggagcaaggtgagatgacaggagatcctgccccggcacttcgccaatagcagccagtcccttcccgttc
agtgacaagtcgagcacagctgcaaggaacgcccgtcgtggccagccacgatagccgcgctgcctcgtcttgcagttcatt
cagggcaccggacaggtcggtcttgacaaaagaaccgggcgccctgcgctgacagccggaacacggcggcatcagagcagc
gattgtctgttgtgcccagtcatagccgaatagcctctccacccaagcggccggagaacctgcgtgcaatccatcttgttc
aatcataatattattgaagcatttatcagggttcgtctcgtcccggtctcctcccaatgcatgtcaatattggccattagc
catattattcattagttatatagcataaatcaatattggctattggccattgcatacgttgtatctatatcataata

[0481] The polynucleotides can optionally be joined to a vector containing a selectable marker for propagation in a host. Generally, a plasmid vector is introduced in a precipitate, such as a calcium phosphate precipitate, or in a complex with a charged lipid. If the vector is a virus, it can be packaged in vitro using an appropriate packaging cell line and then transduced into host cells.

[0482] The DNA insert should be operatively linked to an appropriate promoter. The expression constructs will further contain sites for transcription initiation, termination and, in the transcribed region, a ribosome binding site for translation. The coding portion of the mature transcripts expressed by the constructs will preferably include a translation initiating at the beginning and a termination codon (e.g., UAA, UGA or UAG) appropriately positioned at the end of the mRNA to be translated, with UAA and UAG preferred for mammalian or eukaryotic cell expression.

[0483] Expression vectors will preferably but optionally include at least one selectable marker. Such markers include, e.g., but are not limited to, ampicillin, zeocin (Sh bla gene), puromycin (pac gene), hygromycin B (hygB gene), G418/Geneticin (neo gene), mycophenolic acid, or glutamine synthetase (GS, U.S. Pat. Nos. 5,122,464; 5,770,359; 5,827,739), blasticidin (bsd gene), resistance genes for eukaryotic cell culture as well as ampicillin, zeocin (Sh bla gene), puromycin (pac gene), hygromycin B (hygB gene), G418/Geneticin (neo gene), kanamycin, spectinomycin, streptomycin, carbenicillin, bleomycin, erythromycin, polymyxin B, or tetracycline resistance genes for culturing in E. coli and other bacteria or prokaryotics (the above patents are entirely incorporated hereby by reference). Appropriate culture mediums and conditions for the above-described host cells are known in the art. Suitable vectors will be readily apparent to the skilled artisan. Introduction of a vector construct into a host cell can be effected by calcium phosphate transfection, DEAE-dextran mediated transfection, cationic lipid-mediated transfection, electroporation, transduction, infection or other known methods. Such methods are described in the art, such as Sambrook, supra, Chapters 1-4 and 16-18; Ausubel, supra, Chapters 1, 9, 13, 15, 16.

[0484] Expression vectors will preferably but optionally include at least one selectable cell surface marker for isolation of cells modified by the compositions and methods of the disclosure. Selectable cell surface markers of the disclosure comprise surface proteins, glycoproteins, or group of proteins that distinguish a cell or subset of cells from another defined subset of cells. Preferably the selectable cell surface marker distinguishes those cells modified by a composition or method of the disclosure from those cells that are not modified by a composition or method of the disclosure. Such cell surface markers include, e.g., but are not limited to, “cluster of designation” or “classification determinant” proteins (often abbreviated as “CD”) such as a truncated or full length form of CD19, CD271, CD34, CD22, CD20, CD33, CD52, or any combination thereof. Cell surface markers further include the suicide gene marker RQR8 (Philip B et al. Blood. 2014 Aug. 21; 124(8):1277-87).

[0485] Expression vectors will preferably but optionally include at least one selectable drug resistance marker for isolation of cells modified by the compositions and methods of the disclosure. Selectable drug resistance markers of the disclosure may comprise wild-type or mutant Neo, TYMS, FRANCF, RAD51C, GCS, MDR1, ALDH1, NKX2.2, or any combination thereof.

[0486] At least one sequence of the disclosure can be expressed in a modified form, such as a fusion protein, and can include not only secretion signals, but also additional heterologous functional regions. For instance, a region of additional amino acids, particularly charged amino acids, can be added to the N-terminus of sequence to improve stability and persistence in the host cell, during purification, or during subsequent handling and storage. Also, peptide moieties can be added to a sequence of the disclosure to facilitate purification. Such regions can be removed prior to final preparation of a sequence or at least one fragment thereof. Such methods are described in many standard laboratory manuals, such as Sambrook, supra, Chapters 17.29-17.42 and 18.1-18.74; Ausubel, supra, Chapters 16, 17 and 18.

[0487] Those of ordinary skill in the art are knowledgeable in the numerous expression systems available for expression of a nucleic acid encoding a protein of the disclosure. Alternatively, nucleic acids of the disclosure can be expressed in a host cell by turning on (by manipulation) in a host cell that contains endogenous DNA of the disclosure. Such methods are well known in the art, e.g., as described in U.S. Pat. Nos. 5,580,734, 5,641,670, 5,733,746, and 5,733,761, entirely incorporated herein by reference.

[0488] Illustrative of cell cultures useful for the production of the proteins, specified portions or variants thereof, are bacterial, yeast, and mammalian cells as known in the art. Mammalian cell systems often will be in the form of monolayers of cells although mammalian cell suspensions or bioreactors can also be used. A number of suitable host cell lines capable of expressing intact glycosylated proteins have been developed in the art, and include the COS-1 (e.g., ATCC CRL 1650), COS-7 (e.g., ATCC CRL-1651), HEK293, BHK21 (e.g., ATCC CRL-10), CHO (e.g., ATCC CRL 1610) and BSC-1 (e.g., ATCC CRL-26) cell lines, Cos-7 cells, CHO cells, hep G2 cells, P3×63Ag8.653, SP2/0-Ag14, 293 cells, HeLa cells and the like, which are readily available from, for example, American Type Culture Collection. Manassas, Va. (www.atcc.org). Preferred host cells include cells of lymphoid origin, such as myeloma and lymphoma cells. Particularly preferred host cells are P3×63Ag8.653 cells (ATCC Accession Number CRL-1580) and SP2/0-Ag14 cells (ATCC Accession Number CRL-1851). In a particularly preferred embodiment, the recombinant cell is a P3×63Ab8.653 or an SP2/0-Ag14 cell.

[0489] Expression vectors for these cells can include one or more of the following expression control sequences, such as, but not limited to, an origin of replication; a promoter (e.g., late or early SV40 promoters, the CMV promoter (U.S. Pat. Nos. 5,168,062; 5,385,839), an HSV tk promoter, a pgk (phosphoglycerate kinase) promoter, an EF-1 alpha promoter (U.S. Pat. No. 5,266,491), at least one human promoter; an enhancer, and/or processing information sites, such as ribosome binding sites, RNA splice sites, polyadenylation sites (e.g., an SV40 large T Ag poly A addition site), and transcriptional terminator sequences. See, e.g., Ausubel et al., supra; Sambrook, et al., supra. Other cells useful for production of nucleic acids or proteins of the present disclosure are known and/or available, for instance, from the American Type Culture Collection Catalogue of Cell Lines and Hybridomas (www.atcc.org) or other known or commercial sources.

[0490] When eukaryotic host cells are employed, polyadenlyation or transcription terminator sequences are typically incorporated into the vector. An example of a terminator sequence is the polyadenlyation sequence from the bovine growth hormone gene. Sequences for accurate splicing of the transcript can also be included. An example of a splicing sequence is the VP1 intron from SV40 (Sprague, et al., J. Virol. 45:773-781 (1983)). Additionally, gene sequences to control replication in the host cell can be incorporated into the vector, as known in the art.

### Amino Acid Codes

[0491] The amino acids that make up compositions of the disclosure are often abbreviated. The amino acid designations can be indicated by designating the amino acid by its single letter code, its three letter code, name, or three nucleotide codon(s) as is well understood in the art (see Alberts, B., et al., Molecular Biology of The Cell, Third Ed., Garland Publishing, Inc., New York, 1994). A CARTyrin of the disclosure can include one or more amino acid substitutions, deletions or additions, from spontaneous or mutations and/or human manipulation, as specified herein. Amino acids in a composition of the disclosure that are essential for function can be identified by methods known in the art, such as site-directed mutagenesis or alanine-scanning mutagenesis (e.g., Ausubel, supra, Chapters 8, 15; Cunningham and Wells. Science 244:1081-1085 (1989)). The latter procedure introduces single alanine mutations at every residue in the molecule. The resulting mutant molecules are then tested for biological activity, such as, but not limited to, at least one neutralizing activity. Sites that are critical for CSR or CAR binding can also be identified by structural analysis, such as crystallization, nuclear magnetic resonance or photoaffinity labeling (Smith, et al., J. Mol. Biol. 224:899-904 (1992) and de Vos, et al., Science 255:306-312 (1992)).

[0492] As those of skill will appreciate, the disclosure includes at least one biologically active protein of the disclosure. Biologically active protein have a specific activity at least 20%, 30%, or 40%, and, preferably, at least 50%, 60%, or 70%, and, most preferably, at least 80%, 90%, or 95%-99% or more of the specific activity of the native (non-synthetic), endogenous or related and known protein. Methods of assaying and quantifying measures of enzymatic activity and substrate specificity are well known to those of skill in the art.

[0493] In another aspect, the disclosure relates to Centyrins and fragments, as described herein, which are modified by the covalent attachment of an organic moiety. Such modification can produce a protein fragment with improved pharmacokinetic properties (e.g., increased in vivo serum half-life). The organic moiety can be a linear or branched hydrophilic polymeric group, fatty acid group, or fatty acid ester group. In particular embodiments, the hydrophilic polymeric group can have a molecular weight of about 800 to about 120,000 Daltons and can be a polyalkane glycol (e.g., polyethylene glycol (PEG), polypropylene glycol (PPG)), carbohydrate polymer, amino acid polymer or polyvinyl pyrolidone, and the fatty acid or fatty acid ester group can comprise from about eight to about forty carbon atoms.

[0494] The modified sequence and fragments of the disclosure can comprise one or more organic moieties that are covalently bonded, directly or indirectly, to the antibody. Each organic moiety that is bonded to a sequence or fragment thereof of the disclosure can independently be a hydrophilic polymeric group, a fatty acid group or a fatty acid ester group. As used herein, the term “fatty acid” encompasses mono-carboxylic acids and di-carboxylic acids. A “hydrophilic polymeric group,” as the term is used herein, refers to an organic polymer that is more soluble in water than in octane. For example, polylysine is more soluble in water than in octane. Thus, a sequence modified by the covalent attachment of polylysine is encompassed by the disclosure. Hydrophilic polymers suitable for modifying sequences of the disclosure can be linear or branched and include, for example, polyalkane glycols (e.g., PEG, monomethoxy-polyethylene glycol (mPEG), PPG and the like), carbohydrates (e.g., dextran, cellulose, oligosaccharides, polysaccharides and the like), polymers of hydrophilic amino acids (e.g., polylysine, polyarginine, polyaspartate and the like), polyalkane oxides (e.g., polyethylene oxide, polypropylene oxide and the like) and polyvinyl pyrolidone. Preferably, the hydrophilic polymer that modifies a sequence of the disclosure has a molecular weight of about 800 to about 150,000 Daltons as a separate molecular entity. For example, PEG5000 and PEG 20,000, wherein the subscript is the average molecular weight of the polymer in Daltons, can be used. The hydrophilic polymeric group can be substituted with one to about six alkyl, fatty acid or fatty acid ester groups. Hydrophilic polymers that are substituted with a fatty acid or fatty acid ester group can be prepared by employing suitable methods. For example, a polymer comprising an amine group can be coupled to a carboxylate of the fatty acid or fatty acid ester, and an activated carboxylate (e.g., activated with N,N-carbonyl diimidazole) on a fatty acid or fatty acid ester can be coupled to a hydroxyl group on a polymer.

T Cell Isolation from a Leukapheresis Product

[0495] A leukapheresis product or blood may be collected from a subject at clinical site using a closed system and standard methods (e.g., a COBE Spectra Apheresis System). Preferably, the product is collected according to standard hospital or institutional Leukapheresis procedures in standard Leukapheresis collection bags. For example, in preferred embodiments of the methods of the disclosure, no additional anticoagulants or blood additives (heparin, etc.) are included beyond those normally used during leukapheresis.

[0496] Alternatively, white blood cells (WBC)/Peripheral Blood Mononuclear Cells (PBMC) (using Biosafe Sepax 2 (Closed/Automated)) or T cells (using CliniMACS® Prodigy (Closed/Automated)) may be isolated directly from whole blood. However, in certain subjects (e.g. those diagnosed and/or treated for cancer), the WBC/PBMC yield may be significantly lower when isolated from whole blood than when isolated by leukapheresis.

[0497] Either the leukapheresis procedure and/or the direct cell isolation procedure may be used for any subject of the disclosure.

[0498] The leukapheresis product, blood, WBC/PBMC composition and/or T-cell composition should be packed in insulated containers and should be kept at controlled room temperature (+19° C. to +25° C.) according to standard hospital of institutional blood collection procedures approved for use with the clinical protocol. The leukapheresis product, blood, WBC/PBMC composition and/or T-cell composition should not be refrigerated.

[0499] The cell concentration leukapheresis product, blood. WBC/PBMC composition and/or T-cell composition should not exceed 0.2×10⁹ cells per mL during transportation. Intense mixing of the leukapheresis product, blood, WBC/PBMC composition and/or T-cell composition should be avoided.

[0500] If the leukapheresis product, blood, WBC/PBMC composition and/or T-cell composition has to be stored, e.g. overnight, it should be kept at controlled room temperature (same as above). During storage, the concentration of the leukapheresis product, blood, WBC/PBMC composition and/or T-cell composition should never exceed 0.2×10⁹ cell per mL.

[0501] Preferably, cells of the leukapheresis product, blood, WBC/PBMC composition and/or T-cell composition should be stored in autologous plasma. In certain embodiments, if the cell concentration of the leukapheresis product, blood. WBC/PBMC composition and/or T-cell composition is higher than 0.2×10⁹ cell per mL, the product should be diluted with autologous plasma.

[0502] Preferably, the leukapheresis product, blood, WBC/PBMC composition and/or T-cell composition should not be older than 24 hours when starting the labeling and separation procedure. The leukapheresis product, blood, WBC-PBMC composition and/or T-cell composition may be processed and/or prepared for cell labeling using a closed and/or automated system (e.g., CliniMACS Prodigy).

[0503] An automated system may perform additional buffy coat isolation, possibly by ficolation, and/or washing of the cellular product (e.g., the leukapheresis product, blood, WBC/PBMC composition and/or T cell composition).

[0504] A closed and/or automated system may be used to prepare and label cells for T-Cell isolation (from, for example, the leukapheresis product, blood, WBC/PBMC composition and/or T cell composition).

[0505] Although WBC/PBMCs may be nucleofected directly (which is easier and saves additional steps), the methods of the disclosure may include first isolating T cells prior to nucleofection. The easier strategy of directly nucleofecting PBMC requires selective expansion of modified cells that is mediated via CSR or CAR signaling, which by itself is proving to be an inferior expansion method that directly reduces the in vivo efficiency of the product by rendering T cells functionally exhausted. The product may be a heterogeneous composition of modified cells including T cells, NK cells, NKT cells, monocytes, or any combination thereof, which increases the variability in product from patient to patient and makes dosing and CRS management more difficult. Since T cells are thought to be the primary effectors in tumor suppression and killing, T cell isolation for the manufacture of an autologous product may result in significant benefits over the other more heterogeneous composition.

[0506] T cells may be isolated directly, by enrichment of labeled cells or depletion of labeled cells in a one-way labeling procedure or, indirectly, in a two-step labeling procedure. According to certain enrichment strategies of the disclosure, T cells may be collected in a Cell Collection Bag and the non-labeled cells (non-target cells) in a Negative Fraction Bag. In contrast to an enrichment strategy of the disclosure, the non-labeled cells (target cells) are collected in a Cell Collection Bag and the labeled cells (non-target cells) are collected in a Negative Fraction Bag or in the Non-Target Cell Bag, respectively. Selection reagents may include, but are not limited to, antibody-coated beads. Antibody-coated beads may either be removed prior to a modification and/or an expansion step, or, retained on the cells prior to a modification and/or an expansion step. One or more of the following non-limiting examples of cellular markers may be used to isolate T-cells: CD3, CD4, CD8, CD25, anti-biotin, CD1c, CD3/CD19, CD3/CD56, CD14, CD19, CD34, CD45RA, CD56, CD62L, CD133. CD137. CD271, CD304, IFN-gamma, TCR alpha/beta, and/or any combination thereof. Methods for the isolation of T-cells may include one or more reagents that specifically bind and/or detectably-label one or more of the following non-limiting examples of cellular markers may be used to isolate T-cells: CD3, CD4, CD8, CD25, anti-biotin, CD1c, CD3/CD19, CD3/CD56, CD14, CD19, CD34, CD45RA, CD56, CD62L, CD133, CD137, CD271, CD304, IFN-gamma, TCR alpha/beta, and/or any combination thereof. These reagents may or may not be “Good Manufacturing Practices” (“GMP”) grade. Reagents may include, but are not limited to, Thermo DynaBeads and Miltenyi CliniMACS products. Methods of isolating T-cells of the disclosure may include multiple iterations of labeling and/or isolation steps. At any point in the methods of isolating T-cells of the disclosure, unwanted cells and/or unwanted cell types may be depleted from a T cell product composition of the disclosure by positively or negatively selecting for the unwanted cells and/or unwanted cell types. A T cell product composition of the disclosure may contain additional cell types that may express CD4, CD8, and/or another T cell marker(s).

[0507] Methods of the disclosure for nucleofection of T cells may eliminate the step of T cell isolation by, for example, a process for nucleofection of T cells in a population or composition of WBC/PBMCs that, following nucleofection, includes an isolation step or a selective expansion step via TCR signaling.

[0508] Certain cell populations may be depleted by positive or negative selection before or after T cell enrichment and/or sorting. Examples of cell compositions that may be depleted from a cell product composition may include myeloid cells, CD25+ regulatory T cells (T Regs), dendritic cells, macrophages, red blood cells, mast cells, gamma-delta T cells, natural killer (NK) cells, a Natural Killer (NK)-like cell (e.g. a Cytokine Induced Killer (CIK) cell), induced natural killer (iNK) T cells, NK T cells, B cells, or any combination thereof.

[0509] T cell product compositions of the disclosure may include CD4+ and CD8+ T-Cells. CD4+ and CD8+ T-Cells may be isolated into separate collection bags during an isolation or selection procedure. CD4+ T cells and CD8+ T cells may be further treated separately, or treated after reconstitution (combination into the same composition) at a particular ratio.

[0510] The particular ratio at which CD4+ T cells and CD8+ T cells may be reconstituted may depend upon the type and efficacy of expansion technology used, cell medium, and/or growth conditions utilized for expansion of T-cell product compositions. Examples of possible CD4+: CD8+ ratios include, but are not limited to, 50%:50%, 60%:40%, 40%:60% 75%:25% and 25%:75%.

[0511] CD8+ T cells exhibit a potent capacity for tumor cell killing, while CD4+ T cells provide many of the cytokines required to support CD8+ T cell proliferative capacity and function. Because T cells isolated from normal donors are predominantly CD4+, the T-cell product compositions are artificially adjusted in vitro with respect to the CD4+:CD8+ ratio to improve upon the ratio of CD4+ T cells to CD8+ T cells that would otherwise be present in vivo. An optimized ratio may also be used for the ex vivo expansion of the autologous T− cell product composition. In view of the artificially adjusted CD4+:CD8+ ratio of the T-cell product composition, it is important to note that the product compositions of the disclosure may be significantly different and provide significantly greater advantage than any endogenously-occurring population of T-cells.

[0512] Preferred methods for T cell isolation may include a negative selection strategy for yielding untouched pan T cell, meaning that the resultant T-cell composition includes T-cells that have not been manipulated and that contain an endogenously-occurring variety/ratio of T-cells.

[0513] Reagents that may be used for positive or negative selection include, but are not limited to, magnetic cell separation beads. Magnetic cell separation beads may or may not be removed or depleted from selected populations of CD4+ T cells, CD8+ T cells, or a mixed population of both CD4+ and CD8+ T cells before performing the next step in a T-cell isolation method of the disclosure.

[0514] T cell compositions and T cell product compositions may be prepared for cryopreservation, storage in standard T Cell Culture Medium, and/or genetic modification.

[0515] T cell compositions, T cell product compositions, unstimulated T cell compositions, resting T cell compositions or any portion thereof may be cryopreserved using a standard cryopreservation method optimized for storing and recovering human cells with high recovery, viability, phenotype, and/or functional capacity. Commercially-available cryopreservation media and/or protocols may be used. Cryopreservation methods of the disclosure may include a DMSO free cryopreservant (e.g. CryoSOfree™ DMSO-free Cryopreservation Medium) reduce freezing-related toxicity.

[0516] T cell compositions, T cell product compositions, unstimulated T cell compositions, resting T cell compositions or any portion thereof may be stored in a culture medium. T cell culture media of the disclosure may be optimized for cell storage, cell genetic modification, cell phenotype and/or cell expansion. T cell culture media of the disclosure may include one or more antibiotics. Because the inclusion of an antibiotic within a cell culture media may decrease transfection efficiency and/or cell yield following genetic modification via nucleofection, the specific antibiotics (or combinations thereof) and their respective concentration(s) may be altered for optimal transfection efficiency and/or cell yield following genetic modification via nucleofection.

[0517] T cell culture media of the disclosure may include serum, and, moreover, the serum composition and concentration may be altered for optimal cell outcomes. Human AB serum is preferred over FBS/FCS for culture of T cells because, although contemplated for use in T cell culture media of the disclosure, FBS/FCS may introduce xeno-proteins. Serum may be isolated form the blood of the subject for whom the T-cell composition in culture is intended for administration, thus, a T cell culture medium of the disclosure may comprise autologous serum. Serum-free media or serum-substitute may also be used in T-cell culture media of the disclosure. In certain embodiments of the T-cell culture media and methods of the disclosure, serum-free media or serum-substitute may provide advantages over supplementing the medium with xeno-serum, including, but not limited to, healthier cells that have greater viability, nucleofect with higher efficiency, exhibit greater viability post-nucleofection, display a more desirable cell phenotype, and/or greater/faster expansion upon addition of expansion technologies.

[0518] T cell culture media may include a commercially-available cell growth media. Exemplary commercially-available cell growth media include, but are not limited to, PBS, HBSS, OptiMEM, DMEM, RPMI 1640, AIM-V, X-VIVO 15, CellGro DC Medium, CTS OpTimizer T Cell Expansion SFM, TexMACS Medium, PRIME-XV T Cell Expansion Medium, ImmunoCult-XF T Cell Expansion Medium, or any combination thereof.

[0519] T cell compositions, T cell product compositions, unstimulated T cell compositions, resting T cell compositions or any portion thereof may be prepared for genetic modification. Preparation of T cell compositions, T cell product compositions, unstimulated T cell compositions, resting T cell compositions or any portion thereof for genetic modification may include cell washing and/or resuspension in a desired nucleofection buffer. Cryopreserved T-cell compositions may be thawed and prepared for genetic modification by nucleofection. Cryopreserved cells may be thawed according to standard or known protocols. Thawing and preparation of cryopreserved cells may be optimized to yield cells that have greater viability, nucleofect with higher efficiency, exhibit greater viability post-nucleofection, display a more desirable cell phenotype, and/or greater/faster expansion upon addition of expansion technologies. For example, Grifols Albutein (25% human albumin) may be used in the thawing and/or preparation process.

### Modification of an Autologous T Cell Product Composition

[0520] T cell compositions, T cell product compositions, unstimulated T cell compositions, resting T cell compositions or any portion thereof may be modified using, for example, a nucleofection strategy such as electroporation. The total number of cells to be nucleofected, the total volume of the nucleofection reaction, and the precise timing of the preparation of the sample may be optimized to yield cells that have greater viability, nucleofect with higher efficiency, exhibit greater viability post-nucleofection, display a more desirable cell phenotype, and/or greater/faster expansion upon addition of expansion technologies.

[0521] Nucleofection and/or electroporation may be accomplished using, for example. Lonza Amaxa, MaxCyte PulseAgile, Harvard Apparatus BTX, and/or Invitrogen Neon. Non-metal electrode systems, including, but not limited to, plastic polymer electrodes, may be preferred for nucleofection.

[0522] Prior to modification by nucleofection. T cell compositions, T cell product compositions, unstimulated T cell compositions, resting T cell compositions or any portion thereof may be resuspended in a nucleofection buffer. Nucleofection buffers of the disclosure include commercially-available nucleofection buffers. Nucleofection buffers of the disclosure may be optimized to yield cells that have greater viability, nucleofect with higher efficiency, exhibit greater viability post-nucleofection, display a more desirable cell phenotype, and/or greater/faster expansion upon addition of expansion technologies. Nucleofection buffers of the disclosure may include, but are not limited to, PBS, HBSS, OptiMEM, BTXpress, Amaxa Nucleofector, Human T cell nucleofection buffer and any combination thereof. Nucleofection buffers of the disclosure may comprise one or more supplemental factors to yield cells that have greater viability, nucleofect with higher efficiency, exhibit greater viability post-nucleofection, display a more desirable cell phenotype, and/or greater/faster expansion upon addition of expansion technologies. Exemplary supplemental factors include, but are not limited to, recombinant human cytokines, chemokines, interleukins and any combination thereof. Exemplary cytokines, chemokines, and interleukins include, but are not limited to, IL2, IL7, IL12, IL15, IL21, IL1, IL3, IL4, IL5, IL6, IL8, CXCL8, IL9, IL10, IL11, IL13, IL14, IL16, IL17, IL18, IL19, IL20, IL22, IL23, IL25, IL26, IL27, IL28, IL29, IL30, IL31, IL32, IL33, IL35, IL36, GM-CSF, IFN-gamma, IL-1 alpha/IL-1F1, IL-1 beta/IL-1F2, IL-12 p70, IL-12/IL-35 p35, IL-13, IL-17/IL-17A, IL-17A/F Heterodimer, IL-17F, IL-18/IL-1F4, IL-23, IL-24, IL-32, IL-32 beta, IL-32 gamma, IL-33, LAP (TGF-beta 1), Lymphotoxin-alpha/TNF-beta, TGF-beta, TNF-alpha, TRANCE/TNFSF11/RANK L and any combination thereof. Exemplary supplemental factors include, but are not limited to, salts, minerals, metabolites or any combination thereof. Exemplary salts, minerals, and metabolites include, but are not limited to, HEPES, Nicotinamide, Heparin, Sodium Pyruvate, L-Glutamine, MEM Non-Essential Amino Acid Solution, Ascorbic Acid. Nucleosides, FBS/FCS, Human serum, serum-substitute, anti-biotics, pH adjusters, Earle's Salts, 2-Mercaptoethanol, Human transferrin, Recombinant human insulin, Human serum albumin, Nucleofector PLUS Supplement, KCL, MgCl2, Na2HPO4, NAH2PO4, Sodium lactobionate, Manitol, Sodium succinate, Sodium Chloride, CINa, Glucose, Ca(NO3)2, Tris/HCl, K2HPO4, KH2PO4, Polyethylenimine, Poly-ethylene-glycol, Poloxamer 188, Poloxamer 181, Poloxamer 407, Poly-vinylpyrrolidone, Pop313, Crown-5, and any combination thereof. Exemplary supplemental factors include, but are not limited to, media such as PBS, HBSS. OptiMEM, DMEM, RPMI 1640, AIM-V, X-VIVO 15. CellGro DC Medium. CTS OpTimizer T Cell Expansion SFM, TexMACS Medium. PRIME-XV T Cell Expansion Medium, ImmunoCult-XF T Cell Expansion Medium and any combination thereof. Exemplary supplemental factors include, but are not limited to, inhibitors of cellular DNA sensing, metabolism, differentiation, signal transduction, the apoptotic pathway and combinations thereof. Exemplary inhibitors include, but are not limited to, inhibitors of TLR9, MyD88, IRAK, TRAF6, TRAF3, IRF-7, NF-KB, Type 1 Interferons, pro-inflammatory cytokines, cGAS, STING, Sec5, TBK1, IRF-3, RNA pol III, RIG-1, IPS-1, FADD, RIP1, TRAF3, AIM2, ASC, Caspase1, Pro-IL1B, PI3K. Akt, Wnt3A, inhibitors of glycogen synthase kinase-3β (GSK-3β) (e.g. TWS119), Bafilomycin, Chloroquine, Quinacrine, AC-YVAD-CMK, Z-VAD-FMK, Z-IETD-FMK and any combination thereof. Exemplary supplemental factors include, but are not limited to, reagents that modify or stabilize one or more nucleic acids in a way to enhance cellular delivery, enhance nuclear delivery or transport, enhance the facilitated transport of nucleic acid into the nucleus, enhance degradation of epi-chromosomal nucleic acid, and/or decrease DNA-mediated toxicity. Exemplary reagents that modify or stabilize one or more nucleic acids include, but are not limited to, pH modifiers, DNA-binding proteins, lipids, phospholipids, CaPO4, net neutral charge DNA binding peptides with or without NLS sequences, TREX1 enzyme, and any combination thereof.

[0523] Transposition reagents, including a transposon and a transposase, may be added to a nucleofection reaction of the disclosure prior to, simultaneously with, or after an addition of cells to a nucleofection buffer (optionally, contained within a nucleofection reaction vial or cuvette). Transposons of the disclosure may comprise plasmid DNA, linearized plasmid DNA, a PCR product, nanoplasmid, DOGGYBONET™ DNA, an mRNA template, a single or double-stranded DNA, a protein-nucleic acid combination or any combination thereof. Transposons of the disclosure may comprised one or more sequences that encode one or more TTAA site(s), one or more inverted terminal repeat(s) (ITRs), one or more long terminal repeat(s) (LTRs), one or more insulator(s), one or more promotor(s), one or more full-length or truncated gene(s), one or more polyA signal(s), one or more self-cleaving 2A peptide cleavage site(s), one or more internal ribosome entry site(s) (IRES), one or more enhancer(s), one or more regulator(s), one or more replication origin(s), and any combination thereof.

[0524] Transposons of the disclosure may comprise one or more sequences that encode one or more full-length or truncated gene(s). Full-length and/or truncated gene(s) introduced by transposons of the disclosure may encode one or more of a signal peptide, a hinge, a transmembrane domain, a costimulatory domain, a chimeric antigen receptor (CAR), a chimeric T-cell receptor (CAR-T, a CARTyrin or a VCAR), a receptor, a ligand, a cytokine, a drug resistance gene, a tumor antigen, an allo or auto antigen, an enzyme, a protein, a peptide, a poly-peptide, a fluorescent protein, a mutein or any combination thereof.

[0525] Transposons of the disclosure may be prepared in water, TAE, TBE, PBS, HBSS, media, a supplemental factor of the disclosure or any combination thereof.

[0526] Transposons of the disclosure may be designed to optimize clinical safety and/or improve manufacturability. As a non-limiting example, transposons of the disclosure may be designed to optimize clinical safety and/or improve manufacturability by eliminating unnecessary sequences or regions and/or including a non-antibiotic selection marker. Transposons of the disclosure may or may not be GMP grade.

[0527] Transposase enzymes of the disclosure may be encoded by one or more sequences of plasmid DNA, mRNA, protein, protein-nucleic acid combination or any combination thereof.

[0528] Transposase enzymes of the disclosure may be prepared in water, TAE, TBE, PBS, HBSS, media, a supplemental factor of the disclosure or any combination thereof. Transposase enzymes of the disclosure or the sequences/constructs encoding or delivering them may or may not be GMP grade.

[0529] Transposons and transposase enzymes of the disclosure may be delivered to a cell by any means.

[0530] Although compositions and methods of the disclosure include delivery of a transposon and/or transposase of the disclosure to a cell by plasmid DNA (pDNA), the use of a plasmid for delivery may allow the transposon and/or transposase to be integrated into the chromosomal DNA of the cell, which may lead to continued transposase expression. Accordingly, transposon and/or transposase enzymes of the disclosure may be delivered to a cell as either mRNA or protein to remove any possibility for chromosomal integration.

[0531] Transposons and transposases of the disclosure may be pre-incubated alone or in combination with one another prior to the introduction of the transposon and/or transposase into a nucleofection reaction. The absolute amounts of each of the transposon and the transposase, as well as the relative amounts, e.g., a ratio of transposon to transposase may be optimized.

[0532] Following preparation of nucleofection reaction, optionally, in a vial or cuvette, the reaction may be loaded into a nucleofector apparatus and activated for delivery of an electric pulse according to the manufacturer's protocol. Electric pulse conditions used for delivery of a transposon and/or a transposase of the disclosure (or a sequence encoding a transposon and/or a transposase of the disclosure) to a cell may be optimized for yielding cells with enhanced viability, higher nucleofection efficiency, greater viability post-nucleofection, desirable cell phenotype, and/or greater/faster expansion upon addition of expansion technologies. When using Amaxa nucleofector technology, each of the various nucleofection programs for the Amaxa 2B or 4D nucleofector are contemplated.

[0533] Following a nucleofection reaction of the disclosure, cells may be gently added to a cell medium. For example, when T cells undergo the nucleofection reaction, the T cells may be added to a T cell medium. Post-nucleofection cell media of the disclosure may comprise any one or more commercially-available media. Post-nucleofection cell media of the disclosure (including post-nucleofection T cell media of the disclosure) may be optimized to yield cells with greater viability, higher nucleofection efficiency, exhibit greater viability post-nucleofection, display a more desirable cell phenotype, and/or greater/faster expansion upon addition of expansion technologies. Post-nucleofection cell media of the disclosure (including post-nucleofection T cell media of the disclosure) may comprise PBS, HBSS, OptiMEM, DMEM, RPMI 1640, AIM-V, X-VIVO 15, CellGro DC Medium, CTS OpTimizer T Cell Expansion SFM, TexMACS Medium, PRIME-XV T Cell Expansion Medium, ImmunoCult-XF T Cell Expansion Medium and any combination thereof. Post-nucleofection cell media of the disclosure (including post-nucleofection T cell media of the disclosure) may comprise one or more supplemental factors of the disclosure to enhance viability, nucleofection efficiency, viability post-nucleofection, cell phenotype, and/or greater/faster expansion upon addition of expansion technologies. Exemplary supplemental factors include, but are not limited to, recombinant human cytokines, chemokines, interleukins and any combination thereof. Exemplary cytokines, chemokines, and interleukins include, but are not limited to, IL2, IL7, IL12, IL15, IL21, IL1, IL3, IL4, IL5, IL6, IL8, CXCL8, IL9, IL10, IL11, IL13, IL14, IL16, IL17, IL18, IL19, IL20, IL22, IL23, IL25, IL26, IL27, IL28, IL29, IL30, IL31, IL32, IL33, IL35, IL36, GM-CSF, IFN-gamma, IL-1 alpha/IL-1F1, IL-1 beta/IL-1F2, IL-12 p70, IL-12/IL-35 p35, IL-13, IL-17/IL-17A, IL-17A/F Heterodimer, IL-17F, IL-18/IL-1F4, IL-23, IL-24, IL-32, IL-32 beta, IL-32 gamma, IL-33, LAP (TGF-beta 1), Lymphotoxin-alpha/TNF-beta, TGF-beta, TNF-alpha, TRANCE/TNFSF11/RANK L and any combination thereof. Exemplary supplemental factors include, but are not limited to, salts, minerals, metabolites or any combination thereof. Exemplary salts, minerals, and metabolites include, but are not limited to, HEPES, Nicotinamide, Heparin, Sodium Pyruvate, L-Glutamine, MEM Non-Essential Amino Acid Solution, Ascorbic Acid, Nucleosides, FBS/FCS, Human serum, serum-substitute, anti-biotics, pH adjusters, Earle's Salts, 2-Mercaptoethanol, Human transferrin, Recombinant human insulin, Human serum albumin, Nucleofector PLUS Supplement, KCL, MgCl2, Na2HPO4, NAH2PO4, Sodium lactobionate, Manitol, Sodium succinate, Sodium Chloride, CINa, Glucose. Ca(NO3)2, Tris/HCl, K2HPO4, KH2PO4, Polyethylenimine, Poly-ethylene-glycol, Poloxamer 188, Poloxamer 181, Poloxamer 407, Poly-vinylpyrrolidone, Pop313, Crown-5, and any combination thereof. Exemplary supplemental factors include, but are not limited to, media such as PBS, HBSS, OptiMEM, DMEM, RPMI 1640, AIM-V, X-VIVO 15, CellGro DC Medium, CTS OpTimizer T Cell Expansion SFM, TexMACS Medium, PRIME-XV T Cell Expansion Medium, ImmunoCult-XF T Cell Expansion Medium and any combination thereof. Exemplary supplemental factors include, but are not limited to, inhibitors of cellular DNA sensing, metabolism, differentiation, signal transduction, the apoptotic pathway and combinations thereof. Exemplary inhibitors include, but are not limited to, inhibitors of TLR9, MyD88, IRAK, TRAF6, TRAF3, IRF-7, NF-KB, Type 1 Interferons, pro-inflammatory cytokines, cGAS, STING, Sec5, TBK1, IRF-3, RNA pol 111, RIG-1. IPS-1, FADD, RIP1, TRAF3, AIM2, ASC, Caspase1, Pro-IL1B, PI3K. Akt, Wnt3A, inhibitors of glycogen synthase kinase-3β (GSK-3β) (e.g. TWS119), Bafilomycin, Chloroquine, Quinacrine, AC-YVAD-CMK, Z-VAD-FMK, Z-IETD-FMK and any combination thereof. Exemplary supplemental factors include, but are not limited to, reagents that modify or stabilize one or more nucleic acids in a way to enhance cellular delivery, enhance nuclear delivery or transport, enhance the facilitated transport of nucleic acid into the nucleus, enhance degradation of epi-chromosomal nucleic acid, and/or decrease DNA-mediated toxicity. Exemplary reagents that modify or stabilize one or more nucleic acids include, but are not limited to, pH modifiers, DNA-binding proteins, lipids, phospholipids, CaPO4, net neutral charge DNA binding peptides with or without NLS sequences, TREX1 enzyme, and any combination thereof.

[0534] Post-nucleofection cell media of the disclosure (including post-nucleofection T cell media of the disclosure) may be used at room temperature or pre-warmed to, for example to between 32° C. to 37° C., inclusive of the endpoints. Post-nucleofection cell media of the disclosure (including post-nucleofection T cell media of the disclosure) may be pre-warmed to any temperature that maintains or enhances cell viability and/or expression of a transposon or portion thereof of the disclosure.

[0535] Post-nucleofection cell media of the disclosure (including post-nucleofection T cell media of the disclosure) may be contained in tissue culture flasks or dishes, G-Rex flasks, Bioreactor or cell culture bags, or any other standard receptacle. Post-nucleofection cell cultures of the disclosure (including post-nucleofection T cell cultures of the disclosure) may be may be kept still, or, alternatively, they may be perturbed (e.g. rocked, swirled, or shaken).

[0536] Post-nucleofection cell cultures may comprise modified cells. Post-nucleofection T cell cultures may comprise modified T cells. Modified cells of the disclosure may be either rested for a defined period of time or stimulated for expansion by, for example, the addition of a T Cell Expander technology. In certain embodiments, modified cells of the disclosure may be either rested for a defined period of time or immediately stimulated for expansion by, for example, the addition of a T Cell Expander technology. Modified cells of the disclosure may be rested to allow them sufficient time to acclimate, time for transposition to occur, and/or time for positive or negative selection, resulting in cells with enhanced viability, higher nucleofection efficiency, greater viability post-nucleofection, desirable cell phenotype, and/or greater/faster expansion upon addition of expansion technologies. Modified cells of the disclosure may be rested, for example, for 1, 2, 3, 4, 5, 6, 7, 8, 9, 10, 11, 12, 13, 14, 15, 16, 17, 18, 19, 20, 21, 22, 23, 24, or more hours. In certain embodiments, genetically modified cells of the disclosure may be rested, for example, for an overnight. In certain aspects, an overnight is about 12 hours. Modified cells of the disclosure may be rested, for example, for 1, 2, 3, 4, 5, 6, 7, 8, 9, 10, 11, 12, 13, 14 or more days.

[0537] Modified cells of the disclosure may be selected following a nucleofection reaction and prior to addition of an expander technology. For optimal selection of modified cells, the cells may be allowed to rest in a post-nucleofection cell medium for at least 2-14 days to facilitate identification of modified cells (e.g., differentiation of modified from non-modified cells).

[0538] As early as 24-hours post-nucleofection, expression of a Centyrin or CARTyrin and selection marker of the disclosure may be detectable in modified T cells upon successful nucleofection of a transposon of the disclosure. Due to epi-chromosomal expression of the transposon, expression of a selection marker alone may not differentiate modified T cells (those cells in which the transposon has been successfully integrated) from unmodified T cells (those cells in which the transposon was not successfully integrated). When epi-chromosomal expression of the transposon obscures the detection of modified cells by the selection marker, the nucleofected cells (both modified and unmodified cells) may be rested for a period of time (e.g. 2-14 days) to allow the cells to cease expression or lose all epi-chromosomal transposon expression. Following this extended resting period, only modified T cells should remain positive for expression of selection marker. The length of this extended resting period may be optimized for each nucleofection reaction and selection process. When epi-chromosomal expression of the transposon obscures the detection of modified cells by the selection marker, selection may be performed without this extended resting period, however, an additional selection step may be included at a later time point (e.g. either during or after the expansion stage).

[0539] Selection of modified cells of the disclosure may be performed by any means. In certain embodiments of the methods of the disclosure, selection of modified cells of the disclosure may be performed by isolating cells expressing a specific selection marker. Selection markers of the disclosure may be encoded by one or more sequences in the transposon. Selection markers of the disclosure may be expressed by the modified cell as a result of successful transposition (i.e., not encoded by one or more sequences in the transposon). In certain embodiments, modified cells of the disclosure contain a selection marker that confers resistance to a deleterious compound of the post-nucleofection cell medium. The deleterious compound may comprise, for example, an antibiotic or a drug that, absent the resistance conferred by the selection marker to the modified cells, would result in cell death. Exemplary selection markers include, but are not limited to, wild type (WT) or mutant forms of one or more of the following genes: neo, DHFR, TYMS, ALDH, MDR1, MGMT, FANCF, RAD51C, GCS, and NKX2.2. Exemplary selection markers include, but are not limited to, a surface-expressed selection marker or surface-expressed tag may be targeted by Ab-coated magnetic bead technology or column selection, respectively. A cleavable tag such as those used in protein purification may be added to a selection marker of the disclosure for efficient column selection, washing, and elution. In certain embodiments, selection markers of the disclosure are not expressed by the modified cells (including modified T cells) endogenously and, therefore, may be useful in the physical isolation of modified cells (by, for example, cell sorting techniques). Exemplary selection markers of the disclosure are not expressed by the modified cells (including modified T cells) endogenously include, but are not limited to, full-length, mutated, or truncated forms of CD271, CD19 CD52. CD34. RQR8, CD22, CD20, CD33 and any combination thereof.

[0540] In some embodiments of the modified cells of the disclosure, the selection marker comprises a protein that is active in dividing cells and not active in non-dividing cells. In some embodiments, the selection marker comprises a metabolic marker. In some embodiments, the selection marker comprises a dihydrofolate reductase (DHFR) mutein enzyme. In some embodiments, the DHFR mutein enzyme comprises or consists of the amino acid sequence of:

(SEQ ID NO: 17012)

| | |
|---|---|
| 1 | MVGSLNCIVA VSQNMGIGKN GDFPWPPLRN ESRYFQRMTI |
| | TSSVEGKQNL |
| 61 | VIMGKKTWFS IPEKNRPLKG RINLVLSREL KEPPOGAHFL |
| | SRSLDDALKL |
| 121 | TEQPELANKV DMVWIVGGSS VYKEAMNHPG HLKLFVTRIM |
| | QDFESDTFFP |
| 181 | EIDLEKYKLL PEYPGVLSDV QEEKGIKYKF EVYEKND. |

In some embodiments, the amino acid sequence of the DHFR mutein enzyme further comprises a mutation at one or more of positions 80, 113, or 153. In some embodiments, the amino acid sequence of the DHFR mutein enzyme comprises one or more of a substitution of a Phenylalanine (F) or a Leucine (L) at position 80, a substitution of a Leucine (L) or a Valine (V) at position 113, and a substitution of a Valine (V) or an Aspartic Acid (D) at position 153.

[0541] Modified cells of the disclosure may be selective expanded following a nucleofection reaction. In certain embodiments, modified T cells comprising a CARTyrin may be selectively expanded by CARTyrin stimulation. Modified T cells comprising a CARTyrin may be stimulated by contact with a target-covered reagent (e.g. a tumor line or a normal cell line expressing a target or expander beads covered in a target). Alternatively, modified T cells comprising a CARTyrin may be stimulated by contact with an irradiated tumor cell, an irradiated allogeneic normal cell, an irradiated autologous PBMC. To minimize contamination of cell product compositions of the disclosure with a target-expressing cell used for stimulation, for example, when the cell product composition may be administered directly to a subject, the stimulation may be performed using expander beads coated with CARTyrin target protein. Selective expansion of modified T cells comprising a CARTyrin by CARTyrin stimulation may be optimized to avoid functionally-exhausting the modified T-cells.

[0542] Selected modified cells of the disclosure may be cryopreserved, rested for a defined period of time, or stimulated for expansion by the addition of a Cell Expander technology. Selected modified cells of the disclosure may be cryopreserved, rested for a defined period of time, or immediately stimulated for expansion by the addition of a Cell Expander technology. When the selected modified cells are T cells, the T cells may be stimulated for expansion by the addition of a T-Cell Expander technology. Selected modified cells of the disclosure may be rested, for example, for 1, 2, 3, 4, 5, 6, 7, 8, 9, 10, 11, 12, 13, 14, 15, 16, 17, 18, 19, 20, 21, 22, 23, 24, or more hours. In certain embodiments, selected modified cells of the disclosure may be rested, for example, for an overnight. In certain aspects, an overnight is about 12 hours. Selected modified cells of the disclosure may be rested, for example, for 1, 2, 3, 4, 5, 6, 7, 8, 9, 10, 11, 12, 13, 14 or more days. Selected modified cells of the disclosure may be rested for any period of time resulting in cells with enhanced viability, higher nucleofection efficiency, greater viability post-nucleofection, desirable cell phenotype, and/or greater/faster expansion upon addition of expansion technologies.

[0543] Selected modified cells (including selected modified T cells of the disclosure) may be cryopreserved using any standard cryopreservation method, which may be optimized for storing and/or recovering human cells with high recovery, viability, phenotype, and/or functional capacity. Cryopreservation methods of the disclosure may include commercially-available cryopreservation media and/or protocols.

[0544] A transposition efficiency of selected modified cells (including selected modified T cells of the disclosure) may be assessed by any means. For example, prior to the application of an expander technology, expression of the transposon by selected modified cells (including selected modified T cells of the disclosure) may be measured by fluorescence-activated cell sorting (FACS). Determination of a transposition efficiency of selected modified cells (including selected modified T cells of the disclosure) may include determining a percentage of selected cells expressing the transposon (e.g. a CARTyrin). Alternatively, or in addition, a purity of T cells, a Mean Fluorescence Intensity (MFI) of the transposon expression (e.g. CARTyrin expression), an ability of a CARTyrin (delivered in the transposon) to mediate degranulation and/or killing of a target cell expressing the CARTyrin ligand, and/or a phenotype of selected modified cells (including selected modified T cells of the disclosure) may be assessed by any means.

[0545] Cell product compositions of the disclosure may be released for administration to a subject upon meeting certain release criteria. Exemplary release criteria may include, but are not limited to, a particular percentage of modified, selected and/or expanded T cells expressing detectable levels of a CARTyrin on the cell surface.

### Modification of an Autologous T Cell Product Composition

[0546] Modified cells (including modified T cells) of the disclosure may be expanded using an expander technology. Expander technologies of the disclosure may comprise a commercially-available expander technology. Exemplary expander technologies of the disclosure include stimulation a modified T cell of the disclosure via the TCR. While all means for stimulation of a modified T cell of the disclosure are contemplated, stimulation a modified T cell of the disclosure via the TCR is a preferred method, yielding a product with a superior level of killing capacity.

[0547] To stimulate a modified T cell of the disclosure via the TCR, Thermo Expander DynaBeads may be used at a 3:1 bead to T cell ratio. If the expander beads are not biodegradable, the beads may be removed from the expander composition. For example, the beads may be removed from the expander composition after about 5 days. To stimulate a modified T cell of the disclosure via the TCR, a Miltenyi T Cell Activation/Expansion Reagent may be used. To stimulate a modified T cell of the disclosure via the TCR. StemCell Technologies' ImmunoCult Human CD3/CD28 or CD3/CD28/CD2 T Cell Activator Reagent may be used. This technology may be preferred since the soluble tetrameric antibody complexes would degrade after a period and would not require removal from the process.

[0548] Artificial antigen presenting cells (APCs) may be engineered to co-express the target antigen and may be used to stimulate a cell or T-cell of the disclosure through a TCR and/or CARTyrin of the disclosure. Artificial APCs may comprise or may be derived from a tumor cell line (including, for example, the immortalized myelogenous leukemia line K562) and may be engineered to co-express multiple costimulatory molecules or technologies (such as CD28, 4-1BBL, CD64, mbIL-21, mbIL-15, CAR target molecule, etc.). When artificial APCs of the disclosure are combined with costimulatory molecules, conditions may be optimized to prevent the development or emergence of an undesirable phenotype and functional capacity, namely terminally-differentiated effector T cells.

[0549] Irradiated PBMCs (auto or allo) may express some target antigens, such as CD19, and may be used to stimulate a cell or T-cell of the disclosure through a TCR and/or CARTyrin of the disclosure. Alternatively, or in addition, irradiated tumor cells may express some target antigens and may be used to stimulate a cell or T-cell of the disclosure through a TCR and/or CARTyrin of the disclosure.

[0550] Plate-bound and/or soluble anti-CD3, anti-CD2 and/or anti-CD28 stimulate may be used to stimulate a cell or T-cell of the disclosure through a TCR and/or CARTyrin of the disclosure.

[0551] Antigen-coated beads may display target protein and may be used to stimulate a cell or T-cell of the disclosure through a TCR and/or CAR of the disclosure. Alternatively, or in addition, expander beads coated with a CARTyrin target protein may be used to stimulate a cell or T-cell of the disclosure through a TCR and/or CARTyrin of the disclosure.

[0552] Expansion methods drawn to stimulation of a cell or T-cell of the disclosure through the TCR or CARTyrin and via surface-expressed CD2, CD3, CD28, 4-1BB, and/or other markers on modified T cells.

[0553] An expansion technology may be applied to a cell of the disclosure immediately post-nucleofection until approximately 24 hours post-nucleofection. While various cell media may be used during an expansion procedure, a desirable T Cell Expansion Media of the disclosure may yield cells with, for example, greater viability, cell phenotype, total expansion, or greater capacity for in vivo persistence, engraftment, and/or CAR-mediated killing. Cell media of the disclosure may be optimized to improve/enhance expansion, phenotype, and function of modified cells of the disclosure. A preferred phenotype of expanded T cells may include a mixture of T stem cell memory. T central, and T effector memory cells. Expander Dynabeads may yield mainly central memory T cells which may lead to superior performance in the clinic.

[0554] Exemplary T cell expansion media of the disclosure may include, in part or in total, PBS, HBSS, OptiMEM, DMEM, RPMI 1640, AIM-V, X-VIVO 15, CellGro DC Medium. CTS OpTimizer T Cell Expansion SFM, TexMACS Medium. PRIME-XV T Cell Expansion Medium, ImmunoCult-XF T Cell Expansion Medium, or any combination thereof. T cell expansion media of the disclosure may further include one or more supplemental factors. Supplemental factors that may be included in a T cell expansion media of the disclosure enhance viability, cell phenotype, total expansion, or increase capacity for in vivo persistence, engraftment, and/or CARTyrin-mediated killing. Supplemental factors that may be included in a T cell expansion media of the disclosure include, but are not limited to, recombinant human cytokines, chemokines, and/or interleukins such as IL2, IL7, IL12, IL15, IL21, IL1, IL3, IL4, IL5, IL6, IL8, CXCL8, IL9, IL10, IL11, IL13, IL14, IL16, IL17, IL18, IL19, IL20, IL22, IL23, IL25, IL26, IL27, IL28, IL29, IL30, IL31, IL32, IL33, IL35, IL36, GM-CSF, IFN-gamma, IL-1 alpha/IL-1F1, IL-1 beta/IL-1F2, IL-12 p70, IL-12/IL-35 p35, IL-13, IL-17/IL-17A, IL-17A/F Heterodimer, IL-17F, IL-18/IL-1F4, IL-23, IL-24, IL-32, IL-32 beta, IL-32 gamma, IL-33, LAP (TGF-beta 1), Lymphotoxin-alpha/TNF-beta, TGF-beta, TNF-alpha. TRANCE/TNFSF11/RANK L. or any combination thereof. Supplemental factors that may be included in a T cell expansion media of the disclosure include, but are not limited to, salts, minerals, and/or metabolites such as HEPES, Nicotinamide, Heparin. Sodium Pyruvate, L-Glutamine, MEM Non-Essential Amino Acid Solution, Ascorbic Acid, Nucleosides, FBS/FCS, Human serum, serum-substitute, anti-biotics, pH adjusters, Earle's Salts, 2-Mercaptoethanol, Human transferrin, Recombinant human insulin, Human serum albumin, Nucleofector PLUS Supplement, KCL, MgCl2, Na2HPO4, NAH2PO4. Sodium lactobionate, Manitol, Sodium succinate, Sodium Chloride, CINa, Glucose, Ca(NO3)2. Tris/HCl, K2HPO4, KH2PO4, Polyethylenimine, Poly-ethylene-glycol, Poloxamer 188, Poloxamer 181, Poloxamer 407, Poly-vinylpyrrolidone. Pop313. Crown-5 or any combination thereof. Supplemental factors that may be included in a T cell expansion media of the disclosure include, but are not limited to, inhibitors of cellular DNA sensing, metabolism, differentiation, signal transduction, and/or the apoptotic pathway such as inhibitors of TLR9, MyD88, IRAK. TRAF6, TRAF3, IRF-7, NF-KB, Type 1 Interferons, pro-inflammatory cytokines, cGAS, STING, Sec5, TBK1, IRF-3, RNA pol III, RIG-1, IPS-1, FADD, RIP1, TRAF3, AIM2, ASC, Caspase1, Pro-IL1B, PI3K, Akt, Wnt3A, inhibitors of glycogen synthase kinase-3β (GSK-3β) (e.g. TWS119), Bafilomycin, Chloroquine, Quinacrine, AC-YVAD-CMK, Z-VAD-FMK, Z-IETD-FMK, or any combination thereof.

[0555] Supplemental factors that may be included in a T cell expansion media of the disclosure include, but are not limited to, reagents that modify or stabilize nucleic acids in a way to enhance cellular delivery, enhance nuclear delivery or transport, enhance the facilitated transport of nucleic acid into the nucleus, enhance degradation of epi-chromosomal nucleic acid, and/or decrease DNA-mediated toxicity, such as pH modifiers, DNA-binding proteins, lipids, phospholipids, CaPO4, net neutral charge DNA binding peptides with or without NLS sequences, TREX1 enzyme, or any combination thereof.

[0556] Modified cells of the disclosure may be selected during the expansion process by the use of selectable drugs or compounds. For example, in certain embodiments, when a transposon of the disclosure may encode a selection marker that confers to modified cells resistance to a drug added to the culture medium, selection may occur during the expansion process and may require approximately 1-14 days of culture for selection to occur. Examples of drug resistance genes that may be used as selection markers encoded by a transposon of the disclosure, include, but are not limited to, wild type (WT) or mutant forms of the genes neo, DHFR, TYMS, ALDH, MDR1, MGMT. FANCF, RAD51C. GCS, NKX2.2, or any combination thereof. Examples of corresponding drugs or compounds that may be added to the culture medium to which a selection marker may confer resistance include, but are not limited to, G418, Puromycin, Ampicillin, Kanamycin, Methotrexate, Mephalan, Temozolomide, Vincristine, Etoposide, Doxorubicin, Bendamustine, Fludarabine, Aredia (Pamidronate Disodium), Becenum (Carmustine), BiCNU (Carmustine), Bortezomib, Carfilzomib, Carmubris (Carmustine), Carmustine, Clafen (Cyclophosphamide), Cyclophosphamide, Cytoxan (Cyclophosphamide). Daratumumab, Darzalex (Daratumumab), Doxil (Doxorubicin Hydrochloride Liposome), Doxorubicin Hydrochloride Liposome, Dox-SL (Doxorubicin Hydrochloride Liposome), Elotuzumab, Empliciti (Elotuzumab), Evacet (Doxorubicin Hydrochloride Liposome), Farydak (Panobinostat), Ixazomib Citrate, Kyprolis (Carfilzomib), Lenalidomide, LipoDox (Doxorubicin Hydrochloride Liposome), Mozobil (Plerixafor), Neosar (Cyclophosphamide), Ninlaro (Ixazomib Citrate), Pamidronate Disodium. Panobinostat, Plerixafor, Pomalidomide, Pomalyst (Pomalidomide), Revlimid (Lenalidomide), Synovir (Thalidomide), Thalidomide, Thalomid (Thalidomide), Velcade (Bortezomib), Zoledronic Acid, Zometa (Zoledronic Acid), or any combination thereof.

[0557] A T-Cell Expansion process of the disclosure may occur in a cell culture bag in a WAVE Bioreactor, a G-Rex flask, or in any other suitable container and/or reactor.

[0558] A cell or T-cell culture of the disclosure may be kept steady, rocked, swirled, or shaken.

[0559] A cell or T-cell expansion process of the disclosure may optimize certain conditions, including, but not limited to culture duration, cell concentration, schedule for T cell medium addition/removal, cell size, total cell number, cell phenotype, purity of cell population, percentage of modified cells in growing cell population, use and composition of supplements, the addition/removal of expander technologies, or any combination thereof.

[0560] A cell or T-cell expansion process of the disclosure may continue until a predefined endpoint prior to formulation of the resultant expanded cell population. For example, a cell or T-cell expansion process of the disclosure may continue for a predetermined amount of time: at least, 2, 4, 6, 8, 10, 12, 14, 16, 18, 20, 22, 24 hours; at least 1, 2, 3, 4, 5, 6, 7, 8, 9, 10, 11, 12, 13, 14, 15, 16, 17, 18, 19, 20, 21, 22, 23, 24, 25, 26, 27, 28, 29, 30 days; at least 1, 2, 3, 4, 5, 6, 7, 8, 9, 10, 11, 12 weeks; at least 1, 2, 3, 4, 5, 6, months, or at least 1 year. A cell or T-cell expansion process of the disclosure may continue until the resultant culture reaches a predetermined overall cell density: 1, 10, 100, 1000, 104, 105, 106, 107, 108, 109, 1010 cells per volume (p0, ml, L) or any density in between. A cell or T-cell expansion process of the disclosure may continue until the modified cells of a resultant culture demonstrate a predetermined level of expression of a transposon of the disclosure: 1%, 10%, 20%, 30%, 40%, 50%, 60%, 70%, 80%, 90%, or 100% or any percentage in between of a threshold level of expression (a minimum, maximum or mean level of expression indicating the resultant modified cells are clinically-efficacious). A cell or T-cell expansion process of the disclosure may continue until the proportion of modified cells of a resultant culture to the proportion of unmodified cells reaches a predetermined threshold: at least 1:10, 1:9, 1:8, 1:7, 1:6, 1:5, 1:4, 1:3, 1:2, 1:1, 2:1, 2:1, 4:1, 5:1, 6:1, 7:1, 8:1, 9:1 10:1 or any ratio in between.

### Analysis of Modified Autologous T Cells for Release

[0561] A percentage of modified cells may be assessed during or after an expansion process of the disclosure. Cellular expression of a transposon by a modified cell of the disclosure may be measured by fluorescence-activated cell sorting (FACS). For example, FACS may be used to determine a percentage of cells or T cells expressing a CARTyrin of the disclosure. Alternatively, or in addition, a purity of modified cells or T cells, the Mean Fluorescence Intensity (MFI) of a CARTyrin expressed by a modified cell or T cell of the disclosure, an ability of the CARTyrin to mediate degranulation and/or killing of a target cell expressing the CARTyrin ligand, and/or a phenotype of CARTyrin+ T cells may be assessed.

[0562] Compositions of the disclosure intended for administration to a subject may be required to meet one or more “release criteria” that indicate that the composition is safe and efficacious for formulation as a pharmaceutical product and/or administration to a subject. Release criteria may include a requirement that a composition of the disclosure (e.g. a T-cell product of the disclosure) comprises a particular percentage of T cells expressing detectable levels of a CARTyrin of the disclosure on their cell surface.

[0563] The expansion process should be continued until a specific criterion has been met (e.g. achieving a certain total number of cells, achieving a particular population of memory cells, achieving a population of a specific size).

[0564] Certain criterion signal a point at which the expansion process should end. For example, cells should be formulated, reactivated, or cryopreserved once they reach a cell size of 300fL (otherwise, cells reaching a size above this threshold may start to die). Cryopreservation immediately once a population of cells reaches an average cell size of less than 300 fL may yield better cell recovery upon thawing and culture because the cells haven't yet reached a fully quiescent state prior to cryopreservation (a fully quiescent size is approximately 180 fL). Prior to expansion, T cells of the disclosure may have a cell size of about 180 fL, but may more than quadruple their cell size to approximately 900 fL at 3 days post-expansion. Over the next 6-12 days, the population of T-cells will slowly decrease cell size to full quiescence at 180 fL.

[0565] A process for preparing a cell population for formulation may include, but is not limited to the steps of, concentrating the cells of the cell population, washing the cells, and/or further selection of the cells via drug resistance or magnetic bead sorting against a particular surface-expressed marker. A process for preparing a cell population for formulation may further include a sorting step to ensure the safety and purity of the final product. For example, if a tumor cell from a patient has been used to stimulate a modified T-cell of the disclosure or that have been modified in order to stimulate a modified T-cell of the disclosure that is being prepared for formulation, it is critical that no tumor cells from the patient are included in the final product.

Cell Product Infusion and/or Cryopreservation for Infusion

[0566] A pharmaceutical formulation of the disclosure may be distributed into bags for infusion, cryopreservation, and/or storage.

[0567] A pharmaceutical formulation of the disclosure may be cryopreserved using a standard protocol and, optionally, an infusible cryopreservation medium. For example, a DMSO free cryopreservant (e.g. CryoSOfree™ DMSO-free Cryopreservation Medium) may be used to reduce freezing-related toxicity. A cryopreserved pharmaceutical formulation of the disclosure may be stored for infusion to a patient at a later date. An effective treatment may require multiple administrations of a pharmaceutical formulation of the disclosure and, therefore, pharmaceutical formulations may be packaged in pre-aliquoted “doses” that may be stored frozen but separated for thawing of individual doses.

[0568] A pharmaceutical formulation of the disclosure may be stored at room temperature. An effective treatment may require multiple administrations of a pharmaceutical formulation of the disclosure and, therefore, pharmaceutical formulations may be packaged in pre-aliquoted “doses” that may be stored together but separated for administration of individual doses.

[0569] A pharmaceutical formulation of the disclosure may be archived for subsequent re-expansion and/or selection for generation of additional doses to the same patient in the case of an allogenic therapy who may need an administration at a future date following, for example, a remission and relapse of a condition.

### Formulations

[0570] As noted above, the disclosure provides for stable formulations, which preferably comprise a phosphate buffer with saline or a chosen salt, as well as preserved solutions and formulations containing a preservative as well as multi-use preserved formulations suitable for pharmaceutical or veterinary use, comprising at least one modified cell in a pharmaceutically acceptable formulation. Preserved formulations contain at least one known preservative or optionally selected from the group consisting of at least one phenol, m-cresol, p-cresol, o-cresol, chlorocresol, benzyl alcohol, phenylmercuric nitrite, phenoxyethanol, formaldehyde, chlorobutanol, magnesium chloride (e.g., hexahydrate), alkylparaben (methyl, ethyl, propyl, butyl and the like), benzalkonium chloride, benzethonium chloride, sodium dehydroacetate and thimerosal, polymers, or mixtures thereof in an aqueous diluent. Any suitable concentration or mixture can be used as known in the art, such as about 0.0015%, or any range, value, or fraction therein. Non-limiting examples include, no preservative, about 0.1-2% m-cresol (e.g., 0.2, 0.3, 0.4, 0.5, 0.9, 1.0%), about 0.1-3% benzyl alcohol (e.g., 0.5, 0.9, 1.1, 1.5, 1.9, 2.0, 2.5%), about 0.001-0.5% thimerosal (e.g., 0.005, 0.01), about 0.001-2.0% phenol (e.g., 0.05, 0.25, 0.28, 0.5, 0.9, 1.0%), 0.0005-1.0% alkylparaben(s) (e.g., 0.00075, 0.0009, 0.001, 0.002, 0.005, 0.0075, 0.009, 0.01, 0.02, 0.05, 0.075, 0.09, 0.1, 0.2, 0.3, 0.5, 0.75, 0.9, 1.0%), and the like.

[0571] As noted above, the disclosure provides an article of manufacture, comprising packaging material and at least one vial comprising a solution of at least one modified cell with the prescribed buffers and/or preservatives, optionally in an aqueous diluent, wherein said packaging material comprises a label that indicates that such solution can be held over a period of 1, 2, 3, 4, 5, 6, 9, 12, 18, 20, 24, 30, 36, 40, 48, 54, 60, 66, 72 hours or greater.

[0572] The present claimed articles of manufacture are useful for administration over a period ranging from immediate to twenty-four hours or greater. Accordingly, the presently claimed articles of manufacture offer significant advantages to the patient. Formulations of the disclosure can optionally be safely stored at temperatures of from about 2° C. to about 40° C. and retain the biological activity of the protein for extended periods of time, thus allowing a package label indicating that the solution can be held and/or used over a period of 6, 12, 18, 24, 36, 48, 72, or 96 hours or greater.

[0573] The products presently claimed include packaging material. The packaging material provides, in addition to the information required by the regulatory agencies, the conditions under which the product can be used.

### Therapeutic Applications

[0574] The present disclosure also provides a method for modulating or treating a disease, in a cell, tissue, organ, animal, or patient, as known in the art or as described herein, using at least one composition of the disclosure. e.g., administering or contacting the cell, tissue, organ, animal, or patient with a therapeutic effective amount of a composition of the disclosure. The present disclosure also provides a method for modulating or treating a disease, in a cell, tissue, organ, animal, or patient including, but not limited to, a malignant disease.

[0575] The present disclosure also provides a method for modulating or treating at least one malignant disease in a cell, tissue, organ, animal or patient, including, but not limited to, at least one of: leukemia, acute leukemia, acute lymphoblastic leukemia (ALL), acute lymphocytic leukemia. B-cell, T-cell or FAB ALL, acute myeloid leukemia (AML), acute myelogenous leukemia, chronic myelocytic leukemia (CML), chronic lymphocytic leukemia (CLL), hairy cell leukemia, myelodyplastic syndrome (MDS), a lymphoma, Hodgkin's disease, a malignant lymphoma, non-Hodgkin's lymphoma, Burkitt's lymphoma, multiple myeloma. Kaposi's sarcoma, colorectal carcinoma, pancreatic carcinoma, nasopharyngeal carcinoma, malignant histiocytosis, paraneoplastic syndrome/hypercalcemia of malignancy, solid tumors, bladder cancer, breast cancer, colorectal cancer, endometrial cancer, head cancer, neck cancer, hereditary nonpolyposis cancer, Hodgkin's lymphoma, liver cancer, lung cancer, non-small cell lung cancer, ovarian cancer, pancreatic cancer, prostate cancer, renal cell carcinoma, testicular cancer, adenocarcinomas, sarcomas, malignant melanoma, hemangioma, metastatic disease, cancer related bone resorption, cancer related bone pain, and the like.

[0576] Any method of the present disclosure can comprise administering an effective amount of a composition or pharmaceutical composition to a cell, tissue, organ, animal or patient in need of such modulation, treatment or therapy. Such a method can optionally further comprise co-administration or combination therapy for treating such diseases or disorders, wherein the administering of said at least one composition, further comprises administering, before concurrently, and/or after, at least one selected from at least one of a second therapeutic agent. Suitable dosages are well known in the art. See, e.g., Wells et al., eds., Pharmacotherapy Handbook, 2nd Edition, Appleton and Lange, Stamford, Conn. (2000); PDR Pharmacopoeia, Tarascon Pocket Pharmacopoeia 2000, Deluxe Edition, Tarascon Publishing, Loma Linda, Calif. (2000); Nursing 2001 Handbook of Drugs, 21st edition, Springhouse Corp., Springhouse, Pa., 2001; Health Professional's Drug Guide 2001, ed., Shannon, Wilson, Stang, Prentice-Hall, Inc, Upper Saddle River, N.J. each of which references are entirely incorporated herein by reference.

### Infusion of Modified Cells as Adoptive Cell Therapy

[0577] The disclosure provides modified cells that express one or more CSRs and/or CARs of the disclosure that have been selected and/or expanded for administration to a subject in need thereof. Modified cells of the disclosure may be formulated for storage at any temperature including room temperature and body temperature. Modified cells of the disclosure may be formulated for cryopreservation and subsequent thawing. Modified cells of the disclosure may be formulated in a pharmaceutically acceptable carrier for direct administration to a subject from sterile packaging. Modified cells of the disclosure may be formulated in a pharmaceutically acceptable carrier with an indicator of cell viability and/or protein expression level to ensure a minimal level of cell function and protein expression. Modified cells of the disclosure may be formulated in a pharmaceutically acceptable carrier at a prescribed density with one or more reagents to inhibit further expansion and/or prevent cell death.

### Armored T-Cells “Knock-Down” Strategy

[0578] T-cells of the disclosure may be modified to enhance their therapeutic potential. Alternatively, or in addition, T-cells of the disclosure may be modified to render them less sensitive to immunologic and/or metabolic checkpoints. Modifications of this type “armor” the T cells of the disclosure, which, following the modification, may be referred to here as “armored” T cells. Armored T cells of the disclosure may be produced by, for example, blocking and/or diluting specific endogenous checkpoint signals delivered to the T-cells (i.e. checkpoint inhibition) within the tumor immunosuppressive microenvironment, for example.

[0579] In some embodiments, an armored T-cell of the disclosure is derived from a T cell, a NK cell, a hematopoietic progenitor cell, a peripheral blood (PB) derived T cell (including a T cell isolated or derived from G-CSF-mobilized peripheral blood), or an umbilical cord blood (UCB) derived T cell. In some embodiments, an armored T-cell of the disclosure comprises one or more of a chimeric ligand receptor (CLR comprising a protein scaffold, an antibody, an ScFv, or an antibody mimetic)/chimeric antigen receptor (CAR comprising a protein scaffold, an antibody, an ScFv, or an antibody mimetic), a CARTyrin (a CAR comprising a Centyrin), and/or a VCAR (a CAR comprising a camelid VHH or a single domain VH) of the disclosure. In some embodiments, an armored T-cell of the disclosure comprises an inducible proapoptotic polypeptide comprising (a) a ligand binding region, (b) a linker, and (c) a truncated caspase 9 polypeptide, wherein the inducible proapoptotic polypeptide does not comprise a non-human sequence. In some embodiments, the non-human sequence is a restriction site. In some embodiments, the ligand binding region inducible caspase polypeptide comprises a FK506 binding protein 12 (FKBP12) polypeptide. In some embodiments, the amino acid sequence of the FK506 binding protein 12 (FKBP12) polypeptide comprises a modification at position 36 of the sequence. In some embodiments, the modification is a substitution of valine (V) for phenylalanine (F) at position 36 (F36V). In some embodiments, an armored T-cell of the disclosure comprises an exogenous sequence. In some embodiments, the exogenous sequence comprises a sequence encoding a therapeutic protein. Exemplary therapeutic proteins may be nuclear, cytoplasmic, intracellular, transmembrane, cell-surface bound, or secreted proteins. Exemplary therapeutic proteins expressed by the armored T cell may modify an activity of the armored T cell or may modify an activity of a second cell. In some embodiments, an armored T-cell of the disclosure comprises a selection gene or a selection marker. In some embodiments, an armored T-cell of the disclosure comprises a synthetic gene expression cassette (also referred to herein as an inducible transgene construct).

[0580] In some embodiments, a T-cell of the disclosure is modified to silence or reduce expression one or more gene(s) encoding receptor(s) of inhibitory checkpoint signals to produce an armored T-cell of the disclosure. Examples of inhibitory checkpoint signals include, but are not limited to, a PD-L1 ligand binding to a PD-1 receptor on a CAR-T cell of the disclosure or a TGFβ cytokine binding to a TGFβRII receptor on a CAR-T cell. Receptors of inhibitory checkpoint signals are expressed on the cell surface or within the cytoplasm of a T-cell. Silencing or reducing expressing of the gene encoding the receptor of the inhibitory checkpoint signal results a loss of protein expression of the inhibitory checkpoint receptors on the surface or within the cytoplasm of an armored T-cell of the disclosure. Thus, armored T cells of the disclosure having silenced or reduced expression of one or more genes encoding an inhibitory checkpoint receptor is resistant, non-receptive or insensitive to checkpoint signals. The armored T cell's resistance or decreased sensitivity to inhibitory checkpoint signals enhances the armored T cell's therapeutic potential in the presence of these inhibitory checkpoint signals. Inhibitory checkpoint signals include but are not limited to the examples listed in Table 1. Exemplary inhibitory checkpoint signals that may be silenced in an armored T cell of the disclosure include, but are not limited to, PD-1 and TGFβRII.

TABLE 1
Exemplary Inhibitory Checkpoint Signals (and proteins that
induce immunosuppression). A CSR of the disclosure may comprise
an endodomain of any one of the proteins of this table.

| Full Name | Abbreviation | SEQ ID NO: |
|---|---|---|
| Programmed cell death protein 1 | PD1 | 14643-14644 |
| transforming growth factor β Receptor 1 | TGFβR1 | 14645 |
| transforming growth factor β Receptor 2 | TGFβR2 | 14646 |
| T-cell immunoglobulin and mucin-domain | TIM3 | 14647 |
| containing-3 | | |
| Lymphocyte-activation gene 3 | LAG3 | 14648 |
| Cytotoxic T-lymphocyte protein 4 | CTLA4 | 14649 |
| B- and T-lymphocyte attenuator | BTLA | 14650 |
| Killer cell immunoglobulin-like receptor | KIR | 14651 |
| Alpha-2A adrenergic receptor | A2aR | 14652 |
| V-type immunoglobulin domain-containing | VISTA | 14653 |
| suppressor of T-cell activation | | |
| T-cell immunoreceptor with Ig and ITIM | TIGIT | 14654 |
| domains | | |
| Programmed cell death 1 ligand 1 | B7H1 or PD-L1 | 14655 |
| Programmed cell death 1 ligand 2 | B7DC or PD-L2 | 14656 |
| T-lymphocyte activation antigen CD80 | B7-1 or CD80 | 14657 |
| T-lymphocyte activation antigen CD86 | B7-2 or CD86 | 14658 |
| CD160 antigen | CD160 | 14659 |
| Leukocyte-associated immunoglobulin-like | LAIR1 | 14660 |
| receptor 1 | | |
| T-cell immunoglobulin and mucin domain- | TIM4 or TIMD4 | 14661 |
| containing protein 4 | | |
| Natural killer cell receptor 2B4 | 2B4 or CD244 | 14662 |
| Major Histocompatibility Complex type I | MHC I | 14663 |
| Major Histocompatibility Complex type II | MHC II | |
| Putative 2-methylcitrate dehydratase receptor | PDH1R | |
| T-cell immunoglobulin and mucin domain 1 | TIM1R | |
| receptor | | |
| T-cell immunoglobulin and mucin domain 4 | TIM4R | |
| receptor | | |
| B7-H3 receptor | B7H3R or CD176 | |
| | Receptor | |
| B7-H4 receptor | B7H4R | |
| Immunoglobulin-like transcript (ILT) 3 receptor | ILT3R | |
| phosphoinositide 3-kinase, subunit alpha | PI3K alpha | 14664 |
| phosphoinositide 3-kinase, subunit gamma | PI3K gamma | 14665 |
| Tyrosine-protein phosphatase non-receptor type | SHP2 or PTPN11 | 14666 |
| 11 | | |
| Protein phosphatase 2, subunit gamma | PP2A gamma | 14667 |
| Protein phosphatase 2, subunit beta | PP2A beta | 14668 |
| Protein phosphatase 2, subunit delta | PP2A delta | 14669 |
| Protein phosphatase 2, subunit epsilon | PP2A epsilon | 14670 |
| Protein phosphatase 2, subunit alpha | PP2A alpha | 14671 |
| T-cell Receptor, subunit alpha | TCR alpha | 14672 |
| T-cell Receptor, subunit beta | TCR beta | 14673 |
| T-cell Receptor, subunit zeta | TCR zeta | 14674 |
| T-cell Receptor, subunit CD3 epsilon | TCR CD3 epsilon | 14675 |
| T-cell Receptor, subunit CD3 gamma | TCR CD3 gamma | 14676 |
| T-cell Receptor, subunit CD3 delta | TCR CD3 delta | 14677 |
| Cluster of Differentiation 28 | CD28 | 14678 |
| Galectins | Galectins | |
| Galectin 9 | Galectin 9 | 14679 |
| High Mobility Group Box 1 | HMGB1 | 14680 |
| Arginase 1 | ARG1 | 14681 |
| Prostaglandin-Endoperoxide Synthase 1 | PTGS1 | 14682 |
| Prostaglandin-Endoperoxide Synthase 2 | PTGS2 | 14683 |
| Mucin 1, Cell Surface Associated | MUC1 | 14684 |
| Mucin 2, Oligomeric Mucus/Gel-Forming | MUC2 | 14685 |
| Mucin 3A, Cell Surface Associated | MUC3A | 14686 |
| Mucin 3B, Cell Surface Associated | MUC3B | 14687 |
| Mucin 4, Cell Surface Associated | MUC4 | 14688 |
| Mucin 5AC, Oligomeric Mucus/Gel-Forming | MUC5AC | 14689 |
| Mucin 5B, Oligomeric Mucus/Gel-Forming | MUC5B | 14690 |
| Mucin 6, Oligomeric Mucus/Gel-Forming | MUC6 | 14691 |
| Mucin 7, Secreted | MUC7 | 14692 |
| Mucin 8 | MUC8 | |
| Mucin 12, Cell Surface Associated | MUC12 | 14693 |
| Mucin 13, Cell Surface Associated | MUC13 | 14694 |
| Mucin 15, Cell Surface Associated | MUC15 | 14695 |
| Mucin 16, Cell Surface Associated | MUC16 | 14696 |
| Mucin 17, Cell Surface Associated | MUC17 | 14697 |
| Mucin 19, Oligomeric | MUC19 | 14698 |
| Mucin 20, Cell Surface Associated | MUC20 | 14699 |
| Mucin 21, Cell Surface Associated | MUC21 | 14700 |
| Mucin 22 | MUC22 | 14701 |
| Indoleamine 2,3-Dioxygenase 1 | IDO1 | 14702 |
| Indoleamine 2,3-Dioxygenase 2 | IDO2 | 14703 |
| Inducible T Cell Costimulator Ligand | ICOSLG | 14704 |
| ROS Proto-Oncogene 1, Receptor Tyrosine | ROS1 | 14705 |
| Kinase | | |
| Tumor Necrosis Factor Receptor Superfamily | 4-1BB, CD137, ILA or | 14706 |
| Member 9 | TNFRSF9 | |
| 4-1BB Ligand | 4-1BB-L | 14707 |
| Glucocorticoid-induced TNFR family related | GITR | 14708 |
| gene | | |
| Glucocorticoid-induced TNFR family related | GITRL | 14709 |
| gene ligand | | |

[0581] In some embodiments, a T-cell of the disclosure is modified to silence or reduce expression of one or more gene(s) encoding intracellular proteins involved in checkpoint signaling to produce an armored T-cell of the disclosure. The activity of a T-cell of the disclosure may be enhanced by targeting any intracellular signaling protein involved in a checkpoint signaling pathway, thereby achieving checkpoint inhibition or interference to one or more checkpoint pathways. Intracellular signaling proteins involved in checkpoint signaling include, but are not limited to, exemplary intracellular signaling proteins listed in Table 2.

TABLE 2
Exemplary Intracellular Signaling Proteins.

| Full Name | Abbreviation | SEQ ID NO: |
|---|---|---|
| phosphoinositide 3-kinase, subunit alpha | PI3K alpha | 14710 |
| phosphoinositide 3-kinase, subunit gamma | PI3K gamma | 14711 |
| Tyrosine-protein phosphatase non-receptor type | SHP2 or PTPN11 | 14712 |
| 11 | | |
| Protein phosphatase 2, subunit gamma | PP2A gamma | 14713 |
| Protein phosphatase 2, subunit beta | PP2A beta | 14714 |
| Protein phosphatase 2, subunit delta | PP2A delta | 14715 |
| Protein phosphatase 2, subunit epsilon | PP2A epsilon | 14716 |
| Protein phosphatase 2, subunit alpha | PP2A alpha | 14717 |
| RAC-alpha serine/threonine-protein kinase | AKT or PKB | 14718 |
| Tyrosine-protein kinase ZAP-70 | ZAP70 | 14719 |
| Amino acid sequence (KIEELE)-containing | KIEELE-domain | |
| domain protein | containing proteins | |
| BCL2 associated athanogene 6 | Bat3, Bag6 or Scythe | 14720 |
| B-cell lymphoma-extra large | Bcl-xL | 14721 |
| Bcl-2-related protein A1 | Bfl-1 or BCL2A1 | 14722 |

[0582] In some embodiments, a T-cell of the disclosure is modified to silence or reduce expression of one or more gene(s) encoding a transcription factor that hinders the efficacy of a therapy to produce an armored T-cell of the disclosure. The activity of armored T-cells may be enhanced or modulated by silencing or reducing expression (or repressing a function) of a transaction factor that hinders the efficacy of a therapy. Exemplary transcription factors that may be modified to silence or reduce expression or to repress a function thereof include, but are not limited tom the exemplary transcription factors listed in Table 3. For example expression of a FOXP3 gene may be silenced or reduced in an armored T cell of the disclosure to prevent or reduce the formation of T regulatory CAR-T-cells (CAR-Treg cells), the expression or activity of which may reduce efficacy of a therapy

TABLE 3
Exemplary Transcription Factors.

| Full Name | Abbreviation | SEQ ID NO: |
|---|---|---|
| activity-dependent neuroprotector homeobox | ADNP | 14723 |
| ADNP homeobox 2 | ADNP2 | 14724 |
| AE binding protein 1 | AEBP1 | 14725 |
| AE binding protein 2 | AEBP2 | 14726 |
| AF4/FMR2 family member 1 | AFF1 | 14727 |
| AF4/FMR2 family member 2 | AFF2 | 14728 |
| AF4/FMR2 family member 3 | AFF3 | 14729 |
| AF4/FMR2 family member 4 | AFF4 | 14730 |
| AT-hook containing transcription factor 1 | AHCTF1 | 14731 |
| aryl hydrocarbon receptor | AHR | 14732 |
| aryl-hydrocarbon receptor repressor | AHRR | 14733 |
| autoimmune regulator | AIRE | 14734 |
| AT-hook transcription factor | AKNA | 14735 |
| ALX homeobox 1 | ALX1 | 14736 |
| ALX homeobox 3 | ALX3 | 14737 |
| ALX homeobox 4 | ALX4 | 14738 |
| ankyrin repeat and zinc finger domain containing 1 | ANKZF1 | 14739 |
| adaptor related protein complex 5 zeta 1 subunit | AP5Z1 | 14740 |
| androgen receptor | AR | 14741 |
| arginine-fifty homeobox | ARGFX | 14742 |
| Rho GTPase activating protein 35 | ARHGAP35 | 14743 |
| AT-rich interaction domain 1A | ARID1A | 14744 |
| AT-rich interaction domain 1B | ARID1B | 14745 |
| AT-rich interaction domain 2 | ARID2 | 14746 |
| AT-rich interaction domain 3A | ARID3A | 14747 |
| AT-rich interaction domain 3B | ARID3B | 14748 |
| AT-rich interaction domain 3C | ARID3C | 14749 |
| AT-rich interaction domain 4A | ARID4A | 14750 |
| AT-rich interaction domain 4B | ARID4B | 14751 |
| AT-rich interaction domain 5A | ARID5A | 14752 |
| AT-rich interaction domain 5B | ARID5B | 14753 |
| aryl hydrocarbon receptor nuclear translocator | ARNT | 14754 |
| aryl hydrocarbon receptor nuclear translocator 2 | ARNT2 | 14755 |
| aryl hydrocarbon receptor nuclear translocator like | ARNTL | 14756 |
| aryl hydrocarbon receptor nuclear translocator like 2 | ARNTL2 | 14757 |
| aristaless related homeobox | ARX | 14758 |
| achaete-scute family bHLH transcription factor 1 | ASCL1 | 14759 |
| achaete-scute family bHLH transcription factor 2 | ASCL2 | 14760 |
| achaete-scute family bHLH transcription factor 3 | ASCL3 | 14761 |
| achaete-scute family bHLH transcription factor 4 | ASCL4 | 14762 |
| achaete-scute family bHLH transcription factor 5 | ASCL5 | 14763 |
| ash1 (absent, small, or homeotic)-like (Drosophila) | ASH1L | 14764 |
| ash2 (absent, small, or homeotic)-like (Drosophila) | ASH2L | 14765 |
| activating transcription factor 1 | ATF1 | 14766 |
| activating transcription factor 2 | ATF2 | 14767 |
| activating transcription factor 3 | ATF3 | 14768 |
| activating transcription factor 4 | ATF4 | 14769 |
| activating transcription factor 5 | ATF5 | 14770 |
| activating transcription factor 6 | ATF6 | 14771 |
| activating transcription factor 6 beta | ATF6B | 14772 |
| activating transcription factor 7 | ATF7 | 14773 |
| atonal bHLH transcription factor 1 | ATOH1 | 14774 |
| atonal bHLH transcription factor 7 | ATOH7 | 14775 |
| atonal bHLH transcription factor 8 | ATOH8 | 14776 |
| alpha thalassemia/mental retardation syndrome X- | ATRX | 14777 |
| linked | | |
| ataxin 7 | ATXN7 | 14778 |
| BTB and CNC homology 1, basic leucine zipper | BACH1 | 14779-14780 |
| transcription factor 1 | | |
| BTB domain and CNC homolog 2 | BACH2 | 14781 |
| BarH like homeobox 1 | BARHL1 | 14782 |
| BarH like homeobox 2 | BARHL2 | 14783 |
| BARX homeobox 1 | BARX1 | 14784 |
| BARX homeobox 2 | BARX2 | 14785 |
| Basic Leucine Zipper ATF-Like Transcription Factor, | Batf | 14786 |
| basic leucine zipper transcription factor, ATF-like | BATF | 14786 |
| basic leucine zipper transcription factor, ATF-like 2 | BATF2 | 14787 |
| basic leucine zipper transcription factor, ATF-like 3 | BATF3 | 14788 |
| bobby sox homolog (Drosophila) | BBX | 14789 |
| B-cell CLL/lymphoma 11A | BCL11A | 14790 |
| B-cell CLL/lymphoma 11B | BCL11B | 14791 |
| B-cell CLL/lymphoma 3 | BCL3 | 14792 |
| B-cell CLL/lymphoma 6 | BCL6 | 14793 |
| B-cell CLL/lymphoma 6, member B | BCL6B | 14794 |
| BCL2 associated transcription factor 1 | BCLAF1 | 14795 |
| basic helix-loop-helix family member a15 | BHLHA15 | 14796 |
| basic helix-loop-helix family member a9 | BHLHA9 | 14797 |
| basic helix-loop-helix domain containing, class B, 9 | BHLHB9 | 14798 |
| basic helix-loop-helix family member e22 | BHLHE22 | 14799 |
| basic helix-loop-helix family member e23 | BHLHE23 | 14800 |
| basic helix-loop-helix family member e40 | BHLHE40 | 14801 |
| basic helix-loop-helix family member e41 | BHLHE41 | 14802 |
| Beta-Interferon Gene Positive-Regulatory Domain I | Blimp-1 | 14803 |
| Binding Factor | | |
| bone morphogenetic protein 2 | BMP2 | 14804 |
| basonuclin 1 | BNC1 | 14805 |
| basonuclin 2 | BNC2 | 14806 |
| bolA family member 1 | BOLA1 | 14807 |
| bolA family member 2 | BOLA2 | 14808 |
| bolA family member 3 | BOLA3 | 14809 |
| bromodomain PHD finger transcription factor | BPTF | 14810 |
| breast cancer 1 | BRCA1 | 14811 |
| brain specific homeobox | BSX | 14812 |
| chromosome 20 open reading frame 194 | C20orf194 | 14813 |
| calmodulin binding transcription activator 1 | CAMTA1 | 14814 |
| calmodulin binding transcription activator 2 | CAMTA2 | 14815 |
| calcium regulated heat stable protein 1 | CARHSP1 | 14816 |
| castor zinc finger 1 | CASZ1 | 14817 |
| core-binding factor, beta subunit | CBFB | 14818 |
| coiled-coil domain containing 79 | CCDC79 | 14819 |
| cell division cycle 5 like | CDC5L | 14820 |
| caudal type homeobox 1 | CDX1 | 14821 |
| caudal type homeobox 2 | CDX2 | 14822 |
| caudal type homeobox 4 | CDX4 | 14823 |
| CCAAT/enhancer binding protein alpha | CEBPA | 14824 |
| CCAAT/enhancer binding protein beta | CEBPB | 14825 |
| CCAAT/enhancer binding protein delta | CEBPD | 14826 |
| CCAAT/enhancer binding protein epsilon | CEBPE | 14827 |
| CCAAT/enhancer binding protein gamma | CEBPG | 14828 |
| CCAAT/enhancer binding protein zeta | CEBPZ | 14829 |
| centromere protein T | CENPT | 14830 |
| ceramide synthase 3 | CERS3 | 14831 |
| ceramide synthase 6 | CERS6 | 14832 |
| chromosome alignment maintaining phosphoprotein 1 | CHAMP1 | 14833 |
| capicua transcriptional repressor | CIC | 14834 |
| CDKN1A interacting zinc finger protein 1 | CIZ1 | 14835 |
| clock circadian regulator | CLOCK | 14836 |
| CCR4-NOT transcription complex subunit 4 | CNOT4 | 14837 |
| CPX chromosome region, candidate 1 | CPXCR1 | 14838 |
| cramped chromatin regulator homolog 1 | CRAMP1 | 14839 |
| cAMP responsive element binding protein 1 | CREB1 | 14840 |
| cAMP responsive element binding protein 3 | CREB3 | 14841 |
| cAMP responsive element binding protein 3-like 1 | CREB3L1 | 14842 |
| cAMP responsive element binding protein 3-like 2 | CREB3L2 | 14843 |
| cAMP responsive element binding protein 3-like 3 | CREB3L3 | 14844 |
| cAMP responsive element binding protein 3-like 4 | CREB3L4 | 14845 |
| cAMP responsive element binding protein 5 | CREB5 | 14846 |
| CREB binding protein | CREBBP | 14847 |
| cAMP responsive element binding protein-like 2 | CREBL2 | 14848 |
| CREB3 regulatory factor | CREBRF | 14849 |
| CREB/ATF bZIP transcription factor | CREBZF | 14850 |
| cAMP responsive element modulator | CREM | 14851 |
| cone-rod homeobox | CRX | 14852 |
| cysteine-serine-rich nuclear protein 1 | CSRNP1 | 14853 |
| cysteine-serine-rich nuclear protein 2 | CSRNP2 | 14854 |
| cysteine-serine-rich nuclear protein 3 | CSRNP3 | 14855 |
| CCCTC-binding factor (zinc finger protein) | CTCF | 14856 |
| CCCTC-binding factor like | CTCFL | 14857 |
| cut-like homeobox 1 | CUX1 | 14858-14859 |
| cut-like homeobox 2 | CUX2 | 14860 |
| CXXC finger protein 1 | CXXC1 | 14861 |
| dachshund family transcription factor 1 | DACH1 | 14862 |
| dachshund family transcription factor 2 | DACH2 | 14863 |
| D site of albumin promoter (albumin D-box) binding | DBP | 14864 |
| protein | | |
| developing brain homeobox 1 | DBX1 | 14865 |
| developing brain homeobox 2 | DBX2 | 14866 |
| damage specific DNA binding protein 2 | DDB2 | 14867 |
| DNA damage inducible transcript 3 | DDIT3 | 14868 |
| DEAF1, transcription factor | DEAF1 | 14869 |
| distal-less homeobox 1 | DLX1 | 14870 |
| distal-less homeobox 2 | DLX2 | 14871 |
| distal-less homeobox 3 | DLX3 | 14872 |
| distal-less homeobox 4 | DLX4 | 14873 |
| distal-less homeobox 5 | DLX5 | 14874 |
| distal-less homeobox 6 | DLX6 | 14875 |
| DNA methyltransferase 1 associated protein 1 | DMAP1 | 14876 |
| diencephalon/mesencephalon homeobox 1 | DMBX1 | 14877 |
| doublesex and mab-3 related transcription factor 1 | DMRT1 | 14878 |
| doublesex and mab-3 related transcription factor 2 | DMRT2 | 14879 |
| doublesex and mab-3 related transcription factor 3 | DMRT3 | 14880 |
| DMRT like family Al | DMRTA1 | 14881 |
| DMRT like family A2 | DMRTA2 | 14882 |
| DMRT like family B with proline rich C-terminal 1 | DMRTB1 | 14883 |
| DMRT like family C1 | DMRTC1 | 14884 |
| DMRT like family C1B | DMRTC1B | 14884 |
| DMRT like family C2 | DMRTC2 | 14885 |
| cyclin D binding myb like transcription factor 1 | DMTF1 | 14886 |
| DnaJ heat shock protein family (Hsp40) member C1 | DNAJC1 | 14887 |
| DnaJ heat shock protein family (Hsp40) member C2 | DNAJC2 | 14888 |
| DnaJ heat shock protein family (Hsp40) member C21 | DNAJC21 | 14889 |
| DNA (cytosine-5-)-methyltransferase 1 | DNMT1 | 14890 |
| DNA (cytosine-5-)-methyltransferase 3 alpha | DNMT3A | 14891 |
| DNA (cytosine-5-)-methyltransferase 3 beta | DNMT3B | 14892 |
| DNA (cytosine-5-)-methyltransferase 3-like | DNMT3L | 14893 |
| double PHD fingers 1 | DPF1 | 14894 |
| double PHD fingers 2 | DPF2 | 14895 |
| double PHD fingers 3 | DPF3 | 14896 |
| divergent-paired related homeobox | DPRX | 14897 |
| down-regulator of transcription 1 | DR1 | 14898 |
| DR1 associated protein 1 | DRAP1 | 14899 |
| dorsal root ganglia homeobox | DRGX | 14900 |
| double homeobox 4 | DUX4 | 14901 |
| double homeobox 4 like 9 | DUX4L9 | 14902 |
| double homeobox A | DUXA | 14903 |
| E2F transcription factor 1 | E2F1 | 14904 |
| E2F transcription factor 2 | E2F2 | 14905 |
| E2F transcription factor 3 | E2F3 | 14906 |
| E2F transcription factor 4 | E2F4 | 14907 |
| E2F transcription factor 5 | E2F5 | 14908 |
| E2F transcription factor 6 | E2F6 | 14909 |
| E2F transcription factor 7 | E2F7 | 14910 |
| E2F transcription factor 8 | E2F8 | 14911 |
| E4F transcription factor 1 | E4F1 | 14912 |
| early B-cell factor 1 | EBF1 | 14913 |
| early B-cell factor 2 | EBF2 | 14914 |
| early B-cell factor 3 | EBF3 | 14915 |
| early B-cell factor 4 | EBF4 | 14916 |
| early growth response 1 | EGR1 | 14917 |
| early growth response 2 | EGR2 | 14918 |
| early growth response 3 | EGR3 | 14919 |
| early growth response 4 | EGR4 | 14920 |
| ets homologous factor | EHF | 14921 |
| E74-like factor 1 (ets domain transcription factor) | ELF1 | 14922 |
| E74-like factor 2 (ets domain transcription factor) | ELF2 | 14923 |
| E74-like factor 3 (ets domain transcription factor, | ELF3 | 14924 |
| epithelial-specific) | | |
| E74-like factor 4 (ets domain transcription factor) | ELF4 | 14925 |
| E74-like factor 5 (ets domain transcription factor) | ELF5 | 14926 |
| ELK1, member of ETS oncogene family | ELK1 | 14927 |
| ELK3, ETS-domain protein (SRF accessory protein 2) | ELK3 | 14928 |
| ELK4, ETS-domain protein (SRF accessory protein 1) | ELKA | 14929 |
| ELM2 and Myb/SANT-like domain containing 1 | ELMSAN1 | 14930 |
| empty spiracles homeobox 1 | EMX1 | 14931 |
| empty spiracles homeobox 2 | EMX2 | 14932 |
| engrailed homeobox 1 | EN1 | 14933 |
| engrailed homeobox 2 | EN2 | 14934 |
| enolase 1, (alpha) | ENO1 | 14935 |
| eomesodermin | EOMES | 14936 |
| endothelial PAS domain protein 1 | EPAS1 | 14937 |
| Ets2 repressor factor | ERF | 14938 |
| v-ets avian erythroblastosis virus E26 oncogene | ERG | 14939-14940 |
| homolog | | |
| estrogen receptor 1 | ESR1 | 14941 |
| estrogen receptor 2 (ER beta) | ESR2 | 14942 |
| estrogen related receptor alpha | ESRRA | 14943 |
| estrogen related receptor beta | ESRRB | 14944 |
| estrogen related receptor gamma | ESRRG | 14945 |
| ESX homeobox 1 | ESX1 | 14946 |
| v-ets avian erythroblastosis virus E26 oncogene | ETS1 | 14947 |
| homolog 1 | | |
| v-ets avian erythroblastosis virus E26 oncogene | ETS2 | 14948 |
| homolog 2 | | |
| ets variant 1 | ETV1 | 14949 |
| ets variant 2 | ETV2 | 14950 |
| ets variant 3 | ETV3 | 14951 |
| ets variant 3-like | ETV3L | 14952 |
| ets variant 4 | ETV4 | 14953 |
| ets variant 5 | ETV5 | 14954 |
| ets variant 6 | ETV6 | 14955 |
| ets variant 7 | ETV7 | 14956 |
| even-skipped homeobox 1 | EVX1 | 14957 |
| even-skipped homeobox 2 | EVX2 | 14958 |
| enhancer of zeste 1 poly comb repressive complex 2 | EZH1 | 14959 |
| subunit | | |
| enhancer of zeste 2 poly comb repressive complex 2 | EZH2 | 14960 |
| subunit | | |
| family with sequence similarity 170 member A | FAM170A | 14961 |
| Fer3-like bHLH transcription factor | FERD3L | 14962 |
| FEV (ETS oncogene family) | FEV | 14963 |
| FEZ family zinc finger 1 | FEZF1 | 14964 |
| FEZ family zinc finger 2 | FEZF2 | 14965 |
| folliculogenesis specific bHLH transcription factor | FIGLA | 14966 |
| FLT3-interacting zinc finger 1 | FIZ1 | 14967 |
| Fli-1 proto-oncogene, ETS transcription factor | FLI1 | 14968 |
| FBJ murine osteosarcoma viral oncogene homolog | FOS | 14969 |
| FBJ murine osteosarcoma viral oncogene homolog B | FOSB | 14970 |
| FOS like antigen 1 | FOSL1 | 14971 |
| FOS like antigen 2 | FOSL2 | 14972 |
| forkhead box A1 | FOXA1 | 14973 |
| forkhead box A2 | FOXA2 | 14974 |
| forkhead box A3 | FOXA3 | 14975 |
| forkhead box B1 | FOXB1 | 14976 |
| forkhead box B2 | FOXB2 | 14977 |
| forkhead box C1 | FOXC1 | 14978 |
| forkhead box C2 | FOXC2 | 14979 |
| forkhead box D1 | FOXD1 | 14980 |
| forkhead box D2 | FOXD2 | 14981 |
| forkhead box D3 | FOXD3 | 14982 |
| forkhead box D4 | FOXD4 | 14983 |
| forkhead box D4-like 1 | FOXD4L1 | 14984 |
| forkhead box D4-like 3 | FOXD4L3 | 14985 |
| forkhead box D4-like 4 | FOXD4L4 | 14986 |
| forkhead box D4-like 5 | FOXD4L5 | 14987 |
| forkhead box D4-like 6 | FOXD4L6 | 14988 |
| forkhead box E1 | FOXE1 | 14989 |
| forkhead box E3 | FOXE3 | 14990 |
| forkhead box F1 | FOXF1 | 14991 |
| forkhead box F2 | FOXF2 | 14992 |
| forkhead box G1 | FOXG1 | 14993 |
| forkhead box H1 | FOXH1 | 14994 |
| forkhead box I1 | FOXI1 | 14995 |
| forkhead box I2 | FOXI2 | 14996 |
| forkhead box I3 | FOXI3 | 14997 |
| forkhead box J1 | FOXJ1 | 14998 |
| forkhead box J2 | FOXJ2 | 14999 |
| forkhead box J3 | FOXJ3 | 15000 |
| forkhead box K1 | FOXK1 | 15001 |
| forkhead box K2 | FOXK2 | 15002 |
| forkhead box L1 | FOXL1 | 15003 |
| forkhead box L2 | FOXL2 | 15004 |
| forkhead box M1 | FOXM1 | 15005 |
| forkhead box N1 | FOXN1 | 15006 |
| forkhead box N2 | FOXN2 | 15007 |
| forkhead box N3 | FOXN3 | 15008 |
| forkhead box N4 | FOXN4 | 15009 |
| forkhead box O1 | FOXO1 | 15010 |
| forkhead box O3 | FOXO3 | 15011 |
| forkhead box O4 | FOXO4 | 15012 |
| forkhead box O6 | FOXO6 | 15013 |
| forkhead box P1 | FOXP1 | 15014 |
| forkhead box P2 | FOXP3 | 15015 |
| forkhead box P3 | FOXP4 | 15016 |
| forkhead box P4 | FOXQ1 | 15017 |
| forkhead box Q1 | FOXR1 | 15018 |
| forkhead box R1 | FOXR2 | 15019 |
| forkhead box R2 | FOXS1 | 15020 |
| forkhead box S1 | FOXP3 | 15021 |
| far upstream element binding protein 1 | FUBP1 | 15022 |
| far upstream element (FUSE) binding protein 3 | FUBP3 | 15023 |
| GA binding protein transcription factor alpha subunit | GABPA | 15024 |
| GA binding protein transcription factor, beta subunit 1 | GABPB1 | 15025 |
| GA binding protein transcription factor, beta subunit 2 | GABPB2 | 15026 |
| GATA binding protein 1 (globin transcription factor 1) | GATA1 | 15027 |
| GATA binding protein 2 | GATA2 | 15028 |
| GATA binding protein 3 | GATA3 | 15029 |
| GATA binding protein 4 | GATA4 | 15030 |
| GATA binding protein 5 | GATA5 | 15031 |
| GATA binding protein 6 | GATA6 | 15032 |
| GATA zinc finger domain containing 1 | GATAD1 | 15033 |
| GATA zinc finger domain containing 2 A | GATAD2A | 15034 |
| GATA zinc finger domain containing 2B | GATAD2B | 15035 |
| gastrulation brain homeobox 1 | GBX1 | 15036 |
| gastrulation brain homeobox 2 | GBX2 | 15037 |
| GC-rich sequence DNA-binding factor 2 | GCFC2 | 15038 |
| glial cells missing homolog 1 | GCM1 | 15039 |
| glial cells missing homolog 2 | GCM2 | 15040 |
| growth factor independent 1 transcription repressor | GFI1 | 15041 |
| growth factor independent 1B transcription repressor | GFI1B | 15042 |
| GLI family zinc finger 1 | GLI1 | 15043 |
| GLI family zinc finger 2 | GLI2 | 15044 |
| GLI family zinc finger 3 | GLI3 | 15045 |
| GLI family zinc finger 4 | GLI4 | 15046 |
| GLIS family zinc finger 1 | GLIS1 | 15047 |
| GLIS family zinc finger 2 | GLIS2 | 15048 |
| GLIS family zinc finger 3 | GLIS3 | 15049 |
| glucocorticoid modulatory element binding protein 1 | GMEB1 | 15050 |
| glucocorticoid modulatory element binding protein 2 | GMEB2 | 15051 |
| gon-4-like (C. elegans) | GON4L | 15052 |
| grainyhead like transcription factor 1 | GRHL1 | 15053 |
| grainyhead like transcription factor 2 | GRHL2 | 15054 |
| grainyhead like transcription factor 3 | GRHL3 | 15055 |
| goosecoid homeobox | GSC | 15056 |
| goosecoid homeobox 2 | GSC2 | 15057 |
| GS homeobox 1 | GSX1 | 15058 |
| GS homeobox 2 | GSX2 | 15059 |
| general transcription factor IIi | GTF2I | 15060 |
| general transcription factor IIIA | GTF3A | 15061 |
| GDNF inducible zinc finger protein 1 | GZF1 | 15062 |
| heart and neural crest derivatives expressed 1 | HAND1 | 15063 |
| heart and neural crest derivatives expressed 2 | HAND2 | 15064 |
| HMG-box transcription factor 1 | HBP1 | 15065-15066 |
| highly divergent homeobox | HDX | 15067 |
| helt bHLH transcription factor | HELT | 15068 |
| hes family bHLH transcription factor 1 | HES1 | 15069-15070 |
| hes family bHLH transcription factor 2 | HES2 | 15071 |
| hes family bHLH transcription factor 3 | HES3 | 15072 |
| hes family bHLH transcription factor 4 | HES4 | 15073 |
| hes family bHLH transcription factor 5 | HES5 | 15074 |
| hes family bHLH transcription factor 6 | HES6 | 15075 |
| hes family bHLH transcription factor 7 | HES7 | 15076 |
| HESX homeobox 1 | HESX1 | 15077 |
| hes-related family bHLH transcription factor with | HEY1 | 15078 |
| YRPW motif 1 | | |
| hes-related family bHLH transcription factor with | HEY2 | 15079 |
| YRPW motif 2 | | |
| hes-related family bHLH transcription factor with | HEYL | 15080 |
| YRPW motif-like | | |
| hematopoietically expressed homeobox | HHEX | 15081 |
| hypermethylated in cancer 1 | HIC1 | 15082 |
| hypermethylated in cancer 2 | HIC2 | 15083 |
| hypoxia inducible factor 1, alpha subunit (basic helix- | HIF1A | 15084 |
| loop-helix transcription factor) | | |
| hypoxia inducible factor 3, alpha subunit | HIF3A | 15085 |
| histone H4 transcription factor | HINFP | 15086 |
| human immunodeficiency virus type I enhancer | HIVEP1 | 15087 |
| binding protein 1 | | |
| human immunodeficiency virus type I enhancer | HIVEP2 | 15088 |
| binding protein 2 | | |
| human immunodeficiency virus type I enhancer | HIVEP3 | 15089 |
| binding protein 3 | | |
| HKR1, GLI-Kruppel zinc finger family member | HKR1 | 15090 |
| hepatic leukemia factor | HLF | 15091 |
| helicase-like transcription factor | HLTF | 15092 |
| H2.0-like homeobox | HLX | 15093 |
| homeobox containing 1 | HMBOX1 | 15094 |
| high mobility group 20A | HMG20A | 15095 |
| high mobility group 20B | HMG20B | 15096 |
| high mobility group AT-hook 1 | HMGA1 | 15097 |
| high mobility group AT-hook 2 | HMGA2 | 15098 |
| HMG-box containing 3 | HMGXB3 | 15099 |
| HMG-box containing 4 | HMGXB4 | 15100 |
| H6 family homeobox 1 | HMX1 | 15101 |
| H6 family homeobox 2 | HMX2 | 15102 |
| H6 family homeobox 3 | HMX3 | 15103-15104 |
| HNF1 homeobox A | HNF1A | 15105 |
| HNF1 homeobox B | HNF1B | 15106 |
| hepatocyte nuclear factor 4 alpha | HNF4A | 15107 |
| hepatocyte nuclear factor 4 gamma | HNF4G | 15108 |
| heterogeneous nuclear ribonucleoprotein K | HNRNPK | 15109 |
| homeobox and leucine zipper encoding | HOMEZ | 15110 |
| HOP homeobox | HOPX | 15111 |
| homeobox A1 | HOXA1 | 15112 |
| homeobox A10 | HOXA10 | 15113 |
| homeobox A11 | HOXA11 | 15114 |
| homeobox A13 | HOXA13 | 15115 |
| homeobox A2 | HOXA2 | 15116 |
| homeobox A3 | HOXA3 | 15117 |
| homeobox A4 | HOXA4 | 15118 |
| homeobox A5 | HOXA5 | 15119 |
| homeobox A6 | HOXA6 | 15120 |
| homeobox A7 | HOXA7 | 15121 |
| homeobox A9 | HOXA9 | 15122 |
| homeobox B1 | HOXB1 | 15123 |
| homeobox B13 | HOXB13 | 15124 |
| homeobox B2 | HOXB2 | 15125 |
| homeobox B3 | HOXB3 | 15126 |
| homeobox B4 | HOXB4 | 15127 |
| homeobox B5 | HOXB5 | 15128 |
| homeobox B6 | HOXB6 | 15129 |
| homeobox B7 | HOXB7 | 15130 |
| homeobox B8 | HOXB8 | 15131 |
| homeobox B9 | HOXB9 | 15132 |
| homeobox C10 | HOXC10 | 15133 |
| homeobox C11 | HOXC11 | 15134 |
| homeobox C12 | HOXC12 | 15135 |
| homeobox C13 | HOXC13 | 15136 |
| homeobox C4 | HOXC4 | 15137 |
| homeobox C5 | HOXC5 | 15138 |
| homeobox C6 | HOXC6 | 15139 |
| homeobox C8 | HOXC8 | 15140 |
| homeobox C9 | HOXC9 | 15141 |
| homeobox D1 | HOXD1 | 15142 |
| homeobox D10 | HOXD10 | 15143 |
| homeobox D11 | HOXD11 | 15144 |
| homeobox D12 | HOXD12 | 15145 |
| homeobox D13 | HOXD13 | 15146 |
| homeobox D3 | HOXD3 | 15147 |
| homeobox D4 | HOXD4 | 15148 |
| homeobox D8 | HOXD8 | 15149 |
| homeobox D9 | HOXD9 | 15150 |
| heat shock transcription factor 1 | HSF1 | 15151 |
| heat shock transcription factor 2 | HSF2 | 15152 |
| heat shock transcription factor 4 | HSF4 | 15153 |
| heat shock transcription factor family member 5 | HSF5 | 15154 |
| heat shock transcription factor family, X-linked 1 | HSFX1 | 15155 |
| heat shock transcription factor, Y-linked 1 | HSFY1 | 15156 |
| heat shock transcription factor, Y-linked 2 | HSFY2 | 15156 |
| inhibitor of DNA binding 1, dominant negative helix- | ID1 | 15157 |
| loop-helix protein | | |
| inhibitor of DNA binding 2, dominant negative helix- | ID2 | 15158 |
| loop-helix protein | | |
| inhibitor of DNA binding 3, dominant negative helix- | ID3 | 15159 |
| loop-helix protein | | |
| inhibitor of DNA binding 4, dominant negative helix- | ID4 | 15160 |
| loop-helix protein | | |
| interferon, gamma-inducible protein 16 | IFI16 | 15161 |
| IKAROS family zinc finger 1 | IKZF1 | 15162 |
| IKAROS family zinc finger 2 | IKZF2 | 15163 |
| IKAROS family zinc finger 3 | IKZF3 | 15164 |
| IKAROS family zinc finger 4 | IKZF4 | 15165 |
| IKAROS family zinc finger 5 | IKZF5 | 15166 |
| insulinoma associated 1 | INSM1 | 15167 |
| insulinoma-associated 2 | INSM2 | 15168 |
| interferon regulatory factor 1 | IRF1 | 15169 |
| interferon regulatory factor 2 | IRF2 | 15170 |
| interferon regulatory factor 3 | IRF3 | 15171 |
| interferon regulatory factor 4 | IRF4 | 15172 |
| interferon regulatory factor 5 | IRF5 | 15173 |
| interferon regulatory factor 6 | IRF6 | 15174 |
| interferon regulatory factor 7 | IRF7 | 15175 |
| interferon regulatory factor 8 | IRF8 | 15176 |
| interferon regulatory factor 9 | IRF9 | 15177 |
| iroquois homeobox 1 | IRX1 | 15178 |
| iroquois homeobox 2 | IRX2 | 15179 |
| iroquois homeobox 3 | IRX3 | 15180 |
| iroquois homeobox 4 | IRX4 | 15181 |
| iroquois homeobox 5 | IRX5 | 15182 |
| iroquois homeobox 6 | IRX6 | 15183 |
| ISL LIM homeobox 1 | ISL1 | 15184 |
| ISL LIM homeobox 2 | ISL2 | 15185 |
| intestine specific homeobox | ISX | 15186 |
| jumonji and AT-rich interaction domain containing 2 | JARID2 | 15187 |
| JAZF zinc finger 1 | JAZF1 | 15188 |
| Jun dimerization protein 2 | JDP2 | 15189 |
| jun proto-oncogene | JUN | 15190 |
| jun B proto-oncogene | JUNB | 15191 |
| jun D proto-oncogene | JUND | 15192 |
| K(lysine) acetyltransferase 5 | KAT5 | 15193 |
| lysine acetyltransferase 6A | KAT6A | 15194 |
| lysine acetyltransferase 6B | KAT6B | 15195 |
| lysine acetyltransferase 7 | KAT7 | 15196 |
| lysine acetyltransferase 8 | KAT8 | 15197 |
| potassium channel modulatory factor 1 | KCMF1 | 15198 |
| potassium voltage-gated channel interacting protein 3 | KCNIP3 | 15199 |
| lysine demethylase 2A | KDM2A | 15200 |
| lysine demethylase 5A | KDM5A | 15201 |
| lysine demethylase 5B | KDM5B | 15202 |
| lysine demethylase 5C | KDM5C | 15203 |
| lysine demethylase 5D | KDM5D | 15204 |
| KH-type splicing regulatory protein | KHSRP | 15205 |
| KIAA1549 | KIAA1549 | 15206 |
| Kruppel-like factor 1 (erythroid) | KLF1 | 15207 |
| Kruppel-like factor 10 | KLF10 | 15208 |
| Kruppel-like factor 11 | KLF11 | 15209 |
| Kruppel-like factor 12 | KLF12 | 15210 |
| Kruppel-like factor 13 | KLF13 | 15211 |
| Kruppel-like factor 14 | KLF14 | 15212 |
| Kruppel-like factor 15 | KLF15 | 15213 |
| Kruppel-like factor 16 | KLF16 | 15214 |
| Kruppel-like factor 17 | KLF17 | 15215 |
| Kruppel-like factor 2 | KLF2 | 15216 |
| Kruppel-like factor 3 (basic) | KLF3 | 15217 |
| Kruppel-like factor 4 (gut) | KLF4 | 15218 |
| Kruppel-like factor 5 (intestinal) | KLF5 | 15219 |
| Kruppel-like factor 6 | KLF6 | 15220 |
| Kruppel-like factor 7 (ubiquitous) | KLF7 | 15221 |
| Kruppel-like factor 8 | KLF8 | 15222 |
| Kruppel-like factor 9 | KLF9 | 15223 |
| lysine methyltransferase 2A | KMT2A | 15224 |
| lysine methyltransferase 2B | KMT2B | 15225 |
| lysine methyltransferase 2C | KMT2C | 15226 |
| lysine methyltransferase 2E | KMT2E | 15227 |
| l(3)mbt-like 1 (Drosophila) | L3MBTL1 | 15228 |
| l(3)mbt-like 2 (Drosophila) | L3MBTL2 | 15229 |
| l(3)mbt-like 3 (Drosophila) | L3MBTL3 | 15230 |
| l(3)mbt-like 4 (Drosophila) | L3MBTL4 | 15231 |
| ladybird homeobox 1 | LBX1 | 15232 |
| ladybird homeobox 2 | LBX2 | 15233 |
| ligand dependent nuclear receptor corepressor | LCOR | 15234 |
| ligand dependent nuclear receptor corepressor like | LCORL | 15235 |
| lymphoid enhancer binding factor 1 | LEF1 | 15236 |
| leucine twenty homeobox | LEUTX | 15237 |
| LIM homeobox 1 | LHX1 | 15238 |
| LIM homeobox 2 | LHX2 | 15239 |
| LIM homeobox 3 | LHX3 | 15240 |
| LIM homeobox 4 | LHX4 | 15241 |
| LIM homeobox 5 | LHX5 | 15242 |
| LIM homeobox 6 | LHX6 | 15243 |
| LIM homeobox 8 | LHX8 | 15244 |
| LIM homeobox 9 | LHX9 | 15245 |
| LIM homeobox transcription factor 1, alpha | LMX1A | 15246 |
| LIM homeobox transcription factor 1, beta | LMX1B | 15247 |
| LOC730110 | LOC730110 | |
| leucine rich repeat (in FLII) interacting protein 1 | LRRFIP1 | 15248 |
| leucine rich repeat (in FLII) interacting protein 2 | LRRFIP2 | 15249 |
| Ly 1 antibody reactive | LYAR | 15250 |
| lymphoblastic leukemia associated hematopoiesis | LYL1 | 15251 |
| regulator 1 | | |
| maelstrom spermatogenic transposon silencer | MAEL | 15252 |
| v-maf avian musculoaponeurotic fibrosarcoma | MAF | 15253 |
| oncogene homolog | | |
| MAF1 homolog, negative regulator of RNA | MAF1 | 15254 |
| polymerase III | | |
| v-maf avian musculoaponeurotic fibrosarcoma | MAFA | 15255-15256 |
| oncogene homolog A | | |
| v-maf avian musculoaponeurotic fibrosarcoma | MAFB | 15257 |
| oncogene homolog B | | |
| v-maf avian musculoaponeurotic fibrosarcoma | MAFF | 15258 |
| oncogene homolog F | | |
| v-maf avian musculoaponeurotic fibrosarcoma | MAFG | 15259 |
| oncogene homolog G | | |
| v-maf avian musculoaponeurotic fibrosarcoma | MAFK | 15260 |
| oncogene homolog K | | |
| matrin 3 | MATR3 | 15261 |
| MYC associated factor X | MAX | 15262 |
| MYC associated zinc finger protein | MAZ | 15263 |
| methyl-CpG binding domain protein 1 | MBD1 | 15264 |
| methyl-CpG binding domain protein 2 | MBD2 | 15265 |
| methyl-CpG binding domain protein 3 | MBD3 | 15266 |
| methyl-CpG binding domain protein 3-like 1 | MBD3L1 | 15267 |
| methyl-CpG binding domain protein 3-like 2 | MBD3L2 | 15268 |
| methyl-CpG binding domain 4 DNA glycosylase | MBD4 | 15269 |
| methyl-CpG binding domain protein 5 | MBD5 | 15270 |
| methyl-CpG binding domain protein 6 | MBD6 | 15271 |
| muscleblind like splicing regulator 3 | MBNL3 | 15272 |
| MDS1 and EVI1 complex locus | MECOM | 15273 |
| methyl-CpG binding protein 2 | MECP2 | 15274 |
| myocyte enhancer factor 2A | MEF2A | 15275 |
| myocyte enhancer factor 2B | MEF2B | 15276 |
| myocyte enhancer factor 2C | MEF2C | 15277 |
| myocyte enhancer factor 2D | MEF2D | 15278 |
| Meis homeobox 1 | MEIS1 | 15279 |
| Meis homeobox 2 | MEIS2 | 15280 |
| Meis homeobox 3 | MEIS3 | 15281 |
| Meis homeobox 3 pseudogene 1 | MEIS3P1 | 15282 |
| Meis homeobox 3 pseudogene 2 | MEIS3P2 | 15283 |
| mesenchyme homeobox 1 | MEOX1 | 15284 |
| mesenchyme homeobox 2 | MEOX2 | 15285 |
| mesoderm posterior bHLH transcription factor 1 | MESP1 | 15286 |
| mesoderm posterior bHLH transcription factor 2 | MESP2 | 15287 |
| MGA, MAX dimerization protein | MGA | 15288-15289 |
| MIER1 transcriptional regulator | MIER1 | 15290 |
| MIER family member 2 | MIER2 | 15291 |
| MIER family member 3 | MIER3 | 15292 |
| MIS18 binding protein 1 | MIS18BP1 | 15293 |
| microphthalmia-associated transcription factor | MITF | 15294 |
| Mix paired-like homeobox | MIXL1 | 15295 |
| mohawk homeobox | MKX | 15296 |
| myeloid/lymphoid or mixed-lineage leukemia; | MLLT1 | 15297 |
| translocated to, 1 | | |
| myeloid/lymphoid or mixed-lineage leukemia; | MLLT10 | 15298 |
| translocated to, 10 | | |
| myeloid/lymphoid or mixed-lineage leukemia; | MLLT11 | 15299 |
| translocated to, 11 | | |
| myeloid/lymphoid or mixed-lineage leukemia; | MLLT3 | 15300 |
| translocated to, 3 | | |
| myeloid/lymphoid or mixed-lineage leukemia; | MLLT4 | 15301 |
| translocated to, 4 | | |
| myeloid/lymphoid or mixed-lineage leukemia; | MLLT6 | 15302 |
| translocated to, 6 | | |
| MLX, MAX dimerization protein | MLX | 15303 |
| MLX interacting protein | MLXIP | 15304 |
| MLX interacting protein-like | MLXIPL | 15305 |
| MAX network transcriptional repressor | MNT | 15306 |
| motor neuron and pancreas homeobox 1 | MNX1 | 15307 |
| musculin | MSC | 15308 |
| mesogenin 1 | MSGN1 | 15309 |
| msh homeobox 1 | MSX1 | 15310 |
| msh homeobox 2 | MSX2 | 15311 |
| metastasis associated 1 | MTA1 | 15312 |
| metastasis associated 1 family member 2 | MTA2 | 15313 |
| metastasis associated 1 family member 3 | MTA3 | 15314 |
| metal-regulatory transcription factor 1 | MTF1 | 15315 |
| metal response element binding transcription factor 2 | MTF2 | 15316 |
| MAX dimerization protein 1 | MXD1 | 15317 |
| MAX dimerization protein 3 | MXD3 | 15318 |
| MAX dimerization protein 4 | MXD4 | 15319 |
| MAX interactor 1, dimerization protein | MXI1 | 15320 |
| v-myb avian myeloblastosis viral oncogene homolog | MYB | 15321 |
| v-myb avian myeloblastosis viral oncogene homolog- | MYBL1 | 15322 |
| like 1 | | |
| v-myb avian myeloblastosis viral oncogene homolog- | MYBL2 | 15323 |
| like 2 | | |
| v-myc avian myelocytomatosis viral oncogene | MYC | 15324 |
| homolog | | |
| v-myc avian myelocytomatosis viral oncogene lung | MYCL | 15325 |
| carcinoma derived homolog | | |
| MYCL pseudogene 1 | MYCLP1 | 15326 |
| v-myc avian myelocytomatosis viral oncogene | MYCN | 15327 |
| neuroblastoma derived homolog | | |
| myogenic factor 5 | MYF5 | 15328 |
| myogenic factor 6 | MYF6 | 15329 |
| myoneurin | MYNN | 15330 |
| myogenic differentiation 1 | MYOD1 | 15331 |
| myogenin (myogenic factor 4) | MYOG | 15332 |
| myelin regulatory factor | MYRF | 15333 |
| Myb-like, SWIRM and MPN domains 1 | MYSM1 | 15334 |
| myelin transcription factor 1 | MYT1 | 15335-15336 |
| myelin transcription factor 1 like | MYT1L | 15337 |
| myeloid zinc finger 1 | MZF1 | 15338 |
| Nanog homeobox | NANOG | 15339 |
| NANOG neighbor homeobox | NANOGNB | 15340 |
| Nanog homeobox pseudogene 1 | NANOGP1 | 15341 |
| Nanog homeobox pseudogene 8 | NANOGP8 | 15342 |
| nuclear receptor coactivator 1 | NCOA1 | 15343 |
| nuclear receptor coactivator 2 | NCOA2 | 15344 |
| nuclear receptor coactivator 3 | NCOA3 | 15345 |
| nuclear receptor coactivator 4 | NCOA4 | 15346 |
| nuclear receptor coactivator 5 | NCOA5 | 15347 |
| nuclear receptor coactivator 6 | NCOA6 | 15348 |
| nuclear receptor coactivator 7 | NCOA7 | 15349 |
| nuclear receptor corepressor 1 | NCOR1 | 15350 |
| nuclear receptor corepressor 2 | NCOR2 | 15351 |
| neuronal differentiation 1 | NEUROD1 | 15352 |
| neuronal differentiation 2 | NEUROD2 | 15353 |
| neuronal differentiation 4 | NEUROD4 | 15354 |
| neuronal differentiation 6 | NEUROD6 | 15355 |
| neuro genin 1 | NEUROG1 | 15356 |
| neuro genin 2 | NEUROG2 | 15357 |
| neuro genin 3 | NEUROG3 | 15358 |
| nuclear factor of activated T-cells 5, tonicity- | NFAT5 | 15359 |
| responsive | | |
| nuclear factor of activated T-cells, cytoplasmic, | NFATC1 | 15360 |
| calcineurin-dependent 1 | | |
| nuclear factor of activated T-cells, cytoplasmic, | NFATC2 | 15361 |
| calcineurin-dependent 2 | | |
| nuclear factor of activated T-cells, cytoplasmic, | NFATC3 | 15362 |
| calcineurin-dependent 3 | | |
| nuclear factor of activated T-cells, cytoplasmic, | NFATC4 | 15363 |
| calcineurin-dependent 4 | | |
| nuclear factor, erythroid 2 | NFE2 | 15364 |
| nuclear factor, erythroid 2 like 1 | NFE2L1 | 15365 |
| nuclear factor, erythroid 2 like 2 | NFE2L2 | 15366 |
| nuclear factor, erythroid 2 like 3 | NFE2L3 | 15367 |
| nuclear factor I/A | NFIA | 15368 |
| nuclear factor I/B | NFIB | 15369 |
| nuclear factor I/C (CCAAT-binding transcription | NFIC | 15370 |
| factor) | | |
| nuclear factor, interleukin 3 regulated | NFIL3 | 15371 |
| nuclear factor I/X (CCAAT-binding transcription | NFIX | 15372 |
| factor) | | |
| nuclear factor of kappa light polypeptide gene | NFKB1 | 15373 |
| enhancer in B-cells 1 | | |
| nuclear factor of kappa light polypeptide gene | NFKB2 | 15374 |
| enhancer in B-cells 2 (p49/p100) | | |
| nuclear factor of kappa light polypeptide gene | NFKBIA | 15375 |
| enhancer in B-cells inhibitor, alpha | | |
| nuclear factor of kappa light polypeptide gene | NFKBIB | 15376 |
| enhancer in B-cells inhibitor, beta | | |
| nuclear factor of kappa light polypeptide gene | NFKBID | 15377 |
| enhancer in B-cells inhibitor, delta | | |
| nuclear factor of kappa light polypeptide gene | NFKBIE | 15378 |
| enhancer in B-cells inhibitor, epsilon | | |
| nuclear factor of kappa light polypeptide gene | NFKBIL1 | 15379 |
| enhancer in B-cells inhibitor-like 1 | | |
| nuclear factor of kappa light polypeptide gene | NFKBIZ | 15380 |
| enhancer in B-cells inhibitor, zeta | | |
| nuclear factor related to kappaB binding protein | NFRKB | 15381 |
| nuclear transcription factor, X-box binding 1 | NFX1 | 15382 |
| nuclear transcription factor, X-box binding-like 1 | NFXL1 | 15383 |
| nuclear transcription factor Y subunit alpha | NFYA | 15384 |
| nuclear transcription factor Y subunit beta | NFYB | 15385 |
| nuclear transcription factor Y subunit gamma | NFYC | 15386 |
| nescient helix-loop-helix 1 | NHLH1 | 15387 |
| nescient helix-loop-helix 2 | NHLH2 | 15388 |
| NFKB repressing factor | NKRF | 15389 |
| NK1 homeobox 1 | NKX1-1 | 15390 |
| NK1 homeobox 2 | NKX1-2 | 15391 |
| NK2 homeobox 1 | NKX2-1 | 15392 |
| NK2 homeobox 2 | NKX2-2 | 15393 |
| NK2 homeobox 3 | NKX2-3 | 15394 |
| NK2 homeobox 4 | NKX2-4 | 15395 |
| NK2 homeobox 5 | NKX2-5 | 15396 |
| NK2 homeobox 6 | NKX2-6 | 15397 |
| NK2 homeobox 8 | NKX2-8 | 15398 |
| NK3 homeobox 1 | NKX3-1 | 15399 |
| NK3 homeobox 2 | NKX3-2 | 15400 |
| NK6 homeobox 1 | NKX6-1 | 15401 |
| NK6 homeobox 2 | NKX6-2 | 15402 |
| NK6 homeobox 3 | NKX6-3 | 15403 |
| NOBOX oogenesis homeobox | NOBOX | 15404 |
| NOC3 like DNA replication regulator | NOC3L | 15405 |
| nucleolar complex associated 4 homolog | NOC4L | 15406 |
| non-POU domain containing, octamer-binding | NONO | 15407 |
| notochord homeobox | NOTO | 15408 |
| neuronal PAS domain protein 1 | NPAS1 | 15409 |
| neuronal PAS domain protein 2 | NPAS2 | 15410 |
| neuronal PAS domain protein 3 | NPAS3 | 15411 |
| neuronal PAS domain protein 4 | NPAS4 | 15412 |
| nuclear receptor subfamily 0 group B member 1 | NR0B1 | 15413 |
| nuclear receptor subfamily 0 group B member 2 | NR0B2 | 15414 |
| nuclear receptor subfamily 1 group D member 1 | NR1D1 | 15415 |
| nuclear receptor subfamily 1 group D member 2 | NR1D2 | 15416 |
| nuclear receptor subfamily 1 group H member 2 | NR1H2 | 15417 |
| nuclear receptor subfamily 1 group H member 3 | NR1H3 | 15418 |
| nuclear receptor subfamily 1 group H member 4 | NR1H4 | 15419 |
| nuclear receptor subfamily 1 group I member 2 | NR1I2 | 15420 |
| nuclear receptor subfamily 1 group I member 3 | NR1I3 | 15421 |
| nuclear receptor subfamily 2 group C member 1 | NR2C1 | 15422 |
| nuclear receptor subfamily 2 group C member 2 | NR2C2 | 15423 |
| nuclear receptor subfamily 2 group E member 1 | NR2E1 | 15424 |
| nuclear receptor subfamily 2 group E member 3 | NR2E3 | 15425 |
| nuclear receptor subfamily 2 group F member 1 | NR2F1 | 15426 |
| nuclear receptor subfamily 2 group F member 2 | NR2F2 | 15427 |
| nuclear receptor subfamily 2 group F member 6 | NR2F6 | 15428 |
| nuclear receptor subfamily 3 group C member 1 | NR3C1 | 15429 |
| nuclear receptor subfamily 3 group C member 2 | NR3C2 | 15430 |
| nuclear receptor subfamily 4 group A member 1 | NR4A1 | 15431 |
| nuclear receptor subfamily 4 group A member 2 | NR4A2 | 15432 |
| nuclear receptor subfamily 4 group A member 3 | NR4A3 | 15433 |
| nuclear receptor subfamily 5 group A member 1 | NR5A1 | 15434 |
| nuclear receptor subfamily 5 group A member 2 | NR5A2 | 15435 |
| nuclear receptor subfamily 6 group A member 1 | NR6A1 | 15436 |
| nuclear respiratory factor 1 | NRF1 | 15437-15438 |
| neural retina leucine zipper | NRL | 15439 |
| oligodendrocyte transcription factor 1 | OLIG1 | 15440 |
| oligodendrocyte lineage transcription factor 2 | OLIG2 | 15441 |
| oligodendrocyte transcription factor 3 | OLIG3 | 15442 |
| one cut homeobox 1 | ONECUT1 | 15443 |
| one cut homeobox 2 | ONECUT2 | 15444 |
| one cut homeobox 3 | ONECUT3 | 15445 |
| odd-skipped related transciption factor 1 | OSR1 | 15446 |
| odd-skipped related transciption factor 2 | OSR2 | 15447 |
| orthopedia homeobox | OTP | 15448 |
| orthodenticle homeobox 1 | OTX1 | 15449 |
| orthodenticle homeobox 2 | OTX2 | 15450 |
| ovo like zinc finger 1 | OVOL1 | 15451 |
| ovo like zinc finger 2 | OVOL2 | 15452 |
| ovo like zinc finger 3 | OVOL3 | 15453 |
| poly(ADP-ribose) polymerase 1 | PARP1 | 15454 |
| poly(ADP-ribose) polymerase family member 12 | PARP12 | 15455 |
| POZ/BTB and AT hook containing zinc finger 1 | PATZ1 | 15456 |
| PRKC, apoptosis, WT1, regulator | PAWR | 15457 |
| paired box 1 | PAX1 | 15458 |
| paired box 2 | PAX2 | 15459 |
| paired box 3 | PAX3 | 15460 |
| paired box 4 | PAX4 | 15461 |
| paired box 5 | PAX5 | 15462 |
| paired box 6 | PAX6 | 15463 |
| paired box 7 | PAX7 | 15464 |
| paired box 8 | PAX8 | 15465 |
| paired box 9 | PAX9 | 15466 |
| PAX3 and PAX7 binding protein 1 | PAXBP1 | 15467 |
| polybromo 1 | PBRM1 | 15468 |
| pre-B-cell leukemia homeobox 1 | PBX1 | 15469 |
| pre-B-cell leukemia homeobox 2 | PBX2 | 15470 |
| pre-B-cell leukemia homeobox 3 | PBX3 | 15471 |
| pre-B-cell leukemia homeobox 4 | PBX4 | 15472 |
| poly(rC) binding protein 1 | PCBP1 | 15473 |
| poly(rC) binding protein 2 | PCBP2 | 15474 |
| poly(rC) binding protein 3 | PCBP3 | 15475 |
| poly(rC) binding protein 4 | PCBP4 | 15476 |
| poly comb group ring finger 6 | PCGF6 | 15477 |
| pancreatic and duodenal homeobox 1 | PDX1 | 15478-15479 |
| paternally expressed 3 | PEG3 | 15480 |
| progesterone receptor | PGR | 15481 |
| prohibitin | PHB | 15482 |
| prohibitin 2 | PHB2 | 15483 |
| PHD finger protein 20 | PHF20 | 15484 |
| PHD finger protein 5A | PHF5A | 15485 |
| paired like homeobox 2a | PHOX2A | 15486 |
| paired like homeobox 2b | PHOX2B | 15487 |
| putative homeodomain transcription factor 1 | PHTF1 | 15488 |
| putative homeodomain transcription factor 2 | PHTF2 | 15489 |
| paired like homeodomain 1 | PITX1 | 15490 |
| paired like homeodomain 2 | PITX2 | 15491 |
| paired like homeodomain 3 | PITX3 | 15492 |
| PBX/knotted 1 homeobox 1 | PKNOX1 | 15493 |
| PBX/knotted 1 homeobox 2 | PKNOX2 | 15494 |
| PLAG1 zinc finger | PLAG1 | 15495 |
| PLAG1 like zinc finger 1 | PLAGL1 | 15496 |
| PLAG1 like zinc finger 2 | PLAGL2 | 15497 |
| pleckstrin | PLEK | 15498 |
| promyelocytic leukaemia zinc finger | PLZF | 15499 |
| pogo transposable element with ZNF domain | POGZ | 15500 |
| POU class 1 homeobox 1 | POU1F1 | 15501 |
| POU class 2 associating factor 1 | POU2AF1 | 15502 |
| POU class 2 homeobox 1 | POU2F1 | 15503 |
| POU class 2 homeobox 2 | POU2F2 | 15504 |
| POU class 2 homeobox 3 | POU2F3 | 15505 |
| POU class 3 homeobox 1 | POU3F1 | 15506 |
| POU class 3 homeobox 2 | POU3F2 | 15507 |
| POU class 3 homeobox 3 | POU3F3 | 15508 |
| POU class 3 homeobox 4 | POU3F4 | 15509 |
| POU class 4 homeobox 1 | POU4F1 | 15510 |
| POU class 4 homeobox 2 | POU4F2 | 15511 |
| POU class 4 homeobox 3 | POU4F3 | 15512 |
| POU class 5 homeobox 1 | POU5F1 | 15513 |
| POU class 5 homeobox 1B | POU5F1B | 15514 |
| POU domain class 5, transcription factor 2 | POU5F2 | 15515 |
| POU class 6 homeobox 1 | POU6F1 | 15516 |
| POU class 6 homeobox 2 | POU6F2 | 15517 |
| peroxisome proliferator activated receptor alpha | PPARA | 15518 |
| peroxisome proliferator activated receptor delta | PPARD | 15519 |
| peroxisome proliferator activated receptor gamma | PPARG | 15520 |
| protein phosphatase 1 regulatory subunit 13 like | PPP1R13L | 15521 |
| PR domain 1 | PRDM1 | 15522 |
| PR domain 10 | PRDM10 | 15523 |
| PR domain 11 | PRDM11 | 15524 |
| PR domain 12 | PRDM12 | 15525 |
| PR domain 13 | PRDM13 | 15526 |
| PR domain 14 | PRDM14 | 15527 |
| PR domain 15 | PRDM15 | 15528 |
| PR domain 16 | PRDM16 | 15529 |
| PR domain 2 | PRDM2 | 15530 |
| PR domain 4 | PRDM4 | 15531 |
| PR domain 5 | PRDM5 | 15532 |
| PR domain 6 | PRDM6 | 15533 |
| PR domain 7 | PRDM7 | 15534 |
| PR domain 8 | PRDM8 | 15535 |
| PR domain 9 | PRDM9 | 15536 |
| prolactin regulatory element binding | PREB | 15537 |
| PROP paired-like homeobox 1 | PROP1 | 15538 |
| prospero homeobox 1 | PROX1 | 15539 |
| prospero homeobox 2 | PROX2 | 15540 |
| paired related homeobox 1 | PRRX1 | 15541 |
| paired related homeobox 2 | PRRX2 | 15542 |
| paraspeckle component 1 | PSPC1 | 15543 |
| pancreas specific transcription factor, 1a | PTF1A | 15544 |
| purine-rich element binding protein A | PURA | 15545 |
| purine-rich element binding protein B | PURB | 15546 |
| purine-rich element binding protein G | PURG | 15547 |
| retinoic acid receptor alpha | RARA | 15548 |
| retinoic acid receptor beta | RARB | 15549 |
| retinoic acid receptor gamma | RARG | 15550 |
| retina and anterior neural fold homeobox | RAX | 15551-15552 |
| retina and anterior neural fold homeobox 2 | RAX2 | 15553 |
| RB associated KRAB zinc finger | RBAK | 15554 |
| RNA binding motif protein 22 | RBM22 | 15555 |
| recombination signal binding protein for | RBPJ | 15556 |
| immunoglobulin kappa J region | | |
| recombination signal binding protein for | RBPJL | 15557 |
| immunoglobulin kappa J region-like | | |
| ring finger and CCCH-type domains 1 | RC3H1 | 15558 |
| ring finger and CCCH-type domains 2 | RC3H2 | 15559 |
| REST corepressor 1 | RCOR1 | 15560 |
| REST corepressor 2 | RCOR2 | 15561 |
| REST corepressor 3 | RCOR3 | 15562 |
| v-rel avian reticuloendothcliosis viral oncogene | REL | 15563 |
| homolog | | |
| v-rel avian reticuloendothcliosis viral oncogene | RELA | 15564 |
| homolog A | | |
| v-rel avian reticuloendothcliosis viral oncogene | RELB | 15565 |
| homolog B | | |
| arginine-glutamic acid di peptide (RE) repeats | RERE | 15566 |
| RE1-silencing transcription factor | REST | 15567 |
| regulatory factor X1 | RFX1 | 15568 |
| regulatory factor X2 | RFX2 | 15569 |
| regulatory factor X3 | RFX3 | 15570 |
| regulatory factor X4 | RFX4 | 15571 |
| regulatory factor X5 | RFX5 | 15572 |
| regulatory factor X6 | RFX6 | 15573 |
| regulatory factor X7 | RFX7 | 15574 |
| RFX family member 8, lacking RFX DNA binding | RFX8 | 15575 |
| domain | | |
| regulatory factor X associated ankyrin containing | RFXANK | 15576 |
| protein | | |
| regulatory factor X associated protein | RFXAP | 15577 |
| Rhox homeobox family member 1 | RHOXF1 | 15578 |
| Rhox homeobox family member 2 | RHOXF2 | 15579 |
| Rhox homeobox family member 2B | RHOXF2B | 15580 |
| rearranged L-myc fusion | RLF | 15581-15582 |
| RAR related orphan receptor A | RORA | 15583 |
| RAR related orphan receptor B | RORB | 15584 |
| RAR related orphan receptor C | RORC | 15585 |
| retinoic acid receptor-related orphan nuclear receptor | RORgT | 15586 |
| gamma | | |
| ras responsive element binding protein 1 | RREB1 | 15587 |
| runt related transcription factor 1 | RUNX1 | 15588 |
| runt related transcription factor 1; translocated to, 1 | RUNX1T1 | 15589 |
| (cyclin D related) | | |
| runt related transcription factor 2 | RUNX2 | 15590 |
| runt related transcription factor 3 | RUNX3 | 15591 |
| retinoid X receptor alpha | RXRA | 15592 |
| retinoid X receptor beta | RXRB | 15593 |
| retinoid X receptor gamma | RXRG | 15594 |
| spalt-like transcription factor 1 | SALL1 | 15595 |
| spalt-like transcription factor 2 | SALL2 | 15596 |
| spalt-like transcription factor 3 | SALL3 | 15597 |
| spalt-like transcription factor 4 | SALL4 | 15598 |
| SATB homeobox 1 | SATB1 | 15599 |
| SATB homeobox 2 | SATB2 | 15600 |
| S-phase cyclin A-associated protein in the ER | SCAPER | 15601 |
| scratch family zinc finger 1 | SCRT1 | 15602 |
| scratch family zinc finger 2 | SCRT2 | 15603 |
| scleraxis bHLH transcription factor | SCX | 15604 |
| SEBOX homeobox | SEBOX | 15605 |
| SET binding protein 1 | SETBP1 | 15606 |
| splicing factor proline/glutamine-rich | SFPQ | 15607 |
| short stature homeobox | SHOX | 15608 |
| short stature homeobox 2 | SHOX2 | 15609 |
| single-minded family bHLH transcription factor 1 | SIM1 | 15610 |
| single-minded family bHLH transcription factor 2 | SIM2 | 15611 |
| SIX homeobox 1 | SIX1 | 15612 |
| SIX homeobox 2 | SIX2 | 15613 |
| SIX homeobox 3 | SIX3 | 15614 |
| SIX homeobox 4 | SIX4 | 15615 |
| SIX homeobox 5 | SIX5 | 15616 |
| SIX homeobox 6 | SIX6 | 15617 |
| SKI proto-oncogene | SKI | 15618 |
| SKI-like proto-oncogene | SKIL | 15619 |
| SKI family transcriptional corepressor 1 | SKOR1 | 15620 |
| SKI family transcriptional corepressor 2 | SKOR2 | 15621 |
| solute carrier family 30 (zinc transporter), member 9 | SLC30A9 | 15622 |
| SMAD family member 1 | SMAD1 | 15623 |
| SMAD family member 2 | SMAD2 | 15624 |
| SMAD family member 3 | SMAD3 | 15625 |
| SMAD family member 4 | SMAD4 | 15626 |
| SMAD family member 5 | SMAD5 | 15627 |
| SMAD family member 6 | SMAD6 | 15628 |
| SMAD family member 7 | SMAD7 | 15629 |
| SMAD family member 9 | SMAD9 | 15630 |
| SWI/SNF related, matrix associated, actin dependent | SMARCA1 | 15631 |
| regulator of chromatin, subfamily a, member 1 | | |
| SWI/SNF related, matrix associated, actin dependent | SMARCA2 | 15632 |
| regulator of chromatin, subfamily a, member 2 | | |
| SWI/SNF related, matrix associated, actin dependent | SMARCA4 | 15633 |
| regulator of chromatin, subfamily a, member 4 | | |
| SWI/SNF related, matrix associated, actin dependent | SMARCA5 | 15634 |
| regulator of chromatin, subfamily a, member 5 | | |
| SWI/SNF-related, matrix-associated actin-dependent | SMARCAD1 | 15635 |
| regulator of chromatin, subfamily a, containing | | |
| DEAD/H box 1 | | |
| SWI/SNF related, matrix associated, actin dependent | SMARCAL1 | 15636 |
| regulator of chromatin, subfamily a-like 1 | | |
| SWI/SNF related, matrix associated, actin dependent | SMARCB1 | 15637 |
| regulator of chromatin, subfamily b, member 1 | | |
| SWI/SNF related, matrix associated, actin dependent | SMARCC1 | 15638 |
| regulator of chromatin, subfamily c, member 1 | | |
| SWI/SNF related, matrix associated, actin dependent | SMARCC2 | 15639 |
| regulator of chromatin, subfamily c, member 2 | | |
| SWI/SNF related, matrix associated, actin dependent | SMARCD1 | 15640 |
| regulator of chromatin, subfamily d, member 1 | | |
| SWI/SNF related, matrix associated, actin dependent | SMARCD2 | 15641 |
| regulator of chromatin, subfamily d, member 2 | | |
| SWI/SNF related, matrix associated, actin dependent | SMARCD3 | 15642 |
| regulator of chromatin, subfamily d, member 3 | | |
| SWI/SNF related, matrix associated, actin dependent | SMARCE1 | 15643 |
| regulator of chromatin, subfamily e, member 1 | | |
| snail family zinc finger 1 | SNAI1 | 15644 |
| snail family zinc finger 2 | SNAI2 | 15645 |
| snail family zinc finger 3 | SNAI3 | 15646 |
| small nuclear RNA activating complex polypeptide 4 | SNAPC4 | 15647 |
| spermatogenesis and oogenesis specific basic helix- | SOHLH1 | 15648 |
| loop-helix 1 | | |
| spermatogenesis and oogenesis specific basic helix- | SOHLH2 | 15649 |
| loop-helix 2 | | |
| SRY-box 1 | SOX1 | 15650 |
| SRY-box 10 | SOX10 | 15651 |
| SRY-box 11 | SOX11 | 15652 |
| SRY-box 12 | SOX12 | 15653 |
| SRY-box 13 | SOX13 | 15654 |
| SRY-box 14 | SOX14 | 15655 |
| SRY-box 15 | SOX15 | 15656 |
| SRY-box 17 | SOX17 | 15657 |
| SRY-box 18 | SOX18 | 15658 |
| SRY-box 2 | SOX2 | 15659 |
| SRY-box 21 | SOX21 | 15660 |
| SRY-box 3 | SOX3 | 15661 |
| SRY-box 30 | SOX30 | 15662 |
| SRY-box 4 | SOX4 | 15663 |
| SRY-box 5 | SOX5 | 15664 |
| SRY-box 6 | SOX6 | 15665 |
| SRY-box 7 | SOX7 | 15666 |
| SRY-box 8 | SOX8 | 15667 |
| SRY-box 9 | SOX9 | 15668 |
| Sp1 transcription factor | SP1 | 15669-15670 |
| SP100 nuclear antigen | SP100 | 15671 |
| SP110 nuclear body protein | SP110 | 15672 |
| SP140 nuclear body protein | SP140 | 15673 |
| SP140 nuclear body protein like | SP140L | 15674 |
| Sp2 transcription factor | SP2 | 15675 |
| Sp3 transcription factor | SP3 | 15676 |
| Sp4 transcription factor | SP4 | 15677 |
| Sp5 transcription factor | SP5 | 15678 |
| Sp6 transcription factor | SP6 | 15679 |
| Sp7 transcription factor | SP7 | 15680 |
| Sp8 transcription factor | SP8 | 15681 |
| Sp9 transcription factor | SP9 | 15682 |
| SAM pointed domain containing ETS transcription | SPDEF | 15683 |
| factor | | |
| Spi-1 proto-oncogene | SPI1 | 15684 |
| Spi-B transcription factor (Spi-1/PU.1 related) | SPIB | 15685 |
| Spi-C transcription factor (Spi-1/PU.1 related) | SPIC | 15686 |
| spermatogenic leucine zipper 1 | SPZ1 | 15687 |
| sterol regulatory element binding transcription factor 1 | SREBF1 | 15688 |
| sterol regulatory element binding transcription factor 2 | SREBF2 | 15689 |
| serum response factor | SRF | 15690 |
| sex determining region Y | SRY | 15691 |
| structure specific recognition protein 1 | SSRP1 | 15692 |
| suppression of tumorigenicity 18, zinc finger | ST18 | 15693 |
| signal transducer and activator of transcription 1 | STAT1 | 15694 |
| signal transducer and activator of transcription 2 | STAT2 | 15695 |
| signal transducer and activator of transcription 3 | STAT3 | 15696 |
| (acute-phase response factor) | | |
| signal transducer and activator of transcription 4 | STAT4 | 15697 |
| signal transducer and activator of transcription 5 | STAT5 | 15698 |
| signal transducer and activator of transcription 5A | STAT5A | 15699 |
| signal transducer and activator of transcription 5B | STAT5B | 15700 |
| signal transducer and activator of transcription 6, | STAT6 | 15701 |
| interleukin-4 induced | | |
| transcriptional adaptor 2A | TADA2A | 15702 |
| transcriptional adaptor 2B | TADA2B | 15703 |
| TATA-box binding protein associated factor 1 | TAF1 | 15704 |
| T-cell acute lymphocytic leukemia 1 | TAL1 | 15705 |
| T-cell acute lymphocytic leukemia 2 | TAL2 | 15706 |
| Taxi (human T-cell leukemia virus type I) binding | TAX1BP1 | 15707 |
| protein 1 | | |
| Taxi (human T-cell leukemia virus type I) binding | TAX1BP3 | 15708 |
| protein 3 | | |
| T-box transcription factor T-bet | Tbet | 15709 |
| TATA-box binding protein | TBP | 15710 |
| TATA-box binding protein like 1 | TBPL1 | 15711 |
| TATA-box binding protein like 2 | TBPL2 | 15712 |
| T-box, brain 1 | TBR1 | 15713 |
| T-box 1 | TBX1 | 15714 |
| T-box 10 | TBX10 | 15715 |
| T-box 15 | TBX15 | 15716 |
| T-box 18 | TBX18 | 15717 |
| T-box 19 | TBX19 | 15718 |
| T-box 2 | TBX2 | 15719 |
| T-box 20 | TBX20 | 15720 |
| T-box 21 | TBX21 | 15721 |
| T-box 22 | TBX22 | 15722 |
| T-box 3 | TBX3 | 15723 |
| T-box 4 | TBX4 | 15724 |
| T-box 5 | TBX5 | 15725 |
| T-box 6 | TBX6 | 15726 |
| transcription factor 12 | TCF12 | 15727 |
| transcription factor 15 (basic helix-loop-helix) | TCF15 | 15728 |
| transcription factor 19 | TCF19 | 15729 |
| transcription factor 20 (AR1) | TCF20 | 15730 |
| transcription factor 21 | TCF21 | 15731 |
| transcription factor 23 | TCF23 | 15732 |
| transcription factor 24 | TCF24 | 15733 |
| transcription factor 25 (basic helix-loop-helix) | TCF25 | 15734 |
| transcription factor 3 | TCF3 | 15735 |
| transcription factor 4 | TCF4 | 15736 |
| transcription factor 7 (T-cell specific, HMG-box, | TCF7 | 15737 |
| TCF1) | | |
| transcription factor 7 like 1 | TCF7L1 | 15738 |
| transcription factor 7 like 2 | TCF7L2 | 15739 |
| transcription factor-like 5 (basic helix-loop-helix) | TCFL5 | 15740 |
| TEA domain transcription factor 1 | TEAD1 | 15741 |
| TEA domain transcription factor 2 | TEAD2 | 15742 |
| TEA domain transcription factor 3 | TEAD3 | 15743 |
| TEA domain transcription factor 4 | TEAD4 | 15744 |
| thyrotrophic embryonic factor | TEF | 15745 |
| telomeric repeat binding factor (NIMA-interacting) 1 | TERF1 | 15746 |
| telomeric repeat binding factor 2 | TERF2 | 15747 |
| tet methylcytosine dioxygenase 1 | TET1 | 15748 |
| tet methylcytosine dioxygenase 2 | TET2 | 15749 |
| tet methylcytosine dioxygenase 3 | TET3 | 15750 |
| transcription factor A, mitochondrial | TFAM | 15751 |
| transcription factor AP-2 alpha (activating enhancer | TFAP2A | 15752 |
| binding protein 2 alpha) | | |
| transcription factor AP-2 beta (activating enhancer | TFAP2B | 15753 |
| binding protein 2 beta) | | |
| transcription factor AP-2 gamma (activating enhancer | TFAP2C | 15754 |
| binding protein 2 gamma) | | |
| transcription factor AP-2 delta (activating enhancer | TFAP2D | 15755 |
| binding protein 2 delta) | | |
| transcription factor AP-2 epsilon (activating enhancer | TFAP2E | 15756 |
| binding protein 2 epsilon) | | |
| transcription factor AP-4 (activating enhancer binding | TFAP4 | 15757 |
| protein 4) | | |
| transcription factor B1, mitochondrial | TFB1M | 15758 |
| transcription factor B2, mitochondrial | TFB2M | 15759 |
| transcription factor CP2 | TFCP2 | 15760 |
| transcription factor CP2-like 1 | TFCP2L1 | 15761 |
| transcription factor Dp-1 | TFDP1 | 15762 |
| transcription factor Dp-2 (E2F dimerization partner 2) | TFDP2 | 15763 |
| transcription factor Dp family member 3 | TFDP3 | 15764 |
| transcription factor binding to IGHM enhancer 3 | TFE3 | 15765 |
| transcription factor EB | TFEB | 15766 |
| transcription factor EC | TFEC | 15767 |
| TGFB induced factor homeobox 1 | TGIF1 | 15768 |
| TGFB induced factor homeobox 2 | TGIF2 | 15769 |
| TGFB induced factor homeobox 2 like, X-linked | TGIF2LX | 15770 |
| TGFB induced factor homeobox 2 like, Y-linked | TGIF2LY | 15771 |
| THAP domain containing, apoptosis associated protein | THAP1 | 15772 |
| 1 | | |
| THAP domain containing 10 | THAP10 | 15773 |
| THAP domain containing 11 | THAP11 | 15774 |
| THAP domain containing 12 | THAP12 | 15775 |
| THAP domain containing, apoptosis associated protein | THAP2 | 15776 |
| 2 | | |
| THAP domain containing, apoptosis associated protein | THAP3 | 15777 |
| 3 | | |
| THAP domain containing 4 | THAP4 | 15778 |
| THAP domain containing 5 | THAP5 | 15779 |
| THAP domain containing 6 | THAP6 | 15780 |
| THAP domain containing 7 | THAP7 | 15781 |
| THAP domain containing 8 | THAP8 | 15782 |
| THAP domain containing 9 | THAP9 | 15783 |
| Th inducing POZ-Kruppel Factor | ThPOK | 15784 |
| thyroid hormone receptor, alpha | THRA | 15785 |
| thyroid hormone receptor, beta | THRB | 15786 |
| T-cell leukemia homeobox 1 | TLX1 | 15787 |
| T-cell leukemia homeobox 2 | TLX2 | 15788 |
| T-cell leukemia homeobox 3 | TLX3 | 15789 |
| target of EGR1, member 1 (nuclear) | TOE1 | 15790 |
| tonsoku-like, DNA repair protein | TONSL | 15791 |
| topoisomerase I binding, arginine/serine-rich, E3 | TOPORS | 15792 |
| ubiquitin protein ligase | | |
| thymocyte selection associated high mobility group | TOX | 15793 |
| box | | |
| TOX high mobility group box family member 2 | TOX2 | 15794 |
| TOX high mobility group box family member 3 | TOX3 | 15795 |
| TOX high mobility group box family member 4 | TOX4 | 15796 |
| tumor protein p53 | TP53 | 15797 |
| tumor protein p63 | TP63 | 15798 |
| tumor protein p73 | TP73 | 15799 |
| tetra-peptide repeat homeobox 1 | TPRX1 | 15800 |
| tetra-peptide repeat homeobox-like | TPRXL | 15801 |
| transcriptional regulating factor 1 | TRERF1 | 15802 |
| trichorhinophalangeal syndrome I | TRPS1 | 15803 |
| TSC22 domain family member 1 | TSC22D1 | 15804 |
| TSC22 domain family member 2 | TSC22D2 | 15805 |
| TSC22 domain family member 3 | TSC22D3 | 15806 |
| TSC22 domain family member 4 | TSC22D4 | 15807 |
| teashirt zinc finger homeobox 1 | TSHZ1 | 15808 |
| teashirt zinc finger homeobox 2 | TSHZ2 | 15809 |
| teashirt zinc finger homeobox 3 | TSHZ3 | 15810 |
| transcription termination factor, RNA polymerase I | TTF1 | 15811-15812 |
| transcription termination factor, RNA polymerase II | TTF2 | 15813-15814 |
| tubby bipartite transcription factor | TUB | 15815 |
| twist family bHLH transcription factor 1 | TWIST1 | 15816 |
| twist family bHLH transcription factor 2 | TWIST2 | 15817 |
| upstream binding protein 1 (LBP-1a) | UBP1 | 15818 |
| upstream binding transcription factor, RNA | UBTF | 15819 |
| polymerase I | | |
| upstream binding transcription factor, RNA | UBTFL1 | 15820 |
| polymerase I-like 1 | | |
| upstream binding transcription factor, RNA | UBTFL6 | 15821 |
| polymerase I-like 6 (pseudogene) | | |
| UNC homeobox | UNCX | 15822 |
| unkempt family zinc finger | UNK | 15823 |
| unkempt family like zinc finger | UNKL | 15824 |
| upstream transcription factor 1 | USF1 | 15825 |
| upstream transcription factor 2, c-fos interacting | USF2 | 15826 |
| upstream transcription factor family member 3 | USF3 | 15827 |
| undifferentiated embryonic cell transcription factor 1 | UTF1 | 15828 |
| ventral anterior homeobox 1 | VAX1 | 15829 |
| ventral anterior homeobox 2 | VAX2 | 15830 |
| vitamin D (1,25-dihydroxyvitamin D3) receptor | VDR | 15831 |
| VENT homeobox | VENTX | 15832 |
| vascular endothelial zinc finger 1 | VEZF1 | 15833 |
| visual system homeobox 1 | VSX1 | 15834 |
| visual system homeobox 2 | VSX2 | 15835 |
| WD repeat and HMG-box DNA binding protein 1 | WDHD1 | 15836 |
| Wolf-Hirschhorn syndrome candidate 1 | WHSC1 | 15837 |
| widely interspaced zinc finger motifs | WIZ | 15838 |
| Wilms tumor 1 | WT1 | 15839 |
| X-box binding protein 1 | XBP1 | 15840 |
| Y-box binding protein 1 | YBX1 | 15841 |
| Y-box binding protein 2 | YBX2 | 15842 |
| Y-box binding protein 3 | YBX3 | 15843 |
| YEATS domain containing 2 | YEATS2 | 15844 |
| YEATS domain containing 4 | YEATS4 | 15845 |
| YY1 transcription factor | YY1 | 15846 |
| YY2 transcription factor | YY2 | 15847 |
| zinc finger BED-type containing 1 | ZBED1 | 15848 |
| zinc finger BED-type containing 2 | ZBED2 | 15849 |
| zinc finger BED-type containing 3 | ZBED3 | 15850 |
| zinc finger BED-type containing 4 | ZBED4 | 15851 |
| zinc finger BED-type containing 5 | ZBED5 | 15852 |
| zinc finger, BED-type containing 6 | ZBED6 | 15853 |
| Z-DNA binding protein 1 | ZBP1 | 15854-15855 |
| zinc finger and BTB domain containing 1 | ZBTB1 | 15856 |
| zinc finger and BTB domain containing 10 | ZBTB10 | 15857 |
| zinc finger and BTB domain containing 11 | ZBTB11 | 15858 |
| zinc finger and BTB domain containing 12 | ZBTB12 | 15859 |
| zinc finger and BTB domain containing 14 | ZBTB14 | 15860 |
| zinc finger and BTB domain containing 16 | ZBTB16 | 15861 |
| zinc finger and BTB domain containing 17 | ZBTB17 | 15862 |
| zinc finger and BTB domain containing 18 | ZBTB18 | 15863 |
| zinc finger and BTB domain containing 2 | ZBTB2 | 15864 |
| zinc finger and BTB domain containing 20 | ZBTB20 | 15865 |
| zinc finger and BTB domain containing 21 | ZBTB21 | 15866 |
| zinc finger and BTB domain containing 22 | ZBTB22 | 15867 |
| zinc finger and BTB domain containing 24 | ZBTB24 | 15868 |
| zinc finger and BTB domain containing 25 | ZBTB25 | 15869 |
| zinc finger and BTB domain containing 26 | ZBTB26 | 15870 |
| zinc finger and BTB domain containing 3 | ZBTB3 | 15871 |
| zinc finger and BTB domain containing 32 | ZBTB32 | 15872 |
| zinc finger and BTB domain containing 33 | ZBTB33 | 15873 |
| zinc finger and BTB domain containing 34 | ZBTB34 | 15874 |
| zinc finger and BTB domain containing 37 | ZBTB37 | 15875 |
| zinc finger and BTB domain containing 38 | ZBTB38 | 15876 |
| zinc finger and BTB domain containing 39 | ZBTB39 | 15877 |
| zinc finger and BTB domain containing 4 | ZBTB4 | 15878 |
| zinc finger and BTB domain containing 40 | ZBTB40 | 15879 |
| zinc finger and BTB domain containing 41 | ZBTB41 | 15880 |
| zinc finger and BTB domain containing 42 | ZBTB42 | 15881 |
| zinc finger and BTB domain containing 43 | ZBTB43 | 15882 |
| zinc finger and BTB domain containing 44 | ZBTB44 | 15883 |
| zinc finger and BTB domain containing 45 | ZBTB45 | 15884 |
| zinc finger and BTB domain containing 46 | ZBTB46 | 15885 |
| zinc finger and BTB domain containing 47 | ZBTB47 | 15886 |
| zinc finger and BTB domain containing 48 | ZBTB48 | 15887 |
| zinc finger and BTB domain containing 49 | ZBTB49 | 15888 |
| zinc finger and BTB domain containing 5 | ZBTB5 | 15889 |
| zinc finger and BTB domain containing 6 | ZBTB6 | 15890 |
| zinc finger and BTB domain containing 7A | ZBTB7A | 15891 |
| zinc finger and BTB domain containing 7B | ZBTB7B | 15892 |
| zinc finger and BTB domain containing 7C | ZBTB7C | 15893 |
| zinc finger and BTB domain containing 8A | ZBTB8A | 15894 |
| zinc finger and BTB domain containing 9 | ZBTB9 | 15895 |
| zinc finger CCCH-type containing 10 | ZC3H10 | 15896 |
| zinc finger CCCH-type containing 11A | ZC3H11A | 15897 |
| zinc finger CCCH-type containing 12A | ZC3H12A | 15898 |
| zinc finger CCCH-type containing 12B | ZC3H12B | 15899 |
| zinc finger CCCH-type containing 13 | ZC3H13 | 15900 |
| zinc finger CCCH-type containing 14 | ZC3H14 | 15901 |
| zinc finger CCCH-type containing 15 | ZC3H15 | 15902 |
| zinc finger CCCH-type containing 18 | ZC3H18 | 15903 |
| zinc finger CCCH-type containing 3 | ZC3H3 | 15904 |
| zinc finger CCCH-type containing 4 | ZC3H4 | 15905 |
| zinc finger CCCH-type containing 6 | ZC3H6 | 15906 |
| zinc finger CCCH-type containing 7A | ZC3H7A | 15907 |
| zinc finger CCCH-type containing 7B | ZC3H7B | 15908 |
| zinc finger CCCH-type containing 8 | ZC3H8 | 15909 |
| zinc finger CCHC-type containing 11 | ZCCHC11 | 15910 |
| zinc finger CCHC-type containing 6 | ZCCHC6 | 15911 |
| zinc finger E-box binding homeobox 1 | ZEB1 | 15912 |
| zinc finger E-box binding homeobox 2 | ZEB2 | 15913 |
| zinc finger and AT-hook domain containing | ZFAT | 15914 |
| zinc finger homeobox 2 | ZFHX2 | 15915 |
| zinc finger homeobox 3 | ZFHX3 | 15916 |
| zinc finger homeobox 4 | ZFHX4 | 15917 |
| ZFP1 zinc finger protein | ZFP1 | 15918 |
| ZFP14 zinc finger protein | ZFP14 | 15919 |
| ZFP2 zinc finger protein | ZFP2 | 15920 |
| ZFP28 zinc finger protein | ZFP28 | 15921 |
| ZFP3 zinc finger protein | ZFP3 | 15922 |
| ZFP30 zinc finger protein | ZFP30 | 15923 |
| ZFP36 ring finger protein-like 1 | ZFP36L1 | 15924 |
| ZFP36 ring finger protein-like 2 | ZFP36L2 | 15925 |
| ZFP37 zinc finger protein | ZFP37 | 15926 |
| ZFP41 zinc finger protein | ZFP41 | 15927 |
| ZFP42 zinc finger protein | ZFP42 | 15928 |
| ZFP57 zinc finger protein | ZFP57 | 15929 |
| ZFP62 zinc finger protein | ZFP62 | 15930 |
| ZFP64 zinc finger protein | ZFP64 | 15931 |
| ZFP69 zinc finger protein | ZFP69 | 15932-15933 |
| ZFP69 zinc finger protein B | ZFP69B | 15934 |
| ZFP82 zinc finger protein | ZFP82 | 15935 |
| ZFP90 zinc finger protein | ZFP90 | 15936 |
| ZFP91 zinc finger protein | ZFP91 | 15937 |
| ZFP92 zinc finger protein | ZFP92 | 15938 |
| zinc finger protein, FOG family member 1 | ZFPM1 | 15939 |
| zinc finger protein, FOG family member 2 | ZFPM2 | 15940 |
| zinc finger protein, X-linked | ZFX | 15941 |
| zinc finger protein, Y-linked | ZFY | 15942 |
| zinc finger, FYVE domain containing 26 | ZFYVE26 | 15943 |
| zinc finger, GATA-like protein 1 | ZGLP1 | 15944 |
| zinc finger CCCH-type and G-patch domain | ZGPAT | 15945 |
| containing | | |
| zinc fingers and homeoboxes 1 | ZHX1 | 15946 |
| zinc fingers and homeoboxes 2 | ZHX2 | 15947 |
| zinc fingers and homeoboxes 3 | ZHX3 | 15948 |
| Zic family member 1 | ZIC1 | 15949 |
| Zic family member 2 | ZIC2 | 15950 |
| Zic family member 3 | ZIC3 | 15951 |
| Zic family member 4 | ZIC4 | 15952 |
| Zic family member 5 | ZIC5 | 15953 |
| zinc finger protein interacting with K protein 1 | ZIK1 | 15954 |
| zinc finger, imprinted 2 | ZIM2 | 15955 |
| zinc finger, imprinted 3 | ZIM3 | 15956 |
| zinc finger with KRAB and SCAN domains 1 | ZKSCAN1 | 15957 |
| zinc finger with KRAB and SCAN domains 2 | ZKSCAN2 | 15958 |
| zinc finger with KRAB and SCAN domains 3 | ZKSCAN3 | 15959 |
| zinc finger with KRAB and SCAN domains 4 | ZKSCAN4 | 15960 |
| zinc finger with KRAB and SCAN domains 5 | ZKSCAN5 | 15961 |
| zinc finger with KRAB and SCAN domains 7 | ZKSCAN7 | 15962 |
| zinc finger with KRAB and SCAN domains 8 | ZKSCAN8 | 15963 |
| zinc finger matrin-type 1 | ZMAT1 | 15964 |
| zinc finger matrin-type 2 | ZMAT2 | 15965 |
| zinc finger matrin-type 3 | ZMAT3 | 15966 |
| zinc finger matrin-type 4 | ZMAT4 | 15967 |
| zinc finger matrin-type 5 | ZMAT5 | 15968 |
| zinc finger protein 10 | ZNF10 | 15969 |
| zinc finger protein 100 | ZNF100 | 15970 |
| zinc finger protein 101 | ZNF101 | 15971 |
| zinc finger protein 106 | ZNF106 | 15972 |
| zinc finger protein 107 | ZNF107 | 15973 |
| zinc finger protein 112 | ZNF112 | 15974 |
| zinc finger protein 114 | ZNF114 | 15975 |
| zinc finger protein 117 | ZNF117 | 15976 |
| zinc finger protein 12 | ZNF12 | 15977 |
| zinc finger protein 121 | ZNF121 | 15978 |
| zinc finger protein 124 | ZNF124 | 15979 |
| zinc finger protein 131 | ZNF131 | 15980 |
| zinc finger protein 132 | ZNF132 | 15981 |
| zinc finger protein 133 | ZNF133 | 15982 |
| zinc finger protein 134 | ZNF134 | 15983 |
| zinc finger protein 135 | ZNF135 | 15984 |
| zinc finger protein 136 | ZNF136 | 15985 |
| zinc finger protein 137, pseudogene | ZNF137P | 15986 |
| zinc finger protein 138 | ZNF138 | 15987 |
| zinc finger protein 14 | ZNF14 | 15988 |
| zinc finger protein 140 | ZNF140 | 15989 |
| zinc finger protein 141 | ZNF141 | 15990 |
| zinc finger protein 142 | ZNF142 | 15991 |
| zinc finger protein 143 | ZNF143 | 15992 |
| zinc finger protein 146 | ZNF146 | 15993 |
| zinc finger protein 148 | ZNF148 | 15994 |
| zinc finger protein 154 | ZNF154 | 15995 |
| zinc finger protein 155 | ZNF155 | 15996 |
| zinc finger protein 157 | ZNF157 | 15997 |
| zinc finger protein 16 | ZNF16 | 15998 |
| zinc finger protein 160 | ZNF160 | 15999 |
| zinc finger protein 165 | ZNF165 | 16000 |
| zinc finger protein 169 | ZNF169 | 16001 |
| zinc finger protein 17 | ZNF17 | 16002 |
| zinc finger protein 174 | ZNF174 | 16003 |
| zinc finger protein 175 | ZNF175 | 16004 |
| zinc finger protein 18 | ZNF18 | 16005 |
| zinc finger protein 180 | ZNF180 | 16006 |
| zinc finger protein 181 | ZNF181 | 16007 |
| zinc finger protein 182 | ZNF182 | 16008 |
| zinc finger protein 184 | ZNF184 | 16009 |
| zinc finger protein 189 | ZNF189 | 16010 |
| zinc finger protein 19 | ZNF19 | 16011 |
| zinc finger protein 195 | ZNF195 | 16012 |
| zinc finger protein 197 | ZNF197 | 16013 |
| zinc finger protein 2 | ZNF2 | 16014 |
| zinc finger protein 20 | ZNF20 | 16015-16016 |
| zinc finger protein 200 | ZNF200 | 16017 |
| zinc finger protein 202 | ZNF202 | 16018 |
| zinc finger protein 205 | ZNF205 | 16019 |
| zinc finger protein 207 | ZNF207 | 16020 |
| zinc finger protein 208 | ZNF208 | 16021 |
| zinc finger protein 211 | ZNF211 | 16022 |
| zinc finger protein 212 | ZNF212 | 16023 |
| zinc finger protein 213 | ZNF213 | 16024 |
| zinc finger protein 214 | ZNF214 | 16025 |
| zinc finger protein 215 | ZNF215 | 16026 |
| zinc finger protein 217 | ZNF217 | 16027 |
| zinc finger protein 219 | ZNF219 | 16028 |
| zinc finger protein 22 | ZNF22 | 16029 |
| zinc finger protein 221 | ZNF221 | 16030 |
| zinc finger protein 223 | ZNF223 | 16031 |
| zinc finger protein 224 | ZNF224 | 16032 |
| zinc finger protein 225 | ZNF225 | 16033-16034 |
| zinc finger protein 226 | ZNF226 | 16035 |
| zinc finger protein 227 | ZNF227 | 16036 |
| zinc finger protein 229 | ZNF229 | 16037 |
| zinc finger protein 23 | ZNF23 | 16038 |
| zinc finger protein 230 | ZNF230 | 16039-16040 |
| zinc finger protein 232 | ZNF232 | 16041 |
| zinc finger protein 233 | ZNF233 | 16042-16043 |
| zinc finger protein 234 | ZNF234 | 16044 |
| zinc finger protein 235 | ZNF235 | 16045 |
| zinc finger protein 236 | ZNF236 | 16046 |
| zinc finger protein 239 | ZNF239 | 16047 |
| zinc finger protein 24 | ZNF24 | 16048 |
| zinc finger protein 248 | ZNF248 | 16049 |
| zinc finger protein 25 | ZNF25 | 16050 |
| zinc finger protein 250 | ZNF250 | 16051 |
| zinc finger protein 251 | ZNF251 | 16052 |
| zinc finger protein 252, pseudogene | ZNF252P | 16053 |
| zinc finger protein 253 | ZNF253 | 16054 |
| zinc finger protein 254 | ZNF254 | 16055 |
| zinc finger protein 256 | ZNF256 | 16056 |
| zinc finger protein 257 | ZNF257 | 16057 |
| zinc finger protein 26 | ZNF26 | 16058 |
| zinc finger protein 260 | ZNF260 | 16059 |
| zinc finger protein 263 | ZNF263 | 16060 |
| zinc finger protein 264 | ZNF264 | 16061 |
| zinc finger protein 266 | ZNF266 | 16062 |
| zinc finger protein 267 | ZNF267 | 16063 |
| zinc finger protein 268 | ZNF268 | 16064 |
| zinc finger protein 273 | ZNF273 | 16065 |
| zinc finger protein 274 | ZNF274 | 16066 |
| zinc finger protein 275 | ZNF275 | 16067 |
| zinc finger protein 276 | ZNF276 | 16068 |
| zinc finger protein 277 | ZNF277 | 16069 |
| zinc finger protein 28 | ZNF28 | 16070 |
| zinc finger protein 280A | ZNF280A | 16071 |
| zinc finger protein 280B | ZNF280B | 16072 |
| zinc finger protein 280C | ZNF280C | 16073 |
| zinc finger protein 280D | ZNF280D | 16074 |
| zinc finger protein 281 | ZNF281 | 16075 |
| zinc finger protein 282 | ZNF282 | 16076 |
| zinc finger protein 283 | ZNF283 | 16077 |
| zinc finger protein 284 | ZNF284 | 16078 |
| zinc finger protein 285 | ZNF285 | 16079 |
| zinc finger protein 286A | ZNF286A | 16080 |
| zinc finger protein 286B | ZNF286B | 16081 |
| zinc finger protein 287 | ZNF287 | 16082 |
| zinc finger protein 292 | ZNF292 | 16083 |
| zinc finger protein 296 | ZNF296 | 16084 |
| zinc finger protein 3 | ZNF3 | 16085 |
| zinc finger protein 30 | ZNF30 | 16086 |
| zinc finger protein 300 | ZNF300 | 16087 |
| zinc finger protein 302 | ZNF302 | 16088 |
| zinc finger protein 304 | ZNF304 | 16089 |
| zinc finger protein 311 | ZNF311 | 16090 |
| zinc finger protein 316 | ZNF316 | 16091 |
| zinc finger protein 317 | ZNF317 | 16092 |
| zinc finger protein 318 | ZNF318 | 16093 |
| zinc finger protein 319 | ZNF319 | 16094 |
| zinc finger protein 32 | ZNF32 | 16095 |
| zinc finger protein 320 | ZNF320 | 16096 |
| zinc finger protein 322 | ZNF322 | 16097 |
| zinc finger protein 324 | ZNF324 | 16098 |
| zinc finger protein 324B | ZNF324B | 16099 |
| zinc finger protein 326 | ZNF326 | 16100 |
| zinc finger protein 329 | ZNF329 | 16101 |
| zinc finger protein 331 | ZNF331 | 16102 |
| zinc finger protein 333 | ZNF333 | 16103 |
| zinc finger protein 334 | ZNF334 | 16104 |
| zinc finger protein 335 | ZNF335 | 16105 |
| zinc finger protein 337 | ZNF337 | 16106 |
| zinc finger protein 33A | ZNF33A | 16107 |
| zinc finger protein 33B | ZNF33B | 16108 |
| zinc finger protein 34 | ZNF34 | 16109 |
| zinc finger protein 341 | ZNF341 | 16110 |
| zinc finger protein 343 | ZNF343 | 16111 |
| zinc finger protein 345 | ZNF345 | 16112 |
| zinc finger protein 346 | ZNF346 | 16113 |
| zinc finger protein 347 | ZNF347 | 16114 |
| zinc finger protein 35 | ZNF35 | 16115 |
| zinc finger protein 350 | ZNF350 | 16116 |
| zinc finger protein 354A | ZNF354A | 16117 |
| zinc finger protein 354B | ZNF354B | 16118 |
| zinc finger protein 354C | ZNF354C | 16119 |
| zinc finger protein 355, pseudogene | ZNF355P | 16120 |
| zinc finger protein 358 | ZNF358 | 16121 |
| zinc finger protein 362 | ZNF362 | 16122 |
| zinc finger protein 365 | ZNF365 | 16123-16124 |
| zinc finger protein 366 | ZNF366 | 16125 |
| zinc finger protein 367 | ZNF367 | 16126 |
| zinc finger protein 37A | ZNF37A | 16127 |
| zinc finger protein 382 | ZNF382 | 16128 |
| zinc finger protein 383 | ZNF383 | 16129 |
| zinc finger protein 384 | ZNF384 | 16130 |
| zinc finger protein 385A | ZNF385A | 16131 |
| zinc finger protein 385B | ZNF385B | 16132 |
| zinc finger protein 385C | ZNF385C | 16133 |
| zinc finger protein 385D | ZNF385D | 16134 |
| zinc finger protein 391 | ZNF391 | 16135 |
| zinc finger protein 394 | ZNF394 | 16136 |
| zinc finger protein 395 | ZNF395 | 16137 |
| zinc finger protein 396 | ZNF396 | 16138 |
| zinc finger protein 397 | ZNF397 | 16139 |
| zinc finger protein 398 | ZNF398 | 16140 |
| zinc finger protein 404 | ZNF404 | 16141 |
| zinc finger protein 407 | ZNF407 | 16142 |
| zinc finger protein 408 | ZNF408 | 16143 |
| zinc finger protein 41 | ZNF41 | 16144 |
| zinc finger protein 410 | ZNF410 | 16145 |
| zinc finger protein 414 | ZNF414 | 16146 |
| zinc finger protein 415 | ZNF415 | 16147 |
| zinc finger protein 416 | ZNF416 | 16148 |
| zinc finger protein 417 | ZNF417 | 16149 |
| zinc finger protein 418 | ZNF418 | 16150 |
| zinc finger protein 419 | ZNF419 | 16151 |
| zinc finger protein 420 | ZNF420 | 16152 |
| zinc finger protein 423 | ZNF423 | 16153 |
| zinc finger protein 425 | ZNF425 | 16154 |
| zinc finger protein 426 | ZNF426 | 16155 |
| zinc finger protein 428 | ZNF428 | 16156 |
| zinc finger protein 429 | ZNF429 | 16157 |
| zinc finger protein 43 | ZNF43 | 16158 |
| zinc finger protein 430 | ZNF430 | 16159 |
| zinc finger protein 431 | ZNF431 | 16160 |
| zinc finger protein 432 | ZNF432 | 16161 |
| zinc finger protein 433 | ZNF433 | 16162 |
| zinc finger protein 436 | ZNF436 | 16163 |
| zinc finger protein 438 | ZNF438 | 16164 |
| zinc finger protein 439 | ZNF439 | 16165 |
| zinc finger protein 44 | ZNF44 | 16166 |
| zinc finger protein 440 | ZNF440 | 16167 |
| zinc finger protein 441 | ZNF441 | 16168 |
| zinc finger protein 442 | ZNF442 | 16169 |
| zinc finger protein 443 | ZNF443 | 16170 |
| zinc finger protein 444 | ZNF444 | 16171 |
| zinc finger protein 445 | ZNF445 | 16172 |
| zinc finger protein 446 | ZNF446 | 16173 |
| zinc finger protein 449 | ZNF449 | 16174 |
| zinc finger protein 45 | ZNF45 | 16175 |
| zinc finger protein 451 | ZNF451 | 16176 |
| zinc finger protein 454 | ZNF454 | 16177 |
| zinc finger protein 460 | ZNF460 | 16178 |
| zinc finger protein 461 | ZNF461 | 16179 |
| zinc finger protein 462 | ZNF462 | 16180 |
| zinc finger protein 467 | ZNF467 | 16181 |
| zinc finger protein 468 | ZNF468 | 16182 |
| zinc finger protein 469 | ZNF469 | 16183 |
| zinc finger protein 470 | ZNF470 | 16184 |
| zinc finger protein 471 | ZNF471 | 16185 |
| zinc finger protein 473 | ZNF473 | 16186 |
| zinc finger protein 474 | ZNF474 | 16187-16188 |
| zinc finger protein 479 | ZNF479 | 16189 |
| zinc finger protein 48 | ZNF48 | 16190 |
| zinc finger protein 480 | ZNF480 | 16191 |
| zinc finger protein 483 | ZNF483 | 16192 |
| zinc finger protein 484 | ZNF484 | 16193 |
| zinc finger protein 485 | ZNF485 | 16194 |
| zinc finger protein 486 | ZNF486 | 16195 |
| zinc finger protein 487 | ZNF487 | 16196 |
| zinc finger protein 488 | ZNF488 | 16197 |
| zinc finger protein 490 | ZNF490 | 16198 |
| zinc finger protein 491 | ZNF491 | 16199 |
| zinc finger protein 492 | ZNF492 | 16200 |
| zinc finger protein 493 | ZNF493 | 16201 |
| zinc finger protein 496 | ZNF496 | 16202 |
| zinc finger protein 497 | ZNF497 | 16203 |
| zinc finger protein 500 | ZNF500 | 16204 |
| zinc finger protein 501 | ZNF501 | 16205 |
| zinc finger protein 502 | ZNF502 | 16206 |
| zinc finger protein 503 | ZNF503 | 16207 |
| zinc finger protein 506 | ZNF506 | 16208 |
| zinc finger protein 507 | ZNF507 | 16209 |
| zinc finger protein 510 | ZNF510 | 16210 |
| zinc finger protein 511 | ZNF511 | 16211 |
| zinc finger protein 512 | ZNF512 | 16212 |
| zinc finger protein 512B | ZNF512B | 16213 |
| zinc finger protein 513 | ZNF513 | 16214 |
| zinc finger protein 514 | ZNF514 | 16215 |
| zinc finger protein 516 | ZNF516 | 16216 |
| zinc finger protein 517 | ZNF517 | 16217 |
| zinc finger protein 518A | ZNF518A | 16218 |
| zinc finger protein 518B | ZNF518B | 16219 |
| zinc finger protein 519 | ZNF519 | 16220 |
| zinc finger protein 521 | ZNF521 | 16221 |
| zinc finger protein 524 | ZNF524 | 16222 |
| zinc finger protein 526 | ZNF526 | 16223 |
| zinc finger protein 527 | ZNF527 | 16224 |
| zinc finger protein 528 | ZNF528 | 16225 |
| zinc finger protein 529 | ZNF529 | 16226 |
| zinc finger protein 530 | ZNF530 | 16227 |
| zinc finger protein 532 | ZNF532 | 16228 |
| zinc finger protein 534 | ZNF534 | 16229 |
| zinc finger protein 536 | ZNF536 | 16230 |
| zinc finger protein 540 | ZNF540 | 16231 |
| zinc finger protein 541 | ZNF541 | 16232 |
| zinc finger protein 542, pseudogene | ZNF542P | 16233 |
| zinc finger protein 543 | ZNF543 | 16234 |
| zinc finger protein 544 | ZNF544 | 16235 |
| zinc finger protein 546 | ZNF546 | 16236 |
| zinc finger protein 547 | ZNF547 | 16237 |
| zinc finger protein 548 | ZNF548 | 16238 |
| zinc finger protein 549 | ZNF549 | 16239 |
| zinc finger protein 550 | ZNF550 | 16240 |
| zinc finger protein 552 | ZNF552 | 16241 |
| zinc finger protein 554 | ZNF554 | 16242 |
| zinc finger protein 555 | ZNF555 | 16243 |
| zinc finger protein 556 | ZNF556 | 16244 |
| zinc finger protein 557 | ZNF557 | 16245 |
| zinc finger protein 558 | ZNF558 | 16246 |
| zinc finger protein 559 | ZNF559 | 16247 |
| zinc finger protein 56 | ZNF56 | 16248 |
| zinc finger protein 560 | ZNF560 | 16249 |
| zinc finger protein 561 | ZNF561 | 16250 |
| zinc finger protein 562 | ZNF562 | 16251 |
| zinc finger protein 563 | ZNF563 | 16252 |
| zinc finger protein 564 | ZNF564 | 16253 |
| zinc finger protein 565 | ZNF565 | 16254 |
| zinc finger protein 566 | ZNF566 | 16255 |
| zinc finger protein 567 | ZNF567 | 16256 |
| zinc finger protein 568 | ZNF568 | 16257 |
| zinc finger protein 569 | ZNF569 | 16258 |
| zinc finger protein 57 | ZNF57 | 16259 |
| zinc finger protein 570 | ZNF570 | 16260 |
| zinc finger protein 571 | ZNF571 | 16261 |
| zinc finger protein 572 | ZNF572 | 16262 |
| zinc finger protein 573 | ZNF573 | 16263 |
| zinc finger protein 574 | ZNF574 | 16264 |
| zinc finger protein 575 | ZNF575 | 16265 |
| zinc finger protein 576 | ZNF576 | 16266-16267 |
| zinc finger protein 577 | ZNF577 | 16268 |
| zinc finger protein 578 | ZNF578 | 16269 |
| zinc finger protein 579 | ZNF579 | 16270 |
| zinc finger protein 580 | ZNF580 | 16271 |
| zinc finger protein 581 | ZNF581 | 16272 |
| zinc finger protein 582 | ZNF582 | 16273 |
| zinc finger protein 583 | ZNF583 | 16274 |
| zinc finger protein 584 | ZNF584 | 16275 |
| zinc finger protein 585A | ZNF585A | 16276 |
| zinc finger protein 585B | ZNF585B | 16277 |
| zinc finger protein 586 | ZNF586 | 16278 |
| zinc finger protein 587 | ZNF587 | 16279 |
| zinc finger protein 589 | ZNF589 | 16280 |
| zinc finger protein 592 | ZNF592 | 16281 |
| zinc finger protein 593 | ZNF593 | 16282 |
| zinc finger protein 594 | ZNF594 | 16283 |
| zinc finger protein 595 | ZNF595 | 16284 |
| zinc finger protein 596 | ZNF596 | 16285 |
| zinc finger protein 597 | ZNF597 | 16286 |
| zinc finger protein 598 | ZNF598 | 16287 |
| zinc finger protein 599 | ZNF599 | 16288 |
| zinc finger protein 600 | ZNF600 | 16289 |
| zinc finger protein 605 | ZNF605 | 16290 |
| zinc finger protein 606 | ZNF606 | 16291 |
| zinc finger protein 607 | ZNF607 | 16292 |
| zinc finger protein 608 | ZNF608 | 16293 |
| zinc finger protein 609 | ZNF609 | 16294 |
| zinc finger protein 610 | ZNF610 | 16295 |
| zinc finger protein 611 | ZNF611 | 16296 |
| zinc finger protein 613 | ZNF613 | 16297 |
| zinc finger protein 614 | ZNF614 | 16298 |
| zinc finger protein 615 | ZNF615 | 16299 |
| zinc finger protein 616 | ZNF616 | 16300 |
| zinc finger protein 618 | ZNF618 | 16301 |
| zinc finger protein 619 | ZNF619 | 16302 |
| zinc finger protein 620 | ZNF620 | 16303 |
| zinc finger protein 621 | ZNF621 | 16304 |
| zinc finger protein 622 | ZNF622 | 16305 |
| zinc finger protein 623 | ZNF623 | 16306 |
| zinc finger protein 624 | ZNF624 | 16307 |
| zinc finger protein 625 | ZNF625 | 16308 |
| zinc finger protein 626 | ZNF626 | 16309 |
| zinc finger protein 627 | ZNF627 | 16310 |
| zinc finger protein 628 | ZNF628 | 16311 |
| zinc finger protein 629 | ZNF629 | 16312 |
| zinc finger protein 639 | ZNF639 | 16313 |
| zinc finger protein 641 | ZNF641 | 16314 |
| zinc finger protein 644 | ZNF644 | 16315 |
| zinc finger protein 645 | ZNF645 | 16316 |
| zinc finger protein 646 | ZNF646 | 16317 |
| zinc finger protein 648 | ZNF648 | 16318 |
| zinc finger protein 649 | ZNF649 | 16319 |
| zinc finger protein 652 | ZNF652 | 16320 |
| zinc finger protein 653 | ZNF653 | 16321 |
| zinc finger protein 654 | ZNF654 | 16322 |
| zinc finger protein 655 | ZNF655 | 16323 |
| zinc finger protein 658 | ZNF658 | 16324 |
| zinc finger protein 658B (pseudogene) | ZNF658B | 16325 |
| zinc finger protein 66 | ZNF66 | 16326 |
| zinc finger protein 660 | ZNF660 | 16327 |
| zinc finger protein 662 | ZNF662 | 16328 |
| zinc finger protein 664 | ZNF664 | 16329 |
| zinc finger protein 665 | ZNF665 | 16330 |
| zinc finger protein 667 | ZNF667 | 16331 |
| zinc finger protein 668 | ZNF668 | 16332 |
| zinc finger protein 669 | ZNF669 | 16333 |
| zinc finger protein 670 | ZNF670 | 16334 |
| zinc finger protein 671 | ZNF671 | 16335 |
| zinc finger protein 672 | ZNF672 | 16336 |
| zinc finger protein 674 | ZNF674 | 16337 |
| zinc finger protein 675 | ZNF675 | 16338 |
| zinc finger protein 676 | ZNF676 | 16339 |
| zinc finger protein 677 | ZNF677 | 16340 |
| zinc finger protein 678 | ZNF678 | 16341 |
| zinc finger protein 679 | ZNF679 | 16342 |
| zinc finger protein 680 | ZNF680 | 16343 |
| zinc finger protein 681 | ZNF681 | 16344 |
| zinc finger protein 682 | ZNF682 | 16345 |
| zinc finger protein 683 | ZNF683 | 16346 |
| zinc finger protein 684 | ZNF684 | 16347 |
| zinc finger protein 687 | ZNF687 | 16348 |
| zinc finger protein 688 | ZNF688 | 16349 |
| zinc finger protein 689 | ZNF689 | 16350 |
| zinc finger protein 69 | ZNF69 | 16351 |
| zinc finger protein 691 | ZNF691 | 16352 |
| zinc finger protein 692 | ZNF692 | 16353 |
| zinc finger protein 695 | ZNF695 | 16354 |
| zinc finger protein 696 | ZNF696 | 16355 |
| zinc finger protein 697 | ZNF697 | 16356 |
| zinc finger protein 699 | ZNF699 | 16357 |
| zinc finger protein 7 | ZNF7 | 16358 |
| zinc finger protein 70 | ZNF70 | 16359 |
| zinc finger protein 701 | ZNF701 | 16360 |
| zinc finger protein 702, pseudogene | ZNF702P | 16361 |
| zinc finger protein 703 | ZNF703 | 16362 |
| zinc finger protein 704 | ZNF704 | 16363 |
| zinc finger protein 705A | ZNF705A | 16364 |
| zinc finger protein 705D | ZNF705D | 16365 |
| zinc finger protein 705E | ZNF705E | 16366 |
| zinc finger protein 705G | ZNF705G | 16367 |
| zinc finger protein 706 | ZNF706 | 16368 |
| zinc finger protein 707 | ZNF707 | 16369 |
| zinc finger protein 708 | ZNF708 | 16370 |
| zinc finger protein 709 | ZNF709 | 16371 |
| zinc finger protein 71 | ZNF71 | 16372 |
| zinc finger protein 710 | ZNF710 | 16373 |
| zinc finger protein 711 | ZNF711 | 16374 |
| zinc finger protein 713 | ZNF713 | 16375 |
| zinc finger protein 714 | ZNF714 | 16376 |
| zinc finger protein 716 | ZNF716 | 16377 |
| zinc finger protein 717 | ZNF717 | 16378 |
| zinc finger protein 718 | ZNF718 | 16379 |
| zinc finger protein 720 | ZNF720 | 16380 |
| zinc finger protein 721 | ZNF721 | 16381 |
| zinc finger protein 724, pseudogene | ZNF724P | 16382 |
| zinc finger protein 726 | ZNF726 | 16383 |
| zinc finger protein 727 | ZNF727 | 16384 |
| zinc finger protein 729 | ZNF729 | 16385 |
| zinc finger protein 730 | ZNF730 | 16386 |
| zinc finger protein 732 | ZNF732 | 16387 |
| zinc finger protein 735 | ZNF735 | 16388 |
| zinc finger protein 737 | ZNF737 | 16389 |
| zinc finger protein 74 | ZNF74 | 16390 |
| zinc finger protein 740 | ZNF740 | 16391 |
| zinc finger protein 746 | ZNF746 | 16392 |
| zinc finger protein 747 | ZNF747 | 16393 |
| zinc finger protein 749 | ZNF749 | 16394 |
| zinc finger protein 750 | ZNF750 | 16395 |
| zinc finger protein 75a | ZNF75A | 16396 |
| zinc finger protein 75D | ZNF75D | 16397 |
| zinc finger protein 76 | ZNF76 | 16398 |
| zinc finger protein 761 | ZNF761 | 16399 |
| zinc finger protein 763 | ZNF763 | 16400 |
| zinc finger protein 764 | ZNF764 | 16401 |
| zinc finger protein 765 | ZNF765 | 16402 |
| zinc finger protein 766 | ZNF766 | 16403 |
| zinc finger protein 768 | ZNF768 | 16404 |
| zinc finger protein 77 | ZNF77 | 16405 |
| zinc finger protein 770 | ZNF770 | 16406 |
| zinc finger protein 771 | ZNF771 | 16407 |
| zinc finger protein 772 | ZNF772 | 16408 |
| zinc finger protein 773 | ZNF773 | 16409 |
| zinc finger protein 774 | ZNF774 | 16410 |
| zinc finger protein 775 | ZNF775 | 16411 |
| zinc finger protein 776 | ZNF776 | 16412 |
| zinc finger protein 777 | ZNF777 | 16413 |
| zinc finger protein 778 | ZNF778 | 16414 |
| zinc finger protein 780A | ZNF780A | 16415 |
| zinc finger protein 780B | ZNF780B | 16416 |
| zinc finger protein 781 | ZNF781 | 16417 |
| zinc finger protein 782 | ZNF782 | 16418 |
| zinc finger family member 783 | ZNF783 | 16419 |
| zinc finger protein 784 | ZNF784 | 16420 |
| zinc finger protein 785 | ZNF785 | 16421 |
| zinc finger protein 786 | ZNF786 | 16422 |
| zinc finger protein 787 | ZNF787 | 16423 |
| zinc finger family member 788 | ZNF788 | 16424 |
| zinc finger protein 789 | ZNF789 | 16425 |
| zinc finger protein 79 | ZNF79 | 16426 |
| zinc finger protein 790 | ZNF790 | 16427 |
| zinc finger protein 791 | ZNF791 | 16428 |
| zinc finger protein 792 | ZNF792 | 16429 |
| zinc finger protein 793 | ZNF793 | 16430 |
| zinc finger protein 799 | ZNF799 | 16431 |
| zinc finger protein 8 | ZNF8 | 16432 |
| zinc finger protein 80 | ZNF80 | 16433 |
| zinc finger protein 800 | ZNF800 | 16434 |
| zinc finger protein 804A | ZNF804A | 16435 |
| zinc finger protein 804B | ZNF804B | 16436 |
| zinc finger protein 805 | ZNF805 | 16437 |
| zinc finger protein 806 | ZNF806 | 16438 |
| zinc finger protein 808 | ZNF808 | 16439 |
| zinc finger protein 81 | ZNF81 | 16440 |
| zinc finger protein 813 | ZNF813 | 16441 |
| zinc finger protein 814 | ZNF814 | 16442 |
| zinc finger protein 816 | ZNF816 | 16443 |
| zinc finger protein 821 | ZNF821 | 16444 |
| zinc finger protein 823 | ZNF823 | 16445 |
| zinc finger protein 827 | ZNF827 | 16446 |
| zinc finger protein 829 | ZNF829 | 16447 |
| zinc finger protein 83 | ZNF83 | 16448 |
| zinc finger protein 830 | ZNF830 | 16449 |
| zinc finger protein 831 | ZNF831 | 16450 |
| zinc finger protein 833, pseudogene | ZNF833P | 16451 |
| zinc finger protein 835 | ZNF835 | 16452 |
| zinc finger protein 836 | ZNF836 | 16453 |
| zinc finger protein 837 | ZNF837 | 16454 |
| zinc finger protein 839 | ZNF839 | 16455 |
| zinc finger protein 84 | ZNF84 | 16456 |
| zinc finger protein 840, pseudogene | ZNF840P | 16457 |
| zinc finger protein 841 | ZNF841 | 16458 |
| zinc finger protein 843 | ZNF843 | 16459 |
| zinc finger protein 844 | ZNF844 | 16460 |
| zinc finger protein 845 | ZNF845 | 16461 |
| zinc finger protein 846 | ZNF846 | 16462 |
| zinc finger protein 85 | ZNF85 | 16463 |
| zinc finger protein 853 | ZNF853 | 16464 |
| zinc finger protein 860 | ZNF860 | 16465 |
| zinc finger protein 876, pseudogene | ZNF876P | 16466 |
| zinc finger protein 878 | ZNF878 | 16467 |
| zinc finger protein 879 | ZNF879 | 16468 |
| zinc finger protein 880 | ZNF880 | 16469 |
| zinc finger protein 891 | ZNF891 | 16470 |
| zinc finger protein 90 | ZNF90 | 16471 |
| zinc finger protein 91 | ZNF91 | 16472 |
| zinc finger protein 92 | ZNF92 | 16473 |
| zinc finger protein 93 | ZNF93 | 16474 |
| zinc finger protein 98 | ZNF98 | 16475 |
| zinc finger protein 99 | ZNF99 | 16476 |
| zinc finger, NFX1-type containing 1 | ZNFX1 | 16477 |
| zinc finger and SCAN domain containing 1 | ZSCAN1 | 16478 |
| zinc finger and SCAN domain containing 10 | ZSCAN10 | 16479 |
| zinc finger and SCAN domain containing 12 | ZSCAN12 | 16480 |
| zinc finger and SCAN domain containing 16 | ZSCAN16 | 16481 |
| zinc finger and SCAN domain containing 18 | ZSCAN18 | 16482 |
| zinc finger and SCAN domain containing 2 | ZSCAN2 | 16483 |
| zinc finger and SCAN domain containing 20 | ZSCAN20 | 16484 |
| zinc finger and SCAN domain containing 21 | ZSCAN21 | 16485 |
| zinc finger and SCAN domain containing 22 | ZSCAN22 | 16486 |
| zinc finger and SCAN domain containing 23 | ZSCAN23 | 16487 |
| zinc finger and SCAN domain containing 25 | ZSCAN25 | 16488 |
| zinc finger and SCAN domain containing 26 | ZSCAN26 | 16489 |
| zinc finger and SCAN domain containing 29 | ZSCAN29 | 16490 |
| zinc finger and SCAN domain containing 30 | ZSCAN30 | 16491 |
| zinc finger and SCAN domain containing 31 | ZSCAN31 | 16492 |
| zinc finger and SCAN domain containing 32 | ZSCAN32 | 16493 |
| zinc finger and SCAN domain containing 4 | ZSCAN4 | 16494 |
| zinc finger and SCAN domain containing 5A | ZSCAN5A | 16495 |
| zinc finger and SCAN domain containing 5B | ZSCAN5B | 16496 |
| zinc finger and SCAN domain containing 5C, | ZSCAN5CP | 16497 |
| pseudogene | | |
| zinc finger and SCAN domain containing 9 | ZSCAN9 | 16498 |
| zinc finger with UFM1-specific peptidase domain | ZUFSP | 16499 |
| zinc finger, X-linked, duplicated A | ZXDA | 16500 |
| zinc finger, X-linked, duplicated B | ZXDB | 16501 |
| ZXD family zinc finger C | ZXDC | 16502 |
| zinc finger ZZ-type containing 3 | ZZZ3 | 16503 |

[0583] In some embodiments, a T-cell of the disclosure is modified to silence or reduce expression of one or more gene(s) encoding a cell death or cell apoptosis receptor to produce an armored T-cell of the disclosure. Interaction of a death receptor and its endogenous ligand results in the initiation of apoptosis. Disruption of an expression an activity, or an interaction of a cell death and/or cell apoptosis receptor and/or ligand render an armored T-cell of the disclosure less receptive to death signals, consequently, making the armored T cell of the disclosure more efficacious in a tumor environment. An exemplary cell death receptor which may be modified in an armored T cell of the disclosure is Fas (CD95). Exemplary cell death and/or cell apoptosis receptors and ligands of the disclosure include, but are not limited to, the exemplary receptors and ligands provided in Table 4.

TABLE 4
Exemplary Cell Death and/or Cell
Apoptosis Receptors and Ligands.

| Full Name | Abbreviation | SEQ ID NO: |
|---|---|---|
| Cluster of Differentiation 120 | CD120a | 16504-16505 |
| Death receptor 3 | DR3 | 16506 |
| Death receptor 6 | DR6 | 16507 |
| first apoptosis signal (Fas) receptor | Fas | 16508-16509 |
| | (CD95/APO-1) | |
| Fas Ligand | FasL | 16510 |
| cellular tumor antigen p53 | p53 | 16511 |
| Tumor necrosis factor receptor 1 | TNF-R1 | 16512 |
| Tumor necrosis factor receptor 2 | TNF-R2 | 16513 |
| Tumor necrosis factor-related apoptosis- | TRAIL-R1 | 16514 |
| inducing ligand receptor 1 | (DR4) | |
| Tumor necrosis factor-related apoptosis- | TRAIL-R2 | 16515 |
| inducing ligand receptor 2 | (DR5) | |
| Fas-associated protein with death domain | FADD | 16516 |
| Tumor necrosis factor receptor type 1- | TRADD | 16517 |
| associated DEATH domain protein | | |
| Bcl-2-associatcd X protein | Bax | 16518 |
| Bcl-2 homologous killer | BAK | 16519 |
| 14-3-3 protein | 14-3-3 | 16520 |
| B-cell lymphoma 2 | Bcl-2 | 16521 |
| Cytochrome C | CytC | 16522 |
| Second mitochondria-derived activator of | Smac/Diablo | 16523 |
| caspase | | |
| High temperature requirement protein A2 | HTRA2/Omi | 16524 |
| Apoptosis inducing factor | AIF | 16525 |
| Endonuclease G | EXOG | 16526 |
| Caspase 9 | Cas9 | 16527 |
| Caspase 2 | Cas2 | 16528 |
| Caspase 8 | Cas8 | 16529 |
| Caspase 10 | Cas10 | 16530 |
| Caspase 3 | Cas3 | 16531 |
| Caspase 6 | Cas6 | 16532 |
| Caspase 7 | Cas7 | 16533 |
| Tumor Necrosis Factor alpha | TNF-alpha | 16534 |
| TNF-related weak inducer of apoptosis | TWEAK | 16535 |
| TNF-related weak inducer of apoptosis | TWEAK -R | 16536 |
| receptor | | |
| Tumor necrosis factor-related apoptosis- | TRAIL | 16537 |
| inducing ligand | | |
| TNF ligand-related molecule 1 | TL1A | 16538 |
| Receptor-interacting serine/threonine- | RIP1 | 16539 |
| protein kinase 1 | | |
| Cellular inhibitor of apoptosis 1 | cIAP-1 | 16540 |
| TNF receptor-associated factor 2 | TRAF-2 | 16541 |

[0584] In some embodiments, a T-cell of the disclosure is modified to silence or reduce expression of one or more gene(s) encoding a metabolic sensing protein to produce an armored T-cell of the disclosure. Disruption to the metabolic sensing of the immunosuppressive tumor microenvironment (characterized by low levels of oxygen pH, glucose and other molecules) by an armored T-cell of the disclosure leads to extended retention of T-cell function and, consequently, more tumor cells killed per amored T cell. For example, HIF1a and VHL play a role in T-cell function while in a hypoxic environment. An armored T-cell of the disclosure may have silenced or reduced expression of one or more genes encoding HIF1a or VHL. Genes and proteins involved in metabolic sensing include, but are not limited to, the exemplary genes and proteins provided in Table 5.

TABLE 5
Exemplary Metabolic Sensing Genes (and encoded Proteins).

| Full Name | Metabolite | Abbreviation | SEQ ID NO: |
|---|---|---|---|
| hypoxia-inducible factor 1α | Low oxygen | HIF-1α | 16542 |
| von Hippel-Lindau tumor suppressor | Low oxygen | VHL | 16543 |
| Prolyl-hydroxylase domain proteins | High oxygen | PHD proteins | |
| Glucose transporter 1 | glucose | GLUT1 | 16544 |
| Linker of Activated T cells | Amino acid (leucine) | LAT | 16545 |
| CD98 glycoprotein | Amino acid (leucine) | CD98 | 16546 |
| Alanine, serine, cysteine-preferring | Cationic Amino acid | ASCT2/Slc1a5 | 16547 |
| transporter 2 | (glutamine) | | |
| Solute carrier family 7 member 1 | Cationic Amino acids | Slc7a1 | 16548 |
| Solute carrier family 7 member 2 | Cationic Amino acids | Slc7a2 | 16549 |
| Solute carrier family 7 member 3 | Cationic Amino acids | Slc7a3 | 16550 |
| Solute carrier family 7 member 4 | Cationic Amino acids | Slc7a4 | 16551 |
| Solute carrier family 7 member 5 | Glycoprotein | Slc7a5 | 16552 |
| | associated Amino | | |
| | acids | | |
| Solute carrier family 7 member 6 | Glycoprotein | Slc7a6 | 16553 |
| | associated Amino | | |
| | acids | | |
| Solute carrier family 7 member 7 | Glycoprotein | Slc7a7 | 16554 |
| | associated Amino | | |
| | acids | | |
| Solute carrier family 7 member 8 | Glycoprotein | Slc7a8 | 16555 |
| | associated Amino | | |
| | acids | | |
| Solute carrier family 7 member 9 | Glycoprotein | Slc7a9 | 16556 |
| | associated Amino | | |
| | acids | | |
| Solute carrier family 7 member 10 | Glycoprotein | Slc7a10 | 16557 |
| | associated Amino | | |
| | acids | | |
| Solute carrier family 7 member 11 | Glycoprotein | Slc7a11 | 16558 |
| | associated Amino | | |
| | acids | | |
| Solute carrier family 7 member 13 | Glycoprotein | Slc7a13 | 16559 |
| | associated Amino | | |
| | acids | | |
| Solute carrier family 7 member 14 | Cationic Amino acids | Slc7a14 | 16560 |
| Solute carrier family 3 member 2 | Amino acid | Slc3a2 | 16561 |
| Calcium transport protein 2 | Cationic Amino acid | CAT2 | 16562 |
| | (arginine) | | |
| Calcium transport protein 3 | Cationic Amino acid | CAT3 | 16563 |
| | (arginine) | | |
| Calcium transport protein 4 | Cationic Amino acid | CAT4 | 16564 |
| | (arginine) | | |
| Bromodomain adjacent to zinc finger | Amino acid (arginine) | BAZ1B | 16565 |
| domain protein 1B | | | |
| PC4 and SFRS1-interacting protein | Amino acid (arginine) | PSIP1 | 16566 |
| Translin | Amino acid (arginine) | TSN | 16567 |
| G-protein-coupled receptors | Fatty Acid and | GPCRs | |
| | Cholesterol | | |
| T-cell Receptor, subunit alpha | Fatty Acid and | TCR alpha | 16568 |
| | Cholesterol | | |
| T-cell Receptor, subunit beta | Fatty Acid and | TCR beta | 16569 |
| | Cholesterol | | |
| T-cell Receptor, subunit zeta | Fatty Acid and | TCR zeta | 16570 |
| | Cholesterol | | |
| T-cell Receptor, subunit CD3 epsilon | Fatty Acid and | TCR CD3 epsilon | 16571 |
| | Cholesterol | | |
| T-cell Receptor, subunit CD3 | Fatty Acid and | TCR CD3 gamma | 16572 |
| gamma | Cholesterol | | |
| T-cell Receptor, subunit CD3 delta | Fatty Acid and | TCR CD3 delta | 16573 |
| | Cholesterol | | |
| peroxisome proliferator-activated | Fatty Acid and | PPARs | |
| receptors | Cholesterol | | |
| AMP-activated protein kinase | Energy homeostasis | AMPK | 16574-16575 |
| | (intracellular AMP to | | |
| | ATP ratio) | | |
| P2X purinoceptor 7 | Redox homeostasis | P2X7 | 16576 |

[0585] In some embodiments, a T-cell of the disclosure is modified to silence or reduce expression of one or more gene(s) encoding proteins that that confer sensitivity to a cancer therapy, including a monoclonal antibody, to produce an armored T-cell of the disclosure. Thus, an armored T-cell of the disclosure can function and may demonstrate superior function or efficacy whilst in the presence of a cancer therapy (e.g. a chemotherapy, a monoclonal antibody therapy, or another anti-tumor treatment). Proteins involved in conferring sensitivity to a cancer therapy include, but are not limited to, the exemplary proteins provided in Table 6.

TABLE 6
Exemplary Proteins that Confer Sensitivity to a Cancer Therapeutic.

| Full Name | Abbreviation | SEQ ID NO: |
|---|---|---|
| Copper-transporting ATPase 2 | ATP7B | 16577 |
| Breakpoint cluster region protein | BCR | 16578 |
| Abelson tyrosine-protein kinase 1 | ABL | 16579 |
| Breast cancer resistance protein | BCRP | 16580 |
| Breast cancer type 1 susceptibility protein | BRCA1 | 16581 |
| Breast cancer type 2 susceptibility protein | BRCA2 | 16582 |
| CAMPATH-1 antigen | CD52 | 16583 |
| Cytochrome P450 2D6 | CYP2D6 | 16584 |
| Deoxycytidine kinase | dCK | 16585 |
| Dihydrofolate reductase | DHFR | 16586 |
| Dihydropyrimidine dehydrogenase [NADP(+)] | DPYD | 16587 |
| Epidermal growth factor receptor | EGFR | 16588 |
| DNA excision repair protein ERCC-1 | ERCC1 | 16589 |
| Estrogen Receptor | ESR | 16590 |
| Low affinity immunoglobulin gamma Fc region | FCGR3A | 16591 |
| receptor III-A | | |
| Receptor tyrosine-protein kinase erbB-2 | HER2 or ERBB2 | 16592 |
| Insulin-like growth factor 1 receptor | IGF1R | 16593 |
| GTPase KRas | KRAS | 16594 |
| Multidrug resistance protein 1 | MDR1 or ABCB1 | 16595 |
| Methylated-DNA--protein-cysteine methyltransferase | MGMT | 16596 |
| Multidrug resistance-associated protein 1 | MRP1 or ABCC1 | 16597 |
| Progesterone Receptor | PGR | 16598 |
| Regulator of G-protein signaling 10 | RGS10 | 16599 |
| Suppressor of cytokine signaling 3 | SOCS-3 | 16600 |
| Thymidylate synthase | TYMS | 16601 |
| UDP-glucuronosyltransferase 1-1 | UGT1A1 | 16602 |

[0586] In some embodiments, a T-cell of the disclosure is modified to silence or reduce expression of one or more gene(s) encoding a growth advantage factor to produce an armored T-cell. Silencing or reducing expression of an oncogene can confer a growth advantage for an armored T-cell of the disclosure. For example, silencing or reducing expression (e.g. disrupting expression) of a TET2 gene during a CAR-T manufacturing process results in the generation of an armored CAR-T with a significant capacity for expansion and subsequent eradication of a tumor when compared to a non-armored CAR-T lacking this capacity for expansion. This strategy may be coupled to a safety switch (e.g. an iC9 safety switch of the disclosure), which allows for the targeted disruption of an armored CAR-T-cell in the event of an adverse reaction from a subject or uncontrolled growth of the armored CAR-T. Exemplary growth advantage factors include, but are not limited to, the factors provided in Table 7.

TABLE 7
Exemplary Growth Advantage Factors.

| Full Name | Abbreviation | SEQ ID NO: |
|---|---|---|
| Ten Eleven Translocation 2 | TET2 | 16603 |
| DNA (cytosine-5)-methyltransferase 3A | DNMT3A | 16604 |
| Transforming protein RhoA | RHOA | 16605 |
| Proto-oncogene vav | VAV1 | 16606 |
| Rhombotin-2 | LMO2 | 16607 |
| T-cell acute lymphocytic leukemia | TALI | 16608 |
| protein 1 | | |
| Suppressor of cytokine signaling 1 | SOCS1 | 16609 |
| herpes virus entry mediator | HVEM | 16610 |
| T cell death-associated gene 8 | TDAG8 | 16611 |
| BCL6 corepressor | BCOR | 16612 |
| B and T cell attenuator | BTLA | 16613 |
| SPARC-like protein 1 | SPARCL1 | 16614 |
| Msh homeobox 1-like protein | MSX1 | 16615 |

### Armored T-Cells “Null or Switch Receptor” Strategy

[0587] In some embodiments, a T-cell of the disclosure is modified to express a modified/chimeric checkpoint receptor to produce an armored T-cell of the disclosure.

[0588] In some embodiments, the modified/chimeric checkpoint receptor comprises a null receptor, decoy receptor or dominant negative receptor. A null receptor, decoy receptor or dominant negative receptor of the disclosure may be modified/chimeric receptor/protein. A null receptor, decoy receptor or dominant negative receptor of the disclosure may be truncated for expression of the intracellular signaling domain. Alternatively, or in addition, a null receptor, decoy receptor or dominant negative receptor of the disclosure may be mutated within an intracellular signaling domain at one or more amino acid positions that are determinative or required for effective signaling. Truncation or mutation of null receptor, decoy receptor or dominant negative receptor of the disclosure may result in loss of the receptor's capacity to convey or transduce a checkpoint signal to the cell or within the cell.

[0589] For example, a dilution or a blockage of an immunosuppressive checkpoint signal from a PD-L1 receptor expressed on the surface of a tumor cell may be achieved by expressing a modified/chimeric PD-1 null receptor on the surface of an armored T-cell of the disclosure, which effectively competes with the endogenous (non-modified) PD-1 receptors also expressed on the surface of the armored T-cell to reduce or inhibit the transduction of the immunosuppressive checkpoint signal through endogenous PD-1 receptors of the armored T cell. In this exemplary embodiment, competition between the two different receptors for binding to PD-L1 expressed on the tumor cell reduces or diminishes a level of effective checkpoint signaling, thereby enhancing a therapeutic potential of the armored T-cell expressing the PD-1 null receptor.

[0590] In some embodiments, the modified/chimeric checkpoint receptor comprises a null receptor, decoy receptor or dominant negative receptor that is a transmembrane receptor.

[0591] In some embodiments, the modified/chimeric checkpoint receptor comprises a null receptor, decoy receptor or dominant negative receptor that is a membrane-associated or membrane-linked receptor/protein.

[0592] In some embodiments, the modified/chimeric checkpoint receptor comprises a null receptor, decoy receptor or dominant negative receptor that is an intracellular receptor/protein.

[0593] In some embodiments, the modified/chimeric checkpoint receptor comprises a null receptor, decoy receptor or dominant negative receptor that is an intracellular receptor/protein. Exemplary null, decoy, or dominant negative intracellular receptors/proteins of the disclosure include, but are not limited to, signaling components downstream of an inhibitory checkpoint signal (as provided, for example, in Tables 1 and 2), a transcription factor (as provided, for example, in Table 3), a cytokine or a cytokine receptor, a chemokine or a chemokine receptor, a cell death or apoptosis receptor/ligand (as provided, for example, in Table 4), a metabolic sensing molecule (as provided, for example, in Table 5), a protein conferring sensitivity to a cancer therapy (as provided, for example, in Table 6), and an oncogene or a tumor suppressor gene (as provided, for example, in Table 7). Exemplary cytokines, cytokine receptors, chemokines and chemokine receptors of the disclosure include, but are not limited to, the cytokines and cytokine receptors as well as chemokines and chemokine receptors provided in Table 8.

TABLE 8
Exemplary Cytokines, Cytokine receptors,
Chemokines and Chemokine Receptors.

| Full Name | Abbreviation | SEQ ID NO: |
|---|---|---|
| 4-1BB Ligand | 4-1BBL | 16616 |
| Tumor necrosis factor receptor | Apo3 or TNFRSF25 | 16617 |
| superfamily member 25 | | |
| Tumor necrosis factor receptor | APRIL or TNFRSF13 | 16618 |
| superfamily member 13 | | |
| Bcl2-associated agonist of cell death | Bcl-xL or BAD | 16619 |
| Tumor necrosis factor receptor | BCMA or TNFRSF17 | 16620 |
| superfamily member 17 | | |
| C-C motif chemokine 1 | CCL1 | 16621 |
| C-C motif chemokine 11 | CCL11 | 16622 |
| C-C motif chemokine 13 | CCL13 | 16623 |
| C-C motif chemokine 14 | CCL14 | 16624 |
| C-C motif chemokine 15 | CCL15 | 16625 |
| C-C motif chemokine 16 | CCL16 | 16626 |
| C-C motif chemokine 17 | CCL17 | 16627 |
| C-C motif chemokine 18 | CCL18 | 16628 |
| C-C motif chemokine 19 | CCL19 | 16629 |
| C-C motif chemokine 2 | CCL2 | 16630 |
| C-C motif chemokine 20 | CCL20 | 16631 |
| C-C motif chemokine 21 | CCL21 | 16632 |
| C-C motif chemokine 22 | CCL22 | 16633 |
| C-C motif chemokine 23 | CCL23 | 16634 |
| C-C motif chemokine 24 | CCL24 | 16635 |
| C-C motif chemokine 25 | CCL25 | 16636 |
| C-C motif chemokine 26 | CCL26 | 16637 |
| C-C motif chemokine 27 | CCL27 | 16638 |
| C-C motif chemokine 28 | CCL28 | 16639 |
| C-C motif chemokine 3 | CCL3 | 16640 |
| C-C motif chemokine 4 | CCL4 | 16641 |
| C-C motif chemokine 5 | CCL5 | 16642 |
| C-C motif chemokine 7 | CCL7 | 16643 |
| C-C motif chemokine 8 | CCL8 | 16644 |
| C-C chemokine receptor type 1 | CCR1 | 16645 |
| C-C chemokine receptor type 10 | CCR10 | 16646 |
| C-C chemokine receptor type 11 | CCR11 | 16647 |
| C-C chemokine receptor type 2 | CCR2 | 16648 |
| C-C chemokine receptor type 3 | CCR3 | 16649 |
| C-C chemokine receptor type 4 | CCR4 | 16650 |
| C-C chemokine receptor type 5 | CCR5 | 16651 |
| C-C chemokine receptor type 6 | CCR6 | 16652 |
| C-C chemokine receptor type 7 | CCR7 | 16653 |
| C-C chemokine receptor type 8 | CCR8 | 16654 |
| C-C chemokine receptor type 9 | CCR9 | 16655 |
| Granulocyte colony-stimulating factor | CD114 or CSF3R | 16656 |
| receptor | | |
| Macrophage colony-stimulating factor 1 | CD115 or CSFIR | 16657 |
| receptor | | |
| Granulocyte-macrophage colony- | CD116 or CSF2RA | 16658 |
| stimulating factor receptor subunit alpha | | |
| Mast/stem cell growth factor receptor | CD117 or KIT | 16659 |
| Kit | | |
| Leukemia inhibitory factor receptor | CD118 or LIFR | 16660 |
| Tumor necrosis factor receptor | CD120a or TNFRSF1A | 16661 |
| superfamily member 1A | | |
| Tumor necrosis factor receptor | CD120b or TNFRSF1B | 16662 |
| superfamily member 1B | | |
| Interleukin-1 receptor type 1 | CD121a or IL1R1 | 16663 |
| Interleukin-2 receptor subunit beta | CD122 or IL2RB | 16664 |
| Interleukin-3 receptor subunit alpha | CD123 or IL3RA | 16665 |
| Interleukin-4 receptor subunit alpha | CD124 or IL4R | 16666 |
| Interleukin-6 receptor subunit alpha | CD126 or IL6R | 16667 |
| Interleukin-7 receptor subunit alpha | CD127 or IL7R | 16668 |
| Interleukin-6 receptor subunit beta | CD130 or IL6ST | 16669 |
| Cytokine receptor common subunit | CD132 or IL2RG | 16670 |
| gamma | | |
| Tumor necrosis factor ligand | CD153 or TNFSF8 | 16671 |
| superfamily member 8 | | |
| CD40 ligand | CD154 or CD40L | 16672 |
| Tumor necrosis factor ligand | CD178 or FASLG | 16673 |
| superfamily member 6 | | |
| Interleukin-12 receptor subunit beta-1 | CD212 or IL12RB1 | 16674 |
| Interleukin-13 receptor subunit alpha-1 | CD213a1 or IL13RA1 | 16675 |
| Interleukin-13 receptor subunit alpha-2 | CD213a2 or IL13RA2 | 16676 |
| Interleukin-2 receptor subunit alpha | CD25 or IL2RA | 16677 |
| CD27 antigen | CD27 | 16678 |
| Tumor necrosis factor receptor | CD30 or TNFRSF8 | 16679 |
| superfamily member 8 | | |
| T-cell surface glycoprotein CD4 | CD4 | 16680 |
| Tumor necrosis factor receptor | CD40 or TNFRSF5 | 16681 |
| superfamily member 5 | | |
| CD70 antigen | CD70 | 16682 |
| Tumor necrosis factor receptor | CD95 or FAS or | 16683 |
| superfamily member 6 | FNFRSF6 | |
| Granulocyte-macrophage colony- | CDw116 or CSF2RA | 16684 |
| stimulating factor receptor subunit alpha | | |
| Interferon gamma receptor 1 | CDw119 or IFNGR1 | 16685 |
| Interleukin-1 receptor type 2 | CDw121b or IL1R2 | 16686 |
| Interleukin-5 receptor subunit alpha | CDw125 or IL5RA | 16687 |
| Cytokine receptor common subunit beta | CDw131 or CSF2RB | 16688 |
| Tumor necrosis factor receptor | CDw137 or TNFRSF9 | 16689 |
| superfamily member 9 | | |
| Interleukin-10 receptor | CDw210 or IL10R | 16690 |
| Interleukin-17 receptor A | CDw217 or IL17RA | 16691 |
| C-X3-C motif chemokine 1 | CX3CL1 | 16692 |
| CX3C chemokine receptor 1 | CX3CR1 | 16693 |
| C-X-C motif chemokine 1 | CXCL1 | 16694 |
| C-X-C motif chemokine 10 | CXCL10 | 16695 |
| C-X-C motif chemokine 11 | CXCL11 | 16696 |
| C-X-C motif chemokine 12 | CXCL12 | 16697 |
| C-X-C motif chemokine 13 | CXCL13 | 16698 |
| C-X-C motif chemokine 14 | CXCL14 | 16699 |
| C-X-C motif chemokine 16 | CXCL16 | 16700 |
| C-X-C motif chemokine 2 | CXCL2 | 16701 |
| C-X-C motif chemokine 3 | CXCL3 | 16702 |
| C-X-C motif chemokine 4 | CXCL4 | 16703 |
| C-X-C motif chemokine 5 | CXCL5 | 16704 |
| C-X-C motif chemokine 6 | CXCL6 | 16705 |
| C-X-C motif chemokine 7 | CXCL7 | 16706 |
| C-X-C motif chemokine 8 | CXCL8 | 16707 |
| C-X-C motif chemokine 9 | CXCL9 | 16708 |
| C-X-C chemokine receptor type 1 | CXCR1 | 16709 |
| C-X-C chemokine receptor type 2 | CXCR2 | 16710 |
| C-X-C chemokine receptor type 3 | CXCR3 | 16711 |
| C-X-C chemokine receptor type 4 | CXCR4 | 16712 |
| C-X-C chemokine receptor type 5 | CXCR5 | 16713 |
| C-X-C chemokine receptor type 6 | CXCR6 | 16714 |
| C-X-C chemokine receptor type 7 | CXCR7 | 16715 |
| Atypical chemokine receptor 1 | DARC or ACKR1 | 16716 |
| Erythropoietin | Epo | 16717 |
| Erythropoietin receptor | EpoR | 16718 |
| Receptor-type tyrosine-protein kinase | Flt-3 | 16719 |
| FLT3 | | |
| FLT3 Ligand | Flt-3L | 16720 |
| Granulocyte colony-stimulating factor | G-CSF or GSF3R | 16721 |
| receptor | | |
| Tumor necrosis factor receptor | GITR or TNFRSF18 | 16722 |
| superfamily member 18 | | |
| GITR Ligand | GITRL | 16723 |
| Cytokine receptor common subunit beta | GM-CSF or CSF2RB | 16724 |
| Interleukin-6 receptor subunit beta | gp130 or IL6ST | 16725 |
| Tumor necrosis factor receptor | HVEM or TNFRSF14 | 16726 |
| superfamily member 14 | | |
| Interferon gamma | IENγ | 16727 |
| Interferon gamma receptor 2 | IFNGR2 | 16728 |
| Interferon-alpha | IFN-α | 16729 |
| Interferon-beta | IFN-β | 16730 |
| Interleukin-1 alpha | IL1 | 16731 |
| Interleukin-10 | IL10 | 16732 |
| Interleukin-10 receptor | IL10R | 16733 |
| Interleukin-11 | IL-11 | 16734 |
| Interleukin-11 receptor alpha | IL-11Ra | 16735 |
| Interleukin-12 | IL12 | 16736 |
| Interleukin-13 | IL13 | 16737 |
| Interleukin-13 receptor | IL13R | 16738 |
| Interleukin-14 | IL-14 | 16739 |
| Interleukin-15 | IL15 | 16740 |
| Interleukin-15 receptor alpha | IL-15Ra | 16741 |
| Interleukin-16 | IL-16 | 16742 |
| Interleukin-17 | IL17 | 16743 |
| Interleukin-17 receptor | IL17R | 16744 |
| Interleukin-18 | IL18 | 16745 |
| Interleukin-1 receptor alpha | IL-1RA | 16746 |
| Interleukin-1 alpha | IL-1α | 16747 |
| Interleukin-1beta | IL-1β | 16748 |
| Interleukin-2 | IL2 | 16749 |
| Interleukin-20 | IL-20 | 16750 |
| Interleukin-20 receptor alpha | IL-20Rα | 16751 |
| Interleukin-20 receptor beta | IL-20Rβ | 16752 |
| Interleukin-21 | IL21 | 16753 |
| Interleukin-3 | IL-3 | 16754 |
| Interleukin-35 | IL35 | 16755 |
| Interleukin-4 | IL4 | 16756 |
| Interleukin-4 receptor | IL4R | 16757 |
| Interleukin-5 | IL5 | 16758 |
| Interleukin-5 receptor | IL5R | 16759 |
| Interleukin-6 | IL6 | 16760 |
| Interleukin-6 receptor | IL6R | 16761 |
| Interleukin-7 | IL7 | 16762 |
| Interleukin-9 receptor | IL-9R | 16763 |
| Leukemia inhibitory factor | LIF | 16764 |
| Leukemia inhibitory factor receptor | LIFR | 16765 |
| tumor necrosis factor superfamily | LIGHT or TNFSF14 | 16766 |
| member 14 | | |
| Tumor necrosis factor receptor | LTβR or TNFRSF3 | 16767 |
| superfamily member 3 | | |
| Lymphotoxin-beta | LT-β | 16768 |
| Macrophage colony-stimulating factor 1 | M-CSF | 16769 |
| Tumor necrosis factor receptor | OPG or TNFRSF11B | 16770 |
| superfamily member 11B | | |
| Oncostatin-M | OSM | 16771 |
| Oncostatin-M receptor | OSMR | 16772 |
| Tumor necrosis factor receptor | OX40 or TNFRSF4 | 16773 |
| superfamily member 4 | | |
| Tumor necrosis factor ligand | OX40L or TNFSF4 | 16774 |
| superfamily member 4 | | |
| Tumor necrosis factor receptor | RANK or TNFRSF11A | 16775 |
| superfamily member 11A | | |
| Kit Ligand | SCF or KITLG | 16776 |
| Tumor necrosis factor receptor | TACI or TNFRSF13B | 16777 |
| superfamily member 13B | | |
| Tumor necrosis factor ligand | TALL-1 or TNFSF13B | 16778 |
| superfamily member 13B | | |
| TGF-beta receptor type-1 | TGF-βR1 | 16779 |
| TGF-beta receptor type-2 | TGF-βR2 | 16780 |
| TGF-beta receptor typc-3 | TGF-βR3 | 16781 |
| Transforming growth factor beta-1 | TGF-β1 | 16782 |
| Transforming growth factor beta-2 | TGF-β2 | 16783 |
| Transforming growth factor beta-3 | TGF-β3 | 16784 |
| Tumor necrosis factor alpha | TNF or TNF-α | 16785 |
| Tumor necrosis factor beta | TNF-β | 16786 |
| Thyroid peroxidase | Tpo | 16787 |
| Thyroid peroxidase receptor | TpoR | 16788 |
| Tumor necrosis factor ligand | TRAIL or TNFSF10 | 16789 |
| superfamily member 10 | | |
| Tumor necrosis factor receptor | TRAILR1 or | 16790 |
| superfamily member 10A | TNFRSF10A | |
| Tumor necrosis factor receptor | TRAILR2 or | 16791 |
| superfamily member 10B | TNFRSF10B | |
| Tumor necrosis factor ligand | TRANCE or TNFSF11 | 16792 |
| superfamily member 11 | | |
| Tumor necrosis factor ligand | TWEAK or TNFSF11 | 16793 |
| superfamily member 12 | | |
| Lymphotactin | XCL1 | 16794 |
| Cytokine SCM-1 beta | XCL2 | 16795 |

[0594] In some embodiments, the modified/chimeric checkpoint receptor comprises a switch receptor. Exemplary switch receptors may comprise a modified/chimeric receptor/protein of the disclosure wherein a native or wild type intracellular signaling domain is switched or replaced with a different intracellular signaling domain that is either non-native to the protein and/or not a wild-type domain. For example, replacement of an inhibitory signaling domain with a stimulatory signaling domain would switch an immunosuppressive signal into an immunostimulatory signal. Alternatively, replacement of an inhibitory signaling domain with a different inhibitory domain can reduce or enhance the level of inhibitory signaling. Expression or overexpression, of a switch receptor can result in the dilution and/or blockage of a cognate checkpoint signal via competition with an endogenous wildtype checkpoint receptor (not a switch receptor) for binding to the cognate checkpoint receptor expressed within the immunosuppressive tumor microenvironment. Armored T cells of the disclosure may comprise a sequence encoding switch receptors of the disclosure, leading to the expression of one or more switch receptors of the disclosure, and consequently, altering an activity of an armored T-cell of the disclosure. Armored T cells of the disclosure may express a switch receptor of the disclosure that targets an intracellularly expressed protein downstream of a checkpoint receptor, a transcription factor, a cytokine receptor, a death receptor, a metabolic sensing molecule, a cancer therapy, an oncogene, and/or a tumor suppressor protein or gene of the disclosure.

[0595] Exemplary switch receptors of the disclosure may comprise or may be derived from a protein including, but are not limited to, the signaling components downstream of an inhibitory checkpoint signal (as provided, for example, in Tables 1 and 2), a transcription factor (as provided, for example, in Table 3), a cytokine or a cytokine receptor, a chemokine or a chemokine receptor, a cell death or apoptosis receptor/ligand (as provided, for example, in Table 4), a metabolic sensing molecule (as provided, for example, in Table 5), a protein conferring sensitivity to a cancer therapy (as provided, for example, in Table 6), and an oncogene or a tumor suppressor gene (as provided, for example, in Table 7). Exemplary cytokines, cytokine receptors, chemokines and chemokine receptors of the disclosure include, but are not limited to, the cytokines and cytokine receptors as well as chemokines and chemokine receptors provided in Table 8.

### Armored T-Cells “Synthetic Gene Expression” Strategy

[0596] In some embodiments, a T-cell of the disclosure is modified to express chimeric ligand receptor (CLR) or a chimeric antigen receptor (CAR) that mediates conditional gene expression to produce an armored T-cell of the disclosure. The combination of the CLR/CAR and the condition gene expression system in the nucleus of the armored T cell constitutes a synthetic gene expression system that is conditionally activated upon binding of cognate ligand(s) with CLR or cognate antigen(s) with CAR. This system may help to ‘armor’ or enhance therapeutic potential of modified T cells by reducing or limiting synthetic gene expression at the site of ligand or antigen binding, at or within the tumor environment for example.

### Exogenous Receptors

[0597] In some embodiments, the armored T-cell comprises a composition comprising (a) an inducible transgene construct, comprising a sequence encoding an inducible promoter and a sequence encoding a transgene, and (b) a receptor construct, comprising a sequence encoding a constitutive promoter and a sequence encoding an exogenous receptor, such as a CLR or CAR, wherein, upon integration of the construct of (a) and the construct of (b) into a genomic sequence of a cell, the exogenous receptor is expressed, and wherein the exogenous receptor, upon binding a ligand or antigen, transduces an intracellular signal that targets directly or indirectly the inducible promoter regulating expression of the inducible transgene (a) to modify gene expression.

[0598] In some embodiments of a synthetic gene expression system of the disclosure, the composition modifies gene expression by decreasing gene expression. In some embodiments, the composition modifies gene expression by transiently modifying gene expression (e.g. for the duration of binding of the ligand to the exogenous receptor). In some embodiments, the composition modifies gene expression acutely (e.g. the ligand reversibly binds to the exogenous receptor). In some embodiments, the composition modifies gene expression chronically (e.g. the ligand irreversibly binds to the exogenous receptor).

[0599] In some embodiments of the compositions of the disclosure, the exogenous receptor of (b) comprises an endogenous receptor with respect to the genomic sequence of the cell. Exemplary receptors include, but are not limited to, intracellular receptors, cell-surface receptors, transmembrane receptors, ligand-gated ion channels, and G-protein coupled receptors.

[0600] In some embodiments of the compositions of the disclosure, the exogenous receptor of (b) comprises a non-naturally occurring receptor. In some embodiments, the non-naturally occurring receptor is a synthetic, modified, recombinant, mutant or chimeric receptor. In some embodiments, the non-naturally occurring receptor comprises one or more sequences isolated or derived from a T-cell receptor (TCR). In some embodiments, the non-naturally occurring receptor comprises one or more sequences isolated or derived from a scaffold protein. In some embodiments, including those wherein the non-naturally occurring receptor does not comprise a transmembrane domain, the non-naturally occurring receptor interacts with a second transmembrane, membrane-bound and/or an intracellular receptor that, following contact with the non-naturally occurring receptor, transduces an intracellular signal.

[0601] In some embodiments of the compositions of the disclosure, the exogenous receptor of (b) comprises a non-naturally occurring receptor. In some embodiments, the non-naturally occurring receptor is a synthetic, modified, recombinant, mutant or chimeric receptor. In some embodiments, the non-naturally occurring receptor comprises one or more sequences isolated or derived from a T-cell receptor (TCR). In some embodiments, the non-naturally occurring receptor comprises one or more sequences isolated or derived from a scaffold protein. In some embodiments, the non-naturally occurring receptor comprises a transmembrane domain. In some embodiments, the non-naturally occurring receptor interacts with an intracellular receptor that transduces an intracellular signal. In some embodiments, the non-naturally occurring receptor comprises an intracellular signalling domain. In some embodiments, the non-naturally occurring receptor is a chimeric ligand receptor (CLR). In some embodiments, the CLR is a chimeric antigen receptor (CAR).

[0602] In some embodiments of the compositions of the disclosure, the exogenous receptor of (b) comprises a non-naturally occurring receptor. In some embodiments, the CLR is a chimeric antigen receptor (CAR). In some embodiments, the chimeric ligand receptor comprises (a) an ectodomain comprising a ligand recognition region, wherein the ligand recognition region comprises at least scaffold protein; (b) a transmembrane domain, and (c) an endodomain comprising at least one costimulatory domain. In some embodiments, the ectodomain of (a) further comprises a signal peptide. In some embodiments, the ectodomain of (a) further comprises a hinge between the ligand recognition region and the transmembrane domain.

[0603] In some embodiments of the CLR/CARs of the disclosure, the signal peptide comprises a sequence encoding a human CD2, CD3δ, CD3ε, CD3γ, CD3ζ, CD4, CD8α, CD19, CD28, 4-1BB or GM-CSFR signal peptide. In some embodiments, the signal peptide comprises a sequence encoding a human CD8α signal peptide. In some embodiments, the signal peptide comprises an amino acid sequence comprising MALPVTALLLPLALLLHAARP (SEQ ID NO: 17037). In some embodiments, the signal peptide is encoded by a nucleic acid sequence comprising atggcactgccagtcaccgccctgctgctgcctctggctctgctgctgcacgcagctagacca (SEQ ID NO: 17039).

[0604] In some embodiments of the CLR/CARs of the disclosure, the transmembrane domain comprises a sequence encoding a human CD2, CD3δ, CD3, CD3γ, CD3ζ, CD4, CD8α, CD19, CD28, 4-1BB or GM-CSFR transmembrane domain. In some embodiments, the transmembrane domain comprises a sequence encoding a human CD8α transmembrane domain. In some embodiments, the transmembrane domain comprises an amino acid sequence comprising IYIWAPLAGTCGVLLLSLVITLYC (SEQ ID NO: 17038). In some embodiments, the transmembrane domain is encoded by a nucleic acid sequence comprising atctacatttgggcaccactggccgggacctgtggagtgctgctgctgagcctggtcatcacactgtactgc (SEQ ID NO: 17040).

[0605] In some embodiments of the CLR/CARs of the disclosure, the endodomain comprises a human CD3ζ endodomain. In some embodiments, the at least one costimulatory domain comprises a human 4-1BB, CD28, CD40, ICOS, MyD88, OX-40 intracellular segment, or any combination thereof. In some embodiments, the at least one costimulatory domain comprises a human CD28 and/or a 4-1BB costimulatory domain. In some embodiments, the CD3ζ costimulatory domain comprises an amino acid sequence comprising RVKFSRSADAPAYKQGQNQLYNELNLGRREEYDVLDKRRGRDPEMGGKPRRKNPQ EGLYNELQKDKMAEAYSEIGMKGERRRGKGHDGLYQGLSTATKDTYDALHMQALP PR (SEQ ID NO: 14477). In some embodiments, the CD3ζ costimulatory domain is encoded by a nucleic acid sequence comprising cgcgtgaagtttagtcgatcagcagatgccccagcttacaaacagggacagaaccagctgtataacgagctgaatctgggccgccga gaggaatatgacgtgctggataagcggagaggacgcgaccccgaaatgggaggcaagcccaggcgcaaaaaccctcaggaagg cctgtataacgagctgcagaaggacaaaatggcagaagcctattctgagatcggcatgaagggggagcgacggagaggcaaagg gcacgatgggctgtaccagggactgagcaccgccacaaaggacacctatgatgctctgcatatgcaggcactgcctccaagg (SEQ ID NO: 14478). In some embodiments, the 4-1BB costimulatory domain comprises an amino acid sequence comprising KRGRKKLLYIFKQPFMRPVQTTQEEDGCSCRFPEEEEGGCEL (SEQ ID NO: 14479). In some embodiments, the 4-1BB costimulatory domain is encoded by a nucleic acid sequence comprising aagagaggcaggaagaaactgctgtatattttcaaacagcccttcatgcgccccgtgcagactacccaggaggaagacgggtgctcc tgtcgattccctgaggaagaggaaggcgggtgtgagctg (SEQ ID NO: 14480). In some embodiments, the 4-1BB costimulatory domain is located between the transmembrane domain and the CD28 costimulatory domain.

[0606] In some embodiments of the CLR/CARs of the disclosure, the hinge comprises a sequence derived from a human CD8α, IgG4, and/or CD4 sequence. In some embodiments, the hinge comprises a sequence derived from a human CD8α sequence. In some embodiments, the hinge comprises an amino acid sequence comprising TTTPAPRPPTPAPTIASQPLSLRPEACRPAAGGAVHTRGLDFACD (SEQ ID NO: 14481). In some embodiments, the hinge is encoded by a nucleic acid sequence comprising actaccacaccagcacctagaccaccaactccagctccaaccatcgcgagtcagcccctgagtctgagacctgaggcctgcaggcc agctgcaggaggagctgtgcacaccaggggcctggacttcgcctgcgac (SEQ ID NO: 14482) or ACCACAACCCCTGCCCCCAGACCTCCCACACCCGCCCCTACCATCGCGAGTCAGC CCCTGAGTCTGAGACCTGAGGCCTGCAGGCCAGCTGCAGGAGGAGCTGTGCACA CCAGGGGCCTGGACTTCGCCTGCGAC (SEQ ID NO: 17047). In some embodiments, the at least one protein scaffold specifically binds the ligand.

[0607] In some embodiments of the compositions of the disclosure, the exogenous receptor of (b) comprises a non-naturally occurring receptor. In some embodiments, the CLR is a chimeric antigen receptor (CAR). In some embodiments, the chimeric ligand receptor comprises (a) an ectodomain comprising a ligand recognition region, wherein the ligand recognition region comprises at least scaffold protein; (b) a transmembrane domain, and (c) an endodomain comprising at least one costimulatory domain. In some embodiments, the at least one protein scaffold comprises an antibody, an antibody fragment, a single domain antibody, a single chain antibody, an antibody mimetic, or a Centyrin (referred to herein as a CARTyrin). In some embodiments, the ligand recognition region comprises one or more of an antibody, an antibody fragment, a single domain antibody, a single chain antibody, an antibody mimetic, and a Centyrin. In some embodiments, the single domain antibody comprises or consists of a VHH or a VH (referred to herein as a VCAR). In some embodiments, the single domain antibody comprises or consists of a VHH or a VH comprising human complementarity determining regions (CDRs). In some embodiments, the VH is a recombinant or chimeric protein. In some embodiments, the VH is a recombinant or chimeric human protein. In some embodiments, the antibody mimetic comprises or consists of an affibody, an afflilin, an affimer, an affitin, an alphabody, an anticalin, an avimer, a DARPin, a Fynomer, a Kunitz domain peptide or a monobody. In some embodiments, the Centyrin comprises or consists of a consensus sequence of at least one fibronectin type III (FN3) domain.

[0608] In some embodiments of the compositions of the disclosure, the exogenous receptor of (b) comprises a non-naturally occurring receptor. In some embodiments, the CLR is a chimeric antigen receptor (CAR). In some embodiments, the chimeric ligand receptor comprises (a) an ectodomain comprising a ligand recognition region, wherein the ligand recognition region comprises at least scaffold protein; (b) a transmembrane domain, and (c) an endodomain comprising at least one costimulatory domain. In some embodiments, the Centyrin comprises or consists of a consensus sequence of at least one fibronectin type III (FN3) domain. In some embodiments, the at least one fibronectin type III (FN3) domain is derived from a human protein. In some embodiments, the human protein is Tenascin-C. In some embodiments, the consensus sequence comprises LPAPKNLVVSEVTEDSLRLSWTAPDAAFDSFLIQYQESEKVGEAINLTVPGSERSYDL TGLKPGTEYTVSIYGVKGGHRSNPLSAEFTT (SEQ ID NO: 14488). In some embodiments, the consensus sequence comprises MLPAPKNLVVSEVTEDSLRLSWTAPDAAFDSFLIQYQESEKVGEAINLTVPGSERSY DLTGLKPGTEYTVSIYGVKGGHRSNPLSAEFTT (SEQ ID NO: 14489). In some embodiments, the consensus sequence is modified at one or more positions within (a) a A-B loop comprising or consisting of the amino acid residues TEDS at positions 13-16 of the consensus sequence; (b) a B-C loop comprising or consisting of the amino acid residues TAPDAAF at positions 22-28 of the consensus sequence; (c) a C-D loop comprising or consisting of the amino acid residues SEKVGE at positions 38-43 of the consensus sequence; (d) a D-E loop comprising or consisting of the amino acid residues GSER at positions 51-54 of the consensus sequence; (e) a E-F loop comprising or consisting of the amino acid residues GLKPG at positions 60-64 of the consensus sequence; (f) a F-G loop comprising or consisting of the amino acid residues KGGHRSN at positions 75-81 of the consensus sequence; or (g) any combination of (a)-(f). In some embodiments, the Centyrin comprises a consensus sequence of at least 5 fibronectin type III (FN3) domains. In some embodiments, the Centyrin comprises a consensus sequence of at least 10 fibronectin type III (FN3) domains. In some embodiments, the Centyrin comprises a consensus sequence of at least 15 fibronectin type III (FN3) domains. In some embodiments, the scaffold binds an antigen with at least one affinity selected from a K_{D} of less than or equal to 10⁻⁹M, less than or equal to 10⁻¹⁰M, less than or equal to 10⁻¹¹M, less than or equal to 10⁻¹²M, less than or equal to 10⁻¹³M, less than or equal to 10⁻¹⁴M, and less than or equal to 10⁻¹⁵M. In some embodiments, the K_{D} is determined by surface plasmon resonance.

### Inducible Promoters

[0609] In some embodiments of the compositions of the disclosure, the sequence encoding the inducible promoter of (a) comprises a sequence encoding an NFκB promoter. In some embodiments of the compositions of the disclosure, the sequence encoding the inducible promoter of (a) comprises a sequence encoding an interferon (IFN) promoter or a sequence encoding an interleukin-2 promoter. In some embodiments, the interferon (IFN) promoter is an IFNγ promoter. In some embodiments of the compositions of the disclosure, the inducible promoter is isolated or derived from the promoter of a cytokine or a chemokine. In some embodiments, the cytokine or chemokine comprises IL2, IL3, IL4, IL5, IL6, IL10. IL12, IL13, IL17A/F, IL21, IL22, IL23, transforming growth factor beta (TGFβ), colony stimulating factor 2 (GM-CSF), interferon gamma (IFNγ), Tumor necrosis factor (TNFα), LTα, perforin, Granzyme C (Gzmc), Granzyme B (Gzmb). C-C motif chemokine ligand 5 (CCL5), C-C motif chemokine ligand 4 (Ccl4), C-C motif chemokine ligand 3 (Ccl3), X-C motif chemokine ligand 1 (Xcl1) and LIF interleukin 6 family cytokine (Lif).

[0610] In some embodiments of the compositions of the disclosure, the inducible promoter is isolated or derived from the promoter of a gene comprising a surface protein involved in cell differentiation, activation, exhaustion and function. In some embodiments, the gene comprises CD69, CD71, CTLA4, PD-1, TIG1T, LAG3, TIM-3, GITR, MHCII, COX-2, FASL and 4-1BB.

[0611] In some embodiments of the compositions of the disclosure, the inducible promoter is isolated or derived from the promoter of a gene involved in CD metabolism and differentiation. In some embodiments of the compositions of the disclosure, the inducible promoter is isolated or derived from the promoter of Nr4a1, Nr4a3, Tnfrsf9 (4-1BB), Sema7a, Zfp3612, Gadd45b, Dusp5, Dusp6 and Neto2.

### Inducible Transgene

[0612] In some embodiments, the inducible transgene construct comprises or drives expression of a signaling component downstream of an inhibitory checkpoint signal (as provided, for example, in Tables 1 and 2), a transcription factor (as provided, for example, in Table 3), a cytokine or a cytokine receptor, a chemokine or a chemokine receptor, a cell death or apoptosis receptor/ligand (as provided, for example, in Table 4), a metabolic sensing molecule (as provided, for example, in Table 5), a protein conferring sensitivity to a cancer therapy (as provided, for example, in Table 6 and/or 9), and an oncogene or a tumor suppressor gene (as provided, for example, in Table 7). Exemplary cytokines, cytokine receptors, chemokines and chemokine receptors of the disclosure include, but are not limited to, the cytokines and cytokine receptors as well as chemokines and chemokine receptors provided in Table 8.

TABLE 9
Exemplary therapeutic proteins (and proteins to enhance CAR-T efficacy).

| Gene Name | Gene Description | Protein SEQ ID NO |
|---|---|---|
| A1BG | Alpha-1-B glycoprotein | SEQ ID NOS: 1-2 |
| A2M | Alpha-2-macroglobulin | SEQ ID NOS: 3-6 |
| A2ML1 | Alpha-2-macroglobulin-like 1 | SEQ ID NOS: 7-12 |
| A4GNT | Alpha-1,4-N-acetylglucosaminyltransferase | SEQ ID NO: 13 |
| AADACL2 | Arylacetamide deacetylase-like 2 | SEQ ID NOS: 14-15 |
| AANAT | Aralkylamine N-acetyltransferase | SEQ ID NOS: 16-19 |
| ABCG1 | ATP-binding cassette, sub-family G | SEQ ID NOS: 20-26 |
| | (WHITE), member 1 | |
| ABHD1 | Abhydrolase domain containing 1 | SEQ ID NOS: 27-31 |
| ABHD10 | Abhydrolase domain containing 10 | SEQ ID NOS: 32-35 |
| ABHD14A | Abhydrolase domain containing 14A | SEQ ID NOS: 36-40 |
| ABHD15 | Abhydrolase domain containing 15 | SEQ ID NO: 41 |
| ABI3BP | ABI family, member 3 (NESH) binding | SEQ ID NOS: 42-63 |
| | protein | |
| AC008641.1 | | SEQ ID NO: 73 |
| AC009133.22 | | SEQ ID NO: 76 |
| AC009491.2 | | SEQ ID NO: 77 |
| AC011513.3 | | SEQ ID NOS: 92-93 |
| AC136352.5 | | SEQ ID NO: 88 |
| AC145212.4 | MaFF-interacting protein | SEQ ID NO: 90 |
| AC233755.1 | | SEQ ID NO: 91 |
| ACACB | Acetyl-CoA carboxylase beta | SEQ ID NOS: 94-100 |
| ACAN | Aggrecan | SEQ ID NOS: 101-108 |
| ACE | Angiotensin I converting enzyme | SEQ ID NOS: 109-121 |
| ACHE | Acetylcholinesterase (Yt blood group) | SEQ ID NOS: 122-134 |
| ACP2 | Acid phosphatase 2, lysosomal | SEQ ID NOS: 135-142 |
| ACP5 | Acid phosphatase 5, tartrate resistant | SEQ ID NOS: 143-151 |
| ACP6 | Acid phosphatase 6, lysophosphatidic | SEQ ID NOS: 152-158 |
| ACPP | Acid phosphatase, prostate | SEQ ID NOS: 163-167 |
| ACR | Acrosin | SEQ ID NOS: 168-169 |
| ACRBP | Acrosin binding protein | SEQ ID NOS: 170-174 |
| ACRV1 | Acrosomal vesicle protein 1 | SEQ ID NOS: 175-178 |
| ACSF2 | Acyl-CoA synthetase family member 2 | SEQ ID NOS: 179-187 |
| ACTL10 | Actin-like 10 | SEQ ID NO: 188 |
| ACVR1 | Activin A receptor, type I | SEQ ID NOS: 189-197 |
| ACVR1C | Activin A receptor, type IC | SEQ ID NOS: 198-201 |
| ACVRL1 | Activin A receptor type II-like 1 | SEQ ID NOS: 202-207 |
| ACYP1 | Acylphosphatase 1, erythrocyte (common) | SEQ ID NOS: 208-213 |
| | type | |
| ACYP2 | Acylphosphatase 2, muscle type | SEQ ID NOS: 214-221 |
| ADAM10 | ADAM metallopeptidase domain 10 | SEQ ID NOS: 230-237 |
| ADAM12 | ADAM metallopeptidase domain 12 | SEQ ID NOS: 238-240 |
| ADAM15 | ADAM metallopeptidase domain 15 | SEQ ID NOS: 241-252 |
| ADAM17 | ADAM metallopeptidase domain 17 | SEQ ID NOS: 253-255 |
| ADAM18 | ADAM metallopeptidase domain 18 | SEQ ID NOS: 256-260 |
| ADAM22 | ADAM metallopeptidase domain 22 | SEQ ID NOS: 261-269 |
| ADAM28 | ADAM metallopeptidase domain 28 | SEQ ID NOS: 270-275 |
| ADAM29 | ADAM metallopeptidase domain 29 | SEQ ID NOS: 276-284 |
| ADAM32 | ADAM metallopeptidase domain 32 | SEQ ID NOS: 285-291 |
| ADAM33 | ADAM metallopeptidase domain 33 | SEQ ID NOS: 292-296 |
| ADAM7 | ADAM metallopeptidase domain 7 | SEQ ID NOS: 297-300 |
| ADAM8 | ADAM metallopeptidase domain 8 | SEQ ID NOS: 301-305 |
| ADAM9 | ADAM metallopeptidase domain 9 | SEQ ID NOS: 306-311 |
| ADAMDEC1 | ADAM-like, decysin 1 | SEQ ID NOS: 312-314 |
| ADAMTS1 | ADAM metallopeptidase with | SEQ ID NOS: 315-318 |
| | thrombospondin type 1 motif, 1 | |
| ADAMTS10 | ADAM metallopeptidase with | SEQ ID NOS: 319-324 |
| | thrombospondin type 1 motif, 10 | |
| ADAMTS12 | ADAM metallopeptidase with | SEQ ID NOS: 325-327 |
| | thrombospondin type 1 motif, 12 | |
| ADAMTS13 | ADAM metallopeptidase with | SEQ ID NOS: 328-335 |
| | thrombospondin type 1 motif, 13 | |
| ADAMTS14 | ADAM metallopeptidase with | SEQ ID NOS: 336-337 |
| | thrombospondin type 1 motif, 14 | |
| ADAMTS15 | ADAM metallopeptidase with | SEQ ID NO: 338 |
| | thrombospondin type 1 motif, 15 | |
| ADAMTS16 | ADAM metallopeptidase with | SEQ ID NOS: 339-340 |
| | thrombospondin type 1 motif, 16 | |
| ADAMTS17 | ADAM metallopeptidase with | SEQ ID NOS: 341-344 |
| | thrombospondin type 1 motif, 17 | |
| ADAMTS18 | ADAM metallopeptidase with | SEQ ID NOS: 345-348 |
| | thrombospondin type 1 motif, 18 | |
| ADAMTS19 | ADAM metallopeptidase with | SEQ ID NOS: 349-352 |
| | thrombospondin type 1 motif, 19 | |
| ADAMTS2 | ADAM metallopeptidase with | SEQ ID NOS: 353-355 |
| | thrombospondin type 1 motif, 2 | |
| ADAMTS20 | ADAM metallopeptidase with | SEQ ID NOS: 356-359 |
| | thrombospondin type 1 motif, 20 | |
| ADAMTS3 | ADAM metallopeptidase with | SEQ ID NOS: 360-361 |
| | thrombospondin type 1 motif, 3 | |
| ADAMTS5 | ADAM metallopeptidase with | SEQ ID NO: 362 |
| | thrombospondin type 1 motif, 5 | |
| ADAMTS6 | ADAM metallopeptidase with | SEQ ID NOS: 363-364 |
| | thrombospondin type 1 motif, 6 | |
| ADAMTS7 | ADAM metallopeptidase with | SEQ ID NO: 365 |
| | thrombospondin type 1 motif, 7 | |
| ADAMTS8 | ADAM metallopeptidase with | SEQ ID NO: 366 |
| | thrombospondin type 1 motif, 8 | |
| ADAMTS9 | ADAM metallopeptidase with | SEQ ID NOS: 367-371 |
| | thrombospondin type 1 motif, 9 | |
| ADAMTSL1 | ADAMTS-like 1 | SEQ ID NOS: 372-382 |
| ADAMTSL2 | ADAMTS-like 2 | SEQ ID NOS: 383-385 |
| ADAMTSL3 | ADAMTS-like 3 | SEQ ID NOS: 386-387 |
| ADAMTSL4 | ADAMTS-like 4 | SEQ ID NOS: 388-391 |
| ADAMTSL5 | ADAMTS-like 5 | SEQ ID NOS: 392-397 |
| ADCK1 | AarF domain containing kinase 1 | SEQ ID NOS: 398-402 |
| ADCYAP1 | Adenylate cyclase activating polypeptide 1 | SEQ ID NOS: 403-404 |
| | (pituitary) | |
| ADCYAP1R1 | Adenylate cyclase activating polypeptide 1 | SEQ ID NOS: 405-411 |
| | (pituitary) receptor type I | |
| ADGRA3 | Adhesion G protein-coupled receptor A3 | SEQ ID NOS: 412-416 |
| ADGRB2 | Adhesion G protein-coupled receptor B2 | SEQ ID NOS: 417-425 |
| ADGRD1 | Adhesion G protein-coupled receptor D1 | SEQ ID NOS: 426-431 |
| ADGRE3 | Adhesion G protein-coupled receptor E3 | SEQ ID NOS: 432-436 |
| ADGRE5 | Adhesion G protein-coupled receptor E5 | SEQ ID NOS: 437-442 |
| ADGRF1 | Adhesion G protein-coupled receptor F1 | SEQ ID NOS: 443-447 |
| ADGRG1 | Adhesion G protein-coupled receptor G1 | SEQ ID NOS: 448-512 |
| ADGRG5 | Adhesion G protein-coupled receptor G5 | SEQ ID NOS: 513-515 |
| ADGRG6 | Adhesion G protein-coupled receptor G6 | SEQ ID NOS: 516-523 |
| ADGRV1 | Adhesion G protein-coupled receptor V1 | SEQ ID NOS: 524-540 |
| ADI1 | Acireductone dioxygenase 1 | SEQ ID NOS: 541-543 |
| ADIG | Adipogenin | SEQ ID NOS: 544-547 |
| ADIPOQ | Adiponectin, C1Q and collagen domain | SEQ ID NOS: 548-549 |
| | containing | |
| ADM | Adrenomedullin | SEQ ID NOS: 550-557 |
| ADM2 | Adrenomedullin 2 | SEQ ID NOS: 558-559 |
| ADM5 | Adrenomedullin 5 (putative) | SEQ ID NO: 560 |
| ADPGK | ADP-dependent glucokinase | SEQ ID NOS: 561-570 |
| ADPRHL2 | ADP-ribosylhydrolase like 2 | SEQ ID NO: 571 |
| AEBP1 | AE binding protein 1 | SEQ ID NOS: 572-579 |
| AFM | Afamin | SEQ ID NO: 584 |
| AFP | Alpha-fetoprotein | SEQ ID NOS: 585-586 |
| AGA | Aspartylglucosaminidase | SEQ ID NOS: 587-589 |
| AGER | Advanced glycosylation end product- | SEQ ID NOS: 590-600 |
| | specific receptor | |
| AGK | Acylglycerol kinase | SEQ ID NOS: 601-606 |
| AGPS | Alkylglycerone phosphate synthase | SEQ ID NOS: 607-610 |
| AGR2 | Anterior gradient 2, protein disulphide | SEQ ID NOS: 611-614 |
| | isomerase family member | |
| AGR3 | Anterior gradient 3, protein disulphide | SEQ ID NOS: 615-617 |
| | isomerase family member | |
| AGRN | Agrin | SEQ ID NOS: 618-621 |
| AGRP | Agouti related neuropeptide | SEQ ID NO: 622 |
| AGT | Angiotensinogen (serpin peptidase inhibitor, | SEQ ID NO: 623 |
| | clade A, member 8) | |
| AGTPBP1 | ATP/GTP binding protein 1 | SEQ ID NOS: 624-627 |
| AGTRAP | Angiotensin II receptor-associated protein | SEQ ID NOS: 628-635 |
| AHCYL2 | Adenosylhomocysteinase-like 2 | SEQ ID NOS: 636-642 |
| AHSG | Alpha-2-HS-glycoprotein | SEQ ID NOS: 643-644 |
| AIG1 | Androgen-induced 1 | SEQ ID NOS: 645-653 |
| AK4 | Adenylate kinase 4 | SEQ ID NOS: 654-657 |
| AKAP10 | A kinase (PRKA) anchor protein 10 | SEQ ID NOS: 658-666 |
| AKR1C1 | Aldo-keto reductase family 1, member C1 | SEQ ID NOS: 667-669 |
| AL356289.1 | | SEQ ID NO: 677 |
| AL589743.1 | | SEQ ID NO: 678 |
| ALAS2 | 5′-aminolevulinate synthase 2 | SEQ ID NOS: 684-691 |
| ALB | Albumin | SEQ ID NOS: 692-701 |
| ALDH9A1 | Aldehyde dehydrogenase 9 family, member | SEQ ID NO: 702 |
| | A1 | |
| ALDOA | Aldolase A, fructose-bisphosphate | SEQ ID NOS: 703-717 |
| ALG1 | ALG1, chitobiosyldiphosphodolichol beta- | SEQ ID NOS: 718-723 |
| | mannosyltransferase | |
| ALG5 | ALG5, dolichyl-phosphate beta- | SEQ ID NOS: 724-725 |
| | glucosyltransferase | |
| ALG9 | ALG9, alpha-1,2-mannosyltransferase | SEQ ID NOS: 726-736 |
| ALKBH1 | AlkB homolog 1, histone H2A dioxygenase | SEQ ID NOS: 746-748 |
| ALKBH5 | AlkB homolog 5, RNA demethylase | SEQ ID NOS: 749-750 |
| ALPI | Alkaline phosphatase, intestinal | SEQ ID NOS: 751-752 |
| ALPL | Alkaline phosphatase, liver/bone/kidney | SEQ ID NOS: 753-757 |
| ALPP | Alkaline phosphatase, placental | SEQ ID NO: 758 |
| ALPPL2 | Alkaline phosphatase, placental-like 2 | SEQ ID NO: 759 |
| AMBN | Ameloblastin (enamel matrix protein) | SEQ ID NOS: 760-762 |
| AMBP | Alpha-1-microglobulin/bikunin precursor | SEQ ID NOS: 763-765 |
| AMELX | Amelogenin, X-linked | SEQ ID NOS: 766-768 |
| AMELY | Amelogenin, Y-linked | SEQ ID NOS: 769-770 |
| AMH | Anti-Mullerian hormone | SEQ ID NO: 771 |
| AMICA1 | Adhesion molecule, interacts with CXADR | SEQ ID NOS: 7348- |
| | antigen 1 | 7356 |
| AMPD1 | Adenosine monophosphate deaminase 1 | SEQ ID NOS: 772-774 |
| AMTN | Amelotin | SEQ ID NOS: 775-776 |
| AMY1A | Amylase, alpha 1A (salivary) | SEQ ID NOS: 777-779 |
| AMY1B | Amylase, alpha 1B (salivary) | SEQ ID NOS: 780-783 |
| AMY1C | Amylase, alpha 1C (salivary) | SEQ ID NO: 784 |
| AMY2A | Amylase, alpha 2A (pancreatic) | SEQ ID NOS: 785-787 |
| AMY2B | Amylase, alpha 2B (pancreatic) | SEQ ID NOS: 788-792 |
| ANG | Angiogenin, ribonuclease, RNase A family, | SEQ ID NOS: 793-794 |
| | 5 | |
| ANGEL1 | Angel homolog 1 (Drosophila) | SEQ ID NOS: 795-798 |
| ANGPT1 | Angiopoietin 1 | SEQ ID NOS: 799-803 |
| ANGPT2 | Angiopoietin 2 | SEQ ID NOS: 804-807 |
| ANGPT4 | Angiopoietin 4 | SEQ ID NO: 808 |
| ANGPTL1 | Angiopoietin-like 1 | SEQ ID NOS: 809-811 |
| ANGPTL2 | Angiopoietin-like 2 | SEQ ID NOS: 812-813 |
| ANGPTL3 | Angiopoietin-like 3 | SEQ ID NO: 814 |
| ANGPTL4 | Angiopoietin-like 4 | SEQ ID NOS: 815-822 |
| ANGPTL5 | Angiopoietin-like 5 | SEQ ID NOS: 823-824 |
| ANGPTL6 | Angiopoietin-like 6 | SEQ ID NOS: 825-827 |
| ANGPTL7 | Angiopoietin-like 7 | SEQ ID NO: 828 |
| ANK1 | Ankyrin 1, erythrocytic | SEQ ID NOS: 833-843 |
| ANKDD1A | Ankyrin repeat and death domain containing | SEQ ID NOS: 844-850 |
| | 1A | |
| ANKRD54 | Ankyrin repeat domain 54 | SEQ ID NOS: 851-859 |
| ANKRD60 | Ankyrin repeat domain 60 | SEQ ID NO: 860 |
| ANO7 | Anoctamin 7 | SEQ ID NOS: 861-864 |
| ANO1 | #N/A | SEQ ID NO: 865 |
| ANTXR1 | Anthrax toxin receptor 1 | SEQ ID NOS: 866-869 |
| AOAH | Acyloxyacyl hydrolase (neutrophil) | SEQ ID NOS: 870-874 |
| AOC1 | Amine oxidase, copper containing 1 | SEQ ID NOS: 875-880 |
| AOC2 | Amine oxidase, copper containing 2 (retina- | SEQ ID NOS: 881-882 |
| | specific) | |
| AOC3 | Amine oxidase, copper containing 3 | SEQ ID NOS: 883-889 |
| AP000721.4 | | SEQ ID NO: 890 |
| APBB1 | Amyloid beta (A4) precursor protein- | SEQ ID NOS: 891-907 |
| | binding, family B, member 1 (Fe65) | |
| APCDD1 | Adenomatosis polyposis coli down- | SEQ ID NOS: 908-913 |
| | regulated 1 | |
| APCS | Amyloid P component, serum | SEQ ID NO: 914 |
| APELA | Apelin receptor early endogenous ligand | SEQ ID NOS: 915-917 |
| APLN | Apelin | SEQ ID NO: 918 |
| APLP2 | Amyloid beta (A4) precursor-like protein 2 | SEQ ID NOS: 919-928 |
| APOA1BP | Apolipoprotein A-I | SEQ ID NOS: 929-933 |
| APOA1BP | Apolipoprotein A-I binding protein | SEQ ID NOS: 9177- |
| | | 9179 |
| APOA2 | Apolipoprotein A-II | SEQ ID NOS: 934-942 |
| APOA4 | Apolipoprotein A-IV | SEQ ID NO: 943 |
| APOA5 | Apolipoprotein A-V | SEQ ID NOS: 944-946 |
| APOB | Apolipoprotein B | SEQ ID NOS: 947-948 |
| APOC1 | Apolipoprotein C-I | SEQ ID NOS: 949-957 |
| APOC2 | Apolipoprotein C-II | SEQ ID NOS: 958-962 |
| APOC3 | Apolipoprotein C-III | SEQ ID NOS: 963-966 |
| APOC4 | Apolipoprotein C-IV | SEQ ID NOS: 967-968 |
| APOC4- | APOC4-APOC2 readthrough (NMD | SEQ ID NOS: 969-970 |
| APOC2 | candidate) | |
| APOD | Apolipoprotein D | SEQ ID NOS: 971-974 |
| APOE | Apolipoprotein E | SEQ ID NOS: 975-978 |
| APOF | Apolipoprotein F | SEQ ID NO: 979 |
| APOH | Apolipoprotein H (beta-2-glycoprotein I) | SEQ ID NOS: 980-983 |
| APOL1 | Apolipoprotein L, 1 | SEQ ID NOS: 984-994 |
| APOL3 | Apolipoprotein L, 3 | SEQ ID NOS: 995-1009 |
| APOM | Apolipoprotein M | SEQ ID NOS: 1010- |
| | | 1012 |
| APOOL | Apolipoprotein O-like | SEQ ID NOS: 1013- |
| | | 1015 |
| ARCN1 | Archain 1 | SEQ ID NOS: 1016- |
| | | 1020 |
| ARFIP2 | ADP-ribosylation factor interacting protein | SEQ ID NOS: 1021- |
| | 2 | 1027 |
| ARHGAP36 | Rho GTPase activating protein 36 | SEQ ID NOS: 1028- |
| | | 1033 |
| ARHGAP6 | Rho GTPase activating protein 6 | SEQ ID NOS: 1043- |
| | | 1048 |
| ARHGEF4 | Rho guanine nucleotide exchange factor | SEQ ID NOS: 1049- |
| | (GEF) 4 | 1059 |
| ARL16 | ADP-ribosylation factor-like 16 | SEQ ID NOS: 1060- |
| | | 1068 |
| ARMC5 | Armadillo repeat containing 5 | SEQ ID NOS: 1069- |
| | | 1075 |
| ARNTL | Aryl hydrocarbon receptor nuclear | SEQ ID NOS: 1076- |
| | translocator-like | 1090 |
| ARSA | Arylsulfatase A | SEQ ID NOS: 1091- |
| | | 1096 |
| ARSB | Arylsulfatase B | SEQ ID NOS: 1097- |
| | | 1100 |
| ARSE | Arylsulfatase E (chondrodysplasia punctata | SEQ ID NOS: 1101- |
| | 1) | 1104 |
| ARSG | Arylsulfatase G | SEQ ID NOS: 1105- |
| | | 1108 |
| ARSI | Arylsulfatase family, member I | SEQ ID NOS: 1109- |
| | | 1111 |
| ARSK | Arylsulfatase family, member K | SEQ ID NOS: 1112- |
| | | 1116 |
| ART3 | ADP-ribosyltransferase 3 | SEQ ID NOS: 1117- |
| | | 1124 |
| ART4 | ADP-ribosyltransferase 4 (Dombrock blood | SEQ ID NOS: 1125- |
| | group) | 1128 |
| ART5 | ADP-ribosyltransferase 5 | SEQ ID NOS: 1129- |
| | | 1133 |
| ARTN | Artemin | SEQ ID NOS: 1134- |
| | | 1144 |
| ASAH1 | N-acylsphingosine amidohydrolase (acid | SEQ ID NOS: 1145- |
| | ceramidase) 1 | 1195 |
| ASAH2 | N-acylsphingosine amidohydrolase (non- | SEQ ID NOS: 1196- |
| | lysosomal ceramidase) 2 | 1201 |
| ASCL1 | Achaete-scute family bHLH transcription | SEQ ID NO: 1202 |
| | factor 1 | |
| ASIP | Agouti signaling protein | SEQ ID NOS: 1203- |
| | | 1204 |
| ASPN | Asporin | SEQ ID NOS: 1205- |
| | | 1206 |
| ASTL | Astacin-like metallo-endopeptidase (M12 | SEQ ID NO: 1207 |
| | family) | |
| ATAD5 | ATPase family, AAA domain containing 5 | SEQ ID NOS: 1208- |
| | | 1209 |
| ATAT1 | Alpha tubulin acetyltransferase 1 | SEQ ID NOS: 1210- |
| | | 1215 |
| ATG2A | Autophagy related 2A | SEQ ID NOS: 1216- |
| | | 1218 |
| ATG5 | Autophagy related 5 | SEQ ID NOS: 1219- |
| | | 1227 |
| ATMIN | ATM interactor | SEQ ID NOS: 1228- |
| | | 1231 |
| ATP13A1 | ATPase type 13A1 | SEQ ID NOS: 1232- |
| | | 1234 |
| ATP5F1 | ATP synthase, H+ transporting, | SEQ ID NOS: 1235- |
| | mitochondrial Fo complex, subunit Bl | 1236 |
| ATP6AP1 | ATPase, H+ transporting, lysosomal | SEQ ID NOS: 1237- |
| | accessory protein 1 | 1244 |
| ATP6AP2 | ATPase, H+ transporting, lysosomal | SEQ ID NOS: 1245- |
| | accessory protein 2 | 1267 |
| ATPAF1 | ATP synthase mitochondrial F1 complex | SEQ ID NOS: 1268- |
| | assembly factor 1 | 1278 |
| AUH | AU RNA binding protein/enoyl-CoA | SEQ ID NOS: 1279- |
| | hydratase | 1280 |
| AVP | Arginine vasopressin | SEQ ID NO: 1281 |
| AXIN2 | Axin 2 | SEQ ID NOS: 1282- |
| | | 1289 |
| AZGP1 | Alpha-2-glycoprotein 1, zinc-binding | SEQ ID NOS: 1290- |
| | | 1292 |
| AZU1 | Azurocidin 1 | SEQ ID NOS: 1293- |
| | | 1294 |
| B2M | Beta-2-microglobulin | SEQ ID NOS: 1295- |
| | | 1301 |
| B3GALNT1 | Beta-1,3-N-acetylgalactosaminyltransferase | SEQ ID NOS: 1302- |
| | 1 (globoside blood group) | 1314 |
| B3GALNT2 | Beta-1,3-N-acetylgalactosaminvltransferase | SEQ ID NOS: 1315- |
| | 2 | 1317 |
| B3GALT1 | UDP-Gal:betaGlcNAc beta 1,3- | SEQ ID NO: 1318 |
| | galactosyltransferase, polypeptide 1 | |
| B3GALT4 | UDP-Gal:betaGlcNAc beta 1,3- | SEQ ID NO: 1319 |
| | galactosyltransferase, polypeptide 4 | |
| B3GALT5 | UDP-Gal:betaGlcNAc beta 1,3- | SEQ ID NOS: 1320- |
| | galactosyltransferase, polypeptide 5 | 1324 |
| B3GALT6 | UDP-Gal:betaGal beta 1,3- | SEQ ID NO: 1325 |
| | galactosyltransferase polypeptide 6 | |
| B3GAT3 | Beta-1,3-glucuronyltransferase 3 | SEQ ID NOS: 1326- |
| | | 1330 |
| B3GLCT | Beta 3-glucosvltransferase | SEQ ID NO: 1331 |
| B3GNT3 | UDP-GlcNAc:betaGal beta-1,3-N- | SEQ ID NOS: 1332- |
| | acetylglucosaminyltransferase 3 | 1335 |
| B3GNT4 | UDP-GlcNAc:betaGal beta-1,3-N- | SEQ ID NOS: 1336- |
| | acetylglucosaminyltransferase 4 | 1339 |
| B3GNT6 | UDP-GlcNAc:betaGal beta-1,3-N- | SEQ ID NOS: 1340- |
| | acetylglucosaminyltransferase 6 | 1341 |
| B3GNT7 | UDP-GlcNAc:betaGal beta-1,3-N- | SEQ ID NO: 1342 |
| | acetylglucosaminyltransferase 7 | |
| B3GNT8 | UDP-GlcNAc:betaGal beta-1,3-N- | SEQ ID NO: 1343 |
| | acetylglucosaminyltransferase 8 | |
| B3GNT9 | UDP-GlcNAc:betaGal beta-1,3-N- | SEQ ID NO: 1344 |
| | acetylglucosaminyltransferase 9 | |
| B4GALNT1 | Beta-1,4-N-acetyl-galactosaminyl | SEQ ID NOS: 1345- |
| | transferase 1 | 1356 |
| B4GALNT3 | Beta-1,4-N-acetyl-galactosaminyl | SEQ ID NOS: 1357- |
| | transferase 3 | 1358 |
| B4GALNT4 | Beta-1,4-N-acetyl-galactosaminyl | SEQ ID NOS: 1359- |
| | transferase 4 | 1361 |
| B4GALT4 | UDP-Gal:betaGlcNAc beta 1,4- | SEQ ID NOS: 1362- |
| | galactosyltransferase, polypeptide 4 | 1374 |
| B4GALT5 | UDP-Gal:betaGlcNAc beta 1,4- | SEQ ID NO: 1375 |
| | galactosyltransferase, polypeptide 5 | |
| B4GALT6 | UDP-Gal:betaGlcNAc beta 1,4- | SEQ ID NOS: 1376- |
| | galactosyltransferase, polypeptide 6 | 1379 |
| B4GAT1 | Beta-1,4-glucuronyltransferase 1 | SEQ ID NO: 1380 |
| B9D1 | B9 protein domain 1 | SEQ ID NOS: 1381- |
| | | 1397 |
| BACE2 | Beta-site APP-cleaving enzyme 2 | SEQ ID NOS: 1398- |
| | | 1400 |
| BAGE5 | B melanoma antigen family, member 5 | SEQ ID NO: 1401 |
| BCAM | Basal cell adhesion molecule (Lutheran | SEQ ID NOS: 1402- |
| | blood group) | 1405 |
| BCAN | Brevican | SEQ ID NOS: 1406- |
| | | 1412 |
| BCAP29 | B-cell receptor-associated protein 29 | SEQ ID NOS: 1413- |
| | | 1425 |
| BCAR1 | Breast cancer anti-estrogen resistance 1 | SEQ ID NOS: 1426- |
| | | 1443 |
| BCHE | Butyrylcholinesterase | SEQ ID NOS: 1444- |
| | | 1448 |
| BCKDHB | Branched chain keto acid dehydrogenase | SEQ ID NOS: 1449- |
| | E1, beta polypeptide | 1451 |
| BDNF | Brain-derived neurotrophic factor | SEQ ID NOS: 1452- |
| | | 1469 |
| BGLAP | Bone gamma-carboxyglutamate (gla) | SEQ ID NO: 1470 |
| | protein | |
| BGN | Biglycan | SEQ ID NOS: 1471- |
| | | 1472 |
| BLVRB | Biliverdin reductase B | SEQ ID NOS: 1473- |
| | | 1477 |
| BMP1 | Bone morphogenetic protein 1 | SEQ ID NOS: 1478- |
| | | 1489 |
| BMP10 | Bone morphogenetic protein 10 | SEQ ID NO: 1490 |
| BMP15 | Bone morphogenetic protein 15 | SEQ ID NO: 1491 |
| BMP2 | Bone morphogenetic protein 2 | SEQ ID NO: 1492 |
| BMP3 | Bone morphogenetic protein 3 | SEQ ID NO: 1493 |
| BMP4 | Bone morphogenetic protein 4 | SEQ ID NOS: 1494- |
| | | 1501 |
| BMP6 | Bone morphogenetic protein 6 | SEQ ID NO: 1502 |
| BMP7 | Bone morphogenetic protein 7 | SEQ ID NOS: 1503- |
| | | 1506 |
| BMP8A | Bone morphogenetic protein 8a | SEQ ID NO: 1507 |
| BMP8B | Bone morphogenetic protein 8b | SEQ ID NO: 1508 |
| BMPER | BMP binding endothelial regulator | SEQ ID NOS: 1509- |
| | | 1512 |
| BNC1 | Basonuclin 1 | SEQ ID NOS: 1513- |
| | | 1514 |
| BOC | BOC cell adhesion associated, oncogene | SEQ ID NOS: 1515- |
| | regulated | 1525 |
| BOD1 | Biorientation of chromosomes in cell | SEQ ID NOS: 1526- |
| | division 1 | 1530 |
| BOLA1 | BolA family member 1 | SEQ ID NOS: 1531- |
| | | 1533 |
| BPI | Bactericidal/permeability-increasing protein | SEQ ID NOS: 1534- |
| | | 1537 |
| BPIFA1 | BPI fold containing family A, member 1 | SEQ ID NOS: 1538- |
| | | 1541 |
| BPIFA2 | BPI fold containing family A, member 2 | SEQ ID NOS: 1542- |
| | | 1543 |
| BPIFA3 | BPI fold containing family A, member 3 | SEQ ID NOS: 1544- |
| | | 1545 |
| BPIFB1 | BPI fold containing family B, member 1 | SEQ ID NOS: 1546- |
| | | 1547 |
| BPIFB2 | BPI fold containing family B, member 2 | SEQ ID NO: 1548 |
| BPIFB3 | BPI fold containing family B, member 3 | SEQ ID NO: 1549 |
| BPIFB4 | BPI fold containing family B, member 4 | SEQ ID NOS: 1550- |
| | | 1551 |
| BPIFB6 | BPI fold containing family B, member 6 | SEQ ID NOS: 1552- |
| | | 1553 |
| BPIFC | BPI fold containing family C | SEQ ID NOS: 1554- |
| | | 1557 |
| BRF1 | BRF1, RNA polymerase III transcription | SEQ ID NOS: 1558- |
| | initiation factor 90 kDa subunit | 1573 |
| BRINP1 | Bone morphogenetic protein/retinoic acid | SEQ ID NOS: 1574- |
| | inducible neural-specific 1 | 1575 |
| BRINP2 | Bone morphogenetic protein/retinoic acid | SEQ ID NO: 1576 |
| | inducible neural-specific 2 | |
| BRINP3 | Bone morphogenetic protein/retinoic acid | SEQ ID NOS: 1577- |
| | inducible neural-specific 3 | 1579 |
| BSG | Basigin (Ok blood group) | SEQ ID NOS: 1580- |
| | | 1590 |
| BSPH1 | Binder of sperm protein homolog 1 | SEQ ID NO: 1591 |
| BST1 | Bone marrow stromal cell antigen 1 | SEQ ID NOS: 1592- |
| | | 1596 |
| BTBD17 | BTB (POZ) domain containing 17 | SEQ ID NO: 1597 |
| BTD | Biotinidase | SEQ ID NOS: 1598- |
| | | 1607 |
| BTN2A2 | Butyrophilin, subfamily 2, member A2 | SEQ ID NOS: 1608- |
| | | 1621 |
| BTN3A1 | Butyrophilin, subfamily 3, member A1 | SEQ ID NOS: 1622- |
| | | 1628 |
| BTN3A2 | Butyrophilin, subfamily 3, member A2 | SEQ ID NOS: 1629- |
| | | 1639 |
| BTN3A3 | Butyrophilin, subfamily 3, member A3 | SEQ ID NOS: 1640- |
| | | 1648 |
| C10orf10 | Chromosome 10 open reading frame 10 | SEQ ID NOS: 4169- |
| | | 4170 |
| C10orf99 | Chromosome 10 open reading frame 99 | SEQ ID NO: 1650 |
| C11orf1 | Chromosome 11 open reading frame 1 | SEQ ID NOS: 1651- |
| | | 1655 |
| C11orf24 | Chromosome 11 open reading frame 24 | SEQ ID NOS: 1656- |
| | | 1658 |
| C11orf45 | Chromosome 11 open reading frame 45 | SEQ ID NOS: 1659- |
| | | 1660 |
| C11orf94 | Chromosome 11 open reading frame 94 | SEQ ID NO: 1661 |
| C12orf10 | Chromosome 12 open reading frame 10 | SEQ ID NOS: 1662- |
| | | 1665 |
| C12orf49 | Chromosome 12 open reading frame 49 | SEQ ID NOS: 1666- |
| | | 1669 |
| C12orf73 | Chromosome 12 open reading frame 73 | SEQ ID NOS: 1670- |
| | | 1679 |
| C12orf76 | Chromosome 12 open reading frame 76 | SEQ ID NOS: 1680- |
| | | 1687 |
| C14orf80 | Chromosome 14 open reading frame 80 | SEQ ID NOS: 13083- |
| | | 13096 |
| C14orf93 | Chromosome 14 open reading frame 93 | SEQ ID NOS: 1688- |
| | | 1703 |
| C16orf89 | Chromosome 16 open reading frame 89 | SEQ ID NOS: 1704- |
| | | 1706 |
| C16orf90 | Chromosome 16 open reading frame 90 | SEQ ID NOS: 1707- |
| | | 1708 |
| C17orf67 | Chromosome 17 open reading frame 67 | SEQ ID NO: 1709 |
| C17orf75 | Chromosome 17 open reading frame 75 | SEQ ID NOS: 1710- |
| | | 1718 |
| C17orf99 | Chromosome 17 open reading frame 99 | SEQ ID NOS: 1719- |
| | | 1721 |
| C18orf54 | Chromosome 18 open reading frame 54 | SEQ ID NOS: 1722- |
| | | 1726 |
| C19orf47 | Chromosome 19 open reading frame 47 | SEQ ID NOS: 1727- |
| | | 1734 |
| C19orf70 | Chromosome 19 open reading frame 70 | SEQ ID NOS: 1735- |
| | | 1738 |
| C19orf80 | Chromosome 19 open reading frame 80 | SEQ ID NOS: 829-832 |
| C1GALT1 | Core 1 synthase, glycoprotein-N- | SEQ ID NOS: 1739- |
| | acetylgalactosamine 3-beta- | 1743 |
| | galactosyltransferase 1 | |
| C1orf127 | Chromosome 1 open reading frame 127 | SEQ ID NOS: 1744- |
| | | 1747 |
| C1orf159 | Chromosome 1 open reading frame 159 | SEQ ID NOS: 1748- |
| | | 1760 |
| C1orf198 | Chromosome 1 open reading frame 198 | SEQ ID NOS: 1761- |
| | | 1765 |
| C1orf234 | Chromosome 1 open reading frame 234 | SEQ ID NOS: 13118- |
| | | 13120 |
| C1orf54 | Chromosome 1 open reading frame 54 | SEQ ID NOS: 1766- |
| | | 1768 |
| C1orf56 | Chromosome 1 open reading frame 56 | SEQ ID NO: 1769 |
| C1QA | Complement component 1, q | SEQ ID NOS: 1770- |
| | subcomponent, A chain | 1772 |
| C1QB | Complement component 1, q | SEQ ID NOS: 1773- |
| | subcomponent, B chain | 1776 |
| C1QC | Complement component 1, q | SEQ ID NOS: 1777- |
| | subcomponent, C chain | 1779 |
| C1QL1 | Complement component 1, q | SEQ ID NO: 1780 |
| | subcomponent-like 1 | |
| C1QL2 | Complement component 1, q | SEQ ID NO: 1781 |
| | subcomponent-like 2 | |
| C1QL3 | Complement component 1, q | SEQ ID NOS: 1782- |
| | subcomponent-like 3 | 1783 |
| C1QL4 | Complement component 1, q | SEQ ID NO: 1784 |
| | subcomponent-like 4 | |
| C1QTNF1 | C1q and tumor necrosis factor related | SEQ ID NOS: 1785- |
| | protein 1 | 1794 |
| C1QTNF2 | C1q and tumor necrosis factor related | SEQ ID NO: 1796 |
| | protein 2 | |
| C1QTNF3 | C1q and tumor necrosis factor related | SEQ ID NOS: 1797- |
| | protein 3 | 1798 |
| C1QTNF4 | C1q and tumor necrosis factor related | SEQ ID NOS: 1799- |
| | protein 4 | 1800 |
| C1QTNF5 | C1q and tumor necrosis factor related | SEQ ID NOS: 1801- |
| | protein 5 | 1803 |
| C1QTNF7 | C1q and tumor necrosis factor related | SEQ ID NOS: 1804- |
| | protein 7 | 1808 |
| C1QTNF8 | C1q and tumor necrosis factor related | SEQ ID NOS: 1809- |
| | protein 8 | 1810 |
| C1QTNF9 | C1q and tumor necrosis factor related | SEQ ID NOS: 1811- |
| | protein 9 | 1812 |
| C1QTNF9B | C1q and tumor necrosis factor related | SEQ ID NOS: 1813- |
| | protein 9B | 1815 |
| C1R | Complement component 1, r subcomponent | SEQ ID NOS: 1816- |
| | | 1824 |
| C1RL | Complement component 1, r subcomponent- | SEQ ID NOS: 1825- |
| | like | 1833 |
| C1S | Complement component 1, s subcomponent | SEQ ID NOS: 1834- |
| | | 1843 |
| C2 | Complement component 2 | SEQ ID NOS: 1844- |
| | | 1858 |
| C21orf33 | Chromosome 21 open reading frame 33 | SEQ ID NOS: 1859- |
| | | 1867 |
| C21orf62 | Chromosome 21 open reading frame 62 | SEQ ID NOS: 1868- |
| | | 1871 |
| C22orf15 | Chromosome 22 open reading frame 15 | SEQ ID NOS: 1872- |
| | | 1874 |
| C22orf46 | Chromosome 22 open reading frame 46 | SEQ ID NO: 1875 |
| C2CD2 | C2 calcium-dependent domain containing 2 | SEQ ID NOS: 1876- |
| | | 1878 |
| C2orf40 | Chromosome 2 open reading frame 40 | SEQ ID NOS: 1879- |
| | | 1881 |
| C2orf66 | Chromosome 2 open reading frame 66 | SEQ ID NO: 1882 |
| C2orf69 | Chromosome 2 open reading frame 69 | SEQ ID NO: 1883 |
| C2orf78 | Chromosome 2 open reading frame 78 | SEQ ID NO: 1884 |
| C3 | Complement component 3 | SEQ ID NOS: 1885- |
| | | 1889 |
| C3orf33 | Chromosome 3 open reading frame 33 | SEQ ID NOS: 1890- |
| | | 1894 |
| C3orf58 | Chromosome 3 open reading frame 58 | SEQ ID NOS: 1895- |
| | | 1898 |
| C4A | Complement component 4A (Rodgers blood | SEQ ID NOS: 1899- |
| | group) | 1900 |
| C4B | Complement component 4B (Chido blood | SEQ ID NOS: 1901- |
| | group) | 1902 |
| C4BPA | Complement component 4 binding protein, | SEQ ID NOS: 1903- |
| | alpha | 1905 |
| C4BPB | Complement component 4 binding protein, | SEQ ID NOS: 1906- |
| | beta | 1910 |
| C4orf26 | Chromosome 4 open reading frame 26 | SEQ ID NOS: 9751- |
| | | 9754 |
| C4orf48 | Chromosome 4 open reading frame 48 | SEQ ID NOS: 1911- |
| | | 1912 |
| C5 | Complement component 5 | SEQ ID NO: 1913 |
| C5orf46 | Chromosome 5 open reading frame 46 | SEQ ID NOS: 1914- |
| | | 1915 |
| C6 | Complement component 6 | SEQ ID NOS: 1916- |
| | | 1919 |
| C6orf120 | Chromosome 6 open reading frame 120 | SEQ ID NO: 1920 |
| C6orf15 | Chromosome 6 open reading frame 15 | SEQ ID NO: 1921 |
| C6orf25 | Chromosome 6 open reading frame 25 | SEQ ID NOS: 8832- |
| | | 8839 |
| C6orf58 | Chromosome 6 open reading frame 58 | SEQ ID NO: 1922 |
| C7 | Complement component 7 | SEQ ID NO: 1923 |
| C7orf57 | Chromosome 7 open reading frame 57 | SEQ ID NOS: 1924- |
| | | 1928 |
| C7orf73 | Chromosome 7 open reading frame 73 | SEQ ID NOS: 12924- |
| | | 12925 |
| C8A | Complement component 8, alpha | SEQ ID NO: 1929 |
| | polypeptide | |
| C8B | Complement component 8, beta polypeptide | SEQ ID NOS: 1930- |
| | | 1932 |
| C8G | Complement component 8, gamma | SEQ ID NOS: 1933- |
| | polypeptide | 1934 |
| C9 | Complement component 9 | SEQ ID NO: 1935 |
| C9orf47 | Chromosome 9 open reading frame 47 | SEQ ID NOS: 1936- |
| | | 1938 |
| CA10 | Carbonic anhydrase X | SEQ ID NOS: 1939- |
| | | 1945 |
| CA11 | Carbonic anhydrase XI | SEQ ID NOS: 1946- |
| | | 1947 |
| CA6 | Carbonic anhydrase VI | SEQ ID NOS: 1948- |
| | | 1952 |
| CA9 | Carbonic anhydrase IX | SEQ ID NOS: 1953- |
| | | 1954 |
| CABLES1 | Cdk5 and Abl enzyme substrate 1 | SEQ ID NOS: 1955- |
| | | 1960 |
| CABP1 | Calcium binding protein 1 | SEQ ID NOS: 1961- |
| | | 1964 |
| CACNA2D1 | Calcium channel, voltage-dependent, alpha | SEQ ID NOS: 1965- |
| | 2/delta subunit 1 | 1968 |
| CACNA2D4 | Calcium channel, voltage-dependent, alpha | SEQ ID NOS: 1969- |
| | 2/delta subunit 4 | 1982 |
| CADM3 | Cell adhesion molecule 3 | SEQ ID NOS: 1983- |
| | | 1985 |
| CALCA | Calcitonin-related polypeptide alpha | SEQ ID NOS: 1986- |
| | | 1990 |
| CALCB | Calcitonin-related polypeptide beta | SEQ ID NOS: 1991- |
| | | 1993 |
| CALCR | Calcitonin receptor | SEQ ID NOS: 1994- |
| | | 2000 |
| CALCRL | Calcitonin receptor-like | SEQ ID NOS: 2001- |
| | | 2005 |
| CALR | Calreticulin | SEQ ID NOS: 2011- |
| | | 2014 |
| CALR3 | Calreticulin 3 | SEQ ID NOS: 2015- |
| | | 2016 |
| CALU | Calumenin | SEQ ID NOS: 2017- |
| | | 2022 |
| CAMK2D | Calcium/calmodulin-dependent protein | SEQ ID NOS: 2023- |
| | kinase II delta | 2034 |
| CAMP | Cathelicidin antimicrobial peptide | SEQ ID NO: 2035 |
| CANX | Calnexin | SEQ ID NOS: 2036- |
| | | 2050 |
| CARKD | Carbohydrate kinase domain containing | SEQ ID NOS: 9175- |
| | | 9176 |
| CARM1 | Coactivator-associated arginine | SEQ ID NOS: 2051- |
| | methyltransferase 1 | 2058 |
| CARNS1 | Carnosine synthase 1 | SEQ ID NOS: 2059- |
| | | 2061 |
| CARTPT | CART prepropeptide | SEQ ID NO: 2062 |
| CASQ1 | Calsequestrin 1 (fast-twitch, skeletal | SEQ ID NOS: 2063- |
| | muscle) | 2064 |
| CASQ2 | Calsequestrin 2 (cardiac muscle) | SEQ ID NO: 2065 |
| CATSPERG | Catsper channel auxiliary subunit gamma | SEQ ID NOS: 2066- |
| | | 2073 |
| CBLN1 | Cerebellin 1 precursor | SEQ ID NOS: 2074- |
| | | 2076 |
| CBLN2 | Cerebellin 2 precursor | SEQ ID NOS: 2077- |
| | | 2080 |
| CBLN3 | Cerebellin 3 precursor | SEQ ID NOS: 2081- |
| | | 2082 |
| CBLN4 | Cerebellin 4 precursor | SEQ ID NO: 2083 |
| CCBE1 | Collagen and calcium binding EGF domains | SEQ ID NOS: 2084- |
| | 1 | 2086 |
| CCDC108 | Coiled-coil domain containing 108 | SEQ ID NOS: 2659- |
| | | 2668 |
| CCDC112 | Coiled-coil domain containing 112 | SEQ ID NOS: 2087- |
| | | 2090 |
| CCDC129 | Coiled-coil domain containing 129 | SEQ ID NOS: 2091- |
| | | 2098 |
| CCDC134 | Coiled-coil domain containing 134 | SEQ ID NOS: 2099- |
| | | 2100 |
| CCDC149 | Coiled-coil domain containing 149 | SEQ ID NOS: 2101- |
| | | 2104 |
| CCDC3 | Coiled-coil domain containing 3 | SEQ ID NOS: 2105- |
| | | 2106 |
| CCDC80 | Coiled-coil domain containing 80 | SEQ ID NOS: 2107- |
| | | 2110 |
| CCDC85A | Coiled-coil domain containing 85A | SEQ ID NO: 2111 |
| CCDC88B | Coiled-coil domain containing 88B | SEQ ID NOS: 2112- |
| | | 2114 |
| CCER2 | Coiled-coil glutamate-rich protein 2 | SEQ ID NOS: 2115- |
| | | 2116 |
| CCK | Cholecystokinin | SEQ ID NOS: 2117- |
| | | 2119 |
| CCL1 | Chemokine (C-C motif) ligand 1 | SEQ ID NO: 2120 |
| CCL11 | Chemokine (C-C motif) ligand 11 | SEQ ID NO: 2121 |
| CCL13 | Chemokine (C-C motif) ligand 13 | SEQ ID NOS: 2122- |
| | | 2123 |
| CCL14 | Chemokine (C-C motif) ligand 14 | SEQ ID NOS: 2124- |
| | | 2127 |
| CCL15 | Chemokine (C-C motif) ligand 15 | SEQ ID NOS: 2128- |
| | | 2129 |
| CCL16 | Chemokine (C-C motif) ligand 16 | SEQ ID NOS: 2130- |
| | | 2132 |
| CCL17 | Chemokine (C-C motif) ligand 17 | SEQ ID NOS: 2133- |
| | | 2134 |
| CCL18 | Chemokine (C-C motif) ligand 18 | SEQ ID NO: 2135 |
| | (pulmonary and activation-regulated) | |
| CCL19 | Chemokine (C-C motif) ligand 19 | SEQ ID NOS: 2136- |
| | | 2137 |
| CCL2 | Chemokine (C-C motif) ligand 2 | SEQ ID NOS: 2138- |
| | | 2139 |
| CCL20 | Chemokine (C-C motif) ligand 20 | SEQ ID NOS: 2140- |
| | | 2142 |
| CCL21 | Chemokine (C-C motif) ligand 21 | SEQ ID NOS: 2143- |
| | | 2144 |
| CCL22 | Chemokine (C-C motif) ligand 22 | SEQ ID NO: 2145 |
| CCL23 | Chemokine (C-C motif) ligand 23 | SEQ ID NOS: 2146- |
| | | 2148 |
| CCL24 | Chemokine (C-C motif) ligand 24 | SEQ ID NOS: 2149- |
| | | 2150 |
| CCL25 | Chemokine (C-C motif) ligand 25 | SEQ ID NOS: 2151- |
| | | 2154 |
| CCL26 | Chemokine (C-C motif) ligand 26 | SEQ ID NOS: 2155- |
| | | 2156 |
| CCL27 | Chemokine (C-C motif) ligand 27 | SEQ ID NO: 2157 |
| CCL28 | Chemokine (C-C motif) ligand 28 | SEQ ID NOS: 2158- |
| | | 2160 |
| CCL3 | Chemokine (C-C motif) ligand 3 | SEQ ID NO: 2161 |
| CCL3L3 | Chemokine (C-C motif) ligand 3-like 3 | SEQ ID NO: 2162 |
| CCL4 | Chemokine (C-C motif) ligand 4 | SEQ ID NOS: 2163- |
| | | 2164 |
| CCL4L2 | Chemokine (C-C motif) ligand 4-like 2 | SEQ ID NOS: 2165- |
| | | 2174 |
| CCL5 | Chemokine (C-C motif) ligand 5 | SEQ ID NOS: 2175- |
| | | 2177 |
| CCL7 | Chemokine (C-C motif) ligand 7 | SEQ ID NOS: 2178- |
| | | 2180 |
| CCL8 | Chemokine (C-C motif) ligand 8 | SEQ ID NO: 2181 |
| CCNB1IP1 | Cyclin Bl interacting protein 1, E3 | SEQ ID NOS: 2182- |
| | ubiquitin protein ligase | 2193 |
| CCNL1 | Cyclin L1 | SEQ ID NOS: 2194- |
| | | 2202 |
| CCNL2 | Cyclin L2 | SEQ ID NOS: 2203- |
| | | 2210 |
| CD14 | CD14 molecule | SEQ ID NOS: 2211- |
| | | 2215 |
| CD160 | CD160 molecule | SEQ ID NOS: 2216- |
| | | 2220 |
| CD164 | CD164 molecule, sialomucin | SEQ ID NOS: 2221- |
| | | 2226 |
| CD177 | CD177 molecule | SEQ ID NOS: 2227- |
| | | 2229 |
| CD1E | CD1e molecule | SEQ ID NOS: 2230- |
| | | 2243 |
| CD2 | CD2 molecule | SEQ ID NOS: 2244- |
| | | 2245 |
| CD200 | CD200 molecule | SEQ ID NOS: 2246- |
| | | 2252 |
| CD200R1 | CD200 receptor 1 | SEQ ID NOS: 2253- |
| | | 2257 |
| CD22 | CD22 molecule | SEQ ID NOS: 2258- |
| | | 2275 |
| CD226 | CD226 molecule | SEQ ID NOS: 2276- |
| | | 2283 |
| CD24 | CD24 molecule | SEQ ID NOS: 2284- |
| | | 2290 |
| CD276 | CD276 molecule | SEQ ID NOS: 2291- |
| | | 2306 |
| CD300A | CD300a molecule | SEQ ID NOS: 2307- |
| | | 2311 |
| CD300LB | CD300 molecule-like family member b | SEQ ID NOS: 2312- |
| | | 2313 |
| CD300LF | CD300 molecule-like family member f | SEQ ID NOS: 2314- |
| | | 2322 |
| CD300LG | CD300 molecule-like family member g | SEQ ID NOS: 2323- |
| | | 2328 |
| CD3D | CD3d molecule, delta (CD3-TCR complex) | SEQ ID NOS: 2329- |
| | | 2332 |
| CD4 | CD4 molecule | SEQ ID NOS: 2333- |
| | | 2335 |
| CD40 | CD40 molecule, TNF receptor superfamily | SEQ ID NOS: 2336- |
| | member 5 | 2339 |
| CD44 | CD44 molecule (Indian blood group) | SEQ ID NOS: 2340- |
| | | 2366 |
| CD48 | CD48 molecule | SEQ ID NOS: 2367- |
| | | 2369 |
| CD5 | CD5 molecule | SEQ ID NOS: 2370- |
| | | 2371 |
| CD55 | CD55 molecule, decay accelerating factor | SEQ ID NOS: 2372- |
| | for complement (Cromer blood group) | 2382 |
| CD59 | CD59 molecule, complement regulatory | SEQ ID NOS: 2383- |
| | protein | 2393 |
| CD5L | CD5 molecule-like | SEQ ID NO: 2394 |
| CD6 | CD6 molecule | SEQ ID NOS: 2395- |
| | | 2402 |
| CD68 | CD68 molecule | SEQ ID NOS: 2403- |
| | | 2406 |
| CD7 | CD7 molecule | SEQ ID NOS: 2407- |
| | | 2412 |
| CD79A | CD79a molecule, immunoglobulin- | SEQ ID NOS: 2413- |
| | associated alpha | 2415 |
| CD80 | CD80 molecule | SEQ ID NOS: 2416- |
| | | 2418 |
| CD86 | CD86 molecule | SEQ ID NOS: 2419- |
| | | 2425 |
| CD8A | CD8a molecule | SEQ ID NOS: 2426- |
| | | 2429 |
| CD8B | CD8b molecule | SEQ ID NOS: 2430- |
| | | 2435 |
| CD99 | CD99 molecule | SEQ ID NOS: 2436- |
| | | 2444 |
| CDC23 | Cell division cycle 23 | SEQ ID NOS: 2445- |
| | | 2449 |
| CDC40 | Cell division cycle 40 | SEQ ID NOS: 2450- |
| | | 2452 |
| CDC45 | Cell division cycle 45 | SEQ ID NOS: 2453- |
| | | 2459 |
| CDCP1 | CUB domain containing protein 1 | SEQ ID NOS: 2460- |
| | | 2461 |
| CDCP2 | CUB domain containing protein 2 | SEQ ID NOS: 2462- |
| | | 2463 |
| CDH1 | Cadherin 1, type 1 | SEQ ID NOS: 2464- |
| | | 2471 |
| CDH11 | Cadherin 11, type 2, OB-cadherin | SEQ ID NOS: 2472- |
| | (osteoblast) | 2481 |
| CDH13 | Cadherin 13 | SEQ ID NOS: 2482- |
| | | 2491 |
| CDH17 | Cadherin 17, LI cadherin (liver-intestine) | SEQ ID NOS: 2492- |
| | | 2496 |
| CDH18 | Cadherin 18, type 2 | SEQ ID NOS: 2497- |
| | | 2503 |
| CDH19 | Cadherin 19, type 2 | SEQ ID NOS: 2504- |
| | | 2508 |
| CDH23 | Cadherin-related 23 | SEQ ID NOS: 2509- |
| | | 2524 |
| CDH5 | Cadherin 5, type 2 (vascular endothelium) | SEQ ID NOS: 2525- |
| | | 2532 |
| CDHR1 | Cadherin-related family member 1 | SEQ ID NOS: 2533- |
| | | 2538 |
| CDHR4 | Cadherin-related family member 4 | SEQ ID NOS: 2539- |
| | | 2543 |
| CDHR5 | Cadherin-related family member 5 | SEQ ID NOS: 2544- |
| | | 2550 |
| CDKN2A | Cyclin-dependent kinase inhibitor 2A | SEQ ID NOS: 2551- |
| | | 2561 |
| CDNF | Cerebral dopamine neurotrophic factor | SEQ ID NOS: 2562- |
| | | 2563 |
| CDON | Cell adhesion associated, oncogene | SEQ ID NOS: 2564- |
| | regulated | 2571 |
| CDSN | Corneodesmosin | SEQ ID NO: 2572 |
| CEACAM16 | Carcinoembryonic antigen-related cell | SEQ ID NOS: 2573- |
| | adhesion molecule 16 | 2574 |
| CEACAM18 | Carcinoembryonic antigen-related cell | SEQ ID NO: 2575 |
| | adhesion molecule 18 | |
| CEACAM19 | Carcinoembryonic antigen-related cell | SEQ ID NOS: 2576- |
| | adhesion molecule 19 | 2582 |
| CEACAM5 | Carcinoembryonic antigen-related cell | SEQ ID NOS: 2583- |
| | adhesion molecule 5 | 2590 |
| CEACAM7 | Carcinoembryonic antigen-related cell | SEQ ID NOS: 2591- |
| | adhesion molecule 7 | 2593 |
| CEACAM8 | Carcinoembryonic antigen-related cell | SEQ ID NOS: 2594- |
| | adhesion molecule 8 | 2595 |
| CECR1 | Cat eye syndrome chromosome region, | SEQ ID NOS: 222-229 |
| | candidate 1 | |
| CECR5 | Cat eye syndrome chromosome region, | SEQ ID NOS: 6411- |
| | candidate 5 | 6413 |
| CEL | Carboxyl ester lipase | SEQ ID NO: 2596 |
| CELA2A | Chymotrypsin-like elastase family, member | SEQ ID NO: 2597 |
| | 2A | |
| CELA2B | Chymotrypsin-like elastase family, member | SEQ ID NOS: 2598- |
| | 2B | 2599 |
| CELA3A | Chymotrypsin-like elastase family, member | SEQ ID NOS: 2600- |
| | 3A | 2602 |
| CELA3B | Chymotrypsin-like elastase family, member | SEQ ID NOS: 2603- |
| | 3B | 2605 |
| CEMIP | Cell migration inducing protein, hyaluronan | SEQ ID NOS: 2606- |
| | binding | 2610 |
| CEP89 | Centrosomal protein 89 kDa | SEQ ID NOS: 2611- |
| | | 2616 |
| CER1 | Cerberus 1, DAN family BMP antagonist | SEQ ID NO: 2617 |
| CERCAM | Cerebral endothelial cell adhesion molecule | SEQ ID NOS: 2618- |
| | | 2625 |
| CERS1 | Ceramide synthase 1 | SEQ ID NOS: 2626- |
| | | 2630 |
| CES1 | Carboxylesterase 1 | SEQ ID NOS: 2631- |
| | | 2636 |
| CES3 | Carboxylesterase 3 | SEQ ID NOS: 2637- |
| | | 2641 |
| CES4A | Carboxylesterase 4A | SEQ ID NOS: 2642- |
| | | 2647 |
| CES5A | Carboxylesterase 5A | SEQ ID NOS: 2648- |
| | | 2655 |
| CETP | Cholesteryl ester transfer protein, plasma | SEQ ID NOS: 2656- |
| | | 2658 |
| CFB | Complement factor B | SEQ ID NOS: 2669- |
| | | 2673 |
| CFC1 | Cripto, FRL-1, cryptic family 1 | SEQ ID NOS: 2674- |
| | | 2676 |
| CFC1B | Cripto, FRL-1, cryptic family 1B | SEQ ID NOS: 2677- |
| | | 2679 |
| CFD | Complement factor D (adipsin) | SEQ ID NOS: 2680- |
| | | 2681 |
| CFDP1 | Craniofacial development protein 1 | SEQ ID NOS: 2682- |
| | | 2685 |
| CFH | Complement factor H | SEQ ID NOS: 2686- |
| | | 2688 |
| CFHR1 | Complement factor H-related 1 | SEQ ID NOS: 2689- |
| | | 2690 |
| CFHR2 | Complement factor H-related 2 | SEQ ID NOS: 2691- |
| | | 2692 |
| CFHR3 | Complement factor H-related 3 | SEQ ID NOS: 2693- |
| | | 2697 |
| CFHR4 | Complement factor H-related 4 | SEQ ID NOS: 2698- |
| | | 2701 |
| CFHR5 | Complement factor H-related 5 | SEQ ID NO: 2702 |
| CFI | Complement factor I | SEQ ID NOS: 2703- |
| | | 2707 |
| CFP | Complement factor properdin | SEQ ID NOS: 2708- |
| | | 2711 |
| CGA | Glycoprotein hormones, alpha polypeptide | SEQ ID NOS: 2712- |
| | | 2716 |
| CGB | Chorionic gonadotropin, beta polypeptide | SEQ ID NO: 2721 |
| CGB1 | Chorionic gonadotropin, beta polypeptide 1 | SEQ ID NOS: 2717- |
| | | 2718 |
| CGB2 | Chorionic gonadotropin, beta polypeptide 2 | SEQ ID NOS: 2719- |
| | | 2720 |
| CGB5 | Chorionic gonadotropin, beta polypeptide 5 | SEQ ID NO: 2722 |
| CGB7 | Chorionic gonadotropin, beta polypeptide 7 | SEQ ID NOS: 2723- |
| | | 2725 |
| CGB8 | Chorionic gonadotropin, beta polypeptide 8 | SEQ ID NO: 2726 |
| CGREF1 | Cell growth regulator with EF-hand domain | SEQ ID NOS: 2727- |
| | 1 | 2734 |
| CH507-9B2.3 | | SEQ ID NOS: 5532- |
| | | 5538 |
| CHAD | Chondroadherin | SEQ ID NOS: 2735- |
| | | 2737 |
| CHADL | Chondroadherin-like | SEQ ID NOS: 2738- |
| | | 2740 |
| CHEK2 | Checkpoint kinase 2 | SEQ ID NOS: 2741- |
| | | 2762 |
| CHGA | Chromogranin A | SEQ ID NOS: 2763- |
| | | 2765 |
| CHGB | Chromogranin B | SEQ ID NOS: 2766- |
| | | 2767 |
| CHI3L1 | Chitinase 3-like 1 (cartilage glycoprotein- | SEQ ID NOS: 2768- |
| | 39) | 2769 |
| CHI3L2 | Chitinase 3-like 2 | SEQ ID NOS: 2770- |
| | | 2783 |
| CHIA | Chitinase, acidic | SEQ ID NOS: 2784- |
| | | 2792 |
| CHID1 | Chitinase domain containing 1 | SEQ ID NOS: 2793- |
| | | 2811 |
| CHIT1 | Chitinase 1 (chitotriosidase) | SEQ ID NOS: 2812- |
| | | 2815 |
| CHL1 | Cell adhesion molecule L1-like | SEQ ID NOS: 2816- |
| | | 2824 |
| CHN1 | Chimerin 1 | SEQ ID NOS: 2825- |
| | | 2835 |
| CHPF | Chondroitin polymerizing factor | SEQ ID NOS: 2836- |
| | | 2838 |
| CHPF2 | Chondroitin polymerizing factor 2 | SEQ ID NOS: 2839- |
| | | 2842 |
| CHRD | Chordin | SEQ ID NOS: 2843- |
| | | 2848 |
| CHRDL1 | Chordin-like 1 | SEQ ID NOS: 2849- |
| | | 2853 |
| CHRDL2 | Chordin-like 2 | SEQ ID NOS: 2854- |
| | | 2862 |
| CHRNA2 | Cholinergic receptor, nicotinic, alpha 2 | SEQ ID NOS: 2863- |
| | (neuronal) | 2871 |
| CHRNA5 | Cholinergic receptor, nicotinic, alpha 5 | SEQ ID NOS: 2872- |
| | (neuronal) | 2875 |
| CHRNB1 | Cholinergic receptor, nicotinic, beta 1 | SEQ ID NOS: 2876- |
| | (muscle) | 2881 |
| CHRND | Cholinergic receptor, nicotinic, delta | SEQ ID NOS: 2882- |
| | (muscle) | 2887 |
| CHST1 | Carbohydrate (keratan sulfate Gal-6) | SEQ ID NO: 2888 |
| | sulfotransferase 1 | |
| CHST10 | Carbohydrate sulfotransferase 10 | SEQ ID NOS: 2889- |
| | | 2896 |
| CHST11 | Carbohydrate (chondroitin 4) | SEQ ID NOS: 2897- |
| | sulfotransferase 11 | 2901 |
| CHST13 | Carbohydrate (chondroitin 4) | SEQ ID NOS: 2902- |
| | sulfotransferase 13 | 2903 |
| CHST4 | Carbohydrate (N-acetylglucosamine 6-O) | SEQ ID NOS: 2904- |
| | sulfotransferase 4 | 2905 |
| CHST5 | Carbohydrate (N-acetylglucosamine 6-O) | SEQ ID NOS: 2906- |
| | sulfotransferase 5 | 2907 |
| CHST6 | Carbohydrate (N-acetylglucosamine 6-O) | SEQ ID NOS: 2908- |
| | sulfotransferase 6 | 2909 |
| CHST7 | Carbohydrate (N-acetylglucosamine 6-O) | SEQ ID NO: 2910 |
| | sulfotransferase 7 | |
| CHST8 | Carbohydrate (N-acetylgalactosamine 4-O) | SEQ ID NOS: 2911- |
| | sulfotransferase 8 | 2914 |
| CHSY1 | Chondroitin sulfate synthase 1 | SEQ ID NOS: 2915- |
| | | 2916 |
| CHSY3 | Chondroitin sulfate synthase 3 | SEQ ID NO: 2917 |
| CHTF8 | Chromosome transmission fidelity factor 8 | SEQ ID NOS: 2918- |
| | | 2928 |
| CILP | Cartilage intermediate layer protein, | SEQ ID NO: 2929 |
| | nucleotide pyrophosphohydrolase | |
| CILP2 | Cartilage intermediate layer protein 2 | SEQ ID NOS: 2930- |
| | | 2931 |
| CIRH1A | Cirrhosis, autosomal recessive 1A (cirhin) | SEQ ID NOS: 13974- |
| | | 13983 |
| CKLF | Chemokine-like factor | SEQ ID NOS: 2932- |
| | | 2937 |
| CKMT1A | Creatine kinase, mitochondrial 1A | SEQ ID NOS: 2938- |
| | | 2943 |
| CKMT1B | Creatine kinase, mitochondrial 1B | SEQ ID NOS: 2944- |
| | | 2953 |
| CLCA1 | Chloride channel accessory 1 | SEQ ID NOS: 2954- |
| | | 2955 |
| CLCF1 | Cardiotrophin-like cytokine factor 1 | SEQ ID NOS: 2956- |
| | | 2957 |
| CLDN15 | Claudin 15 | SEQ ID NOS: 2958- |
| | | 2963 |
| CLDN7 | Claudin 7 | SEQ ID NOS: 2964- |
| | | 2970 |
| CLDND1 | Claudin domain containing 1 | SEQ ID NOS: 2971- |
| | | 2996 |
| CLEC11A | C-type lectin domain family 11, member A | SEQ ID NOS: 2997- |
| | | 2999 |
| CLEC16A | C-type lectin domain family 16, member A | SEQ ID NOS: 3000- |
| | | 3005 |
| CLEC18A | C-type lectin domain family 18, member A | SEQ ID NOS: 3006- |
| | | 3011 |
| CLEC18B | C-type lectin domain family 18, member B | SEQ ID NOS: 3012- |
| | | 3015 |
| CLEC18C | C-type lectin domain family 18, member C | SEQ ID NOS: 3016- |
| | | 3022 |
| CLEC19A | C-type lectin domain family 19, member A | SEQ ID NOS: 3023- |
| | | 3026 |
| CLEC2B | C-type lectin domain family 2, member B | SEQ ID NOS: 3027- |
| | | 3028 |
| CLEC3A | C-type lectin domain family 3, member A | SEQ ID NOS: 3029- |
| | | 3030 |
| CLEC3B | C-type lectin domain family 3, member B | SEQ ID NOS: 3031- |
| | | 3032 |
| CLGN | Calmegin | SEQ ID NOS: 3033- |
| | | 3035 |
| CLN5 | Ceroid-lipofuscinosis, neuronal 5 | SEQ ID NOS: 3036- |
| | | 3047 |
| CLPS | Colipase, pancreatic | SEQ ID NOS: 3048- |
| | | 3050 |
| CLPSL1 | Colipase-like 1 | SEQ ID NOS: 3051- |
| | | 3052 |
| CLPSL2 | Colipase-like 2 | SEQ ID NOS: 3053- |
| | | 3054 |
| CLPX | Caseinolytic mitochondrial matrix peptidase | SEQ ID NOS: 3055- |
| | chaperone subunit | 3057 |
| CLSTN3 | Calsyntenin 3 | SEQ ID NOS: 3058- |
| | | 3064 |
| CLU | Clusterin | SEQ ID NOS: 3065- |
| | | 3078 |
| CLUL1 | Clusterin-like 1 (retinal) | SEQ ID NOS: 3079- |
| | | 3086 |
| CMA1 | Chymase 1, mast cell | SEQ ID NOS: 3087- |
| | | 3088 |
| CMPK1 | Cytidine monophosphate (UMP-CMP) | SEQ ID NOS: 3089- |
| | kinase 1, cytosolic | 3092 |
| CNBD1 | Cyclic nucleotide binding domain | SEQ ID NOS: 3093- |
| | containing 1 | 3096 |
| CNDP1 | Carnosine dipeptidase 1 (metallopeptidase | SEQ ID NOS: 3097- |
| | M20 family) | 3099 |
| CNPY2 | Canopy FGF signaling regulator 2 | SEQ ID NOS: 3107- |
| | | 3111 |
| CNPY3 | Canopy FGF signaling regulator 3 | SEQ ID NOS: 3112- |
| | | 3113 |
| CNPY4 | Canopy FGF signaling regulator 4 | SEQ ID NOS: 3114- |
| | | 3116 |
| CNTFR | Ciliary neurotrophic factor receptor | SEQ ID NOS: 3117- |
| | | 3120 |
| CNTN1 | Contactin 1 | SEQ ID NOS: 3121- |
| | | 3130 |
| CNTN2 | Contactin 2 (axonal) | SEQ ID NOS: 3131- |
| | | 3142 |
| CNTN3 | Contactin 3 (plasmacytoma associated) | SEQ ID NO: 3143 |
| CNTN4 | Contactin 4 | SEQ ID NOS: 3144- |
| | | 3152 |
| CNTN5 | Contactin 5 | SEQ ID NOS: 3153- |
| | | 3158 |
| CNTNAP2 | Contactin associated protein-like 2 | SEQ ID NOS: 3159- |
| | | 3162 |
| CNTNAP3 | Contactin associated protein-like 3 | SEQ ID NOS: 3163- |
| | | 3167 |
| CNTNAP3B | Contactin associated protein-like 3B | SEQ ID NOS: 3168- |
| | | 3176 |
| COASY | CoA synthase | SEQ ID NOS: 3177- |
| | | 3186 |
| COCH | Cochlin | SEQ ID NOS: 3187- |
| | | 3198 |
| COG3 | Component of oligomeric golgi complex 3 | SEQ ID NOS: 3199- |
| | | 3202 |
| COL10A1 | Collagen, type X, alpha 1 | SEQ ID NOS: 3203- |
| | | 3206 |
| COL11A1 | Collagen, type XI, alpha 1 | SEQ ID NOS: 3207- |
| | | 3217 |
| COL11A2 | Collagen, type XI, alpha 2 | SEQ ID NOS: 3218- |
| | | 3222 |
| COL12A1 | Collagen, type XII, alpha 1 | SEQ ID NOS: 3223- |
| | | 3230 |
| COL14A1 | Collagen, type XIV, alpha 1 | SEQ ID NOS: 3231- |
| | | 3238 |
| COL15A1 | Collagen, type XV, alpha 1 | SEQ ID NOS: 3239- |
| | | 3240 |
| COL16A1 | Collagen, type XVI, alpha 1 | SEQ ID NOS: 3241- |
| | | 3245 |
| COL18A1 | Collagen, type XVIII, alpha 1 | SEQ ID NOS: 3246- |
| | | 3250 |
| COL19A1 | Collagen, type XIX, alpha 1 | SEQ ID NOS: 3251- |
| | | 3253 |
| COL1A1 | Collagen, type I, alpha 1 | SEQ ID NOS: 3254- |
| | | 3255 |
| COL1A2 | Collagen, type I, alpha 2 | SEQ ID NOS: 3256- |
| | | 3257 |
| COL20A1 | Collagen, type XX, alpha 1 | SEQ ID NOS: 3258- |
| | | 3261 |
| COL21A1 | Collagen, type XXI, alpha 1 | SEQ ID NOS: 3262- |
| | | 3267 |
| COL22A1 | Collagen, type XXII, alpha 1 | SEQ ID NOS: 3268- |
| | | 3270 |
| COL24A1 | Collagen, type XXIV, alpha 1 | SEQ ID NOS: 3271- |
| | | 3274 |
| COL26A1 | Collagen, type XXVI, alpha 1 | SEQ ID NOS: 3275- |
| | | 3276 |
| COL27A1 | Collagen, type XXVII, alpha 1 | SEQ ID NOS: 3277- |
| | | 3279 |
| COL28A1 | Collagen, type XXVIII, alpha 1 | SEQ ID NOS: 3280- |
| | | 3284 |
| COL2A1 | Collagen, type II, alpha 1 | SEQ ID NOS: 3285- |
| | | 3286 |
| COL3A1 | Collagen, type III, alpha 1 | SEQ ID NOS: 3287- |
| | | 3289 |
| COL4A1 | Collagen, type IV, alpha 1 | SEQ ID NOS: 3290- |
| | | 3292 |
| COL4A2 | Collagen, type IV, alpha 2 | SEQ ID NOS: 3293- |
| | | 3295 |
| COL4A3 | Collagen, type IV, alpha 3 (Goodpasture | SEQ ID NOS: 3296- |
| | antigen) | 3299 |
| COL4A4 | Collagen, type IV, alpha 4 | SEQ ID NOS: 3300- |
| | | 3301 |
| COL4A5 | Collagen, type IV, alpha 5 | SEQ ID NOS: 3302- |
| | | 3308 |
| COL4A6 | Collagen, type IV, alpha 6 | SEQ ID NOS: 3309- |
| | | 3314 |
| COL5A1 | Collagen, type V, alpha 1 | SEQ ID NOS: 3315- |
| | | 3317 |
| COL5A2 | Collagen, type V, alpha 2 | SEQ ID NOS: 3318- |
| | | 3319 |
| COL5A3 | Collagen, type V, alpha 3 | SEQ ID NO: 3320 |
| COL6A1 | Collagen, type VI, alpha 1 | SEQ ID NOS: 3321- |
| | | 3322 |
| COL6A2 | Collagen, type VI, alpha 2 | SEQ ID NOS: 3323- |
| | | 3328 |
| COL6A3 | Collagen, type VI, alpha 3 | SEQ ID NOS: 3329- |
| | | 3337 |
| COL6A5 | Collagen, type VI, alpha 5 | SEQ ID NOS: 3338- |
| | | 3342 |
| COL6A6 | Collagen, type VI, alpha 6 | SEQ ID NOS: 3343- |
| | | 3345 |
| COL7A1 | Collagen, type VII, alpha 1 | SEQ ID NOS: 3346- |
| | | 3347 |
| COL8A1 | Collagen, type VIII, alpha 1 | SEQ ID NOS: 3348- |
| | | 3351 |
| COL8A2 | Collagen, type VIII, alpha 2 | SEQ ID NOS: 3352- |
| | | 3354 |
| COL9A1 | Collagen, type IX, alpha 1 | SEQ ID NOS: 3355- |
| | | 3358 |
| COL9A2 | Collagen, type IX, alpha 2 | SEQ ID NOS: 3359- |
| | | 3362 |
| COL9A3 | Collagen, type IX, alpha 3 | SEQ ID NOS: 3363- |
| | | 3364 |
| COLEC10 | Collectin sub-family member 10 (C-type | SEQ ID NO: 3365 |
| | lectin) | |
| COLEC11 | Collectin sub-family member 11 | SEQ ID NOS: 3366- |
| | | 3375 |
| COLGALT1 | Collagen beta(1-O)galactosyltransferase 1 | SEQ ID NOS: 3376- |
| | | 3378 |
| COLGALT2 | Collagen beta(1-O)galactosyltransferase 2 | SEQ ID NOS: 3379- |
| | | 3381 |
| COLQ | Collagen-like tail subunit (single strand of | SEQ ID NOS: 3382- |
| | homotrimer) of asymmetric | 3386 |
| | acetylcholinesterase | |
| COMP | Cartilage oligomeric matrix protein | SEQ ID NOS: 3387- |
| | | 3389 |
| C0PS6 | COP9 signalosome subunit 6 | SEQ ID NOS: 3390- |
| | | 3393 |
| COQ6 | Coenzyme Q6 monooxygenase | SEQ ID NOS: 3394- |
| | | 3401 |
| CORT | Cortistatin | SEQ ID NO: 3402 |
| CP | Ceruloplasmin (ferroxidase) | SEQ ID NOS: 3403- |
| | | 3407 |
| CPA1 | Carboxypeptidase A1 (pancreatic) | SEQ ID NOS: 3408- |
| | | 3412 |
| CPA2 | Carboxypeptidase A2 (pancreatic) | SEQ ID NOS: 3413- |
| | | 3414 |
| CPA3 | Carboxypeptidase A3 (mast cell) | SEQ ID NO: 3415 |
| CPA4 | Carboxypeptidase A4 | SEQ ID NOS: 3416- |
| | | 3421 |
| CPA6 | Carboxypeptidase A6 | SEQ ID NOS: 3422- |
| | | 3424 |
| CPAMD8 | C3 and PZP-like, alpha-2-macroglobulin | SEQ ID NOS: 3425- |
| | domain containing 8 | 3430 |
| CPB1 | Carboxypeptidase B1 (tissue) | SEQ ID NOS: 3431- |
| | | 3435 |
| CPB2 | Carboxypeptidase B2 (plasma) | SEQ ID NOS: 3436- |
| | | 3438 |
| CPE | Carboxypeptidase E | SEQ ID NOS: 3439- |
| | | 3443 |
| CPM | Carboxypeptidase M | SEQ ID NOS: 3444- |
| | | 3453 |
| CPN1 | Carboxypeptidase N, polypeptide 1 | SEQ ID NOS: 3454- |
| | | 3455 |
| CPN2 | Carboxypeptidase N, polypeptide 2 | SEQ ID NOS: 3456- |
| | | 3457 |
| CPO | Carboxypeptidase O | SEQ ID NO: 3458 |
| CPQ | Carboxvpeptidase Q | SEQ ID NOS: 3459- |
| | | 3464 |
| CPVL | Carboxypeptidase, vitellogenic-like | SEQ ID NOS: 3465- |
| | | 3475 |
| CPXM1 | Carboxypeptidase X (M14 family), member | SEQ ID NO: 3476 |
| | 1 | |
| CPXM2 | Carboxypeptidase X (M14 family), member | SEQ ID NOS: 3477- |
| | 2 | 3478 |
| CPZ | Carboxypeptidase Z | SEQ ID NOS: 3479- |
| | | 3482 |
| CR1L | Complement component (3b/4b) receptor 1- | SEQ ID NOS: 3483- |
| | like | 3484 |
| CRB2 | Crumbs family member 2 | SEQ ID NOS: 3485- |
| | | 3487 |
| CREG1 | Cellular repressor of E1A-stimulated genes | SEQ ID NO: 3488 |
| | 1 | |
| CREG2 | Cellular repressor of E1A-stimulated genes | SEQ ID NO: 3489 |
| | 2 | |
| CRELD1 | Cysteine-rich with EGF-like domains 1 | SEQ ID NOS: 3490- |
| | | 3495 |
| CRELD2 | Cysteine-rich with EGF-like domains 2 | SEQ ID NOS: 3496- |
| | | 3500 |
| CRH | Corticotropin releasing hormone | SEQ ID NO: 3501 |
| CRHBP | Corticotropin releasing hormone binding | SEQ ID NOS: 3502- |
| | protein | 3503 |
| CRHR1 | Corticotropin releasing hormone receptor 1 | SEQ ID NOS: 3504- |
| | | 3515 |
| CRHR2 | Corticotropin releasing hormone receptor 2 | SEQ ID NOS: 3516- |
| | | 3522 |
| CRISP1 | Cysteine-rich secretory protein 1 | SEQ ID NOS: 3523- |
| | | 3526 |
| CRISP2 | Cysteine-rich secretory protein 2 | SEQ ID NOS: 3527- |
| | | 3529 |
| CRISP3 | Cysteine-rich secretory protein 3 | SEQ ID NOS: 3530- |
| | | 3533 |
| CRISPLD2 | Cysteine-rich secretory protein LCCL | SEQ ID NOS: 3534- |
| | domain containing 2 | 3541 |
| CRLF1 | Cytokine receptor-like factor 1 | SEQ ID NOS: 3542- |
| | | 3543 |
| CRP | C-reactive protein, pentraxin-related | SEQ ID NOS: 3544- |
| | | 3548 |
| CRTAC1 | Cartilage acidic protein 1 | SEQ ID NOS: 3549- |
| | | 3553 |
| CRTAP | Cartilage associated protein | SEQ ID NOS: 3554- |
| | | 3555 |
| CRY2 | Cryptochrome circadian clock 2 | SEQ ID NOS: 3556- |
| | | 3559 |
| CSAD | Cysteine sulfinic acid decarboxylase | SEQ ID NOS: 3560- |
| | | 3572 |
| CSF1 | Colony stimulating factor 1 (macrophage) | SEQ ID NOS: 3573- |
| | | 3580 |
| CSF1R | Colony stimulating factor 1 receptor | SEQ ID NOS: 3581- |
| | | 3585 |
| CSF2 | Colony stimulating factor 2 (granulocyte- | SEQ ID NO: 3586 |
| | macrophage) | |
| CSF2RA | Colony stimulating factor 2 receptor, alpha, | SEQ ID NOS: 3587- |
| | low-affinity (granulocyte-macrophage) | 3598 |
| CSF3 | Colony stimulating factor 3 (granulocyte) | SEQ ID NOS: 3599- |
| | | 3605 |
| CSGALNACT1 | Chondroitin sulfate N- | SEQ ID NOS: 3606- |
| | acetylgalactosaminyltransferase 1 | 3614 |
| CSH1 | Chorionic somatomammotropin hormone 1 | SEQ ID NOS: 3615- |
| | (placental lactogen) | 3618 |
| CSH2 | Chorionic somatomammotropin hormone 2 | SEQ ID NOS: 3619- |
| | | 3623 |
| CSHL1 | Chorionic somatomammotropin hormone- | SEQ ID NOS: 3624- |
| | like 1 | 3630 |
| CSN1S1 | Casein alpha s1 | SEQ ID NOS: 3631- |
| | | 3636 |
| CSN2 | Casein beta | SEQ ID NO: 3637 |
| CSN3 | Casein kappa | SEQ ID NO: 3638 |
| CST1 | Cystatin SN | SEQ ID NOS: 3639- |
| | | 3640 |
| CST11 | Cystatin 11 | SEQ ID NOS: 3641- |
| | | 3642 |
| CST2 | Cystatin SA | SEQ ID NO: 3643 |
| CST3 | Cystatin C | SEQ ID NOS: 3644- |
| | | 3646 |
| CST4 | Cystatin S | SEQ ID NO: 3647 |
| CST5 | Cystatin D | SEQ ID NO: 3648 |
| CST6 | Cystatin E/M | SEQ ID NO: 3649 |
| CST7 | Cystatin F (leukocystatin) | SEQ ID NO: 3650 |
| CST8 | Cystatin 8 (cystatin-related epididymal | SEQ ID NOS: 3651- |
| | specific) | 3652 |
| CST9 | Cystatin 9 (testatin) | SEQ ID NO: 3653 |
| CST9L | Cystatin 9-like | SEQ ID NO: 3654 |
| CSTL1 | Cy statin-like 1 | SEQ ID NOS: 3655- |
| | | 3657 |
| CT55 | Cancer/testis antigen 55 | SEQ ID NOS: 3658- |
| | | 3659 |
| CTB-60B18.6 | | SEQ ID NOS: 74-75 |
| CTBS | Chitobiase, di-N-acetyl- | SEQ ID NOS: 3660- |
| | | 3662 |
| CTD- | | SEQ ID NO: 4160 |
| 2313N18.7 | | |
| CTD- | | SEQ ID NOS: 81-84 |
| 2370N5.3 | | |
| CTGF | Connective tissue growth factor | SEQ ID NO: 3663 |
| CTHRC1 | Collagen triple helix repeat containing 1 | SEQ ID NOS: 3664- |
| | | 3667 |
| CTLA4 | Cytotoxic T-lymphocyte-associated protein | SEQ ID NOS: 3668- |
| | 4 | 3671 |
| CTNS | Cystinosin, lysosomal cystine transporter | SEQ ID NOS: 3672- |
| | | 3679 |
| CTRB1 | Chymotrypsinogen B1 | SEQ ID NOS: 3680- |
| | | 3682 |
| CTRB2 | Chymotrypsinogen B2 | SEQ ID NOS: 3683- |
| | | 3686 |
| CTRC | Chymotrypsin C (caldecrin) | SEQ ID NOS: 3687- |
| | | 3688 |
| CTRL | Chymotrypsin-like | SEQ ID NOS: 3689- |
| | | 3691 |
| CTSA | Cathepsin A | SEQ ID NOS: 3692- |
| | | 3700 |
| CTSB | Cathepsin B | SEQ ID NOS: 3701- |
| | | 3725 |
| CTSC | Cathepsin C | SEQ ID NOS: 3726- |
| | | 3730 |
| CTSD | Cathepsin D | SEQ ID NOS: 3731- |
| | | 3741 |
| CTSE | Cathepsin E | SEQ ID NOS: 3742- |
| | | 3743 |
| CTSF | Cathepsin F | SEQ ID NOS: 3744- |
| | | 3747 |
| CTSG | Cathepsin G | SEQ ID NO: 3748 |
| CTSH | Cathepsin H | SEQ ID NOS: 3749- |
| | | 3754 |
| CTSK | Cathepsin K | SEQ ID NOS: 3755- |
| | | 3756 |
| CTSL | Cathepsin L | SEQ ID NOS: 3757- |
| | | 3759 |
| CTSO | Cathepsin O | SEQ ID NO: 3760 |
| CTSS | Cathepsin S | SEQ ID NOS: 3761- |
| | | 3765 |
| CTSV | Cathepsin V | SEQ ID NOS: 3766- |
| | | 3767 |
| CTSW | Cathepsin W | SEQ ID NOS: 3768- |
| | | 3770 |
| CTSZ | Cathepsin Z | SEQ ID NO: 3771 |
| CUBN | Cubilin (intrinsic factor-cobalamin receptor) | SEQ ID NOS: 3772- |
| | | 3775 |
| CUTA | CutA divalent cation tolerance homolog | SEQ ID NOS: 3776- |
| | (E. coli) | 3785 |
| CX3CL1 | Chemokine (C-X3-C motif) ligand 1 | SEQ ID NOS: 3786- |
| | | 3789 |
| CXADR | Coxsackie virus and adenovirus receptor | SEQ ID NOS: 3790- |
| | | 3794 |
| CXCL1 | Chemokine (C-X-C motif) ligand 1 | SEQ ID NO: 3795 |
| | (melanoma growth stimulating activity, | |
| | alpha) | |
| CXCL10 | Chemokine (C-X-C motif) ligand 10 | SEQ ID NO: 3796 |
| CXCL11 | Chemokine (C-X-C motif) ligand 11 | SEQ ID NOS: 3797- |
| | | 3798 |
| CXCL12 | Chemokine (C-X-C motif) ligand 12 | SEQ ID NOS: 3799- |
| | | 3804 |
| CXCL13 | Chemokine (C-X-C motif) ligand 13 | SEQ ID NO: 3805 |
| CXCL14 | Chemokine (C-X-C motif) ligand 14 | SEQ ID NOS: 3806- |
| | | 3807 |
| CXCL17 | Chemokine (C-X-C motif) ligand 17 | SEQ ID NOS: 3808- |
| | | 3809 |
| CXCL2 | Chemokine (C-X-C motif) ligand 2 | SEQ ID NO: 3810 |
| CXCL3 | Chemokine (C-X-C motif) ligand 3 | SEQ ID NO: 3811 |
| CXCL5 | Chemokine (C-X-C motif) ligand 5 | SEQ ID NO: 3812 |
| CXCL6 | Chemokine (C-X-C motif) ligand 6 | SEQ ID NOS: 3813- |
| | | 3814 |
| CXCL8 | Chemokine (C-X-C motif) ligand 8 | SEQ ID NOS: 3815- |
| | | 3816 |
| CXCL9 | Chemokine (C-X-C motif) ligand 9 | SEQ ID NO: 3817 |
| CXorf36 | Chromosome X open reading frame 36 | SEQ ID NOS: 3818- |
| | | 3819 |
| CYB5D2 | Cytochrome b5 domain containing 2 | SEQ ID NOS: 3820- |
| | | 3823 |
| CYHR1 | Cysteine/histidine-rich 1 | SEQ ID NOS: 3824- |
| | | 3831 |
| CYP17A1 | Cytochrome P450, family 17, subfamily A, | SEQ ID NOS: 3832- |
| | polypeptide 1 | 3836 |
| CYP20A1 | Cytochrome P450, family 20, subfamily A, | SEQ ID NOS: 3837- |
| | polypeptide 1 | 3843 |
| CYP21A2 | Cytochrome P450, family 21, subfamily A, | SEQ ID NOS: 3844- |
| | polypeptide 2 | 3851 |
| CYP26B1 | Cytochrome P450, family 26, subfamily B, | SEQ ID NOS: 3852- |
| | polypeptide 1 | 3856 |
| CYP2A6 | Cytochrome P450, family 2, subfamily A, | SEQ ID NOS: 3857- |
| | polypeptide 6 | 3858 |
| CYP2A7 | Cytochrome P450, family 2, subfamily A, | SEQ ID NOS: 3859- |
| | polypeptide 7 | 3861 |
| CYP2B6 | Cytochrome P450, family 2, subfamily B, | SEQ ID NOS: 3862- |
| | polypeptide 6 | 3865 |
| CYP2C18 | Cytochrome P450, family 2, subfamily C, | SEQ ID NOS: 3866- |
| | polypeptide 18 | 3867 |
| CYP2C19 | Cytochrome P450, family 2, subfamily C, | SEQ ID NOS: 3868- |
| | polypeptide 19 | 3869 |
| CYP2C8 | Cytochrome P450, family 2, subfamily C, | SEQ ID NOS: 3870- |
| | polypeptide 8 | 3877 |
| CYP2C9 | Cytochrome P450, family 2, subfamily C, | SEQ ID NOS: 3878- |
| | polypeptide 9 | 3880 |
| CYP2E1 | Cytochrome P450, family 2, subfamily E, | SEQ ID NOS: 3881- |
| | polypeptide 1 | 3886 |
| CYP2F1 | Cytochrome P450, family 2, subfamily F, | SEQ ID NOS: 3887- |
| | polypeptide 1 | 3890 |
| CYP2J2 | Cytochrome P450, family 2, subfamily J, | SEQ ID NO: 3891 |
| | polypeptide 2 | |
| CYP2R1 | Cytochrome P450, family 2, subfamily R, | SEQ ID NOS: 3892- |
| | polypeptide 1 | 3897 |
| CYP2S1 | Cytochrome P450, family 2, subfamily S, | SEQ ID NOS: 3898- |
| | polypeptide 1 | 3903 |
| CYP2W1 | Cytochrome P450, family 2, subfamily W, | SEQ ID NOS: 3904- |
| | polypeptide 1 | 3906 |
| CYP46A1 | Cytochrome P450, family 46, subfamily A, | SEQ ID NOS: 3907- |
| | polypeptide 1 | 3911 |
| CYP4F11 | Cytochrome P450, family 4, subfamily F, | SEQ ID NOS: 3912- |
| | polypeptide 11 | 3916 |
| CYP4F2 | Cytochrome P450, family 4, subfamily F, | SEQ ID NOS: 3917- |
| | polypeptide 2 | 3921 |
| CYR61 | Cysteine-rich, angiogenic inducer, 61 | SEQ ID NO: 3922 |
| CYTL1 | Cytokine-like 1 | SEQ ID NOS: 3923- |
| | | 3925 |
| D2HGDH | D-2-hydroxvglutarate dehydrogenase | SEQ ID NOS: 3926- |
| | | 3934 |
| DAG1 | Dystroglycan 1 (dystrophin-associated | SEQ ID NOS: 3935- |
| | glycoprotein 1) | 3949 |
| DAND5 | DAN domain family member 5, BMP | SEQ ID NOS: 3950- |
| | antagonist | 3951 |
| DAO | D-amino-acid oxidase | SEQ ID NOS: 3952- |
| | | 3957 |
| DAZAP2 | DAZ associated protein 2 | SEQ ID NOS: 3958- |
| | | 3966 |
| DBH | Dopamine beta-hydroxylase (dopamine | SEQ ID NOS: 3967- |
| | beta-monooxygenase) | 3968 |
| DBNL | Drebrin-like | SEQ ID NOS: 3969- |
| | | 3986 |
| DCD | Dermcidin | SEQ ID NOS: 3987- |
| | | 3989 |
| DCN | Decorin | SEQ ID NOS: 3990- |
| | | 4008 |
| DDIAS | DNA damage-induced apoptosis suppressor | SEQ ID NOS: 4009- |
| | | 4018 |
| DDOST | Dolichyl-diphosphooligosaccharide--protein | SEQ ID NOS: 4019- |
| | glycosyltransferase subunit (non-catalytic) | 4022 |
| DDR1 | Discoidin domain receptor tyrosine kinase 1 | SEQ ID NOS: 4023- |
| | | 4068 |
| DDR2 | Discoidin domain receptor tyrosine kinase 2 | SEQ ID NOS: 4069- |
| | | 4074 |
| DDT | D-dopachrome tautomerase | SEQ ID NOS: 4075- |
| | | 4080 |
| DDX17 | DEAD (Asp-Glu-Ala-Asp) box helicase 17 | SEQ ID NOS: 4081- |
| | | 4085 |
| DDX20 | DEAD (Asp-Glu-Ala-Asp) box polypeptide | SEQ ID NOS: 4086- |
| | 20 | 4088 |
| DDX25 | DEAD (Asp-Glu-Ala-Asp) box helicase 25 | SEQ ID NOS: 4089- |
| | | 4095 |
| DDX28 | DEAD (Asp-Glu-Ala-Asp) box polypeptide | SEQ ID NO: 4096 |
| | 28 | |
| DEAF1 | DEAF1 transcription factor | SEQ ID NOS: 4097- |
| | | 4099 |
| DEF8 | Differentially expressed in FDCP 8 | SEQ ID NOS: 4100- |
| | homolog (mouse) | 4119 |
| DEFA1 | Defensin, alpha 1 | SEQ ID NOS: 4120- |
| | | 4121 |
| DEFA1B | Defensin, alpha 1B | SEQ ID NO: 4122 |
| DEFA3 | Defensin, alpha 3, neutrophil-specific | SEQ ID NO: 4123 |
| DEFA4 | Defensin, alpha 4, corticostatin | SEQ ID NO: 4124 |
| DEFA5 | Defensin, alpha 5, Paneth cell-specific | SEQ ID NO: 4125 |
| DEFA6 | Defensin, alpha 6, Paneth cell-specific | SEQ ID NO: 4126 |
| DEFB1 | Defensin, beta 1 | SEQ ID NO: 4127 |
| DEFB103A | Defensin, beta 103A | SEQ ID NO: 4128 |
| DEFB103B | Defensin, beta 103B | SEQ ID NO: 4129 |
| DEFB104A | Defensin, beta 104A | SEQ ID NO: 4130 |
| DEFB104B | Defensin, beta 104B | SEQ ID NO: 4131 |
| DEFB105A | Defensin, beta 105A | SEQ ID NO: 4132 |
| DEFB105B | Defensin, beta 105B | SEQ ID NO: 4133 |
| DEFB106A | Defensin, beta 106A | SEQ ID NO: 4134 |
| DEFB106B | Defensin, beta 106B | SEQ ID NO: 4135 |
| DEFB107A | Defensin, beta 107A | SEQ ID NO: 4136 |
| DEFB107B | Defensin, beta 107B | SEQ ID NO: 4137 |
| DEFB108B | Defensin, beta 108B | SEQ ID NO: 4138 |
| DEFB110 | Defensin, beta 110 | SEQ ID NOS: 4139- |
| | | 4140 |
| DEFB113 | Defensin, beta 113 | SEQ ID NO: 4141 |
| DEFB114 | Defensin, beta 114 | SEQ ID NO: 4142 |
| DEFB115 | Defensin, beta 115 | SEQ ID NO: 4143 |
| DEFB116 | Defensin, beta 116 | SEQ ID NO: 4144 |
| DEFB118 | Defensin, beta 118 | SEQ ID NO: 4145 |
| DEFB119 | Defensin, beta 119 | SEQ ID NOS: 4146- |
| | | 4148 |
| DEFB121 | Defensin, beta 121 | SEQ ID NO: 4149 |
| DEFB123 | Defensin, beta 123 | SEQ ID NO: 4150 |
| DEFB124 | Defensin, beta 124 | SEQ ID NO: 4151 |
| DEFB125 | Defensin, beta 125 | SEQ ID NO: 4152 |
| DEFB126 | Defensin, beta 126 | SEQ ID NO: 4153 |
| DEFB127 | Defensin, beta 127 | SEQ ID NO: 4154 |
| DEFB128 | Defensin, beta 128 | SEQ ID NO: 4155 |
| DEFB129 | Defensin, beta 129 | SEQ ID NO: 4156 |
| DEFB130 | Defensin, beta 130 | SEQ ID NO: 4157 |
| DEFB131 | Defensin, beta 131 | SEQ ID NO: 4159 |
| DEFB132 | Defensin, beta 132 | SEQ ID NO: 4161 |
| DEFB133 | Defensin, beta 133 | SEQ ID NO: 4162 |
| DEFB134 | Defensin, beta 134 | SEQ ID NOS: 4163- |
| | | 4164 |
| DEFB135 | Defensin, beta 135 | SEQ ID NO: 4165 |
| DEFB136 | Defensin, beta 136 | SEQ ID NO: 4166 |
| DEFB4A | Defensin, beta 4A | SEQ ID NO: 4167 |
| DEFB4B | Defensin, beta 4B | SEQ ID NO: 4168 |
| DFNA5 | Deafness, autosomal dominant 5 | SEQ ID NOS: 6271- |
| | | 6279 |
| DFNB31 | Deafness, autosomal recessive 31 | SEQ ID NOS: 14251- |
| | | 14254 |
| DGCR2 | DiGeorge syndrome critical region gene 2 | SEQ ID NOS: 4171- |
| | | 4174 |
| DHH | Desert hedgehog | SEQ ID NO: 4175 |
| DHRS4 | Dehydrogenase/reductase (SDR family) | SEQ ID NOS: 4176- |
| | member 4 | 4183 |
| DHRS4L2 | Dehydrogenase/reductase (SDR family) | SEQ ID NOS: 4184- |
| | member 4 like 2 | 4193 |
| DHRS7 | Dehydrogenase/reductase (SDR family) | SEQ ID NOS: 4194- |
| | member 7 | 4201 |
| DHRS7C | Dehydrogenase/reductase (SDR family) | SEQ ID NOS: 4202- |
| | member 7C | 4204 |
| DHRS9 | Dehydrogenase/reductase (SDR family) | SEQ ID NOS: 4205- |
| | member 9 | 4212 |
| DHRSX | Dehydrogenase/reductase (SDR family) X- | SEQ ID NOS: 4213- |
| | linked | 4217 |
| DHX29 | DEAH (Asp-Glu-Ala-His) box polypeptide | SEQ ID NOS: 4218- |
| | 29 | 4220 |
| DHX30 | DEAH (Asp-Glu-Ala-His) box helicase 30 | SEQ ID NOS: 4221- |
| | | 4228 |
| DHX8 | DEAH (Asp-Glu-Ala-His) box polypeptide | SEQ ID NOS: 4229- |
| | 8 | 4233 |
| DIO2 | Deiodinase, iodothyronine, type II | SEQ ID NOS: 4234- |
| | | 4243 |
| DIXDC1 | DIX domain containing 1 | SEQ ID NOS: 4244- |
| | | 4247 |
| DKK1 | Dickkopf WNT signaling pathway inhibitor | SEQ ID NO: 4248 |
| | 1 | |
| DKK2 | Dickkopf WNT signaling pathway inhibitor | SEQ ID NOS: 4249- |
| | 2 | 4251 |
| DKK3 | Dickkopf WNT signaling pathway inhibitor | SEQ ID NOS: 4252- |
| | 3 | 4257 |
| DKK4 | Dickkopf WNT signaling pathway inhibitor | SEQ ID NO: 4258 |
| | 4 | |
| DKKL1 | Dickkopf-like 1 | SEQ ID NOS: 4259- |
| | | 4264 |
| DLG4 | Discs, large homolog 4 (Drosophila) | SEQ ID NOS: 4265- |
| | | 4273 |
| DLK1 | Delta-like 1 homolog (Drosophila) | SEQ ID NOS: 4274- |
| | | 4277 |
| DLL1 | Delta-like 1 (Drosophila) | SEQ ID NOS: 4278- |
| | | 4279 |
| DLL3 | Delta-like 3 (Drosophila) | SEQ ID NOS: 4280- |
| | | 4282 |
| DMBT1 | Deleted in malignant brain tumors 1 | SEQ ID NOS: 4283- |
| | | 4289 |
| DMKN | Dermokine | SEQ ID NOS: 4290- |
| | | 4336 |
| DMP1 | Dentin matrix acidic phosphoprotein 1 | SEQ ID NOS: 4337- |
| | | 4338 |
| DMRTA2 | DMRT-like family A2 | SEQ ID NOS: 4339- |
| | | 4340 |
| DNAAF5 | Dynein, axonemal, assembly factor 5 | SEQ ID NOS: 4341- |
| | | 4344 |
| DNAH14 | Dynein, axonemal, heavy chain 14 | SEQ ID NOS: 4345- |
| | | 4359 |
| DNAJB11 | DnaJ (Hsp40) homolog, subfamily B, | SEQ ID NOS: 4360- |
| | member 11 | 4361 |
| DNAJB9 | DnaJ (Hsp40) homolog, subfamily B, | SEQ ID NO: 4362 |
| | member 9 | |
| DNAJC25- | DNAJC25-GNG10 readthrough | SEQ ID NO: 4363 |
| GNG10 | | |
| DNAJC3 | DnaJ (Hsp40) homolog, subfamily C, | SEQ ID NOS: 4364- |
| | member 3 | 4365 |
| DNASE1 | Deoxyribonuclease I | SEQ ID NOS: 4366- |
| | | 4376 |
| DNASE1L1 | Deoxyribonuclease I-like 1 | SEQ ID NOS: 4377- |
| | | 4387 |
| DNASE1L2 | Deoxyribonuclease I-like 2 | SEQ ID NOS: 4388- |
| | | 4393 |
| DNASE1L3 | Deoxyribonuclease I-like 3 | SEQ ID NOS: 4394- |
| | | 4399 |
| DNASE2 | Deoxyribonuclease II, lysosomal | SEQ ID NOS: 4400- |
| | | 4401 |
| DNASE2B | Deoxyribonuclease II beta | SEQ ID NOS: 4402- |
| | | 4403 |
| DPEP1 | Dipeptidase 1 (renal) | SEQ ID NOS: 4404- |
| | | 4408 |
| DPEP2 | Dipeptidase 2 | SEQ ID NOS: 4409- |
| | | 4415 |
| DPEP3 | Dipeptidase 3 | SEQ ID NO: 4416 |
| DPF3 | D4, zinc and double PHD fingers, family 3 | SEQ ID NOS: 4417- |
| | | 4423 |
| DPP4 | Dipeptidyl-peptidase 4 | SEQ ID NOS: 4424- |
| | | 4428 |
| DPP7 | Dipeptidyl-peptidase 7 | SEQ ID NOS: 4429- |
| | | 4434 |
| DPT | Dermatopontin | SEQ ID NO: 4435 |
| DRAXIN | Dorsal inhibitory axon guidance protein | SEQ ID NO: 4436 |
| DSE | Dermatan sulfate epimerase | SEQ ID NOS: 4437- |
| | | 4445 |
| DSG2 | Desmoglein 2 | SEQ ID NOS: 4446- |
| | | 4447 |
| DSPP | Dentin sialophosphoprotein | SEQ ID NOS: 4448- |
| | | 4449 |
| DST | Dystonin | SEQ ID NOS: 4450- |
| | | 4468 |
| DUOX1 | Dual oxidase 1 | SEQ ID NOS: 4469- |
| | | 4473 |
| DYNLT3 | Dynein, light chain, Tctex-type 3 | SEQ ID NOS: 4474- |
| | | 4476 |
| E2F5 | E2F transcription factor 5, p130-binding | SEQ ID NOS: 4477- |
| | | 4483 |
| EBAG9 | Estrogen receptor binding site associated, | SEQ ID NOS: 4484- |
| | antigen, 9 | 4492 |
| EBI3 | Epstein-Barr virus induced 3 | SEQ ID NO: 4493 |
| ECHDC1 | Ethylmalonyl-CoA decarboxylase 1 | SEQ ID NOS: 4494- |
| | | 4512 |
| ECM1 | Extracellular matrix protein 1 | SEQ ID NOS: 4513- |
| | | 4515 |
| ECM2 | Extracellular matrix protein 2, female organ | SEQ ID NOS: 4516- |
| | and adipocyte specific | 4519 |
| ECSIT | ECSIT signalling integrator | SEQ ID NOS: 4520- |
| | | 4531 |
| EDDM3A | Epididymal protein 3A | SEQ ID NO: 4532 |
| EDDM3B | Epididymal protein 3B | SEQ ID NO: 4533 |
| EDEM2 | ER degradation enhancer, mannosidase | SEQ ID NOS: 4534- |
| | alpha-like 2 | 4535 |
| EDEM3 | ER degradation enhancer, mannosidase | SEQ ID NOS: 4536- |
| | alpha-like 3 | 4538 |
| EDIL3 | EGF-like repeats and discoidin I-like | SEQ ID NOS: 4539- |
| | domains 3 | 4540 |
| EDN1 | Endothelin 1 | SEQ ID NO: 4541 |
| EDN2 | Endothelin 2 | SEQ ID NO: 4542 |
| EDN3 | Endothelin 3 | SEQ ID NOS: 4543- |
| | | 4548 |
| EDNRB | Endothelin receptor type B | SEQ ID NOS: 4549- |
| | | 4557 |
| EFEMP1 | EGF containing fibulin-like extracellular | SEQ ID NOS: 4558- |
| | matrix protein 1 | 4568 |
| EFEMP2 | EGF containing fibulin-like extracellular | SEQ ID NOS: 4569- |
| | matrix protein 2 | 4580 |
| EFNA1 | Ephrin-A1 | SEQ ID NOS: 4581- |
| | | 4582 |
| EFNA2 | Ephrin-A2 | SEQ ID NO: 4583 |
| EFNA4 | Ephrin-A4 | SEQ ID NOS: 4584- |
| | | 4586 |
| EGFL6 | EGF-like-domain, multiple 6 | SEQ ID NOS: 4587- |
| | | 4588 |
| EGFL7 | EGF-like-domain, multiple 7 | SEQ ID NOS: 4589- |
| | | 4593 |
| EGFL8 | EGF-like-domain, multiple 8 | SEQ ID NOS: 4594- |
| | | 4596 |
| EGFLAM | EGF-like, fibronectin type III and laminin G | SEQ ID NOS: 4597- |
| | domains | 4605 |
| EGFR | Epidermal growth factor receptor | SEQ ID NOS: 4606- |
| | | 4613 |
| EHBP1 | EH domain binding protein 1 | SEQ ID NOS: 4614- |
| | | 4625 |
| EHF | Ets homologous factor | SEQ ID NOS: 4626- |
| | | 4635 |
| EHMT1 | Euchromatic histone-lysine N- | SEQ ID NOS: 4636- |
| | methyltransferase 1 | 4661 |
| EHMT2 | Euchromatic histone-lysine N- | SEQ ID NOS: 4662- |
| | methyltransferase 2 | 4666 |
| EIF2AK1 | Eukaryotic translation initiation factor 2- | SEQ ID NOS: 4667- |
| | alpha kinase 1 | 4670 |
| ELANE | Elastase, neutrophil expressed | SEQ ID NOS: 4671- |
| | | 4672 |
| ELN | Elastin | SEQ ID NOS: 4673- |
| | | 4695 |
| ELP2 | Elongator acetyltransferase complex subunit | SEQ ID NOS: 4696- |
| | 2 | 4708 |
| ELSPBP1 | Epididymal sperm binding protein 1 | SEQ ID NOS: 4709- |
| | | 4714 |
| EMC1 | ER membrane protein complex subunit 1 | SEQ ID NOS: 4715- |
| | | 4721 |
| EMC10 | ER membrane protein complex subunit 10 | SEQ ID NOS: 4722- |
| | | 4728 |
| EMC9 | ER membrane protein complex subunit 9 | SEQ ID NOS: 4729- |
| | | 4732 |
| EMCN | Endomucin | SEQ ID NOS: 4733- |
| | | 4737 |
| EMID1 | EMI domain containing 1 | SEQ ID NOS: 4738- |
| | | 4744 |
| EMILIN1 | Elastin microfibril interfacer 1 | SEQ ID NOS: 4745- |
| | | 4746 |
| EMILIN2 | Elastin microfibril interfacer 2 | SEQ ID NO: 4747 |
| EMILIN3 | Elastin microfibril interfacer 3 | SEQ ID NO: 4748 |
| ENAM | Enamelin | SEQ ID NO: 4749 |
| ENDOG | Endonuclease G | SEQ ID NO: 4750 |
| ENDOU | Endonuclease, polyU-specific | SEQ ID NOS: 4751- |
| | | 4753 |
| ENHO | Energy homeostasis associated | SEQ ID NO: 4754 |
| ENO4 | Enolase family member 4 | SEQ ID NOS: 4755- |
| | | 4759 |
| ENPP6 | Ectonucleotide | SEQ ID NOS: 4760- |
| | pyrophosphatase/phosphodiesterase 6 | 4761 |
| ENPP7 | Ectonucleotide | SEQ ID NOS: 4762- |
| | pyrophosphatase/phosphodiesterase 7 | 4763 |
| ENTPD5 | Ectonucleoside triphosphate | SEQ ID NOS: 4764- |
| | diphosphohydrolase 5 | 4768 |
| ENTPD8 | Ectonucleoside triphosphate | SEQ ID NOS: 4769- |
| | diphosphohydrolase 8 | 4772 |
| EOGT | EGF domain-specific O-linked N- | SEQ ID NOS: 4773- |
| | acetylglucosamine (GlcNAc) transferase | 4780 |
| EPCAM | Epithelial cell adhesion molecule | SEQ ID NOS: 4781- |
| | | 4784 |
| EPDR1 | Ependymin related 1 | SEQ ID NOS: 4785- |
| | | 4788 |
| EPGN | Epithelial mitogen | SEQ ID NOS: 4789- |
| | | 4797 |
| EPHA10 | EPH receptor A10 | SEQ ID NOS: 4798- |
| | | 4805 |
| EPHA3 | EPH receptor A3 | SEQ ID NOS: 4806- |
| | | 4808 |
| EPHA4 | EPH receptor A4 | SEQ ID NOS: 4809- |
| | | 4818 |
| EPHA7 | EPH receptor A7 | SEQ ID NOS: 4819- |
| | | 4820 |
| EPHA8 | EPH receptor A8 | SEQ ID NOS: 4821- |
| | | 4822 |
| EPHB2 | EPH receptor B2 | SEQ ID NOS: 4823- |
| | | 4827 |
| EPHB4 | EPH receptor B4 | SEQ ID NOS: 4828- |
| | | 4830 |
| EPHX3 | Epoxide hydrolase 3 | SEQ ID NOS: 4831- |
| | | 4834 |
| EPO | Erythropoietin | SEQ ID NO: 4835 |
| EPPIN | Epididymal peptidase inhibitor | SEQ ID NOS: 4836- |
| | | 4838 |
| EPPIN- | EPPIN-WFDC6 readthrough | SEQ ID NO: 4839 |
| WFDC6 | | |
| EPS15 | Epidermal growth factor receptor pathway | SEQ ID NOS: 4840- |
| | substrate 15 | 4842 |
| EPS8L1 | EPS8-like 1 | SEQ ID NOS: 4843- |
| | | 4848 |
| EPX | Eosinophil peroxidase | SEQ ID NO: 4849 |
| EPYC | Epiphycan | SEQ ID NOS: 4850- |
| | | 4851 |
| EQTN | Equatorin, sperm acrosome associated | SEQ ID NOS: 4852- |
| | | 4854 |
| ERAP1 | Endoplasmic reticulum aminopeptidase 1 | SEQ ID NOS: 4855- |
| | | 4859 |
| ERAP2 | Endoplasmic reticulum aminopeptidase 2 | SEQ ID NOS: 4860- |
| | | 4867 |
| ERBB3 | Erb-b2 receptor tyrosine kinase 3 | SEQ ID NOS: 4868- |
| | | 4881 |
| ERLIN1 | ER lipid raft associated 1 | SEQ ID NOS: 4885- |
| | | 4887 |
| ERLIN2 | ER lipid raft associated 2 | SEQ ID NOS: 4888- |
| | | 4896 |
| ERN1 | Endoplasmic reticulum to nucleus signaling | SEQ ID NOS: 4897- |
| | 1 | 4898 |
| ERN2 | Endoplasmic reticulum to nucleus signaling | SEQ ID NOS: 4899- |
| | 2 | 4903 |
| ERO1A | Endoplasmic reticulum oxidoreductase | SEQ ID NOS: 4904- |
| | alpha | 4910 |
| ERO1B | Endoplasmic reticulum oxidoreductase beta | SEQ ID NOS: 4911- |
| | | 4913 |
| ERP27 | Endoplasmic reticulum protein 27 | SEQ ID NOS: 4914- |
| | | 4915 |
| ERP29 | Endoplasmic reticulum protein 29 | SEQ ID NOS: 4916- |
| | | 4919 |
| ERP44 | Endoplasmic reticulum protein 44 | SEQ ID NO: 4920 |
| ERV3-1 | Endogenous retrovirus group 3, member 1 | SEQ ID NO: 4921 |
| ESM1 | Endothelial cell-specific molecule 1 | SEQ ID NOS: 4922- |
| | | 4924 |
| ESRP1 | Epithelial splicing regulatory protein 1 | SEQ ID NOS: 4925- |
| | | 4933 |
| EXOG | Endo/exonuclease (5′-3′), endonuclease G- | SEQ ID NOS: 4934- |
| | like | 4947 |
| EXTL1 | Exostosin-like glycosyltransferase 1 | SEQ ID NO: 4948 |
| EXTL2 | Exostosin-like glycosyltransferase 2 | SEQ ID NOS: 4949- |
| | | 4953 |
| F10 | Coagulation factor X | SEQ ID NOS: 4954- |
| | | 4957 |
| F11 | Coagulation factor XI | SEQ ID NOS: 4958- |
| | | 4962 |
| F12 | Coagulation factor XII (Hageman factor) | SEQ ID NO: 4963 |
| F13B | Coagulation factor XIII, B polypeptide | SEQ ID NO: 4964 |
| F2 | Coagulation factor II (thrombin) | SEQ ID NOS: 4965- |
| | | 4967 |
| F2R | Coagulation factor II (thrombin) receptor | SEQ ID NOS: 4968- |
| | | 4969 |
| F2RL3 | Coagulation factor II (thrombin) receptor- | SEQ ID NOS: 4970- |
| | like 3 | 4971 |
| F5 | Coagulation factor V (proaccelerin, labile | SEQ ID NOS: 4972- |
| | factor) | 4973 |
| F7 | Coagulation factor VII (serum prothrombin | SEQ ID NOS: 4974- |
| | conversion accelerator) | 4977 |
| F8 | Coagulation factor VIII, procoagulant | SEQ ID NOS: 4978- |
| | component | 4983 |
| F9 | Coagulation factor IX | SEQ ID NOS: 4984- |
| | | 4985 |
| FABP6 | Fatty acid binding protein 6, ileal | SEQ ID NOS: 4986- |
| | | 4988 |
| FAM107B | Family with sequence similarity 107, | SEQ ID NOS: 4989- |
| | member B | 5010 |
| FAM131A | Family with sequence similarity 131, | SEQ ID NOS: 5011- |
| | member A | 5019 |
| FAM132A | Family with sequence similarity 132, | SEQ ID NO: 1795 |
| | member A | |
| FAM132B | Family with sequence similarity 132, | SEQ ID NOS: 4882- |
| | member B | 4884 |
| FAM150A | Family with sequence similarity 150, | SEQ ID NOS: 737-738 |
| | member A | |
| FAM150B | Family with sequence similarity 150, | SEQ ID NOS: 739-745 |
| | member B | |
| FAM171A1 | Family with sequence similarity 171, | SEQ ID NOS: 5020- |
| | member A1 | 5021 |
| FAM171B | Family with sequence similarity 171, | SEQ ID NOS: 5022- |
| | member B | 5023 |
| FAM172A | Family with sequence similarity 172, | SEQ ID NOS: 5024- |
| | member A | 5028 |
| FAM175A | Family with sequence similarity 175, | SEQ ID NOS: 64-71 |
| | member A | |
| FAM177A1 | Family with sequence similarity 177, | SEQ ID NOS: 5029- |
| | member A1 | 5038 |
| FAM179B | Family with sequence similarity 179, | SEQ ID NOS: 13628- |
| | member B | 13633 |
| FAM180A | Family with sequence similarity 180, | SEQ ID NOS: 5039- |
| | member A | 5041 |
| FAM189A1 | Family with sequence similarity 189, | SEQ ID NOS: 5042- |
| | member A1 | 5043 |
| FAM198A | Family with sequence similarity 198, | SEQ ID NOS: 5044- |
| | member A | 5046 |
| FAM19A1 | Family with sequence similarity 19 | SEQ ID NOS: 5047- |
| | (chemokine (C-C motif)-like), member A1 | 5049 |
| FAM19A2 | Family with sequence similarity 19 | SEQ ID NOS: 5050- |
| | (chemokine (C-C motif)-like), member A2 | 5057 |
| FAM19A3 | Family with sequence similarity 19 | SEQ ID NOS: 5058- |
| | (chemokine (C-C motif)-like), member A3 | 5059 |
| FAM19A4 | Family with sequence similarity 19 | SEQ ID NOS: 5060- |
| | (chemokine (C-C motif)-like), member A4 | 5062 |
| FAM19A5 | Family with sequence similarity 19 | SEQ ID NOS: 5063- |
| | (chemokine (C-C motif)-like), member A5 | 5066 |
| FAM20A | Family with sequence similarity 20, | SEQ ID NOS: 5067- |
| | member A | 5070 |
| FAM20C | Family with sequence similarity 20, | SEQ ID NO: 5071 |
| | member C | |
| FAM213A | Family with sequence similarity 213, | SEQ ID NOS: 5072- |
| | member A | 5077 |
| FAM26D | Family with sequence similarity 26, | SEQ ID NOS: 2006- |
| | member D | 2010 |
| FAM46B | Family with sequence similarity 46, | SEQ ID NO: 5078 |
| | member B | |
| FAM57A | Family with sequence similarity 57, | SEQ ID NOS: 5079- |
| | member A | 5084 |
| FAM78A | Family with sequence similarity 78, | SEQ ID NOS: 5085- |
| | member A | 5087 |
| FAM96A | Family with sequence similarity 96, | SEQ ID NOS: 5088- |
| | member A | 5092 |
| FAM9B | Family with sequence similarity 9, member | SEQ ID NOS: 5093- |
| | B | 5096 |
| FAP | Fibroblast activation protein, alpha | SEQ ID NOS: 5097- |
| | | 5103 |
| FAS | Fas cell surface death receptor | SEQ ID NOS: 5104- |
| | | 5113 |
| FAT1 | FAT atypical cadherin 1 | SEQ ID NOS: 5114- |
| | | 5120 |
| FBLN1 | Fibulin 1 | SEQ ID NOS: 5121- |
| | | 5133 |
| FBLN2 | Fibulin 2 | SEQ ID NOS: 5134- |
| | | 5139 |
| FBLN5 | Fibulin 5 | SEQ ID NOS: 5140- |
| | | 5145 |
| FBLN7 | Fibulin 7 | SEQ ID NOS: 5146- |
| | | 5151 |
| FBN1 | Fibrillin 1 | SEQ ID NOS: 5152- |
| | | 5155 |
| FBN2 | Fibrillin 2 | SEQ ID NOS: 5156- |
| | | 5161 |
| FBN3 | Fibrillin 3 | SEQ ID NOS: 5162- |
| | | 5166 |
| FBXW7 | F-box and WD repeat domain containing 7, | SEQ ID NOS: 5167- |
| | E3 ubiquitin protein ligase | 5177 |
| FCAR | Fc fragment of IgA receptor | SEQ ID NOS: 5178- |
| | | 5187 |
| FCGBP | Fc fragment of IgG binding protein | SEQ ID NOS: 5188- |
| | | 5190 |
| FCGR1B | Fc fragment of IgG, high affinity Ib, | SEQ ID NOS: 5191- |
| | receptor (CD64) | 5196 |
| FCGR3A | Fc fragment of IgG, low affinity IIIa, | SEQ ID NOS: 5197- |
| | receptor (CD16a) | 5203 |
| FCGRT | Fc fragment of IgG, receptor, transporter, | SEQ ID NOS: 5204- |
| | alpha | 5214 |
| FCMR | Fc fragment of IgM receptor | SEQ ID NOS: 5215- |
| | | 5221 |
| FCN1 | Ficolin (collagen/fibrinogen domain | SEQ ID NOS: 5222- |
| | containing) 1 | 5223 |
| FCN2 | Ficolin (collagen/fibrinogen domain | SEQ ID NOS: 5224- |
| | containing lectin) 2 | 5225 |
| FCN3 | Ficolin (collagen/fibrinogen domain | SEQ ID NOS: 5226- |
| | containing) 3 | 5227 |
| FCRL1 | Fc receptor-like 1 | SEQ ID NOS: 5228- |
| | | 5230 |
| FCRL3 | Fc receptor-like 3 | SEQ ID NOS: 5231- |
| | | 5236 |
| FCRL5 | Fc receptor-like 5 | SEQ ID NOS: 5237- |
| | | 5239 |
| FCRLA | Fc receptor-like A | SEQ ID NOS: 5240- |
| | | 5251 |
| FCRLB | Fc receptor-like B | SEQ ID NOS: 5252- |
| | | 5256 |
| FDCSP | Follicular dendritic cell secreted protein | SEQ ID NO: 5257 |
| FETUB | Fetuin B | SEQ ID NOS: 5258- |
| | | 5264 |
| FGA | Fibrinogen alpha chain | SEQ ID NOS: 5265- |
| | | 5267 |
| FGB | Fibrinogen beta chain | SEQ ID NOS: 5268- |
| | | 5270 |
| FGF10 | Fibroblast growth factor 10 | SEQ ID NOS: 5271- |
| | | 5272 |
| FGF17 | Fibroblast growth factor 17 | SEQ ID NOS: 5273- |
| | | 5274 |
| FGF18 | Fibroblast growth factor 18 | SEQ ID NO: 5275 |
| FGF19 | Fibroblast growth factor 19 | SEQ ID NO: 5276 |
| FGF21 | Fibroblast growth factor 21 | SEQ ID NOS: 5277- |
| | | 5278 |
| FGF22 | Fibroblast growth factor 22 | SEQ ID NOS: 5279- |
| | | 5280 |
| FGF23 | Fibroblast growth factor 23 | SEQ ID NO: 5281 |
| FGF3 | Fibroblast growth factor 3 | SEQ ID NO: 5282 |
| FGF4 | Fibroblast growth factor 4 | SEQ ID NO: 5283 |
| FGF5 | Fibroblast growth factor 5 | SEQ ID NOS: 5284- |
| | | 5286 |
| FGF7 | Fibroblast growth factor 7 | SEQ ID NOS: 5287- |
| | | 5291 |
| FGF8 | Fibroblast growth factor 8 (androgen- | SEQ ID NOS: 5292- |
| | induced) | 5297 |
| FGFBP1 | Fibroblast growth factor binding protein 1 | SEQ ID NO: 5298 |
| FGFBP2 | Fibroblast growth factor binding protein 2 | SEQ ID NO: 5299 |
| FGFBP3 | Fibroblast growth factor binding protein 3 | SEQ ID NO: 5300 |
| FGFR1 | Fibroblast growth factor receptor 1 | SEQ ID NOS: 5301- |
| | | 5322 |
| FGFR2 | Fibroblast growth factor receptor 2 | SEQ ID NOS: 5323- |
| | | 5344 |
| FGFR3 | Fibroblast growth factor receptor 3 | SEQ ID NOS: 5345- |
| | | 5352 |
| FGFR4 | Fibroblast growth factor receptor 4 | SEQ ID NOS: 5353- |
| | | 5362 |
| FGFRL1 | Fibroblast growth factor receptor-like 1 | SEQ ID NOS: 5363- |
| | | 5368 |
| FGG | Fibrinogen gamma chain | SEQ ID NOS: 5369- |
| | | 5374 |
| FGL1 | Fibrinogen-like 1 | SEQ ID NOS: 5375- |
| | | 5381 |
| FGL2 | Fibrinogen-like 2 | SEQ ID NOS: 5382- |
| | | 5383 |
| FHL1 | Four and a half LIM domains 1 | SEQ ID NOS: 5384- |
| | | 5411 |
| FHOD3 | Formin homology 2 domain containing 3 | SEQ ID NOS: 5412- |
| | | 5418 |
| FIBIN | Fin bud initiation factor homolog | SEQ ID NO: 5419 |
| | (zebrafish) | |
| FICD | FIC domain containing | SEQ ID NOS: 5420- |
| | | 5423 |
| FIGF | C-fos induced growth factor (vascular | SEQ ID NO: 14054 |
| | endothelial growth factor D) | |
| FJX1 | Four jointed box 1 | SEQ ID NO: 5424 |
| FKBP10 | FK506 binding protein 10, 65 kDa | SEQ ID NOS: 5425- |
| | | 5430 |
| FKBP11 | FK506 binding protein 11, 19 kDa | SEQ ID NOS: 5431- |
| | | 5437 |
| FKBP14 | FK506 binding protein 14, 22 kDa | SEQ ID NOS: 5438- |
| | | 5440 |
| FKBP2 | FK506 binding protein 2, 13 kDa | SEQ ID NOS: 5441- |
| | | 5444 |
| FKBP7 | FK506 binding protein 7 | SEQ ID NOS: 5445- |
| | | 5450 |
| FKBP9 | FK506 binding protein 9, 63 kDa | SEQ ID NOS: 5451- |
| | | 5454 |
| FLT1 | Fms-related tyrosine kinase 1 | SEQ ID NOS: 5455- |
| | | 5463 |
| FLT4 | Fms-related tyrosine kinase 4 | SEQ ID NOS: 5464- |
| | | 5468 |
| FMO1 | Flavin containing monooxygenase 1 | SEQ ID NOS: 5469- |
| | | 5473 |
| FMO2 | Flavin containing monooxygenase 2 (non- | SEQ ID NOS: 5474- |
| | functional) | 5476 |
| FMO3 | Flavin containing monooxygenase 3 | SEQ ID NOS: 5477- |
| | | 5479 |
| FMO5 | Flavin containing monooxygenase 5 | SEQ ID NOS: 5480- |
| | | 5486 |
| FMOD | Fibromodulin | SEQ ID NO: 5487 |
| FN1 | Fibronectin 1 | SEQ ID NOS: 5488- |
| | | 5500 |
| FNDC1 | Fibronectin type III domain containing 1 | SEQ ID NOS: 5501- |
| | | 5502 |
| FNDC7 | Fibronectin type III domain containing 7 | SEQ ID NOS: 5503- |
| | | 5504 |
| FOCAD | Focadhesin | SEQ ID NOS: 5505- |
| | | 5511 |
| FOLR2 | Folate receptor 2 (fetal) | SEQ ID NOS: 5512- |
| | | 5521 |
| FOLR3 | Folate receptor 3 (gamma) | SEQ ID NOS: 5522- |
| | | 5526 |
| FOXRED2 | FAD-dependent oxidoreductase domain | SEQ ID NOS: 5527- |
| | containing 2 | 5530 |
| FP325331.1 | Uncharacterized protein | SEQ ID NO: 5531 |
| | UNQ6126/PRO20091 | |
| FPGS | Folylpolyglutamate synthase | SEQ ID NOS: 5539- |
| | | 5545 |
| FRAS1 | Fraser extracellular matrix complex subunit | SEQ ID NOS: 5546- |
| | 1 | 5551 |
| FREM1 | FRAS1 related extracellular matrix 1 | SEQ ID NOS: 5552- |
| | | 5556 |
| FREM3 | FRAS1 related extracellular matrix 3 | SEQ ID NO: 5557 |
| FRMPD2 | FERM and PDZ domain containing 2 | SEQ ID NOS: 5558- |
| | | 5561 |
| FRZB | Frizzled-related protein | SEQ ID NO: 5562 |
| FSHB | Follicle stimulating hormone, beta | SEQ ID NOS: 5563- |
| | polypeptide | 5565 |
| FSHR | Follicle stimulating hormone receptor | SEQ ID NOS: 5566- |
| | | 5569 |
| FST | Follistatin | SEQ ID NOS: 5570- |
| | | 5573 |
| FSTL1 | Follistatin-like 1 | SEQ ID NOS: 5574- |
| | | 5577 |
| FSTL3 | Follistatin-like 3 (secreted glycoprotein) | SEQ ID NOS: 5578- |
| | | 5583 |
| FSTL4 | Follistatin-like 4 | SEQ ID NOS: 5584- |
| | | 5586 |
| FSTL5 | Follistatin-like 5 | SEQ ID NOS: 5587- |
| | | 5589 |
| FTCDNL1 | Formiminotransferase cyclodeaminase N- | SEQ ID NOS: 5590- |
| | terminal like | 5593 |
| FUCA1 | Fucosidase, alpha-L- 1, tissue | SEQ ID NO: 5594 |
| FUCA2 | Fucosidase, alpha-L- 2, plasma | SEQ ID NOS: 5595- |
| | | 5596 |
| FURIN | Furin (paired basic amino acid cleaving | SEQ ID NOS: 5597- |
| | enzyme) | 5603 |
| FUT10 | Fucosyltransferase 10 (alpha (1,3) | SEQ ID NOS: 5604- |
| | fucosyltransferase) | 5606 |
| FUT11 | Fucosyltransferase 11 (alpha (1,3) | SEQ ID NOS: 5607- |
| | fucosyltransferase) | 5608 |
| FXN | Frataxin | SEQ ID NOS: 5609- |
| | | 5616 |
| FXR1 | Fragile X mental retardation, autosomal | SEQ ID NOS: 5617- |
| | homolog 1 | 5629 |
| FXYD3 | FXYD domain containing ion transport | SEQ ID NOS: 5630- |
| | regulator 3 | 5642 |
| GABBR1 | Gamma-aminobutyric acid (GABA) B | SEQ ID NOS: 5643- |
| | receptor, 1 | 5654 |
| GABRA1 | Gamma-aminobutyric acid (GABA) A | SEQ ID NOS: 5655- |
| | receptor, alpha 1 | 5670 |
| GABRA2 | Gamma-aminobutyric acid (GABA) A | SEQ ID NOS: 5671- |
| | receptor, alpha 2 | 5685 |
| GABRA5 | Gamma-aminobutyric acid (GABA) A | SEQ ID NOS: 5686- |
| | receptor, alpha 5 | 5694 |
| GABRG3 | Gamma-aminobutyric acid (GABA) A | SEQ ID NOS: 5695- |
| | receptor, gamma 3 | 5700 |
| GABRP | Gamma-aminobutyric acid (GABA) A | SEQ ID NOS: 5701- |
| | receptor, pi | 5709 |
| GAL | Galanin/GMAP prepropeptide | SEQ ID NO: 5710 |
| GAL3ST1 | Galactose-3-O-sulfotransferase 1 | SEQ ID NOS: 5711- |
| | | 5732 |
| GAL3ST2 | Galactose-3-O-sulfotransferase 2 | SEQ ID NO: 5733 |
| GAL3ST3 | Galactose-3-O-sulfotransferase 3 | SEQ ID NOS: 5734- |
| | | 5735 |
| GALC | Galactosylceramidase | SEQ ID NOS: 5736- |
| | | 5745 |
| GALNS | Galactosamine (N-acetyl)-6-sulfatase | SEQ ID NOS: 5746- |
| | | 5751 |
| GALNT10 | Polypeptide N- | SEQ ID NOS: 5752- |
| | acetylgalactosaminyltransferase 10 | 5755 |
| GALNT12 | Polypeptide N- | SEQ ID NOS: 5756- |
| | acetylgalactosaminyltransferase 12 | 5757 |
| GALNT15 | Polypeptide N- | SEQ ID NOS: 5758- |
| | acetylgalactosaminyltransferase 15 | 5761 |
| GALNT2 | Polypeptide N- | SEQ ID NO: 5762 |
| | acetylgalactosaminyltransferase 2 | |
| GALNT6 | Polypeptide N- | SEQ ID NOS: 5763- |
| | acetylgalactosaminyltransferase 6 | 5774 |
| GALNT8 | Polypeptide N- | SEQ ID NOS: 5775- |
| | acetylgalactosaminyltransferase 8 | 5778 |
| GALNTL6 | Polypeptide N- | SEQ ID NOS: 5779- |
| | acetylgalactosaminyltransferase-like 6 | 5782 |
| GALP | Galanin-like peptide | SEQ ID NOS: 5783- |
| | | 5785 |
| GANAB | Glucosidase, alpha; neutral AB | SEQ ID NOS: 5786- |
| | | 5794 |
| GARS | Glycyl-tRNA synthetase | SEQ ID NOS: 5795- |
| | | 5798 |
| GAS1 | Growth arrest-specific 1 | SEQ ID NO: 5799 |
| GAS6 | Growth arrest-specific 6 | SEQ ID NO: 5800 |
| GAST | Gastrin | SEQ ID NO: 5801 |
| GBA | Glucosidase, beta, acid | SEQ ID NOS: 5811- |
| | | 5814 |
| GBGT1 | Globoside alpha-1,3-N- | SEQ ID NOS: 5815- |
| | acetylgalactosaminyltransferase 1 | 5823 |
| GC | Group-specific component (vitamin D | SEQ ID NOS: 5824- |
| | binding protein) | 5828 |
| GCG | Glucagon | SEQ ID NOS: 5829- |
| | | 5830 |
| GCGR | Glucagon receptor | SEQ ID NOS: 5831- |
| | | 5833 |
| GCNT7 | Glucosaminyl (N-acetyl) transferase family | SEQ ID NOS: 5834- |
| | member 7 | 5835 |
| GCSH | Glycine cleavage system protein H | SEQ ID NOS: 5836- |
| | (aminomethyl carrier) | 5844 |
| GDF1 | Growth differentiation factor 1 | SEQ ID NO: 5845 |
| GDF10 | Growth differentiation factor 10 | SEQ ID NO: 5846 |
| GDF11 | Growth differentiation factor 11 | SEQ ID NOS: 5847- |
| | | 5848 |
| GDF15 | Growth differentiation factor 15 | SEQ ID NOS: 5849- |
| | | 5851 |
| GDF2 | Growth differentiation factor 2 | SEQ ID NO: 5852 |
| GDF3 | Growth differentiation factor 3 | SEQ ID NO: 5853 |
| GDF5 | Growth differentiation factor 5 | SEQ ID NOS: 5854- |
| | | 5855 |
| GDF6 | Growth differentiation factor 6 | SEQ ID NOS: 5856- |
| | | 5858 |
| GDF7 | Growth differentiation factor 7 | SEQ ID NO: 5859 |
| GDF9 | Growth differentiation factor 9 | SEQ ID NOS: 5860- |
| | | 5864 |
| GDNF | Glial cell derived neurotrophic factor | SEQ ID NOS: 5865- |
| | | 5872 |
| GFOD2 | Glucose-fructose oxidoreductase domain | SEQ ID NOS: 5873- |
| | containing 2 | 5878 |
| GFPT2 | Glutamine-fructose-6-phosphate | SEQ ID NOS: 5879- |
| | transaminase 2 | 5881 |
| GFRA2 | GDNF family receptor alpha 2 | SEQ ID NOS: 5882- |
| | | 5888 |
| GFRA4 | GDNF family receptor alpha 4 | SEQ ID NOS: 5889- |
| | | 5891 |
| GGA2 | Golgi-associated, gamma adaptin ear | SEQ ID NOS: 5892- |
| | containing, ARF binding protein 2 | 5900 |
| GGH | Gamma-glutamyl hydrolase (conjugase, | SEQ ID NO: 5901 |
| | folylpolygammaglutamyl hydrolase) | |
| GGT1 | Gamma-glutamyltransferase 1 | SEQ ID NOS: 5902- |
| | | 5924 |
| GGT5 | Gamma-glutamyltransferase 5 | SEQ ID NOS: 5925- |
| | | 5929 |
| GH1 | Growth hormone 1 | SEQ ID NOS: 5930- |
| | | 5934 |
| GH2 | Growth hormone 2 | SEQ ID NOS: 5935- |
| | | 5939 |
| GHDC | GH3 domain containing | SEQ ID NOS: 5940- |
| | | 5947 |
| GHRH | Growth hormone releasing hormone | SEQ ID NOS: 5948- |
| | | 5950 |
| GHRHR | Growth hormone releasing hormone | SEQ ID NOS: 5951- |
| | receptor | 5956 |
| GHRL | Ghrelin/obestatin prepropeptide | SEQ ID NOS: 5957- |
| | | 5967 |
| GIF | Gastric intrinsic factor (vitamin B synthesis) | SEQ ID NOS: 5968- |
| | | 5969 |
| GIP | Gastric inhibitory polypeptide | SEQ ID NO: 5970 |
| GKN1 | Gastrokine 1 | SEQ ID NO: 5971 |
| GKN2 | Gastrokine 2 | SEQ ID NOS: 5972- |
| | | 5973 |
| GLA | Galactosidase, alpha | SEQ ID NOS: 5974- |
| | | 5975 |
| GLB1 | Galactosidase, beta 1 | SEQ ID NOS: 5976- |
| | | 5984 |
| GLB1L | Galactosidase, beta 1-like | SEQ ID NOS: 5985- |
| | | 5992 |
| GLB1L2 | Galactosidase, beta 1-like 2 | SEQ ID NOS: 5993- |
| | | 5994 |
| GLCE | Glucuronic acid epimerase | SEQ ID NOS: 5995- |
| | | 5996 |
| GLG1 | Golgi glycoprotein 1 | SEQ ID NOS: 5997- |
| | | 6004 |
| GLIPR1 | GLI pathogenesis-related 1 | SEQ ID NOS: 6005- |
| | | 6008 |
| GLIPR1L1 | GLI pathogenesis-related 1 like 1 | SEQ ID NOS: 6009- |
| | | 6012 |
| GLIS3 | GLIS family zinc finger 3 | SEQ ID NOS: 6013- |
| | | 6021 |
| GLMP | Glycosylated lysosomal membrane protein | SEQ ID NOS: 6022- |
| | | 6030 |
| GLRB | Glycine receptor, beta | SEQ ID NOS: 6031- |
| | | 6036 |
| GLS | Glutaminase | SEQ ID NOS: 6037- |
| | | 6044 |
| GLT6D1 | Glycosyltransferase 6 domain containing 1 | SEQ ID NOS: 6045- |
| | | 6046 |
| GLTPD2 | Glycolipid transfer protein domain | SEQ ID NO: 6047 |
| | containing 2 | |
| GLUD1 | Glutamate dehydrogenase 1 | SEQ ID NO: 6048 |
| GM2A | GM2 ganglioside activator | SEQ ID NOS: 6049- |
| | | 6051 |
| GML | Glycosylphosphatidylinositol anchored | SEQ ID NOS: 6052- |
| | molecule like | 6053 |
| GNAS | GNAS complex locus | SEQ ID NOS: 6054- |
| | | 6075 |
| GNLY | Granulysin | SEQ ID NOS: 6076- |
| | | 6079 |
| GNPTG | N-acetylglucosamine-1-phosphate | SEQ ID NOS: 6080- |
| | transferase, gamma subunit | 6084 |
| GNRH1 | Gonadotropin-releasing hormone 1 | SEQ ID NOS: 6085- |
| | (luteinizing-releasing hormone) | 6086 |
| GNRH2 | Gonadotropin-releasing hormone 2 | SEQ ID NOS: 6087- |
| | | 6090 |
| GNS | Glucosamine (N-acetyl)-6-sulfatase | SEQ ID NOS: 6091- |
| | | 6096 |
| GOLM1 | Golgi membrane protein 1 | SEQ ID NOS: 6097- |
| | | 6101 |
| GORAB | Golgin, RAB6-interacting | SEQ ID NOS: 6102- |
| | | 6104 |
| GOT2 | Glutamic-oxaloacetic transaminase 2, | SEQ ID NOS: 6105- |
| | mitochondrial | 6107 |
| GP2 | Glycoprotein 2 (zymogen granule | SEQ ID NOS: 6108- |
| | membrane) | 6116 |
| GP6 | Glycoprotein VI (platelet) | SEQ ID NOS: 6117- |
| | | 6120 |
| GPC2 | Glypican 2 | SEQ ID NOS: 6121- |
| | | 6122 |
| GPC5 | Glypican 5 | SEQ ID NOS: 6123- |
| | | 6125 |
| GPC6 | Glypican 6 | SEQ ID NOS: 6126- |
| | | 6127 |
| GPD2 | Glycerol-3-phosphate dehydrogenase 2 | SEQ ID NOS: 6128- |
| | (mitochondrial) | 6136 |
| GPER1 | G protein-coupled estrogen receptor 1 | SEQ ID NOS: 6137- |
| | | 6143 |
| GPHA2 | Glycoprotein hormone alpha 2 | SEQ ID NOS: 6144- |
| | | 6146 |
| GPHB5 | Glycoprotein hormone beta 5 | SEQ ID NOS: 6147- |
| | | 6148 |
| GPIHBP1 | Glycosylphosphatidylinositol anchored high | SEQ ID NO: 6149 |
| | density lipoprotein binding protein 1 | |
| GPLD1 | Glycosylphosphatidylinositol specific | SEQ ID NO: 6150 |
| | phospholipase D1 | |
| GPNMB | Glycoprotein (transmembrane) nmb | SEQ ID NOS: 6151- |
| | | 6153 |
| GPR162 | G protein-coupled receptor 162 | SEQ ID NOS: 6154- |
| | | 6157 |
| GPX3 | Glutathione peroxidase 3 | SEQ ID NOS: 6158- |
| | | 6165 |
| GPX4 | Glutathione peroxidase 4 | SEQ ID NOS: 6166- |
| | | 6176 |
| GPX5 | Glutathione peroxidase 5 | SEQ ID NOS: 6177- |
| | | 6178 |
| GPX6 | Glutathione peroxidase 6 | SEQ ID NOS: 6179- |
| | | 6181 |
| GPX7 | Glutathione peroxidase 7 | SEQ ID NO: 6182 |
| GREM1 | Gremlin 1, DAN family BMP antagonist | SEQ ID NOS: 6183- |
| | | 6185 |
| GREM2 | Gremlin 2, DAN family BMP antagonist | SEQ ID NO: 6186 |
| GRHL3 | Grainyhead-like transcription factor 3 | SEQ ID NOS: 6187- |
| | | 6192 |
| GRIA2 | Glutamate receptor, ionotropic, AMPA 2 | SEQ ID NOS: 6193- |
| | | 6204 |
| GRIA3 | Glutamate receptor, ionotropic, AMPA 3 | SEQ ID NOS: 6205- |
| | | 6210 |
| GRIA4 | Glutamate receptor, ionotropic, AMPA 4 | SEQ ID NOS: 6211- |
| | | 6222 |
| GRIK2 | Glutamate receptor, ionotropic, kainate 2 | SEQ ID NOS: 6223- |
| | | 6231 |
| GRIN2B | Glutamate receptor, ionotropic, N-methyl | SEQ ID NOS: 6232- |
| | D-aspartate 2B | 6235 |
| GRM2 | Glutamate receptor, metabotropic 2 | SEQ ID NOS: 6236- |
| | | 6239 |
| GRM3 | Glutamate receptor, metabotropic 3 | SEQ ID NOS: 6240- |
| | | 6244 |
| GRM5 | Glutamate receptor, metabotropic 5 | SEQ ID NOS: 6245- |
| | | 6249 |
| CRN | Granulin | SEQ ID NOS: 6250- |
| | | 6265 |
| GRP | Gastrin-releasing peptide | SEQ ID NOS: 6266- |
| | | 6270 |
| GSG1 | Germ cell associated 1 | SEQ ID NOS: 6280- |
| | | 6288 |
| GSN | Gelsolin | SEQ ID NOS: 6289- |
| | | 6297 |
| GTDC1 | Glycosyltransferase-like domain containing | SEQ ID NOS: 6298- |
| | 1 | 6311 |
| GTPBP10 | GTP-binding protein 10 (putative) | SEQ ID NOS: 6312- |
| | | 6320 |
| GUCA2A | Guanylate cyclase activator 2A (guanylin) | SEQ ID NO: 6321 |
| GUCA2B | Guanylate cyclase activator 2B | SEQ ID NO: 6322 |
| | (uroguanylin) | |
| GUSB | Glucuronidase, beta | SEQ ID NOS: 6323- |
| | | 6327 |
| GVQW1 | GVQW motif containing 1 | SEQ ID NO: 6328 |
| GXYLT1 | Glucoside xylosyltransferase 1 | SEQ ID NOS: 6329- |
| | | 6330 |
| GXYLT2 | Glucoside xylosyltransferase 2 | SEQ ID NOS: 6331- |
| | | 6333 |
| GYLTL1B | Glycosyltransferase-like 1B | SEQ ID NOS: 7702- |
| | | 7707 |
| GYPB | Glycophorin B (MNS blood group) | SEQ ID NOS: 6334- |
| | | 6342 |
| GZMA | Granzyme A (granzyme 1, cytotoxic T- | SEQ ID NO: 6343 |
| | lymphocyte-associated serine esterase 3) | |
| GZMB | Granzyme B (granzyme 2, cytotoxic T- | SEQ ID NOS: 6344- |
| | lymphocyte-associated serine esterase 1) | 6352 |
| GZMH | Granzyme H (cathepsin G-like 2, protein h- | SEQ ID NOS: 6353- |
| | CCPX) | 6355 |
| GZMK | Granzyme K (granzyme 3; tryptase II) | SEQ ID NO: 6356 |
| GZMM | Granzyme M (lymphocyte met-ase 1) | SEQ ID NOS: 6357- |
| | | 6358 |
| H6PD | Hexose-6-phosphate dehydrogenase | SEQ ID NOS: 6359- |
| | (glucose 1-dehydrogenase) | 6360 |
| HABP2 | Hyaluronan binding protein 2 | SEQ ID NOS: 6361- |
| | | 6362 |
| HADHB | Hydroxyacyl-CoA dehydrogenase/3- | SEQ ID NOS: 6363- |
| | ketoacyl-CoA thiolase/enoyl-CoA hydratase | 6369 |
| | (trifunctional protein), beta subunit | |
| HAMP | Hepcidin antimicrobial peptide | SEQ ID NOS: 6370- |
| | | 6371 |
| HAPLN1 | Hyaluronan and proteoglycan link protein 1 | SEQ ID NOS: 6372- |
| | | 6378 |
| HAPLN2 | Hyaluronan and proteoglycan link protein 2 | SEQ ID NOS: 6379- |
| | | 6380 |
| HAPLN3 | Hyaluronan and proteoglycan link protein 3 | SEQ ID NOS: 6381- |
| | | 6384 |
| HAPLN4 | Hyaluronan and proteoglycan link protein 4 | SEQ ID NO: 6385 |
| HARS2 | Histidyl-tRNA synthetase 2, mitochondrial | SEQ ID NOS: 6386- |
| | | 6401 |
| HAVCR1 | Hepatitis A virus cellular receptor 1 | SEQ ID NOS: 6402- |
| | | 6406 |
| HCCS | Holocytochrome c synthase | SEQ ID NOS: 6407- |
| | | 6409 |
| HCRT | Hypocretin (orexin) neuropeptide precursor | SEQ ID NO: 6410 |
| HEATR5A | HEAT repeat containing 5A | SEQ ID NOS: 6414- |
| | | 6420 |
| HEPH | Hephaestin | SEQ ID NOS: 6421- |
| | | 6428 |
| HEXA | Hexosaminidase A (alpha polypeptide) | SEQ ID NOS: 6429- |
| | | 6438 |
| HEXB | Hexosaminidase B (beta polypeptide) | SEQ ID NOS: 6439- |
| | | 6444 |
| HFE2 | Hemochromatosis type 2 (juvenile) | SEQ ID NOS: 6445- |
| | | 6451 |
| HGF | Hepatocyte growth factor (hepapoietin A; | SEQ ID NOS: 6452- |
| | scatter factor) | 6462 |
| HGFAC | HGF activator | SEQ ID NOS: 6463- |
| | | 6464 |
| HHIP | Hedgehog interacting protein | SEQ ID NOS: 6465- |
| | | 6466 |
| HHIPL1 | HHIP-like 1 | SEQ ID NOS: 6467- |
| | | 6468 |
| HHIPL2 | HHIP-like 2 | SEQ ID NO: 6469 |
| HHLA1 | HERV-H LTR-associating 1 | SEQ ID NOS: 6470- |
| | | 6471 |
| HHLA2 | HERV-H LTR-associating 2 | SEQ ID NOS: 6472- |
| | | 6482 |
| HIBADH | 3-hydroxyisobutyrate dehydrogenase | SEQ ID NOS: 6483- |
| | | 6485 |
| HINT2 | Histidine triad nucleotide binding protein 2 | SEQ ID NO: 6486 |
| HLA-A | Major histocompatibility complex, class I, | SEQ ID NOS: 6487- |
| | A | 6491 |
| HLA-C | Major histocompatibility complex, class I, C | SEQ ID NOS: 6492- |
| | | 6496 |
| HLA-DOA | Major histocompatibility complex, class II, | SEQ ID NOS: 6497- |
| | DO alpha | 6498 |
| HLA-DPA1 | Major histocompatibility complex, class II, | SEQ ID NOS: 6499- |
| | DP alpha 1 | 6502 |
| HLA-DQA1 | Major histocompatibility complex, class II, | SEQ ID NOS: 6503- |
| | DQ alpha 1 | 6508 |
| HLA-DQB1 | Major histocompatibility complex, class II, | SEQ ID NOS: 6509- |
| | DQ beta 1 | 6514 |
| HLA-DQB2 | Major histocompatibility complex, class II, | SEQ ID NOS: 6515- |
| | DQ beta 2 | 6518 |
| HMCN1 | Hemicentin 1 | SEQ ID NOS: 6519- |
| | | 6520 |
| HMCN2 | Hemicentin 2 | SEQ ID NOS: 6521- |
| | | 6524 |
| HMGCL | 3-hydroxymethyl-3-methylglutaryl-CoA | SEQ ID NOS: 6525- |
| | lyase | 6528 |
| HMHA1 | Histocompatibility (minor) HA-1 | SEQ ID NOS: 1034- |
| | | 1042 |
| HMSD | Histocompatibility (minor) serpin domain | SEQ ID NOS: 6529- |
| | containing | 6530 |
| HP | Haptoglobin | SEQ ID NOS: 6531- |
| | | 6544 |
| HPR | Haptoglobin-related protein | SEQ ID NOS: 6545- |
| | | 6547 |
| HPSE | Heparanase | SEQ ID NOS: 6548- |
| | | 6554 |
| HPSE2 | Heparanase 2 (inactive) | SEQ ID NOS: 6555- |
| | | 6560 |
| HPX | Hemopexin | SEQ ID NOS: 6561- |
| | | 6562 |
| HRC | Histidine rich calcium binding protein | SEQ ID NOS: 6563- |
| | | 6565 |
| HRG | Histidine-rich glycoprotein | SEQ ID NO: 6566 |
| HRSP12 | Heat-responsive protein 12 | SEQ ID NOS: 11389- |
| | | 11392 |
| HS2ST1 | Heparan sulfate 2-O-sulfotransferase 1 | SEQ ID NOS: 6567- |
| | | 6569 |
| HS3ST1 | Heparan sulfate (glucosamine) 3-O- | SEQ ID NOS: 6570- |
| | sulfotransferase 1 | 6572 |
| HS6ST1 | Heparan sulfate 6-O-sulfotransferase 1 | SEQ ID NO: 6573 |
| HS6ST3 | Heparan sulfate 6-O-sulfotransferase 3 | SEQ ID NOS: 6574- |
| | | 6575 |
| HSD11B1L | Hydroxysteroid (11-beta) dehydrogenase 1- | SEQ ID NOS: 6576- |
| | like | 6594 |
| HSD17B11 | Hydroxysteroid (17-beta) dehydrogenase 11 | SEQ ID NOS: 6595- |
| | | 6596 |
| HSD17B7 | Hydroxysteroid (17-beta) dehydrogenase 7 | SEQ ID NOS: 6597- |
| | | 6601 |
| HSP90B1 | Heat shock protein 90 kDa beta (Grp94), | SEQ ID NOS: 6602- |
| | member 1 | 6607 |
| HSPA13 | Heat shock protein 70 kDa family, member | SEQ ID NO: 6608 |
| | 13 | |
| HSPA5 | Heat shock 70 kDa protein 5 (glucose- | SEQ ID NO: 6609 |
| | regulated protein, 78 kDa) | |
| HSPG2 | Heparan sulfate proteoglycan 2 | SEQ ID NOS: 6610- |
| | | 6614 |
| HTATIP2 | HIV-1 Tat interactive protein 2, 30 kDa | SEQ ID NOS: 6615- |
| | | 6622 |
| HTN1 | Histatin 1 | SEQ ID NOS: 6623- |
| | | 6625 |
| HTN3 | Histatin 3 | SEQ ID NOS: 6626- |
| | | 6628 |
| HTRA1 | HtrA serine peptidase 1 | SEQ ID NOS: 6629- |
| | | 6630 |
| HTRA3 | HtrA serine peptidase 3 | SEQ ID NOS: 6631- |
| | | 6632 |
| HTRA4 | HtrA serine peptidase 4 | SEQ ID NO: 6633 |
| HYAL1 | Hyaluronoglucosaminidase 1 | SEQ ID NOS: 6634- |
| | | 6642 |
| HYAL2 | Hyaluronoglucosaminidase 2 | SEQ ID NOS: 6643- |
| | | 6651 |
| HYAL3 | Hyaluronoglucosaminidase 3 | SEQ ID NOS: 6652- |
| | | 6658 |
| HYOU1 | Hypoxia up-regulated 1 | SEQ ID NOS: 6659- |
| | | 6673 |
| IAPP | Islet amyloid polypeptide | SEQ ID NOS: 6674- |
| | | 6678 |
| IBSP | Integrin-binding sialoprotein | SEQ ID NO: 6679 |
| ICAM1 | Intercellular adhesion molecule 1 | SEQ ID NOS: 6680- |
| | | 6682 |
| ICAM2 | Intercellular adhesion molecule 2 | SEQ ID NOS: 6683- |
| | | 6693 |
| ICAM4 | Intercellular adhesion molecule 4 | SEQ ID NOS: 6694- |
| | (Landsteiner-Wiener blood group) | 6696 |
| ID1 | Inhibitor of DNA binding 1, dominant | SEQ ID NOS: 6697- |
| | negative helix-loop-helix protein | 6698 |
| IDE | Insulin-degrading enzyme | SEQ ID NOS: 6699- |
| | | 6702 |
| IDNK | IdnK, gluconokinase homolog (E. coli) | SEQ ID NOS: 6703- |
| | | 6708 |
| IDS | Iduronate 2-sulfatase | SEQ ID NOS: 6709- |
| | | 6714 |
| IDUA | Iduronidase, alpha-L- | SEQ ID NOS: 6715- |
| | | 6720 |
| IFI27L2 | Interferon, alpha-inducible protein 27-like 2 | SEQ ID NOS: 6721- |
| | | 6722 |
| IFI30 | Interferon, gamma-inducible protein 30 | SEQ ID NOS: 6723- |
| | | 6724 |
| IFNA1 | Interferon, alpha 1 | SEQ ID NO: 6725 |
| IFNA10 | Interferon, alpha 10 | SEQ ID NO: 6726 |
| IFNA13 | Interferon, alpha 13 | SEQ ID NOS: 6727- |
| | | 6728 |
| IFNA14 | Interferon, alpha 14 | SEQ ID NO: 6729 |
| IFNA16 | Interferon, alpha 16 | SEQ ID NO: 6730 |
| IFNA17 | Interferon, alpha 17 | SEQ ID NO: 6731 |
| IFNA2 | Interferon, alpha 2 | SEQ ID NO: 6732 |
| IFNA21 | Interferon, alpha 21 | SEQ ID NO: 6733 |
| IFNA4 | Interferon, alpha 4 | SEQ ID NO: 6734 |
| IFNA5 | Interferon, alpha 5 | SEQ ID NO: 6735 |
| IFNA6 | Interferon, alpha 6 | SEQ ID NOS: 6736- |
| | | 6737 |
| IFNA7 | Interferon, alpha 7 | SEQ ID NO: 6738 |
| IFNA8 | Interferon, alpha 8 | SEQ ID NO: 6739 |
| IFNAR1 | Interferon (alpha, beta and omega) receptor | SEQ ID NOS: 6740- |
| | 1 | 6741 |
| IFNB1 | Interferon, beta 1, fibroblast | SEQ ID NO: 6742 |
| IFNE | Interferon, epsilon | SEQ ID NO: 6743 |
| IFNG | Interferon, gamma | SEQ ID NO: 6744 |
| IFNGR1 | Interferon gamma receptor 1 | SEQ ID NOS: 6745- |
| | | 6755 |
| IFNL1 | Interferon, lambda 1 | SEQ ID NO: 6756 |
| IFNL2 | Interferon, lambda 2 | SEQ ID NO: 6757 |
| IFNL3 | Interferon, lambda 3 | SEQ ID NOS: 6758- |
| | | 6759 |
| IFNLR1 | Interferon, lambda receptor 1 | SEQ ID NOS: 6760- |
| | | 6764 |
| IFNW1 | Interferon, omega 1 | SEQ ID NO: 6765 |
| IGF1 | Insulin-like growth factor 1 (somatomedin | SEQ ID NOS: 6766- |
| | C) | 6771 |
| IGF2 | Insulin-like growth factor 2 | SEQ ID NOS: 6772- |
| | | 6779 |
| IGFALS | Insulin-like growth factor binding protein, | SEQ ID NOS: 6780- |
| | acid labile subunit | 6782 |
| IGFBP1 | Insulin-like growth factor binding protein 1 | SEQ ID NOS: 6783- |
| | | 6785 |
| IGFBP2 | Insulin-like growth factor binding protein 2, | SEQ ID NOS: 6786- |
| | 36 kDa | 6789 |
| IGFBP3 | Insulin-like growth factor binding protein 3 | SEQ ID NOS: 6790- |
| | | 6797 |
| IGFBP4 | Insulin-like growth factor binding protein 4 | SEQ ID NO: 6798 |
| IGFBP5 | Insulin-like growth factor binding protein 5 | SEQ ID NOS: 6799- |
| | | 6800 |
| IGFBP6 | Insulin-like growth factor binding protein 6 | SEQ ID NOS: 6801- |
| | | 6803 |
| IGFBP7 | Insulin-like growth factor binding protein 7 | SEQ ID NOS: 6804- |
| | | 6805 |
| IGFBPL1 | Insulin-like growth factor binding protein- | SEQ ID NO: 6806 |
| | like 1 | |
| IGFL1 | IGF-like family member 1 | SEQ ID NO: 6807 |
| IGFL2 | IGF-like family member 2 | SEQ ID NOS: 6808- |
| | | 6810 |
| IGFL3 | IGF-like family member 3 | SEQ ID NO: 6811 |
| IGFLR1 | IGF-like family receptor 1 | SEQ ID NOS: 6812- |
| | | 6820 |
| IGIP | IgA-inducing protein | SEQ ID NO: 6821 |
| IGLON5 | IgLON family member 5 | SEQ ID NO: 6822 |
| IGSF1 | Immunoglobulin superfamily, member 1 | SEQ ID NOS: 6823- |
| | | 6828 |
| IGSF10 | Immunoglobulin superfamily, member 10 | SEQ ID NOS: 6829- |
| | | 6830 |
| IGSF11 | Immunoglobulin superfamily, member 11 | SEQ ID NOS: 6831- |
| | | 6838 |
| IGSF21 | Immunoglobin superfamily, member 21 | SEQ ID NO: 6839 |
| IGSF8 | Immunoglobulin superfamily, member 8 | SEQ ID NOS: 6840- |
| | | 6843 |
| IGSF9 | Immunoglobulin superfamily, member 9 | SEQ ID NOS: 6844- |
| | | 6846 |
| IHH | Indian hedgehog | SEQ ID NO: 6847 |
| IL10 | Interleukin 10 | SEQ ID NOS: 6848- |
| | | 6849 |
| IL11 | Interleukin 11 | SEQ ID NOS: 6850- |
| | | 6853 |
| IL11RA | Interleukin 11 receptor, alpha | SEQ ID NOS: 6854- |
| | | 6864 |
| IL12B | Interleukin 12B | SEQ ID NO: 6865 |
| IL12RB1 | Interleukin 12 receptor, beta 1 | SEQ ID NOS: 6866- |
| | | 6871 |
| IL12RB2 | Interleukin 12 receptor, beta 2 | SEQ ID NOS: 6872- |
| | | 6876 |
| IL13 | Interleukin 13 | SEQ ID NOS: 6877- |
| | | 6878 |
| IL13RA1 | Interleukin 13 receptor, alpha 1 | SEQ ID NOS: 6879- |
| | | 6880 |
| IL15RA | Interleukin 15 receptor, alpha | SEQ ID NOS: 6881- |
| | | 6898 |
| IL17A | Interleukin 17A | SEQ ID NO: 6899 |
| IL17B | Interleukin 17B | SEQ ID NO: 6900 |
| IL17C | Interleukin 17C | SEQ ID NO: 6901 |
| IL17D | Interleukin 17D | SEQ ID NOS: 6902- |
| | | 6904 |
| IL17F | Interleukin 17F | SEQ ID NO: 6905 |
| IL17RA | Interleukin 17 receptor A | SEQ ID NOS: 6906- |
| | | 6907 |
| IL17RC | Interleukin 17 receptor C | SEQ ID NOS: 6908- |
| | | 6923 |
| IL17RE | Interleukin 17 receptor E | SEQ ID NOS: 6924- |
| | | 6930 |
| IL18BP | Interleukin 18 binding protein | SEQ ID NOS: 6931- |
| | | 6941 |
| IL18R1 | Interleukin 18 receptor 1 | SEQ ID NOS: 6942- |
| | | 6945 |
| IL18RAP | Interleukin 18 receptor accessory protein | SEQ ID NOS: 6946- |
| | | 6948 |
| IL19 | Interleukin 19 | SEQ ID NOS: 6949- |
| | | 6951 |
| IL1R1 | Interleukin 1 receptor, type I | SEQ ID NOS: 6952- |
| | | 6964 |
| IL1R2 | Interleukin 1 receptor, type II | SEQ ID NOS: 6965- |
| | | 6968 |
| IL1RAP | Interleukin 1 receptor accessory protein | SEQ ID NOS: 6969- |
| | | 6982 |
| IL1RL1 | Interleukin 1 receptor-like 1 | SEQ ID NOS: 6983- |
| | | 6988 |
| IL1RL2 | Interleukin 1 receptor-like 2 | SEQ ID NOS: 6989- |
| | | 6991 |
| IL1RN | Interleukin 1 receptor antagonist | SEQ ID NOS: 6992- |
| | | 6996 |
| IL2 | Interleukin 2 | SEQ ID NO: 6997 |
| IL20 | Interleukin 20 | SEQ ID NOS: 6998- |
| | | 7000 |
| IL20RA | Interleukin 20 receptor, alpha | SEQ ID NOS: 7001- |
| | | 7007 |
| IL21 | Interleukin 21 | SEQ ID NOS: 7008- |
| | | 7009 |
| IL22 | Interleukin 22 | SEQ ID NOS: 7010- |
| | | 7011 |
| IL22RA2 | Interleukin 22 receptor, alpha 2 | SEQ ID NOS: 7012- |
| | | 7014 |
| IL23A | Interleukin 23, alpha subunit p19 | SEQ ID NO: 7015 |
| IL24 | Interleukin 24 | SEQ ID NOS: 7016- |
| | | 7021 |
| IL25 | Interleukin 25 | SEQ ID NOS: 7022- |
| | | 7023 |
| IL26 | Interleukin 26 | SEQ ID NO: 7024 |
| IL27 | Interleukin 27 | SEQ ID NOS: 7025- |
| | | 7026 |
| IL2RB | Interleukin 2 receptor, beta | SEQ ID NOS: 7027- |
| | | 7031 |
| IL3 | Interleukin 3 | SEQ ID NO: 7032 |
| IL31 | Interleukin 31 | SEQ ID NO: 7033 |
| IL31RA | Interleukin 31 receptor A | SEQ ID NOS: 7034- |
| | | 7041 |
| IL32 | Interleukin 32 | SEQ ID NOS: 7042- |
| | | 7071 |
| IL34 | Interleukin 34 | SEQ ID NOS: 7072- |
| | | 7075 |
| IL3RA | Interleukin 3 receptor, alpha (low affinity) | SEQ ID NOS: 7076- |
| | | 7078 |
| IL4 | Interleukin 4 | SEQ ID NOS: 7079- |
| | | 7081 |
| IL4I1 | Interleukin 4 induced 1 | SEQ ID NOS: 7082- |
| | | 7089 |
| IL4R | Interleukin 4 receptor | SEQ ID NOS: 7090- |
| | | 7103 |
| IL5 | Interleukin 5 | SEQ ID NOS: 7104- |
| | | 7105 |
| IL5RA | Interleukin 5 receptor, alpha | SEQ ID NOS: 7106- |
| | | 7115 |
| IL6 | Interleukin 6 | SEQ ID NOS: 7116- |
| | | 7122 |
| IL6R | Interleukin 6 receptor | SEQ ID NOS: 7123- |
| | | 7128 |
| IL6ST | Interleukin 6 signal transducer | SEQ ID NOS: 7129- |
| | | 7138 |
| IL7 | Interleukin 7 | SEQ ID NOS: 7139- |
| | | 7146 |
| IL7R | Interleukin 7 receptor | SEQ ID NOS: 7147- |
| | | 7153 |
| IL9 | Interleukin 9 | SEQ ID NO: 7154 |
| ILDR1 | Immunoglobulin-like domain containing | SEQ ID NOS: 7155- |
| | receptor 1 | 7159 |
| ILDR2 | Immunoglobulin-like domain containing | SEQ ID NOS: 7160- |
| | receptor 2 | 7166 |
| IMP4 | IMP4, U3 small nucleolar ribonucleoprotein | SEQ ID NOS: 7167- |
| | | 7172 |
| IMPG1 | Interphotoreceptor matrix proteoglycan 1 | SEQ ID NOS: 7173- |
| | | 7176 |
| INHA | Inhibin, alpha | SEQ ID NO: 7177 |
| INHBA | Inhibin, beta A | SEQ ID NOS: 7178- |
| | | 7180 |
| INHBB | Inhibin, beta B | SEQ ID NO: 7181 |
| INHBC | Inhibin, beta C | SEQ ID NO: 7182 |
| INHBE | Inhibin, beta E | SEQ ID NOS: 7183- |
| | | 7184 |
| INPP5A | Inositol polyphosphate-5-phosphatase A | SEQ ID NOS: 7185- |
| | | 7189 |
| INS | Insulin | SEQ ID NOS: 7190- |
| | | 7194 |
| INS-IGF2 | INS-IGF2 readthrough | SEQ ID NOS: 7195- |
| | | 7196 |
| INSL3 | Insulin-like 3 (Leydig cell) | SEQ ID NOS: 7197- |
| | | 7199 |
| INSL4 | Insulin-like 4 (placenta) | SEQ ID NO: 7200 |
| INSL5 | Insulin-like 5 | SEQ ID NO: 7201 |
| INSL6 | Insulin-like 6 | SEQ ID NO: 7202 |
| INTS3 | Integrator complex subunit 3 | SEQ ID NOS: 7203- |
| | | 7208 |
| IPO11 | Importin 11 | SEQ ID NOS: 7209- |
| | | 7217 |
| IPO9 | Importin 9 | SEQ ID NOS: 7218- |
| | | 7219 |
| IQCF6 | IQ motif containing F6 | SEQ ID NOS: 7220- |
| | | 7221 |
| IRAK3 | Interleukin-1 receptor-associated kinase 3 | SEQ ID NOS: 7222- |
| | | 7224 |
| IRS4 | Insulin receptor substrate 4 | SEQ ID NO: 7225 |
| ISLR | Immunoglobulin superfamily containing | SEQ ID NOS: 7226- |
| | leucine-rich repeat | 7229 |
| ISLR2 | Immunoglobulin superfamily containing | SEQ ID NOS: 7230- |
| | leucine-rich repeat 2 | 7239 |
| ISM1 | Isthmin 1, angiogenesis inhibitor | SEQ ID NO: 7240 |
| ISM2 | Isthmin 2 | SEQ ID NOS: 7241- |
| | | 7246 |
| ITGA4 | Integrin, alpha 4 (antigen CD49D, alpha 4 | SEQ ID NOS: 7247- |
| | subunit of VLA-4 receptor) | 7249 |
| ITGA9 | Integrin, alpha 9 | SEQ ID NOS: 7250- |
| | | 7252 |
| ITGAL | Integrin, alpha L (antigen CD11A (p180), | SEQ ID NOS: 7253- |
| | lymphocyte function-associated antigen 1; | 7262 |
| | alpha polypeptide) | |
| ITGAX | Integrin, alpha X (complement component 3 | SEQ ID NOS: 7263- |
| | receptor 4 subunit) | 7265 |
| ITGB1 | Integrin, beta 1 (fibronectin receptor, beta | SEQ ID NOS: 7266- |
| | polypeptide, antigen CD29 includes MDF2, | 7281 |
| | MSK12) | |
| ITGB2 | Integrin, beta 2 (complement component 3 | SEQ ID NOS: 7282- |
| | receptor 3 and 4 subunit) | 7298 |
| ITGB3 | Integrin, beta 3 (platelet glycoprotein IIIa, | SEQ ID NOS: 7299- |
| | antigen CD61) | 7301 |
| ITGB7 | Integrin, beta 7 | SEQ ID NOS: 7302- |
| | | 7309 |
| ITGBL1 | Integrin, beta-like 1 (with EGF-like repeat | SEQ ID NOS: 7310- |
| | domains) | 7315 |
| ITIH1 | Inter-alpha-trypsin inhibitor heavy chain 1 | SEQ ID NOS: 7316- |
| | | 7321 |
| ITIH2 | Inter-alpha-trypsin inhibitor heavy chain 2 | SEQ ID NOS: 7322- |
| | | 7324 |
| ITIH3 | Inter-alpha-trypsin inhibitor heavy chain 3 | SEQ ID NOS: 7325- |
| | | 7327 |
| ITIH4 | Inter-alpha-trypsin inhibitor heavy chain | SEQ ID NOS: 7328- |
| | family, member 4 | 7331 |
| ITIH5 | Inter-alpha-trypsin inhibitor heavy chain | SEQ ID NOS: 7332- |
| | family, member 5 | 7335 |
| ITIH6 | Inter-alpha-trypsin inhibitor heavy chain | SEQ ID NO: 7336 |
| | family, member 6 | |
| ITLN1 | Intelectin 1 (galactofuranose binding) | SEQ ID NO: 7337 |
| ITLN2 | Intelectin 2 | SEQ ID NO: 7338 |
| IZUMO1R | IZUMO1 receptor, JUNO | SEQ ID NOS: 7339- |
| | | 7340 |
| IZUMO4 | IZUMO family member 4 | SEQ ID NOS: 7341- |
| | | 7347 |
| JCHAIN | Joining chain of multimeric IgA and IgM | SEQ ID NOS: 7357- |
| | | 7362 |
| JMJD8 | Jumonji domain containing 8 | SEQ ID NOS: 7363- |
| | | 7367 |
| JSRP1 | Junctional sarcoplasmic reticulum protein 1 | SEQ ID NO: 7368 |
| KANSL2 | KAT8 regulatory NSL complex subunit 2 | SEQ ID NOS: 7369- |
| | | 7379 |
| KAZALD1 | Kazal-type serine peptidase inhibitor | SEQ ID NO: 7380 |
| | domain 1 | |
| KCNIP3 | Kv channel interacting protein 3, calsenilin | SEQ ID NOS: 7381- |
| | | 7383 |
| KCNK7 | Potassium channel, two pore domain | SEQ ID NOS: 7384- |
| | subfamily K, member 7 | 7389 |
| KCNN4 | Potassium channel, calcium activated | SEQ ID NOS: 7390- |
| | intermediate/small conductance subfamily | 7395 |
| | N alpha, member 4 | |
| KCNU1 | Potassium channel, subfamily U, member 1 | SEQ ID NOS: 7396- |
| | | 7400 |
| KCP | Kielin/chordin-like protein | SEQ ID NOS: 7401- |
| | | 7404 |
| KDELC1 | KDEL (Lys-Asp-Glu-Leu) containing 1 | SEQ ID NO: 7405 |
| KDELC2 | KDEL (Lys-Asp-Glu-Leu) containing 2 | SEQ ID NOS: 7406- |
| | | 7409 |
| KDM1A | Lysine (K)-specific demethylase 1A | SEQ ID NOS: 7410- |
| | | 7413 |
| KDM3B | Lysine (K)-specific demethylase 3B | SEQ ID NOS: 7414- |
| | | 7417 |
| KDM6A | Lysine (K)-specific demethylase 6A | SEQ ID NOS: 7418- |
| | | 7427 |
| KDM7A | Lysine (K)-specific demethylase 7A | SEQ ID NOS: 7428- |
| | | 7429 |
| KDSR | 3-ketodihydrosphingosine reductase | SEQ ID NOS: 7430- |
| | | 7436 |
| KERA | Keratocan | SEQ ID NO: 7437 |
| KIAA0100 | KJAA0100 | SEQ ID NOS: 7438- |
| | | 7443 |
| KIAA0319 | KJAA0319 | SEQ ID NOS: 7444- |
| | | 7449 |
| KIAA1324 | KIAA1324 | SEQ ID NOS: 7450- |
| | | 7458 |
| KIFC2 | Kinesin family member C2 | SEQ ID NOS: 7459- |
| | | 7461 |
| KIR2DL4 | Killer cell immunoglobulin-like receptor, | SEQ ID NOS: 7462- |
| | two domains, long cytoplasmic tail, 4 | 7468 |
| KIR3DX1 | Killer cell immunoglobulin-like receptor, | SEQ ID NOS: 7469- |
| | three domains, X1 | 7473 |
| KIRREL2 | Kin of IRRE like 2 (Drosophila) | SEQ ID NOS: 7474- |
| | | 7478 |
| KISS1 | KiSS-1 metastasis-suppressor | SEQ ID NOS: 7479- |
| | | 7480 |
| KLHL11 | Kelch-like family member 11 | SEQ ID NO: 7481 |
| KLHL22 | Kelch-like family member 22 | SEQ ID NOS: 7482- |
| | | 7488 |
| KLK1 | Kallikrein 1 | SEQ ID NOS: 7489- |
| | | 7490 |
| KLK10 | Kallikrein-related peptidase 10 | SEQ ID NOS: 7491- |
| | | 7495 |
| KLK11 | Kallikrein-related peptidase 11 | SEQ ID NOS: 7496- |
| | | 7504 |
| KLK12 | Kallikrein-related peptidase 12 | SEQ ID NOS: 7505- |
| | | 7511 |
| KLK13 | Kallikrein-related peptidase 13 | SEQ ID NOS: 7512- |
| | | 7520 |
| KLK14 | Kallikrein-related peptidase 14 | SEQ ID NOS: 7521- |
| | | 7522 |
| KLK15 | Kallikrein-related peptidase 15 | SEQ ID NOS: 7523- |
| | | 7527 |
| KLK2 | Kallikrein-related peptidase 2 | SEQ ID NOS: 7528- |
| | | 7540 |
| KLK3 | Kallikrein-related peptidase 3 | SEQ ID NOS: 7541- |
| | | 7552 |
| KLK4 | Kallikrein-related peptidase 4 | SEQ ID NOS: 7553- |
| | | 7557 |
| KLK5 | Kallikrein-related peptidase 5 | SEQ ID NOS: 7558- |
| | | 7561 |
| KLK6 | Kallikrein-related peptidase 6 | SEQ ID NOS: 7562- |
| | | 7568 |
| KLK7 | Kallikrein-related peptidase 7 | SEQ ID NOS: 7569- |
| | | 7573 |
| KLK8 | Kallikrein-related peptidase 8 | SEQ ID NOS: 7574- |
| | | 7581 |
| KLK9 | Kallikrein-related peptidase 9 | SEQ ID NOS: 7582- |
| | | 7583 |
| KLKB1 | Kallikrein B, plasma (Fletcher factor) 1 | SEQ ID NOS: 7584- |
| | | 7588 |
| KNDC1 | Kinase non-catalytic C-lobe domain | SEQ ID NOS: 7593- |
| | (KIND) containing 1 | 7594 |
| KNG1 | Kininogen 1 | SEQ ID NOS: 7595- |
| | | 7599 |
| KRBA2 | KRAB-A domain containing 2 | SEQ ID NOS: 7600- |
| | | 7603 |
| KREMEN2 | Kringle containing transmembrane protein 2 | SEQ ID NOS: 7604- |
| | | 7609 |
| KRTDAP | Keratinocyte differentiation-associated | SEQ ID NOS: 7610- |
| | protein | 7611 |
| L1CAM | L1 cell adhesion molecule | SEQ ID NOS: 7612- |
| | | 7621 |
| L3MBTL2 | L(3)mbt-like 2 (Drosophila) | SEQ ID NOS: 7622- |
| | | 7626 |
| LA16c- | | SEQ ID NO: 72 |
| 380H5.3 | | |
| LACE1 | Lactation elevated 1 | SEQ ID NOS: 580-583 |
| LACRT | Lacritin | SEQ ID NOS: 7627- |
| | | 7629 |
| LACTB | Lactamase, beta | SEQ ID NOS: 7630- |
| | | 7632 |
| LAG3 | Lymphocyte-activation gene 3 | SEQ ID NOS: 7633- |
| | | 7634 |
| LAIR2 | Leukocyte-associated immunoglobulin-like | SEQ ID NOS: 7635- |
| | receptor 2 | 7638 |
| LALBA | Lactalbumin, alpha- | SEQ ID NOS: 7639- |
| | | 7640 |
| LAMA1 | Laminin, alpha 1 | SEQ ID NOS: 7641- |
| | | 7642 |
| LAMA2 | Laminin, alpha 2 | SEQ ID NOS: 7643- |
| | | 7646 |
| LAMA3 | Laminin, alpha 3 | SEQ ID NOS: 7647- |
| | | 7656 |
| LAMA4 | Laminin, alpha 4 | SEQ ID NOS: 7657- |
| | | 7671 |
| LAMA5 | Laminin, alpha 5 | SEQ ID NOS: 7672- |
| | | 7674 |
| LAMB1 | Laminin, beta 1 | SEQ ID NOS: 7675- |
| | | 7679 |
| LAMB2 | Laminin, beta 2 (laminin S) | SEQ ID NOS: 7680- |
| | | 7682 |
| LAMB3 | Laminin, beta 3 | SEQ ID NOS: 7683- |
| | | 7687 |
| LAMB4 | Laminin, beta 4 | SEQ ID NOS: 7688- |
| | | 7691 |
| LAMC1 | Laminin, gamma 1 (formerly LAMB2) | SEQ ID NOS: 7692- |
| | | 7693 |
| LAMC2 | Laminin, gamma 2 | SEQ ID NOS: 7694- |
| | | 7695 |
| LAMC3 | Laminin, gamma 3 | SEQ ID NOS: 7696- |
| | | 7697 |
| LAMP3 | Lysosomal-associated membrane protein 3 | SEQ ID NOS: 7698- |
| | | 7701 |
| LAT | Linker for activation of T cells | SEQ ID NOS: 7708- |
| | | 7717 |
| LAT2 | Linker for activation of T cells family, | SEQ ID NOS: 7718- |
| | member 2 | 7726 |
| LBP | Lipopolysaccharide binding protein | SEQ ID NO: 7727 |
| LCAT | Lecithin-cholesterol acyltransferase | SEQ ID NOS: 7728- |
| | | 7734 |
| LCN1 | Lipocalin 1 | SEQ ID NOS: 7735- |
| | | 7736 |
| LCN10 | Lipocalin 10 | SEQ ID NOS: 7737- |
| | | 7742 |
| LCN12 | Lipocalin 12 | SEQ ID NOS: 7743- |
| | | 7745 |
| LCN15 | Lipocalin 15 | SEQ ID NO: 7746 |
| LCN2 | Lipocalin 2 | SEQ ID NOS: 7747- |
| | | 7749 |
| LCN6 | Lipocalin 6 | SEQ ID NOS: 7750- |
| | | 7751 |
| LCN8 | Lipocalin 8 | SEQ ID NOS: 7752- |
| | | 7753 |
| LCN9 | Lipocalin 9 | SEQ ID NOS: 7754- |
| | | 7755 |
| LCORL | Ligand dependent nuclear receptor | SEQ ID NOS: 7756- |
| | corepressor-like | 7761 |
| LDLR | Low density lipoprotein receptor | SEQ ID NOS: 7762- |
| | | 7770 |
| LDLRAD2 | Low density lipoprotein receptor class A | SEQ ID NOS: 7771- |
| | domain containing 2 | 7772 |
| LEAP2 | Liver expressed antimicrobial peptide 2 | SEQ ID NO: 7773 |
| LECT2 | Leukocyte cell-derived chemotaxin 2 | SEQ ID NOS: 7774- |
| | | 7777 |
| LEFTY1 | Left-right determination factor 1 | SEQ ID NOS: 7778- |
| | | 7779 |
| LEFTY2 | Left-right determination factor 2 | SEQ ID NOS: 7780- |
| | | 7781 |
| LEP | Leptin | SEQ ID NO: 7782 |
| LFNG | LFNG O-fucosylpeptide 3-beta-N- | SEQ ID NOS: 7783- |
| | acetylglucosaminyltransferase | 7788 |
| LGALS3BP | Lectin, galactoside-binding, soluble, 3 | SEQ ID NOS: 7789- |
| | binding protein | 7803 |
| LGI1 | Leucine-rich, glioma inactivated 1 | SEQ ID NOS: 7804- |
| | | 7822 |
| LGI2 | Leucine-rich repeat LGI family, member 2 | SEQ ID NOS: 7823- |
| | | 7824 |
| LGI3 | Leucine-rich repeat LGI family, member 3 | SEQ ID NOS: 7825- |
| | | 7828 |
| LGI4 | Leucine-rich repeat LGI family, member 4 | SEQ ID NOS: 7829- |
| | | 7832 |
| LGMN | Legumain | SEQ ID NOS: 7833- |
| | | 7846 |
| LGR4 | Leucine-rich repeat containing G protein- | SEQ ID NOS: 7847- |
| | coupled receptor 4 | 7849 |
| LHB | Luteinizing hormone beta polypeptide | SEQ ID NO: 7850 |
| LHCGR | Luteinizing hormone/choriogonadotropin | SEQ ID NOS: 7851- |
| | receptor | 7855 |
| LIF | Leukemia inhibitory factor | SEQ ID NOS: 7856- |
| | | 7857 |
| LIFR | Leukemia inhibitory factor receptor alpha | SEQ ID NOS: 7858- |
| | | 7862 |
| LILRA1 | Leukocyte immunoglobulin-like receptor, | SEQ ID NOS: 7863- |
| | subfamily A (with TM domain), member 1 | 7864 |
| LILRA2 | Leukocyte immunoglobulin-like receptor, | SEQ ID NOS: 7865- |
| | subfamily A (with TM domain), member 2 | 7871 |
| LILRB3 | Leukocyte immunoglobulin-like receptor, | SEQ ID NOS: 7872- |
| | subfamily B (with TM and ITIM domains), | 7876 |
| | member 3 | |
| LIME1 | Lek interacting transmembrane adaptor 1 | SEQ ID NOS: 7877- |
| | | 7882 |
| LINGO1 | Leucine rich repeat and Ig domain | SEQ ID NOS: 7883- |
| | containing 1 | 7893 |
| LIPA | Lipase A, lysosomal acid, cholesterol | SEQ ID NOS: 7894- |
| | esterase | 7898 |
| LIPC | Lipase, hepatic | SEQ ID NOS: 7899- |
| | | 7902 |
| LIPF | Lipase, gastric | SEQ ID NOS: 7903- |
| | | 7906 |
| LIPG | Lipase, endothelial | SEQ ID NOS: 7907- |
| | | 7912 |
| LIPH | Lipase, member H | SEQ ID NOS: 7913- |
| | | 7917 |
| LIPK | Lipase, family member K | SEQ ID NO: 7918 |
| LIPM | Lipase, family member M | SEQ ID NOS: 7919- |
| | | 7920 |
| LIPN | Lipase, family member N | SEQ ID NO: 7921 |
| LMAN2 | Lectin, mannose-binding 2 | SEQ ID NOS: 7922- |
| | | 7926 |
| LMNTD1 | Lamin tail domain containing 1 | SEQ ID NOS: 7927- |
| | | 7937 |
| LNX1 | Ligand of numb-protein X 1, E3 ubiquitin | SEQ ID NOS: 7938- |
| | protein ligase | 7944 |
| LOX | Lysyl oxidase | SEQ ID NOS: 7945- |
| | | 7947 |
| LOXL1 | Lysyl oxidase-like 1 | SEQ ID NOS: 7948- |
| | | 7949 |
| LOXL2 | Lysyl oxidase-like 2 | SEQ ID NOS: 7950- |
| | | 7958 |
| LOXL3 | Lysyl oxidase-like 3 | SEQ ID NOS: 7959- |
| | | 7965 |
| LOXL4 | Lysyl oxidase-like 4 | SEQ ID NO: 7966 |
| LPA | Lipoprotein, Lp(a) | SEQ ID NOS: 7967- |
| | | 7969 |
| LPL | Lipoprotein lipase | SEQ ID NOS: 7970- |
| | | 7974 |
| LPO | Lactoperoxidase | SEQ ID NOS: 7975- |
| | | 7981 |
| LRAT | Lecithin retinol acyltransferase | SEQ ID NOS: 7982- |
| | (phosphatidylcholine--retinol O- | 7984 |
| | acyltransferase) | |
| LRCH3 | Leucine-rich repeats and calponin | SEQ ID NOS: 7985- |
| | homology (CH) domain containing 3 | 7993 |
| LRCOL1 | Leucine rich colipase-like 1 | SEQ ID NOS: 7994- |
| | | 7997 |
| LRFN4 | Leucine rich repeat and fibronectin type III | SEQ ID NOS: 7998- |
| | domain containing 4 | 7999 |
| LRFN5 | Leucine rich repeat and fibronectin type III | SEQ ID NOS: 8000- |
| | domain containing 5 | 8002 |
| LRG1 | Leucine-rich alpha-2-glycoprotein 1 | SEQ ID NO: 8003 |
| LRP1 | Low density lipoprotein receptor-related | SEQ ID NOS: 8004- |
| | protein 1 | 8009 |
| LRP11 | Low density lipoprotein receptor-related | SEQ ID NOS: 8010- |
| | protein 11 | 8011 |
| LRP1B | Low density lipoprotein receptor-related | SEQ ID NOS: 8012- |
| | protein 1B | 8015 |
| LRP2 | Low density lipoprotein receptor-related | SEQ ID NOS: 8016- |
| | protein 2 | 8017 |
| LRP4 | Low density lipoprotein receptor-related | SEQ ID NOS: 8018- |
| | protein 4 | 8019 |
| LRPAP1 | Low density lipoprotein receptor-related | SEQ ID NOS: 8020- |
| | protein associated protein 1 | 8021 |
| LRRC17 | Leucine rich repeat containing 17 | SEQ ID NOS: 8022- |
| | | 8024 |
| LRRC32 | Leucine rich repeat containing 32 | SEQ ID NOS: 8025- |
| | | 8028 |
| LRRC3B | Leucine rich repeat containing 3B | SEQ ID NOS: 8029- |
| | | 8033 |
| LRRC4B | Leucine rich repeat containing 4B | SEQ ID NOS: 8034- |
| | | 8036 |
| LRRC70 | Leucine rich repeat containing 70 | SEQ ID NOS: 8037- |
| | | 8038 |
| LRRN3 | Leucine rich repeat neuronal 3 | SEQ ID NOS: 8039- |
| | | 8042 |
| LRRTM1 | Leucine rich repeat transmembrane | SEQ ID NOS: 8043- |
| | neuronal 1 | 8049 |
| LRRTM2 | Leucine rich repeat transmembrane | SEQ ID NOS: 8050- |
| | neuronal 2 | 8052 |
| LRRTM4 | Leucine rich repeat transmembrane | SEQ ID NOS: 8053- |
| | neuronal 4 | 8058 |
| LRTM2 | Leucine-rich repeats and transmembrane | SEQ ID NOS: 8059- |
| | domains 2 | 8063 |
| LSR | Lipolysis stimulated lipoprotein receptor | SEQ ID NOS: 8064- |
| | | 8074 |
| LST1 | Leukocyte specific transcript 1 | SEQ ID NOS: 8075- |
| | | 8092 |
| LTA | Lymphotoxin alpha | SEQ ID NOS: 8093- |
| | | 8094 |
| LTBP1 | Latent transforming growth factor beta | SEQ ID NOS: 8095- |
| | binding protein 1 | 8104 |
| LTBP2 | Latent transforming growth factor beta | SEQ ID NOS: 8105- |
| | binding protein 2 | 8108 |
| LTBP3 | Latent transforming growth factor beta | SEQ ID NOS: 8109- |
| | binding protein 3 | 8121 |
| LTBP4 | Latent transforming growth factor beta | SEQ ID NOS: 8122- |
| | binding protein 4 | 8137 |
| LTBR | Lymphotoxin beta receptor (TNFR | SEQ ID NOS: 8138- |
| | superfamily, member 3) | 8143 |
| LTF | Lactotransferrin | SEQ ID NOS: 8144- |
| | | 8148 |
| LTK | Leukocyte receptor tyrosine kinase | SEQ ID NOS: 8149- |
| | | 8152 |
| LUM | Lumican | SEQ ID NO: 8153 |
| LUZP2 | Leucine zipper protein 2 | SEQ ID NOS: 8154- |
| | | 8157 |
| LVRN | Laeverin | SEQ ID NOS: 8158- |
| | | 8163 |
| LY6E | Lymphocyte antigen 6 complex, locus E | SEQ ID NOS: 8164- |
| | | 8177 |
| LY6G5B | Lymphocyte antigen 6 complex, locus G5B | SEQ ID NOS: 8178- |
| | | 8179 |
| LY6G6D | Lymphocyte antigen 6 complex, locus G6D | SEQ ID NOS: 8180- |
| | | 8181 |
| LY6G6E | Lymphocyte antigen 6 complex, locus G6E | SEQ ID NOS: 8182- |
| | (pseudogene) | 8185 |
| LY6H | Lymphocyte antigen 6 complex, locus H | SEQ ID NOS: 8186- |
| | | 8189 |
| LY6K | Lymphocyte antigen 6 complex, locus K | SEQ ID NOS: 8190- |
| | | 8193 |
| LY86 | Lymphocyte antigen 86 | SEQ ID NOS: 8195- |
| | | 8196 |
| LY96 | Lymphocyte antigen 96 | SEQ ID NOS: 8197- |
| | | 8198 |
| LYG1 | Lysozyme G-like 1 | SEQ ID NOS: 8199- |
| | | 8200 |
| LYG2 | Lysozyme G-like 2 | SEQ ID NOS: 8201- |
| | | 8206 |
| LYNX1 | Ly6/neurotoxin 1 | SEQ ID NOS: 8207- |
| | | 8211 |
| LYPD1 | LY6/PLAUR domain containing 1 | SEQ ID NOS: 8212- |
| | | 8214 |
| LYPD2 | LY6/PLAUR domain containing 2 | SEQ ID NO: 8215 |
| LYPD4 | LY6/PLAUR domain containing 4 | SEQ ID NOS: 8216- |
| | | 8218 |
| LYPD6 | LY6/PLAUR domain containing 6 | SEQ ID NOS: 8219- |
| | | 8223 |
| LYPD6B | LY6/PLAUR domain containing 6B | SEQ ID NOS: 8224- |
| | | 8230 |
| LYPD8 | LY6/PLAUR domain containing 8 | SEQ ID NOS: 8231- |
| | | 8232 |
| LYZ | Lysozyme | SEQ ID NOS: 8233- |
| | | 8235 |
| LYZL4 | Lysozyme-like 4 | SEQ ID NOS: 8236- |
| | | 8237 |
| LYZL6 | Lysozyme-like 6 | SEQ ID NOS: 8238- |
| | | 8240 |
| M6PR | Mannose-6-phosphate receptor (cation | SEQ ID NOS: 8241- |
| | dependent) | 8251 |
| MAD1L1 | MAD1 mitotic arrest deficient-like 1 (yeast) | SEQ ID NOS: 8252- |
| | | 8264 |
| MAG | Myelin associated glycoprotein | SEQ ID NOS: 8265- |
| | | 8270 |
| MAGT1 | Magnesium transporter 1 | SEQ ID NOS: 8271- |
| | | 8274 |
| MALSU1 | Mitochondrial assembly of ribosomal large | SEQ ID NO: 8275 |
| | subunit 1 | |
| MAMDC2 | MAM domain containing 2 | SEQ ID NO: 8276 |
| MAN2B1 | Mannosidase, alpha, class 2B, member 1 | SEQ ID NOS: 8277- |
| | | 8282 |
| MAN2B2 | Mannosidase, alpha, class 2B, member 2 | SEQ ID NOS: 8283- |
| | | 8285 |
| MANBA | Mannosidase, beta A, lysosomal | SEQ ID NOS: 8286- |
| | | 8299 |
| MANEAL | Mannosidase, endo-alpha-like | SEQ ID NOS: 8300- |
| | | 8304 |
| MANF | Mesencephalic astrocyte-derived | SEQ ID NOS: 8305- |
| | neurotrophic factor | 8306 |
| MANSC1 | MANSC domain containing 1 | SEQ ID NOS: 8307- |
| | | 8310 |
| MAP3K9 | Mitogen-activated protein kinase 9 | SEQ ID NOS: 8311- |
| | | 8316 |
| MASP1 | Mannan-binding lectin serine peptidase 1 | SEQ ID NOS: 8317- |
| | (C4/C2 activating component of Ra-reactive | 8324 |
| | factor) | |
| MASP2 | Mannan-binding lectin serine peptidase 2 | SEQ ID NOS: 8325- |
| | | 8326 |
| MATN1 | Matrilin 1, cartilage matrix protein | SEQ ID NO: 8327 |
| MATN2 | Matrilin 2 | SEQ ID NOS: 8328- |
| | | 8340 |
| MATN3 | Matrilin 3 | SEQ ID NOS: 8341- |
| | | 8342 |
| MATN4 | Matrilin 4 | SEQ ID NOS: 8343- |
| | | 8347 |
| MATR3 | Matrin 3 | SEQ ID NOS: 8348- |
| | | 8375 |
| MAU2 | MAU2 sister chromatid cohesion factor | SEQ ID NOS: 8376- |
| | | 8378 |
| MAZ | MYC-associated zinc finger protein (purine- | SEQ ID NOS: 8379- |
| | binding transcription factor) | 8393 |
| MBD6 | Methyl-CpG binding domain protein 6 | SEQ ID NOS: 8394- |
| | | 8405 |
| MBL2 | Mannose-binding lectin (protein C) 2, | SEQ ID NO: 8406 |
| | soluble | |
| MBNL1 | Muscleblind-like splicing regulator 1 | SEQ ID NOS: 8407- |
| | | 8425 |
| MCCC1 | Methylcrotonoyl-CoA carboxylase 1 (alpha) | SEQ ID NOS: 8426- |
| | | 8437 |
| MCCD1 | Mitochondrial coiled-coil domain 1 | SEQ ID NO: 8438 |
| MCEE | Methylmalonyl CoA epimerase | SEQ ID NOS: 8439- |
| | | 8442 |
| MCF2L | MCF.2 cell line derived transforming | SEQ ID NOS: 8443- |
| | sequence-like | 8464 |
| MCFD2 | Multiple coagulation factor deficiency 2 | SEQ ID NOS: 8465- |
| | | 8476 |
| MDFIC | MyoD family inhibitor domain containing | SEQ ID NOS: 8477- |
| | | 8484 |
| MDGA1 | MAM domain containing | SEQ ID NOS: 8485- |
| | glycosylphosphatidylinositol anchor 1 | 8490 |
| MDK | Midkine (neurite growth-promoting factor | SEQ ID NOS: 8491- |
| | 2) | 8500 |
| MED20 | Mediator complex subunit 20 | SEQ ID NOS: 8501- |
| | | 8505 |
| MEGF10 | Multiple EGF-like-domains 10 | SEQ ID NOS: 8506- |
| | | 8509 |
| MEGF6 | Multiple EGF-like-domains 6 | SEQ ID NOS: 8510- |
| | | 8513 |
| MEI1 | Meiotic double-stranded break formation | SEQ ID NOS: 8514- |
| | protein 1 | 8517 |
| MEI4 | Meiotic double-stranded break formation | SEQ ID NO: 8518 |
| | protein 4 | |
| MEIS1 | Meis homeobox 1 | SEQ ID NOS: 8519- |
| | | 8524 |
| MEIS3 | Meis homeobox 3 | SEQ ID NOS: 8525- |
| | | 8534 |
| MEPE | Matrix extracellular phosphoglycoprotein | SEQ ID NOS: 8538- |
| | | 8544 |
| MESDC2 | Mesoderm development candidate 2 | SEQ ID NOS: 8545- |
| | | 8549 |
| MEST | Mesoderm specific transcript | SEQ ID NOS: 8550- |
| | | 8563 |
| MET | MET proto-oncogene, receptor tyrosine | SEQ ID NOS: 8564- |
| | kinase | 8569 |
| METRN | Meteorin, glial cell differentiation regulator | SEQ ID NOS: 8570- |
| | | 8574 |
| METRNL | Meteorin, glial cell differentiation regulator- | SEQ ID NOS: 8575- |
| | like | 8578 |
| METTL17 | Methyltransferase like 17 | SEQ ID NOS: 8579- |
| | | 8589 |
| METTL24 | Methyltransferase like 24 | SEQ ID NO: 8590 |
| METTL7B | Methyltransferase like 7B | SEQ ID NOS: 8591- |
| | | 8592 |
| METTL9 | Methyltransferase like 9 | SEQ ID NOS: 8593- |
| | | 8601 |
| MEX3C | Mex-3 RNA binding family member C | SEQ ID NOS: 8602- |
| | | 8604 |
| MFAP2 | Microfibrillar-associated protein 2 | SEQ ID NOS: 8605- |
| | | 8606 |
| MFAP3 | Microfibrillar-associated protein 3 | SEQ ID NOS: 8607- |
| | | 8611 |
| MFAP3L | Microfibrillar-associated protein 3-like | SEQ ID NOS: 8612- |
| | | 8621 |
| MFAP4 | Microfibrillar-associated protein 4 | SEQ ID NOS: 8622- |
| | | 8624 |
| MFAP5 | Microfibrillar associated protein 5 | SEQ ID NOS: 8625- |
| | | 8635 |
| MFGE8 | Milk fat globule-EGF factor 8 protein | SEQ ID NOS: 8636- |
| | | 8642 |
| MFI2 | Antigen p97 (melanoma associated) | SEQ ID NOS: 8535- |
| | identified by monoclonal antibodies 133.2 | 8537 |
| | and 96.5 | |
| MFNG | MFNG O-fucosylpeptide 3-beta-N- | SEQ ID NOS: 8643- |
| | acetylglucosaminyltransferase | 8650 |
| MGA | MGA, MAX dimerization protein | SEQ ID NOS: 8651- |
| | | 8659 |
| MGAT2 | Mannosyl (alpha-1,6-)-glycoprotein beta- | SEQ ID NO: 8660 |
| | 1,2-N-acetylglucosaminyltransferase | |
| MGAT3 | Mannosyl (beta-1,4-)-glycoprotein beta-1,4- | SEQ ID NOS: 8661- |
| | N-acetylglucosaminyltransferase | 8663 |
| MGAT4A | Mannosyl (alpha-1,3-)-glycoprotein beta- | SEQ ID NOS: 8664- |
| | 1,4-N-acetylglucosaminyltransferase, | 8668 |
| | isozyme A | |
| MGAT4B | Mannosyl (alpha-1,3-)-glycoprotein beta- | SEQ ID NOS: 8669- |
| | 1,4-N-acetylglucosaminyltransferase, | 8679 |
| | isozyme B | |
| MGAT4D | MGAT4 family, member D | SEQ ID NOS: 8680- |
| | | 8685 |
| MGLL | Monoglyceride lipase | SEQ ID NOS: 8686- |
| | | 8695 |
| MGP | Matrix Gla protein | SEQ ID NOS: 8696- |
| | | 8698 |
| MGST2 | Microsomal glutathione S-transferase 2 | SEQ ID NOS: 8699- |
| | | 8702 |
| MIA | Melanoma inhibitory activity | SEQ ID NOS: 8703- |
| | | 8708 |
| MIA2 | Melanoma inhibitory activity 2 | SEQ ID NO: 8709 |
| MIA3 | Melanoma inhibitory activity family, | SEQ ID NOS: 8710- |
| | member 3 | 8714 |
| MICU1 | Mitochondrial calcium uptake 1 | SEQ ID NOS: 8715- |
| | | 8724 |
| MIER1 | Mesoderm induction early response 1, | SEQ ID NOS: 8725- |
| | transcriptional regulator | 8733 |
| MINOS1- | MINOS1-NBL1 readthrough | SEQ ID NOS: 8734- |
| NBL1 | | 8736 |
| MINPP1 | Multiple inositol-polyphosphate | SEQ ID NOS: 8737- |
| | phosphatase 1 | 8739 |
| MLEC | Malectin | SEQ ID NOS: 8740- |
| | | 8743 |
| MLN | Motilin | SEQ ID NOS: 8744- |
| | | 8746 |
| MLXIP | MLX interacting protein | SEQ ID NOS: 8747- |
| | | 8752 |
| MLXIPL | MLX interacting protein-like | SEQ ID NOS: 8753- |
| | | 8760 |
| MMP1 | Matrix metallopeptidase 1 | SEQ ID NO: 8761 |
| MMP10 | Matrix metallopeptidase 10 | SEQ ID NOS: 8762- |
| | | 8763 |
| MMP11 | Matrix metallopeptidase 11 | SEQ ID NOS: 8764- |
| | | 8767 |
| MMP12 | Matrix metallopeptidase 12 | SEQ ID NO: 8768 |
| MMP13 | Matrix metallopeptidase 13 | SEQ ID NOS: 8769- |
| | | 8771 |
| MMP14 | Matrix metallopeptidase 14 (membrane- | SEQ ID NOS: 8772- |
| | inserted) | 8774 |
| MMP17 | Matrix metallopeptidase 17 (membrane- | SEQ ID NOS: 8775- |
| | inserted) | 8782 |
| MMP19 | Matrix metallopeptidase 19 | SEQ ID NOS: 8783- |
| | | 8788 |
| MMP2 | Matrix metallopeptidase 2 | SEQ ID NOS: 8789- |
| | | 8796 |
| MMP20 | Matrix metallopeptidase 20 | SEQ ID NO: 8797 |
| MMP21 | Matrix metallopeptidase 21 | SEQ ID NO: 8798 |
| MMP25 | Matrix metallopeptidase 25 | SEQ ID NOS: 8799- |
| | | 8800 |
| MMP26 | Matrix metallopeptidase 26 | SEQ ID NOS: 8801- |
| | | 8802 |
| MMP27 | Matrix metallopeptidase 27 | SEQ ID NO: 8803 |
| MMP28 | Matrix metallopeptidase 28 | SEQ ID NOS: 8804- |
| | | 8809 |
| MMP3 | Matrix metallopeptidase 3 | SEQ ID NOS: 8810- |
| | | 8812 |
| MMP7 | Matrix metallopeptidase 7 | SEQ ID NO: 8813 |
| MMP8 | Matrix metallopeptidase 8 | SEQ ID NOS: 8814- |
| | | 8819 |
| MMP9 | Matrix metallopeptidase 9 | SEQ ID NO: 8820 |
| MMRN1 | Multimerin 1 | SEQ ID NOS: 8821- |
| | | 8823 |
| MMRN2 | Multimerin 2 | SEQ ID NOS: 8824- |
| | | 8828 |
| MOXD1 | Monooxygenase, DBH-like 1 | SEQ ID NOS: 8829- |
| | | 8831 |
| MPO | Myeloperoxidase | SEQ ID NOS: 8840- |
| | | 8841 |
| MPPED1 | Metallophosphoesterase domain containing | SEQ ID NOS: 8842- |
| | 1 | 8845 |
| MPZL1 | Myelin protein zero-like 1 | SEQ ID NOS: 8846- |
| | | 8850 |
| MR1 | Major histocompatibility complex, class I- | SEQ ID NOS: 8851- |
| | related | 8856 |
| MRPL2 | Mitochondrial ribosomal protein L2 | SEQ ID NOS: 8857- |
| | | 8861 |
| MRPL21 | Mitochondrial ribosomal protein L21 | SEQ ID NOS: 8862- |
| | | 8868 |
| MRPL22 | Mitochondrial ribosomal protein L22 | SEQ ID NOS: 8869- |
| | | 8873 |
| MRPL24 | Mitochondrial ribosomal protein L24 | SEQ ID NOS: 8874- |
| | | 8878 |
| MRPL27 | Mitochondrial ribosomal protein L27 | SEQ ID NOS: 8879- |
| | | 8884 |
| MRPL32 | Mitochondrial ribosomal protein L32 | SEQ ID NOS: 8885- |
| | | 8887 |
| MRPL34 | Mitochondrial ribosomal protein L34 | SEQ ID NOS: 8888- |
| | | 8892 |
| MRPL35 | Mitochondrial ribosomal protein L35 | SEQ ID NOS: 8893- |
| | | 8896 |
| MRPL52 | Mitochondrial ribosomal protein L52 | SEQ ID NOS: 8897- |
| | | 8907 |
| MRPL55 | Mitochondrial ribosomal protein L55 | SEQ ID NOS: 8908- |
| | | 8933 |
| MRPS14 | Mitochondrial ribosomal protein S14 | SEQ ID NOS: 8934- |
| | | 8935 |
| MRPS22 | Mitochondrial ribosomal protein S22 | SEQ ID NOS: 8936- |
| | | 8944 |
| MRPS28 | Mitochondrial ribosomal protein S28 | SEQ ID NOS: 8945- |
| | | 8952 |
| MS4A14 | Membrane-spanning 4-domains, subfamily | SEQ ID NOS: 8953- |
| | A, member 14 | 8963 |
| MS4A3 | Membrane-spanning 4-domains, subfamily | SEQ ID NOS: 8964- |
| | A, member 3 (hematopoietic cell-specific) | 8968 |
| MSH3 | MutS homolog 3 | SEQ ID NO: 8969 |
| MSH5 | MutS homolog 5 | SEQ ID NOS: 8970- |
| | | 8981 |
| MSLN | Mesothelin | SEQ ID NOS: 8982- |
| | | 8989 |
| MSMB | Microseminoprotein, beta- | SEQ ID NOS: 8990- |
| | | 8991 |
| MSRA | Methionine sulfoxide reductase A | SEQ ID NOS: 8992- |
| | | 8999 |
| MSRB2 | Methionine sulfoxide reductase B2 | SEQ ID NOS: 9000- |
| | | 9001 |
| MSRB3 | Methionine sulfoxide reductase B3 | SEQ ID NOS: 9002- |
| | | 9015 |
| MST1 | Macrophage stimulating 1 | SEQ ID NOS: 9016- |
| | | 9017 |
| MSTN | Myostatin | SEQ ID NO: 9018 |
| MT1G | Metallothionein 1G | SEQ ID NOS: 9019- |
| | | 9022 |
| MTHFD2 | Methylenetetrahy drofolate dehydrogenase | SEQ ID NOS: 9023- |
| | (NADP+ dependent) 2, | 9027 |
| | methenyltetrahydrofolate cyclohydrolase | |
| MTMR14 | Myotubularin related protein 14 | SEQ ID NOS: 9028- |
| | | 9038 |
| MTRNR2L11 | MT-RNR2-like 11 (pseudogene) | SEQ ID NO: 9039 |
| MTRR | 5-methyltetrahydrofolate-homocysteine | SEQ ID NOS: 9040- |
| | methyltransferase reductase | 9052 |
| MTTP | Microsomal triglyceride transfer protein | SEQ ID NOS: 9053- |
| | | 9063 |
| MTX2 | Metaxin 2 | SEQ ID NOS: 9064- |
| | | 9068 |
| MUC1 | Mucin 1, cell surface associated | SEQ ID NOS: 9069- |
| | | 9094 |
| MUC13 | Mucin 13, cell surface associated | SEQ ID NOS: 9095- |
| | | 9096 |
| MUC20 | Mucin 20, cell surface associated | SEQ ID NOS: 9097- |
| | | 9101 |
| MUC3A | Mucin 3A, cell surface associated | SEQ ID NOS: 9102- |
| | | 9104 |
| MUC5AC | Mucin 5AC, oligomeric mucus/gel-forming | SEQ ID NO: 9105 |
| MUC5B | Mucin 5B, oligomeric mucus/gel-forming | SEQ ID NOS: 9106- |
| | | 9107 |
| MUC6 | Mucin 6, oligomeric mucus/gel-forming | SEQ ID NOS: 9108- |
| | | 9111 |
| MUC7 | Mucin 7, secreted | SEQ ID NOS: 9112- |
| | | 9115 |
| MUCL1 | Mucin-like 1 | SEQ ID NOS: 9116- |
| | | 9118 |
| MXRA5 | Matrix-remodelling associated 5 | SEQ ID NO: 9119 |
| MXRA7 | Matrix-remodelling associated 7 | SEQ ID NOS: 9120- |
| | | 9126 |
| MYDGF | Myeloid-derived growth factor | SEQ ID NOS: 9127- |
| | | 9129 |
| MYL1 | Myosin, light chain 1, alkali; skeletal, fast | SEQ ID NOS: 9130- |
| | | 9131 |
| MYOC | Myocilin, trabecular meshwork inducible | SEQ ID NOS: 9132- |
| | glucocorticoid response | 9133 |
| MYRFL | Myelin regulatory factor-like | SEQ ID NOS: 9134- |
| | | 9138 |
| MZB1 | Marginal zone B and B1 cell-specific | SEQ ID NOS: 9139- |
| | protein | 9143 |
| N4BP2L2 | NEDD4 binding protein 2-like 2 | SEQ ID NOS: 9144- |
| | | 9149 |
| NAA38 | N(alpha)-acetyltransferase 38, NatC | SEQ ID NOS: 9150- |
| | auxiliary subunit | 9155 |
| NAAA | N-acylethanolamine acid amidase | SEQ ID NOS: 9156- |
| | | 9161 |
| NAGA | N-acetylgalactosaminidase, alpha- | SEQ ID NOS: 9162- |
| | | 9164 |
| NAGLU | N-acetylglucosaminidase, alpha | SEQ ID NOS: 9165- |
| | | 9169 |
| NAGS | N-acetylglutamate synthase | SEQ ID NOS: 9170- |
| | | 9171 |
| NAPSA | Napsin A aspartic peptidase | SEQ ID NOS: 9172- |
| | | 9174 |
| NBL1 | Neuroblastoma 1, DAN family BMP | SEQ ID NOS: 9180- |
| | antagonist | 9193 |
| NCAM1 | Neural cell adhesion molecule 1 | SEQ ID NOS: 9194- |
| | | 9213 |
| NCAN | Neurocan | SEQ ID NOS: 9214- |
| | | 9215 |
| NCBP2-AS2 | NCBP2 antisense RNA 2 (head to head) | SEQ ID NO: 9216 |
| NCSTN | Nicastrin | SEQ ID NOS: 9217- |
| | | 9226 |
| NDNF | Neuron-derived neurotrophic factor | SEQ ID NOS: 9227- |
| | | 9229 |
| NDP | Norrie disease (pseudoglioma) | SEQ ID NOS: 9230- |
| | | 9232 |
| NDUFA10 | NADH dehydrogenase (ubiquinone) 1 alpha | SEQ ID NOS: 9233- |
| | subcomplex, 10, 42 kDa | 9242 |
| NDUFB5 | NADH dehydrogenase (ubiquinone) 1 beta | SEQ ID NOS: 9243- |
| | subcomplex, 5, 16 kDa | 9251 |
| NDUFS8 | NADH dehydrogenase (ubiquinone) Fe—S | SEQ ID NOS: 9252- |
| | protein 8, 23 kDa (NADH-coenzyme Q | 9261 |
| | reductase) | |
| NDUFV1 | NADH dehydrogenase (ubiquinone) | SEQ ID NOS: 9262- |
| | flavoprotein 1, 51 kDa | 9275 |
| NECAB3 | N-terminal EF-hand calcium binding | SEQ ID NOS: 9276- |
| | protein 3 | 9285 |
| NELL1 | Neural EGFL like 1 | SEQ ID NOS: 9289- |
| | | 9292 |
| NELL2 | Neural EGFL like 2 | SEQ ID NOS: 9293- |
| | | 9307 |
| NENF | Neudesin neurotrophic factor | SEQ ID NO: 9308 |
| NETO1 | Neuropilin (NRP) and tolloid (TLL)-like 1 | SEQ ID NOS: 9309- |
| | | 9312 |
| NFASC | Neurofascin | SEQ ID NOS: 9313- |
| | | 9327 |
| NFE2L1 | Nuclear factor, erythroid 2-like 1 | SEQ ID NOS: 9328- |
| | | 9346 |
| NFE2L3 | Nuclear factor, erythroid 2-like 3 | SEQ ID NOS: 9347- |
| | | 9348 |
| NGEF | Neuronal guanine nucleotide exchange | SEQ ID NOS: 9349- |
| | factor | 9354 |
| NGF | Nerve growth factor (beta polypeptide) | SEQ ID NO: 9355 |
| NGLY1 | N-glycanase 1 | SEQ ID NOS: 9356- |
| | | 9362 |
| NGRN | Neugrin, neurite outgrowth associated | SEQ ID NOS: 9363- |
| | | 9364 |
| NHLRC3 | NHL repeat containing 3 | SEQ ID NOS: 9365- |
| | | 9367 |
| NIDI | Nidogen 1 | SEQ ID NOS: 9368- |
| | | 9369 |
| NID2 | Nidogen 2 (osteonidogen) | SEQ ID NOS: 9370- |
| | | 9372 |
| NKG7 | Natural killer cell granule protein 7 | SEQ ID NOS: 9373- |
| | | 9377 |
| NLGN3 | Neuroligin 3 | SEQ ID NOS: 9378- |
| | | 9382 |
| NLGN4Y | Neuroligin 4, Y-linked | SEQ ID NOS: 9383- |
| | | 9389 |
| NLRP5 | NLR family, pyrin domain containing 5 | SEQ ID NOS: 9390- |
| | | 9392 |
| NMB | Neuromedin B | SEQ ID NOS: 9393- |
| | | 9394 |
| NME1 | NME/NM23 nucleoside diphosphate kinase | SEQ ID NOS: 9395- |
| | 1 | 9401 |
| NME1-NME2 | NME1-NME2 readthrough | SEQ ID NOS: 9402- |
| | | 9404 |
| NME3 | NME/NM23 nucleoside diphosphate kinase | SEQ ID NOS: 9405- |
| | 3 | 9409 |
| NMS | Neuromedin S | SEQ ID NO: 9410 |
| NMU | Neuromedin U | SEQ ID NOS: 9411- |
| | | 9414 |
| NOA1 | Nitric oxide associated 1 | SEQ ID NO: 9415 |
| NODAL | Nodal growth differentiation factor | SEQ ID NOS: 9416- |
| | | 9417 |
| NOG | Noggin | SEQ ID NO: 9418 |
| NOMO3 | NODAL modulator 3 | SEQ ID NOS: 9419- |
| | | 9425 |
| NOS1AP | Nitric oxide synthase 1 (neuronal) adaptor | SEQ ID NOS: 9426- |
| | protein | 9430 |
| NOTCH3 | Notch 3 | SEQ ID NOS: 9431- |
| | | 9434 |
| NOTUM | Notum pectinacetylesterase homolog | SEQ ID NOS: 9435- |
| | (Drosophila) | 9437 |
| NOV | Nephroblastoma overexpressed | SEQ ID NO: 9438 |
| NPB | Neuropeptide B | SEQ ID NOS: 9439- |
| | | 9440 |
| NPC2 | Niemann-Pick disease, type C2 | SEQ ID NOS: 9441- |
| | | 9449 |
| NPFF | Neuropeptide FF-amide peptide precursor | SEQ ID NO: 9450 |
| NPFFR2 | Neuropeptide FF receptor 2 | SEQ ID NOS: 9451- |
| | | 9454 |
| NPHS1 | Nephrosis 1, congenital, Finnish type | SEQ ID NOS: 9455- |
| | (nephrin) | 9456 |
| NPNT | Nephronectin | SEQ ID NOS: 9457- |
| | | 9467 |
| NPPA | Natriuretic peptide A | SEQ ID NOS: 9468- |
| | | 9470 |
| NPPB | Natriuretic peptide B | SEQ ID NO: 9471 |
| NPPC | Natriuretic peptide C | SEQ ID NOS: 9472- |
| | | 9473 |
| NPS | Neuropeptide S | SEQ ID NO: 9474 |
| NPTX1 | Neuronal pentraxin I | SEQ ID NO: 9475 |
| NPTX2 | Neuronal pentraxin II | SEQ ID NO: 9476 |
| NPTXR | Neuronal pentraxin receptor | SEQ ID NOS: 9477- |
| | | 9478 |
| NPVF | Neuropeptide VF precursor | SEQ ID NO: 9479 |
| NPW | Neuropeptide W | SEQ ID NOS: 9480- |
| | | 9482 |
| NPY | Neuropeptide Y | SEQ ID NOS: 9483- |
| | | 9485 |
| NQO2 | NAD(P)H dehydrogenase, quinone 2 | SEQ ID NOS: 9486- |
| | | 9494 |
| NRCAM | Neuronal cell adhesion molecule | SEQ ID NOS: 9495- |
| | | 9507 |
| NRG1 | Neuregulin 1 | SEQ ID NOS: 9508- |
| | | 9525 |
| NRN1L | Neuritin 1-like | SEQ ID NOS: 9526- |
| | | 9528 |
| NRP1 | Neuropilin 1 | SEQ ID NOS: 9529- |
| | | 9542 |
| NRP2 | Neuropilin 2 | SEQ ID NOS: 9543- |
| | | 9549 |
| NRTN | Neurturin | SEQ ID NO: 9550 |
| NRXN1 | Neurexin 1 | SEQ ID NOS: 9551- |
| | | 9581 |
| NRXN2 | Neurexin 2 | SEQ ID NOS: 9582- |
| | | 9590 |
| NT5C3A | 5′-nucleotidase, cytosolic IIIA | SEQ ID NOS: 9591- |
| | | 9601 |
| NT5DC3 | 5′-nucleotidase domain containing 3 | SEQ ID NOS: 9602- |
| | | 9604 |
| NT5E | 5′-nucleotidase, ecto (CD73) | SEQ ID NOS: 9605- |
| | | 9609 |
| NTF3 | Neurotrophin 3 | SEQ ID NOS: 9610- |
| | | 9611 |
| NTF4 | Neurotrophin 4 | SEQ ID NOS: 9612- |
| | | 9613 |
| NTM | Neurotrimin | SEQ ID NOS: 9614- |
| | | 9623 |
| NTN1 | Netrin 1 | SEQ ID NOS: 9624- |
| | | 9625 |
| NTN3 | Netrin 3 | SEQ ID NO: 9626 |
| NTN4 | Netrin 4 | SEQ ID NOS: 9627- |
| | | 9631 |
| NTN5 | Netrin 5 | SEQ ID NOS: 9632- |
| | | 9633 |
| NTNG1 | Netrin G1 | SEQ ID NOS: 9634- |
| | | 9640 |
| NTNG2 | Netrin G2 | SEQ ID NOS: 9641- |
| | | 9642 |
| NTS | Neurotensin | SEQ ID NOS: 9643- |
| | | 9644 |
| NUBPL | Nucleotide binding proteindike | SEQ ID NOS: 9645- |
| | | 9651 |
| NUCB1 | Nucleobindin 1 | SEQ ID NOS: 9652- |
| | | 9658 |
| NUCB2 | Nucleobindin 2 | SEQ ID NOS: 9659- |
| | | 9674 |
| NUDT19 | Nudix (nucleoside diphosphate linked | SEQ ID NO: 9675 |
| | moiety X)-type motif 19 | |
| NUDT9 | Nudix (nucleoside diphosphate linked | SEQ ID NOS: 9676- |
| | moiety X)-type motif 9 | 9680 |
| NUP155 | Nucleoporin 155 kDa | SEQ ID NOS: 9681- |
| | | 9684 |
| NUP214 | Nucleoporin 214 kDa | SEQ ID NOS: 9685- |
| | | 9696 |
| NUP85 | Nucleoporin 85 kDa | SEQ ID NOS: 9697- |
| | | 9711 |
| NXPE3 | Neurexophilin and PC-esterase domain | SEQ ID NOS: 9712- |
| | family, member 3 | 9716 |
| NXPE4 | Neurexophilin and PC-esterase domain | SEQ ID NOS: 9717- |
| | family, member 4 | 9718 |
| NXPH1 | Neurexophilin 1 | SEQ ID NOS: 9719- |
| | | 9722 |
| NXPH2 | Neurexophilin 2 | SEQ ID NO: 9723 |
| NXPH3 | Neurexophilin 3 | SEQ ID NOS: 9724- |
| | | 9725 |
| NXPH4 | Neurexophilin 4 | SEQ ID NOS: 9726- |
| | | 9727 |
| NYX | Nyctalopin | SEQ ID NOS: 9728- |
| | | 9729 |
| OAF | Out at first homolog | SEQ ID NOS: 9730- |
| | | 9731 |
| OBP2A | Odorant binding protein 2A | SEQ ID NOS: 9732- |
| | | 9738 |
| OBP2B | Odorant binding protein 2B | SEQ ID NOS: 9739- |
| | | 9742 |
| OC90 | Otoconin 90 | SEQ ID NO: 9743 |
| OCLN | Occludin | SEQ ID NOS: 9744- |
| | | 9746 |
| ODAM | Odontogenic, ameloblast asssociated | SEQ ID NOS: 9747- |
| | | 9750 |
| OGG1 | 8-oxoguanine DNA glvcosylase | SEQ ID NOS: 9755- |
| | | 9768 |
| OGN | Osteoglycin | SEQ ID NOS: 9769- |
| | | 9771 |
| OIT3 | Oncoprotein induced transcript 3 | SEQ ID NOS: 9772- |
| | | 9773 |
| OLFM1 | Olfactomedin 1 | SEQ ID NOS: 9774- |
| | | 9784 |
| OLFM2 | Olfactomedin 2 | SEQ ID NOS: 9785- |
| | | 9788 |
| OLFM3 | Olfactomedin 3 | SEQ ID NOS: 9789- |
| | | 9791 |
| OLFM4 | Olfactomedin 4 | SEQ ID NO: 9792 |
| OLFML1 | Olfactomedin-like 1 | SEQ ID NOS: 9793- |
| | | 9796 |
| OLFML2A | Olfactomedin-like 2A | SEQ ID NOS: 9797- |
| | | 9799 |
| OLFML2B | Olfactomedin-like 2B | SEQ ID NOS: 9800- |
| | | 9804 |
| OLFML3 | Olfactomedin-like 3 | SEQ ID NOS: 9805- |
| | | 9807 |
| OMD | Osteomodulin | SEQ ID NO: 9808 |
| OMG | Oligodendrocyte myelin glycoprotein | SEQ ID NO: 9809 |
| OOSP2 | Oocyte secreted protein 2 | SEQ ID NOS: 9810- |
| | | 9811 |
| OPCML | Opioid binding protein/cell adhesion | SEQ ID NOS: 9812- |
| | molecule-like | 9816 |
| OPTC | Opticin | SEQ ID NOS: 9818- |
| | | 9819 |
| ORAI1 | ORAI calcium release-activated calcium | SEQ ID NO: 9820 |
| | modulator 1 | |
| ORM1 | Orosomucoid 1 | SEQ ID NO: 9821 |
| ORM2 | Orosomucoid 2 | SEQ ID NO: 9822 |
| ORMDL2 | ORMDL sphingolipid biosynthesis | SEQ ID NOS: 9823- |
| | regulator 2 | 9826 |
| OS9 | Osteosarcoma amplified 9, endoplasmic | SEQ ID NOS: 9827- |
| | reticulum lectin | 9841 |
| OSCAR | Osteoclast associated, immunoglobulin-like | SEQ ID NOS: 9842- |
| | receptor | 9852 |
| OSM | Oncostatin M | SEQ ID NOS: 9853- |
| | | 9855 |
| OSMR | Oncostatin M receptor | SEQ ID NOS: 9856- |
| | | 9860 |
| OSTN | Osteocrin | SEQ ID NOS: 9861- |
| | | 9862 |
| OTOA | Otoancorin | SEQ ID NOS: 9863- |
| | | 9868 |
| OTOG | Otogelin | SEQ ID NOS: 9869- |
| | | 9871 |
| OTOGL | Otogelin-like | SEQ ID NOS: 9872- |
| | | 9878 |
| OTOL1 | Otolin 1 | SEQ ID NO: 9879 |
| OTOR | Otoraplin | SEQ ID NO: 9880 |
| OTOS | Otospiralin | SEQ ID NOS: 9881- |
| | | 9882 |
| OVCH1 | Ovochymase 1 | SEQ ID NOS: 9883- |
| | | 9885 |
| OVCH2 | Ovochymase 2 (gene/pseudogene) | SEQ ID NOS: 9886- |
| | | 9887 |
| OVGP1 | Oviductal glycoprotein 1, 120 kDa | SEQ ID NO: 9888 |
| OXCT1 | 3-oxoacid CoA transferase 1 | SEQ ID NOS: 9889- |
| | | 9892 |
| OXCT2 | 3-oxoacid CoA transferase 2 | SEQ ID NO: 9893 |
| OXNAD1 | Oxidoreductase NAD-binding domain | SEQ ID NOS: 9894- |
| | containing 1 | 9900 |
| OXT | Oxytocin/neurophysin I prepropeptide | SEQ ID NO: 9901 |
| P3H1 | Prolyl 3-hydroxylase 1 | SEQ ID NOS: 9902- |
| | | 9906 |
| P3H2 | Prolyl 3-hydroxylase 2 | SEQ ID NOS: 9907- |
| | | 9910 |
| P3H3 | Prolyl 3-hydroxylase 3 | SEQ ID NO: 9911 |
| P3H4 | Prolyl 3-hydroxylase family member 4 | SEQ ID NOS: 9912- |
| | (non-enzymatic) | 9916 |
| P4HA1 | Prolyl 4-hydroxylase, alpha polypeptide I | SEQ ID NOS: 9917- |
| | | 9921 |
| P4HA2 | Prolyl 4-hydroxylase, alpha polypeptide II | SEQ ID NOS: 9922- |
| | | 9936 |
| P4HA3 | Prolyl 4-hydroxylase, alpha polypeptide III | SEQ ID NOS: 9937- |
| | | 9941 |
| P4HB | Prolyl 4-hydroxylase, beta polypeptide | SEQ ID NOS: 9942- |
| | | 9953 |
| PAEP | Progestagen-associated endometrial protein | SEQ ID NOS: 9954- |
| | | 9962 |
| PAM | Peptidylglycine alpha-amidating | SEQ ID NOS: 9963- |
| | monooxygenase | 9976 |
| PAMR1 | Peptidase domain containing associated | SEQ ID NOS: 9977- |
| | with muscle regeneration 1 | 9983 |
| PAPL | Iron/zinc purple acid phosphatase-like | SEQ ID NOS: 159-162 |
| | protein | |
| PAPLN | Papilin, proteoglycan-like sulfated | SEQ ID NOS: 9984- |
| | glycoprotein | 9991 |
| PAPPA | Pregnancy-associated plasma protein A, | SEQ ID NO: 9992 |
| | pappalysin 1 | |
| PAPPA2 | Pappalysin 2 | SEQ ID NOS: 9993- |
| | | 9994 |
| PARP15 | Poly (ADP-ribose) polymerase family, | SEQ ID NOS: 9995- |
| | member 15 | 9998 |
| PARVB | Parvin, beta | SEQ ID NOS: 9999- |
| | | 10003 |
| PATE1 | Prostate and testis expressed 1 | SEQ ID NOS: 10004- |
| | | 10005 |
| PATE2 | Prostate and testis expressed 2 | SEQ ID NOS: 10006- |
| | | 10007 |
| PATE3 | Prostate and testis expressed 3 | SEQ ID NO: 10008 |
| PATE4 | Prostate and testis expressed 4 | SEQ ID NOS: 10009- |
| | | 10010 |
| PATL2 | Protein associated with topoisomerase II | SEQ ID NOS: 10011- |
| | homolog 2 (yeast) | 10016 |
| PAX2 | Paired box 2 | SEQ ID NOS: 10017- |
| | | 10022 |
| PAX4 | Paired box 4 | SEQ ID NOS: 10023- |
| | | 10029 |
| PCCB | Propionyl CoA carboxylase, beta | SEQ ID NOS: 10030- |
| | polypeptide | 10044 |
| PCDH1 | Protocadherin 1 | SEQ ID NOS: 10045- |
| | | 10050 |
| PCDH12 | Protocadherin 12 | SEQ ID NOS: 10051- |
| | | 10052 |
| PCDH15 | Protocadherin-related 15 | SEQ ID NOS: 10053- |
| | | 10086 |
| PCDHA1 | Protocadherin alpha 1 | SEQ ID NOS: 10087- |
| | | 10089 |
| PCDHA10 | Protocadherin alpha 10 | SEQ ID NOS: 10090- |
| | | 10092 |
| PCDHA11 | Protocadherin alpha 11 | SEQ ID NOS: 10093- |
| | | 10095 |
| PCDHA6 | Protocadherin alpha 6 | SEQ ID NOS: 10096- |
| | | 10098 |
| PCDHB12 | Protocadherin beta 12 | SEQ ID NOS: 10099- |
| | | 10101 |
| PCDHGA11 | Protocadherin gamma subfamily A, 11 | SEQ ID NOS: 10102- |
| | | 10104 |
| PCF11 | PCF11 cleavage and polyadenylation factor | SEQ ID NOS: 10105- |
| | subunit | 10109 |
| PCOLCE | Procollagen C-endopeptidase enhancer | SEQ ID NO: 10110 |
| PCOLCE2 | Procollagen C-endopeptidase enhancer 2 | SEQ ID NOS: 10111- |
| | | 10114 |
| PCSK1 | Proprotein convertase subtilisin/kexin type | SEQ ID NOS: 10115- |
| | 1 | 10117 |
| PCSK1N | Proprotein convertase subtilisin/kexin type | SEQ ID NO: 10118 |
| | 1 inhibitor | |
| PCSK2 | Proprotein convertase subtilisin/kexin type | SEQ ID NOS: 10119- |
| | 2 | 10121 |
| PCSK4 | Proprotein convertase subtilisin/kexin type | SEQ ID NOS: 10122- |
| | 4 | 10124 |
| PCSK5 | Proprotein convertase subtilisin/kexin type | SEQ ID NOS: 10125- |
| | 5 | 10129 |
| PCSK9 | Proprotein convertase subtilisin/kexin type | SEQ ID NO: 10130 |
| | 9 | |
| PCYOX1 | Prenylcysteine oxidase 1 | SEQ ID NOS: 10131- |
| | | 10135 |
| PCYOX1L | Prenylcysteine oxidase 1 like | SEQ ID NOS: 10136- |
| | | 10140 |
| PDDC1 | Parkinson disease 7 domain containing 1 | SEQ ID NOS: 5802- |
| | | 5810 |
| PDE11A | Phosphodiesterase 11A | SEQ ID NOS: 10141- |
| | | 10146 |
| PDE2A | Phosphodiesterase 2A, cGMP-stimulated | SEQ ID NOS: 10147- |
| | | 10168 |
| PDE7A | Phosphodiesterase 7A | SEQ ID NOS: 10169- |
| | | 10172 |
| PDF | Peptide deformylase (mitochondrial) | SEQ ID NO: 10173 |
| PDGFA | Platelet-derived growth factor alpha | SEQ ID NOS: 10174- |
| | polypeptide | 10177 |
| PDGFB | Platelet-derived growth factor beta | SEQ ID NOS: 10178- |
| | polypeptide | 10181 |
| PDGFC | Platelet derived growth factor C | SEQ ID NOS: 10182- |
| | | 10185 |
| PDGFD | Platelet derived growth factor D | SEQ ID NOS: 10186- |
| | | 10188 |
| PDGFRA | Platelet-derived growth factor receptor, | SEQ ID NOS: 10189- |
| | alpha polypeptide | 10195 |
| PDGFRB | Platelet-derived growth factor receptor, beta | SEQ ID NOS: 10196- |
| | polypeptide | 10199 |
| PDGFRL | Platelet-derived growth factor receptor-like | SEQ ID NOS: 10200- |
| | | 10201 |
| PDHA1 | Pyruvate dehydrogenase (lipoamide) alpha | SEQ ID NOS: 10202- |
| | 1 | 10210 |
| PDIA2 | Protein disulfide isomerase family A, | SEQ ID NOS: 10211- |
| | member 2 | 10214 |
| PDIA3 | Protein disulfide isomerase family A, | SEQ ID NOS: 10215- |
| | member 3 | 10218 |
| PDIA4 | Protein disulfide isomerase family A, | SEQ ID NOS: 10219- |
| | member 4 | 10220 |
| PDIA5 | Protein disulfide isomerase family A, | SEQ ID NOS: 10221- |
| | member 5 | 10224 |
| PDIA6 | Protein disulfide isomerase family A, | SEQ ID NOS: 10225- |
| | member 6 | 10231 |
| PDILT | Protein disulfide isomerase-like, testis | SEQ ID NOS: 10232- |
| | expressed | 10233 |
| PDYN | Prodynorphin | SEQ ID NOS: 10234- |
| | | 10236 |
| PDZD8 | PDZ domain containing 8 | SEQ ID NO: 10237 |
| PDZRN4 | PDZ domain containing ring finger 4 | SEQ ID NOS: 10238- |
| | | 10240 |
| PEAR1 | Platelet endothelial aggregation receptor 1 | SEQ ID NOS: 10241- |
| | | 10244 |
| PEBP4 | Phosphatidylethanolamine-binding protein 4 | SEQ ID NOS: 10245- |
| | | 10246 |
| PECAM1 | Platelet/endothelial cell adhesion molecule | SEQ ID NOS: 10247- |
| | 1 | 10250 |
| PENK | Proenkephalin | SEQ ID NOS: 10251- |
| | | 10256 |
| PET117 | PET117 homolog | SEQ ID NO: 10257 |
| PF4 | Platelet factor 4 | SEQ ID NO: 10258 |
| PF4V1 | Platelet factor 4 variant 1 | SEQ ID NO: 10259 |
| PFKP | Phosphofructokinase, platelet | SEQ ID NOS: 10260- |
| | | 10268 |
| PFN1 | Profilin 1 | SEQ ID NOS: 10269- |
| | | 10271 |
| PGA3 | Pepsinogen 3, group I (pepsinogen A) | SEQ ID NOS: 10272- |
| | | 10275 |
| PGA4 | Pepsinogen 4, group I (pepsinogen A) | SEQ ID NOS: 10276- |
| | | 10278 |
| PGA5 | Pepsinogen 5, group I (pepsinogen A) | SEQ ID NOS: 10279- |
| | | 10281 |
| PGAM5 | PGAM family member 5, serine/threonine | SEQ ID NOS: 10282- |
| | protein phosphatase, mitochondrial | 10285 |
| PGAP3 | Post-GPI attachment to proteins 3 | SEQ ID NOS: 10286- |
| | | 10293 |
| PGC | Progastricsin (pepsinogen C) | SEQ ID NOS: 10294- |
| | | 10297 |
| PGF | Placental growth factor | SEQ ID NOS: 10298- |
| | | 10301 |
| PGLYRP1 | Peptidoglycan recognition protein 1 | SEQ ID NO: 10302 |
| PGLYRP2 | Peptidoglycan recognition protein 2 | SEQ ID NOS: 10303- |
| | | 10306 |
| PGLYRP3 | Peptidoglycan recognition protein 3 | SEQ ID NO: 10307 |
| PGLYRP4 | Peptidoglycan recognition protein 4 | SEQ ID NOS: 10308- |
| | | 10309 |
| PHACTR1 | Phosphatase and actin regulator 1 | SEQ ID NOS: 10310- |
| | | 10316 |
| PHB | Prohibitin | SEQ ID NOS: 10317- |
| | | 10325 |
| PI15 | Peptidase inhibitor 15 | SEQ ID NOS: 10326- |
| | | 10327 |
| PI3 | Peptidase inhibitor 3, skin-derived | SEQ ID NO: 10328 |
| PIANP | PILR alpha associated neural protein | SEQ ID NOS: 10329- |
| | | 10334 |
| PIGK | Phosphatidylinositol glycan anchor | SEQ ID NOS: 10335- |
| | biosynthesis, class K | 10338 |
| PIGL | Phosphatidylinositol glycan anchor | SEQ ID NOS: 10339- |
| | biosynthesis, class L | 10346 |
| PIGT | Phosphatidylinositol glycan anchor | SEQ ID NOS: 10347- |
| | biosynthesis, class T | 10400 |
| PIGZ | Phosphatidylinositol glycan anchor | SEQ ID NOS: 10401- |
| | biosynthesis, class Z | 10403 |
| PIK3AP1 | Phosphoinositide-3-kinase adaptor protein 1 | SEQ ID NOS: 10404- |
| | | 10406 |
| PIK3IP1 | Phosphoinositide-3-kinase interacting | SEQ ID NOS: 10407- |
| | protein 1 | 10410 |
| PILRA | Paired immunoglobin-like type 2 receptor | SEQ ID NOS: 10411- |
| | alpha | 10415 |
| PILRB | Paired immunoglobin-like type 2 receptor | SEQ ID NOS: 10416- |
| | beta | 10427 |
| PINLYP | Phospholipase A2 inhibitor and | SEQ ID NOS: 10428- |
| | LY6/PLAUR domain containing | 10432 |
| PIP | Prolactin-induced protein | SEQ ID NO: 10433 |
| PIWIL4 | Piwi-like RNA-mediated gene silencing 4 | SEQ ID NOS: 10434- |
| | | 10438 |
| PKDCC | Protein kinase domain containing, | SEQ ID NOS: 10439- |
| | cytoplasmic | 10440 |
| PKHD1 | Polycystic kidney and hepatic disease 1 | SEQ ID NOS: 10441- |
| | (autosomal recessive) | 10442 |
| PLA1A | Phospholipase A1 member A | SEQ ID NOS: 10443- |
| | | 10447 |
| PLA2G10 | Phospholipase A2, group X | SEQ ID NOS: 10448- |
| | | 10449 |
| PLA2G12A | Phospholipase A2, group XIIA | SEQ ID NOS: 10450- |
| | | 10452 |
| PLA2G12B | Phospholipase A2, group XIIB | SEQ ID NO: 10453 |
| PLA2G15 | Phospholipase A2, group XV | SEQ ID NOS: 10454- |
| | | 10461 |
| PLA2G1B | Phospholipase A2, group IB (pancreas) | SEQ ID NOS: 10462- |
| | | 10464 |
| PLA2G2A | Phospholipase A2, group IIA (platelets, | SEQ ID NOS: 10465- |
| | synovial fluid) | 10466 |
| PLA2G2C | Phospholipase A2, group IIC | SEQ ID NOS: 10467- |
| | | 10468 |
| PLA2G2D | Phospholipase A2, group IID | SEQ ID NOS: 10469- |
| | | 10470 |
| PLA2G2E | Phospholipase A2, group IIE | SEQ ID NO: 10471 |
| PLA2G3 | Phospholipase A2, group III | SEQ ID NO: 10472 |
| PLA2G5 | Phospholipase A2, group V | SEQ ID NO: 10473 |
| PLA2G7 | Phospholipase A2, group VII (platelet- | SEQ ID NOS: 10474- |
| | activating factor acetylhydrolase, plasma) | 10475 |
| PLA2R1 | Phospholipase A2 receptor 1, 180 kDa | SEQ ID NOS: 10476- |
| | | 10477 |
| PLAC1 | Placenta-specific 1 | SEQ ID NO: 10478 |
| PLAC9 | Placenta-specific 9 | SEQ ID NOS: 10479- |
| | | 10481 |
| PLAT | Plasminogen activator, tissue | SEQ ID NOS: 10482- |
| | | 10490 |
| PLAU | Plasminogen activator, urokinase | SEQ ID NOS: 10491- |
| | | 10493 |
| PLAUR | Plasminogen activator, urokinase receptor | SEQ ID NOS: 10494- |
| | | 10505 |
| PLBD1 | Phospholipase B domain containing 1 | SEQ ID NOS: 10506- |
| | | 10508 |
| PLBD2 | Phospholipase B domain containing 2 | SEQ ID NOS: 10509- |
| | | 10511 |
| PLG | Plasminogen | SEQ ID NOS: 10512- |
| | | 10514 |
| PLGLB1 | Plasminogen-like B1 | SEQ ID NOS: 10515- |
| | | 10518 |
| PLGLB2 | Plasminogen-like B2 | SEQ ID NOS: 10519- |
| | | 10520 |
| PLOD1 | Procollagen-lysine, 2-oxoglutarate 5- | SEQ ID NOS: 10521- |
| | dioxygenase 1 | 10523 |
| PLOD2 | Procollagen-lysine, 2-oxoglutarate 5- | SEQ ID NOS: 10524- |
| | dioxygenase 2 | 10529 |
| PLOD3 | Procollagen-lysine, 2-oxoglutarate 5- | SEQ ID NOS: 10530- |
| | dioxygenase 3 | 10536 |
| PLTP | Phospholipid transfer protein | SEQ ID NOS: 10537- |
| | | 10541 |
| PLXNA4 | Plexin A4 | SEQ ID NOS: 10542- |
| | | 10545 |
| PLXNB2 | Plexin B2 | SEQ ID NOS: 10546- |
| | | 10554 |
| PM20D1 | Peptidase M20 domain containing 1 | SEQ ID NO: 10555 |
| PMCH | Pro-melanin-concentrating hormone | SEQ ID NO: 10556 |
| PMEL | Premelanosome protein | SEQ ID NOS: 10557- |
| | | 10568 |
| PMEPA1 | Prostate transmembrane protein, androgen | SEQ ID NOS: 10569- |
| | induced 1 | 10575 |
| PNLIP | Pancreatic lipase | SEQ ID NO: 10576 |
| PNLIPRP1 | Pancreatic lipase-related protein 1 | SEQ ID NOS: 10577- |
| | | 10585 |
| PNLIPRP3 | Pancreatic lipase-related protein 3 | SEQ ID NO: 10586 |
| PNOC | Prepronociceptin | SEQ ID NOS: 10587- |
| | | 10589 |
| PNP | Purine nucleoside phosphorylase | SEQ ID NOS: 10590- |
| | | 10593 |
| PNPLA4 | Patatin-like phospholipase domain | SEQ ID NOS: 10594- |
| | containing 4 | 10597 |
| PODNL1 | Podocan-like 1 | SEQ ID NOS: 10598- |
| | | 10609 |
| POFUT1 | Protein O-fucosyltransferase 1 | SEQ ID NOS: 10610- |
| | | 10611 |
| POFUT2 | Protein O-fucosyltransferase 2 | SEQ ID NOS: 10612- |
| | | 10617 |
| POGLUT1 | Protein O-glucosyltransferase 1 | SEQ ID NOS: 10618- |
| | | 10622 |
| POLL | Polymerase (DNA directed), lambda | SEQ ID NOS: 10623- |
| | | 10635 |
| POMC | Proopiomelanocortin | SEQ ID NOS: 10636- |
| | | 10640 |
| POMGNT2 | Protein O-linked mannose N- | SEQ ID NOS: 10641- |
| | acetylglucosaminyltransferase 2 (beta 1,4-) | 10642 |
| PON1 | Paraoxonase 1 | SEQ ID NOS: 10643- |
| | | 10644 |
| PON2 | Paraoxonase 2 | SEQ ID NOS: 10645- |
| | | 10657 |
| PON3 | Paraoxonase 3 | SEQ ID NOS: 10658- |
| | | 10663 |
| POSTN | Periostin, osteoblast specific factor | SEQ ID NOS: 10664- |
| | | 10669 |
| PPBP | Pro-platelet basic protein (chemokine (C-X- | SEQ ID NO: 10670 |
| | C motif) ligand 7) | |
| PPIB | Peptidylprolyl isomerase B (cyclophilin B) | SEQ ID NO: 10671 |
| PPIC | Peptidylprolyl isomerase C (cyclophilin C) | SEQ ID NO: 10672 |
| PPOX | Protoporphyrinogen oxidase | SEQ ID NOS: 10673- |
| | | 10683 |
| PPP1CA | Protein phosphatase 1, catalytic subunit, | SEQ ID NOS: 10684- |
| | alpha isozyme | 10689 |
| PPT1 | Palmitoyl-protein thioesterase 1 | SEQ ID NOS: 10690- |
| | | 10706 |
| PPT2 | Palmitoyl-protein thioesterase 2 | SEQ ID NOS: 10707- |
| | | 10714 |
| PPY | Pancreatic polypeptide | SEQ ID NOS: 10715- |
| | | 10719 |
| PRAC2 | Prostate cancer susceptibility candidate 2 | SEQ ID NOS: 10720- |
| | | 10721 |
| PRADC1 | Protease-associated domain containing 1 | SEQ ID NO: 10722 |
| PRAP1 | Proline-rich acidic protein 1 | SEQ ID NOS: 10723- |
| | | 10724 |
| PRB1 | Proline-rich protein BstNI subfamily 1 | SEQ ID NOS: 10725- |
| | | 10728 |
| PRB2 | Proline-rich protein BstNI subfamily 2 | SEQ ID NOS: 10729- |
| | | 10730 |
| PRB3 | Proline-rich protein BstNI subfamily 3 | SEQ ID NOS: 10731- |
| | | 10732 |
| PRB4 | Proline-rich protein BstNI subfamily 4 | SEQ ID NOS: 10733- |
| | | 10736 |
| PRCD | Progressive rod-cone degeneration | SEQ ID NOS: 10737- |
| | | 10738 |
| PRCP | Prolylcarboxypeptidase (angiotensinase C) | SEQ ID NOS: 10739- |
| | | 10750 |
| PRDM12 | PR domain containing 12 | SEQ ID NO: 10751 |
| PRDX4 | Peroxiredoxin 4 | SEQ ID NOS: 10752- |
| | | 10755 |
| PRELP | Proline/arginine-rich end leucine-rich repeat | SEQ ID NO: 10756 |
| | protein | |
| PRF1 | Perforin 1 (pore forming protein) | SEQ ID NOS: 10757- |
| | | 10759 |
| PRG2 | Proteoglycan 2, bone marrow (natural killer | SEQ ID NOS: 10760- |
| | cell activator, eosinophil granule major | 10762 |
| | basic protein) | |
| PRG3 | Proteoglycan 3 | SEQ ID NO: 10763 |
| PRG4 | Proteoglycan 4 | SEQ ID NOS: 10764- |
| | | 10769 |
| PRH1 | Proline-rich protein HaeIII subfamily 1 | SEQ ID NOS: 10770- |
| | | 10772 |
| PRH2 | Proline-rich protein HaeIII subfamily 2 | SEQ ID NOS: 10773- |
| | | 10774 |
| PRKAG1 | Protein kinase, AMP-activated, gamma 1 | SEQ ID NOS: 10775- |
| | non-catalytic subunit | 10789 |
| PRKCSH | Protein kinase C substrate 80K-H | SEQ ID NOS: 10790- |
| | | 10799 |
| PRKD1 | Protein kinase D1 | SEQ ID NOS: 10800- |
| | | 10805 |
| PRL | Prolactin | SEQ ID NOS: 10806- |
| | | 10808 |
| PRLH | Prolactin releasing hormone | SEQ ID NO: 10809 |
| PRLR | Prolactin receptor | SEQ ID NOS: 10810- |
| | | 10828 |
| PRNP | Prion protein | SEQ ID NOS: 10829- |
| | | 10832 |
| PRNT | Prion protein (testis specific) | SEQ ID NO: 10833 |
| PROC | Protein C (inactivator of coagulation factors | SEQ ID NOS: 10834- |
| | Va and VIIIa) | 10841 |
| PROK1 | Prokineticin 1 | SEQ ID NO: 10842 |
| PROK2 | Prokineticin 2 | SEQ ID NOS: 10843- |
| | | 10844 |
| PROL1 | Proline rich, lacrimal 1 | SEQ ID NO: 9817 |
| PROM1 | Prominin 1 | SEQ ID NOS: 10845- |
| | | 10856 |
| PROS1 | Protein S (alpha) | SEQ ID NOS: 10857- |
| | | 10860 |
| PROZ | Protein Z, vitamin K-dependent plasma | SEQ ID NOS: 10861- |
| | glycoprotein | 10862 |
| PRR27 | Proline rich 27 | SEQ ID NOS: 10863- |
| | | 10866 |
| PRR4 | Proline rich 4 (lacrimal) | SEQ ID NOS: 10867- |
| | | 10869 |
| PRRG2 | Proline rich Gla (G-carboxyglutamic acid) 2 | SEQ ID NOS: 10870- |
| | | 10872 |
| PRRT3 | Proline-rich transmembrane protein 3 | SEQ ID NOS: 10873- |
| | | 10875 |
| PRRT4 | Proline-rich transmembrane protein 4 | SEQ ID NOS: 10876- |
| | | 10882 |
| PRSS1 | Protease, serine, 1 (trypsin 1) | SEQ ID NOS: 10883- |
| | | 10886 |
| PRSS12 | Protease, serine, 12 (neurotrypsin, | SEQ ID NO: 10887 |
| | motopsin) | |
| PRSS16 | Protease, serine, 16 (thymus) | SEQ ID NOS: 10888- |
| | | 10895 |
| PRSS2 | Protease, serine, 2 (trypsin 2) | SEQ ID NOS: 10896- |
| | | 10899 |
| PRSS21 | Protease, serine, 21 (testisin) | SEQ ID NOS: 10900- |
| | | 10905 |
| PRSS22 | Protease, serine, 22 | SEQ ID NOS: 10906- |
| | | 10908 |
| PRSS23 | Protease, serine, 23 | SEQ ID NOS: 10909- |
| | | 10912 |
| PRSS27 | Protease, serine 27 | SEQ ID NOS: 10913- |
| | | 10915 |
| PRSS3 | Protease, serine, 3 | SEQ ID NOS: 10916- |
| | | 10920 |
| PRSS33 | Protease, serine, 33 | SEQ ID NOS: 10921- |
| | | 10924 |
| PRSS35 | Protease, serine, 35 | SEQ ID NO: 10925 |
| PRSS36 | Protease, serine, 36 | SEQ ID NOS: 10926- |
| | | 10929 |
| PRSS37 | Protease, serine, 37 | SEQ ID NOS: 10930- |
| | | 10933 |
| PRSS38 | Protease, serine, 38 | SEQ ID NO: 10934 |
| PRSS42 | Protease, serine, 42 | SEQ ID NOS: 10935- |
| | | 10936 |
| PRSS48 | Protease, serine, 48 | SEQ ID NOS: 10937- |
| | | 10938 |
| PRSS50 | Protease, serine, 50 | SEQ ID NO: 10939 |
| PRSS53 | Protease, serine, 53 | SEQ ID NO: 10940 |
| PRSS54 | Protease, serine, 54 | SEQ ID NOS: 10941- |
| | | 10945 |
| PRSS55 | Protease, serine, 55 | SEQ ID NOS: 10946- |
| | | 10948 |
| PRSS56 | Protease, serine, 56 | SEQ ID NOS: 10949- |
| | | 10950 |
| PRSS57 | Protease, serine, 57 | SEQ ID NOS: 10951- |
| | | 10952 |
| PRSS58 | Protease, serine, 58 | SEQ ID NOS: 10953- |
| | | 10954 |
| PRSS8 | Protease, serine, 8 | SEQ ID NOS: 10955- |
| | | 10958 |
| PRTG | Protogenin | SEQ ID NOS: 10959- |
| | | 10962 |
| PRTN3 | Proteinase 3 | SEQ ID NOS: 10963- |
| | | 10964 |
| PSAP | Prosaposin | SEQ ID NOS: 10965- |
| | | 10968 |
| PSAPL1 | Prosaposin-like 1 (gene/pseudogene) | SEQ ID NO: 10969 |
| PSG1 | Pregnancy specific beta-1-glycoprotein 1 | SEQ ID NOS: 10970- |
| | | 10977 |
| PSG11 | Pregnancy specific beta-1-glycoprotein 11 | SEQ ID NOS: 10978- |
| | | 10982 |
| PSG2 | Pregnancy specific beta-1-glycoprotein 2 | SEQ ID NOS: 10983- |
| | | 10984 |
| PSG3 | Pregnancy specific beta-1-glycoprotein 3 | SEQ ID NOS: 10985- |
| | | 10988 |
| PSG4 | Pregnancy specific beta-1-glycoprotein 4 | SEQ ID NOS: 10989- |
| | | 11000 |
| PSG5 | Pregnancy specific beta-1-glycoprotein 5 | SEQ ID NOS: 11001- |
| | | 11006 |
| PSG6 | Pregnancy specific beta-1-glycoprotein 6 | SEQ ID NOS: 11007- |
| | | 11012 |
| PSG7 | Pregnancy specific beta-1-glycoprotein 7 | SEQ ID NOS: 11013- |
| | (gene/pseudogene) | 11015 |
| PSG8 | Pregnancy specific beta-1-glycoprotein 8 | SEQ ID NOS: 11016- |
| | | 11020 |
| PSG9 | Pregnancy specific beta-1-glycoprotein 9 | SEQ ID NOS: 11021- |
| | | 11028 |
| PSMD1 | Proteasome 26S subunit, non-ATPase 1 | SEQ ID NOS: 11029- |
| | | 11036 |
| PSORS1C2 | Psoriasis susceptibility 1 candidate 2 | SEQ ID NO: 11037 |
| PSPN | Persephin | SEQ ID NOS: 11038- |
| | | 11039 |
| PTGDS | Prostaglandin D2 synthase 21 kDa (brain) | SEQ ID NOS: 11040- |
| | | 11044 |
| PTGIR | Prostaglandin I2 (prostacyclin) receptor (IP) | SEQ ID NOS: 11045- |
| | | 11049 |
| PTGS1 | Prostaglandin-endoperoxide synthase 1 | SEQ ID NOS: 11050- |
| | (prostaglandin G/H synthase and | 11058 |
| | cyclooxygenase) | |
| PTGS2 | Prostaglandin-endoperoxide synthase 2 | SEQ ID NOS: 11059- |
| | (prostaglandin G/H synthase and | 11060 |
| | cyclooxygenase) | |
| PTH | Parathyroid hormone | SEQ ID NOS: 11061- |
| | | 11062 |
| PTH2 | Parathyroid hormone 2 | SEQ ID NO: 11063 |
| PTHLH | Parathyroid hormone-like hormone | SEQ ID NOS: 11064- |
| | | 11072 |
| PTK7 | Protein tyrosine kinase 7 (inactive) | SEQ ID NOS: 11073- |
| | | 11088 |
| PTN | Pleiotrophin | SEQ ID NOS: 11089- |
| | | 11090 |
| PTPRA | Protein tyrosine phosphatase, receptor type, | SEQ ID NOS: 11091- |
| | A | 11098 |
| PTPRB | Protein tyrosine phosphatase, receptor type, | SEQ ID NOS: 11099- |
| | B | 11106 |
| PTPRC | Protein tyrosine phosphatase, receptor type, | SEQ ID NOS: 11107- |
| | C | 11117 |
| PTPRCAP | Protein tyrosine phosphatase, receptor type, | SEQ ID NO: 11118 |
| | C-associated protein | |
| PTPRD | Protein tyrosine phosphatase, receptor type, | SEQ ID NOS: 11119- |
| | D | 11130 |
| PTPRF | Protein tyrosine phosphatase, receptor type, | SEQ ID NOS: 11131- |
| | F | 11138 |
| PTPRJ | Protein tyrosine phosphatase, receptor type, | SEQ ID NOS: 11139- |
| | J | 11144 |
| PTPRO | Protein tyrosine phosphatase, receptor type, | SEQ ID NOS: 11145- |
| | O | 11153 |
| PTPRS | Protein tyrosine phosphatase, receptor type, | SEQ ID NOS: 11154- |
| | S | 11161 |
| PTTG1IP | Pituitary tumor-transforming 1 interacting | SEQ ID NOS: 11162- |
| | protein | 11165 |
| PTX3 | Pentraxin 3, long | SEQ ID NO: 11166 |
| PTX4 | Pentraxin 4, long | SEQ ID NOS: 11167- |
| | | 11169 |
| PVR | Poliovirus receptor | SEQ ID NOS: 11170- |
| | | 11175 |
| PVRL1 | Poliovirus receptor-related 1 (herpesvirus | SEQ ID NOS: 9286- |
| | entry mediator C) | 9288 |
| PXDN | Peroxidasin | SEQ ID NOS: 11176- |
| | | 11180 |
| PXDNL | Peroxidasin-like | SEQ ID NOS: 11181- |
| | | 11183 |
| PXYLP1 | 2-phosphoxylose phosphatase 1 | SEQ ID NOS: 11184- |
| | | 11196 |
| PYY | Peptide YY | SEQ ID NOS: 11197- |
| | | 11198 |
| PZP | Pregnancy-zone protein | SEQ ID NOS: 11199- |
| | | 11200 |
| QPCT | Glutaminyl-peptide cyclotransferase | SEQ ID NOS: 11201- |
| | | 11203 |
| QPRT | Quinolinate phosphoribosyltransferase | SEQ ID NOS: 11204- |
| | | 11205 |
| QRFP | Pyroglutamylated RFamide peptide | SEQ ID NOS: 11206- |
| | | 11207 |
| QSOX1 | Quiescin Q6 sulfhydryl oxidase 1 | SEQ ID NOS: 11208- |
| | | 11211 |
| R3HDML | R3H domain containing-like | SEQ ID NO: 11212 |
| RAB26 | RAB26, member RAS oncogene family | SEQ ID NOS: 11213- |
| | | 11216 |
| RAB36 | RAB36, member RAS oncogene family | SEQ ID NOS: 11217- |
| | | 11219 |
| RAB9B | RAB9B, member RAS oncogene family | SEQ ID NO: 11220 |
| RAET1E | Retinoic acid early transcript 1E | SEQ ID NOS: 11221- |
| | | 11226 |
| RAET1G | Retinoic acid early transcript 1G | SEQ ID NOS: 11227- |
| | | 11229 |
| RAMP2 | Receptor (G protein-coupled) activity | SEQ ID NOS: 11230- |
| | modifying protein 2 | 11234 |
| RAPGEF5 | Rap guanine nucleotide exchange factor | SEQ ID NOS: 11235- |
| | (GEF) 5 | 11241 |
| RARRES1 | Retinoic acid receptor responder (tazarotene | SEQ ID NOS: 11242- |
| | induced) 1 | 11243 |
| RARRES2 | Retinoic acid receptor responder (tazarotene | SEQ ID NOS: 11244- |
| | induced) 2 | 11247 |
| RASA2 | RAS p21 protein activator 2 | SEQ ID NOS: 11248- |
| | | 11250 |
| RBM3 | RNA binding motif (RNP1, RRM) protein 3 | SEQ ID NOS: 11251- |
| | | 11253 |
| RBP3 | Retinol binding protein 3, interstitial | SEQ ID NO: 11254 |
| RBP4 | Retinol binding protein 4, plasma | SEQ ID NOS: 11255- |
| | | 11258 |
| RCN1 | Reticulocalbin 1, EF-hand calcium binding | SEQ ID NOS: 11259- |
| | domain | 11262 |
| RCN2 | Reticulocalbin 2, EF-hand calcium binding | SEQ ID NOS: 11263- |
| | domain | 11266 |
| RCN3 | Reticulocalbin 3, EF-hand calcium binding | SEQ ID NOS: 11267- |
| | domain | 11270 |
| RCOR1 | REST corepressor 1 | SEQ ID NOS: 11271- |
| | | 11272 |
| RDH11 | Retinol dehydrogenase 11 (all-trans/9- | SEQ ID NOS: 11273- |
| | cis/11-cis) | 11280 |
| RDH12 | Retinol dehydrogenase 12 (all-trans/9- | SEQ ID NOS: 11281- |
| | cis/11-cis) | 11282 |
| RDH13 | Retinol dehydrogenase 13 (all-trans/9-cis) | SEQ ID NOS: 11283- |
| | | 11291 |
| RDH5 | Retinol dehydrogenase 5 (11-cis/9-cis) | SEQ ID NOS: 11292- |
| | | 11296 |
| RDH8 | Retinol dehydrogenase 8 (all-trans) | SEQ ID NOS: 11297- |
| | | 11298 |
| REG1A | Regenerating islet-derived 1 alpha | SEQ ID NO: 11299 |
| REG1B | Regenerating islet-derived 1 beta | SEQ ID NOS: 11300- |
| | | 11301 |
| REG3A | Regenerating islet-derived 3 alpha | SEQ ID NOS: 11302- |
| | | 11304 |
| REG3G | Regenerating islet-derived 3 gamma | SEQ ID NOS: 11305- |
| | | 11307 |
| REG4 | Regenerating islet-derived family, member | SEQ ID NOS: 11308- |
| | 4 | 11311 |
| RELN | Reelin | SEQ ID NOS: 11312- |
| | | 11315 |
| RELT | RELT tumor necrosis factor receptor | SEQ ID NOS: 11316- |
| | | 11319 |
| REN | Renin | SEQ ID NOS: 11320- |
| | | 11321 |
| REPIN1 | Replication initiator 1 | SEQ ID NOS: 11322- |
| | | 11335 |
| REPS2 | RALBP1 associated Eps domain containing | SEQ ID NOS: 11336- |
| | 2 | 11337 |
| RET | Ret proto-oncogene | SEQ ID NOS: 11338- |
| | | 11343 |
| RETN | Resistin | SEQ ID NOS: 11344- |
| | | 11346 |
| RETNLB | Resistin like beta | SEQ ID NO: 11347 |
| RETSAT | Retinol saturase (all-trans-retinol 13,14- | SEQ ID NOS: 11348- |
| | reductase) | 11352 |
| RFNG | RFNG O-fucosylpeptide 3-beta-N- | SEQ ID NOS: 11353- |
| | acetylglucosaminyltransferase | 11355 |
| RGCC | Regulator of cell cycle | SEQ ID NO: 11356 |
| RGL4 | Ral guanine nucleotide dissociation | SEQ ID NOS: 11357- |
| | stimulator-like 4 | 11363 |
| RGMA | Repulsive guidance molecule family | SEQ ID NOS: 11364- |
| | member a | 11373 |
| RGMB | Repulsive guidance molecule family | SEQ ID NOS: 11374- |
| | member b | 11375 |
| RHOQ | Ras homolog family member Q | SEQ ID NOS: 11376- |
| | | 11380 |
| RIC3 | RIC3 acety lcholine receptor chaperone | SEQ ID NOS: 11381- |
| | | 11388 |
| RIMS1 | Regulating sy naptic membrane exocytosis 1 | SEQ ID NOS: 11393- |
| | | 11408 |
| RIPPLY1 | Ripply transcriptional repressor 1 | SEQ ID NOS: 11409- |
| | | 11410 |
| RLN1 | Relaxin 1 | SEQ ID NO: 11411 |
| RLN2 | Relaxin 2 | SEQ ID NOS: 11412- |
| | | 11413 |
| RLN3 | Relaxin 3 | SEQ ID NOS: 11414- |
| | | 11415 |
| RMDN1 | Regulator of microtubule dynamics 1 | SEQ ID NOS: 11416- |
| | | 11429 |
| RNASE1 | Ribonuclease, RNase A family, 1 | SEQ ID NOS: 11430- |
| | (pancreatic) | 11434 |
| RNASE10 | Ribonuclease, RNase A family, 10 (non- | SEQ ID NOS: 11435- |
| | active) | 11436 |
| RNASE11 | Ribonuclease, RNase A family, 11 (non- | SEQ ID NOS: 11437- |
| | active) | 11447 |
| RNASE12 | Ribonuclease, RNase A family, 12 (non- | SEQ ID NO: 11448 |
| | active) | |
| RNASE13 | Ribonuclease, RNase A family, 13 (non- | SEQ ID NO: 11449 |
| | active) | |
| RNASE2 | Ribonuclease, RNase A family, 2 (liver, | SEQ ID NO: 11450 |
| | eosinophil-derived neurotoxin) | |
| RNASE3 | Ribonuclease, RNase A family, 3 | SEQ ID NO: 11451 |
| RNASE4 | Ribonuclease, RNase A family, 4 | SEQ ID NOS: 11452- |
| | | 11454 |
| RNASE6 | Ribonuclease, RNase A family, k6 | SEQ ID NO: 11455 |
| RNASE7 | Ribonuclease, RNase A family, 7 | SEQ ID NOS: 11456- |
| | | 11457 |
| RNASE8 | Ribonuclease, RNase A family, 8 | SEQ ID NO: 11458 |
| RNASE9 | Ribonuclease, RNase A family, 9 (non- | SEQ ID NOS: 11459- |
| | active) | 11469 |
| RNASEH1 | Ribonuclease H1 | SEQ ID NOS: 11470- |
| | | 11472 |
| RNASET2 | Ribonuclease T2 | SEQ ID NOS: 11473- |
| | | 11480 |
| RNF146 | Ring finger protein 146 | SEQ ID NOS: 11481- |
| | | 11492 |
| RNF148 | Ring finger protein 148 | SEQ ID NOS: 11493- |
| | | 11494 |
| RNF150 | Ring finger protein 150 | SEQ ID NOS: 11495- |
| | | 11499 |
| RNF167 | Ring finger protein 167 | SEQ ID NOS: 11500- |
| | | 11510 |
| RNF220 | Ring finger protein 220 | SEQ ID NOS: 11511- |
| | | 11517 |
| RNF34 | Ring finger protein 34, E3 ubiquitin protein | SEQ ID NOS: 11518- |
| | ligase | 11525 |
| RNLS | Renalase, FAD-dependent amine oxidase | SEQ ID NOS: 11526- |
| | | 11528 |
| RNPEP | Arginyl aminopeptidase (aminopeptidase B) | SEQ ID NOS: 11529- |
| | | 11534 |
| ROR1 | Receptor tyrosine kinase-like orphan | SEQ ID NOS: 11535- |
| | receptor 1 | 11537 |
| RP11- | | SEQ ID NO: 4158 |
| 1236K1.1 | | |
| RP11-14J7.7 | | SEQ ID NOS: 674-675 |
| RP11- | | SEQ ID NOS: 85-87 |
| 196G11.1 | | |
| RP11- | | SEQ ID NO: 683 |
| 350O14.18 | | |
| RP11- | | SEQ ID NO: 8194 |
| 520P18.5 | | |
| RP11- | | SEQ ID NO: 89 |
| 812E19.9 | | |
| RP11- | | SEQ ID NO: 676 |
| 903H12.5 | | |
| RP11- | | SEQ ID NOS: 78-80 |
| 977G19.10 | | |
| RP4-576H24.4 | | SEQ ID NOS: 670-672 |
| RP4-608O15.3 | Complement factor H-related protein 2 | SEQ ID NO: 1649 |
| RPL3 | Ribosomal protein L3 | SEQ ID NOS: 11538- |
| | | 11543 |
| RPLP2 | Ribosomal protein, large, P2 | SEQ ID NOS: 11544- |
| | | 11546 |
| RPN2 | Ribophorin II | SEQ ID NOS: 11547- |
| | | 11553 |
| RPS27L | Ribosomal protein S27-like | SEQ ID NOS: 11554- |
| | | 11559 |
| RQCD1 | RCD1 required for cell differentiation1 | SEQ ID NOS: 3100- |
| | homolog (S. pombe) | 3106 |
| RS1 | Retinoschisin 1 | SEQ ID NO: 11560 |
| RSF1 | Remodeling and spacing factor 1 | SEQ ID NOS: 11561- |
| | | 11567 |
| RSPO1 | R-spondin 1 | SEQ ID NOS: 11568- |
| | | 11571 |
| RSPO2 | R-spondin 2 | SEQ ID NOS: 11572- |
| | | 11579 |
| RSPO3 | R-spondin 3 | SEQ ID NOS: 11580- |
| | | 11581 |
| RSPO4 | R-spondin 4 | SEQ ID NOS: 11582- |
| | | 11583 |
| RSPRY1 | Ring finger and SPRY domain containing 1 | SEQ ID NOS: 11584- |
| | | 11590 |
| RTBDN | Retbindin | SEQ ID NOS: 11591- |
| | | 11603 |
| RTN4RL1 | Reticulon 4 receptor-like 1 | SEQ ID NO: 11604 |
| RTN4RL2 | Reticulon 4 receptor-like 2 | SEQ ID NOS: 11605- |
| | | 11607 |
| SAA1 | Serum amyloid A1 | SEQ ID NOS: 11608- |
| | | 11610 |
| SAA2 | Serum amyloid A2 | SEQ ID NOS: 11611- |
| | | 11616 |
| SAA4 | Serum amyloid A4, constitutive | SEQ ID NO: 11617 |
| SAP30 | Sin3A-associated protein, 30 kDa | SEQ ID NO: 11618 |
| SAR1A | Secretion associated, Ras related GTPase | SEQ ID NOS: 11619- |
| | 1A | 11625 |
| SARAF | Store-operated calcium entry-associated | SEQ ID NOS: 11626- |
| | regulatory factor | 11636 |
| SARM1 | Sterile alpha and TIR motif containing 1 | SEQ ID NOS: 11637- |
| | | 11640 |
| SATB1 | SATB homeobox 1 | SEQ ID NOS: 11641- |
| | | 11653 |
| SAXO2 | Stabilizer of axonemal microtubules 2 | SEQ ID NOS: 11654- |
| | | 11658 |
| SBSN | Suprabasin | SEQ ID NOS: 11659- |
| | | 11661 |
| SBSPON | Somatomedin B and thrombospondin, type | SEQ ID NO: 11662 |
| | 1 domain containing | |
| SCARF1 | Scavenger receptor class F, member 1 | SEQ ID NOS: 11663- |
| | | 11667 |
| SCG2 | Secretogranin II | SEQ ID NOS: 11668- |
| | | 11670 |
| SCG3 | Secretogranin III | SEQ ID NOS: 11671- |
| | | 11673 |
| SCG5 | Secretogranin V | SEQ ID NOS: 11674- |
| | | 11678 |
| SCGB1A1 | Secretoglobin, family 1A, member 1 | SEQ ID NOS: 11679- |
| | (uteroglobin) | 11680 |
| SCGB1C1 | Secretoglobin, family 1C, member 1 | SEQ ID NO: 11681 |
| SCGB1C2 | Secretoglobin, family 1C, member 2 | SEQ ID NO: 11682 |
| SCGB1D1 | Secretoglobin, family 1D, member 1 | SEQ ID NO: 11683 |
| SCGB1D2 | Secretoglobin, family 1D, member 2 | SEQ ID NO: 11684 |
| SCGB1D4 | Secretoglobin, family 1D, member 4 | SEQ ID NO: 11685 |
| SCGB2A1 | Secretoglobin, family 2A, member 1 | SEQ ID NO: 11686 |
| SCGB2A2 | Secretoglobin, family 2A, member 2 | SEQ ID NOS: 11687- |
| | | 11688 |
| SCGB2B2 | Secretoglobin, family 2B, member 2 | SEQ ID NOS: 11689- |
| | | 11690 |
| SCGB3A1 | Secretoglobin, family 3A, member 1 | SEQ ID NO: 11691 |
| SCGB3A2 | Secretoglobin, family 3A, member 2 | SEQ ID NOS: 11692- |
| | | 11693 |
| SCN1B | Sodium channel, voltage gated, type I beta | SEQ ID NOS: 11694- |
| | subunit | 11699 |
| SCN3B | Sodium channel, voltage gated, type III beta | SEQ ID NOS: 11700- |
| | subunit | 11704 |
| SCPEP1 | Serine carboxypeptidase 1 | SEQ ID NOS: 11705- |
| | | 11712 |
| SCRG1 | Stimulator of chondrogenesis 1 | SEQ ID NOS: 11713- |
| | | 11714 |
| SCT | Secretin | SEQ ID NO: 11715 |
| SCUBE1 | Signal peptide, CUB domain, EGF-like 1 | SEQ ID NOS: 11716- |
| | | 11719 |
| SCUBE2 | Signal peptide, CUB domain, EGF-like 2 | SEQ ID NOS: 11720- |
| | | 11726 |
| SCUBE3 | Signal peptide, CUB domain, EGF-like 3 | SEQ ID NO: 11727 |
| SDC1 | Syndecan 1 | SEQ ID NOS: 11728- |
| | | 11732 |
| SDF2 | Stromal cell-derived factor 2 | SEQ ID NOS: 11733- |
| | | 11735 |
| SDF2L1 | Stromal cell-derived factor 2-like 1 | SEQ ID NO: 11736 |
| SDF4 | Stromal cell derived factor 4 | SEQ ID NOS: 11737- |
| | | 11740 |
| SDHAF2 | Succinate dehydrogenase complex assembly | SEQ ID NOS: 11741- |
| | factor 2 | 11748 |
| SDHAF4 | Succinate dehydrogenase complex assembly | SEQ ID NO: 11749 |
| | factor 4 | |
| SDHB | Succinate dehydrogenase complex, subunit | SEQ ID NOS: 11750- |
| | B, iron sulfur (Ip) | 11752 |
| SDHD | Succinate dehydrogenase complex, subunit | SEQ ID NOS: 11753- |
| | D, integral membrane protein | 11762 |
| SEC14L3 | SEC14-like lipid binding 3 | SEQ ID NOS: 11763- |
| | | 11769 |
| SEC16A | SEC16 homolog A, endoplasmic reticulum | SEQ ID NOS: 11770- |
| | export factor | 11776 |
| SEC16B | SEC16 homolog B, endoplasmic reticulum | SEQ ID NOS: 11777- |
| | export factor | 11780 |
| SEC22C | SEC22 homolog C, vesicle trafficking | SEQ ID NOS: 11781- |
| | protein | 11793 |
| SEC31A | SEC31 homolog A, COPII coat complex | SEQ ID NOS: 11794- |
| | component | 11823 |
| SECISBP2 | SECIS binding protein 2 | SEQ ID NOS: 11824- |
| | | 11828 |
| SECTM1 | Secreted and transmembrane 1 | SEQ ID NOS: 11829- |
| | | 11836 |
| SEL1L | Sel-1 suppressor of lin-12-like (C. elegans) | SEQ ID NOS: 11837- |
| | | 11839 |
| SELM | Selenoprotein M | SEQ ID NOS: 11847- |
| | | 11849 |
| SELO | Selenoprotein O | SEQ ID NOS: 11854- |
| | | 11855 |
| SEMA3A | Serna domain, immunoglobulin domain | SEQ ID NOS: 11862- |
| | (Ig), short basic domain, secreted, | 11866 |
| | (semaphorin) 3A | |
| SEMA3B | Serna domain, immunoglobulin domain | SEQ ID NOS: 11867- |
| | (Ig), short basic domain, secreted, | 11873 |
| | (semaphorin) 3B | |
| SEMA3C | Serna domain, immunoglobulin domain | SEQ ID NOS: 11874- |
| | (Ig), short basic domain, secreted, | 11878 |
| | (semaphorin) 3C | |
| SEMA3E | Serna domain, immunoglobulin domain | SEQ ID NOS: 11879- |
| | (Ig), short basic domain, secreted, | 11883 |
| | (semaphorin) 3E | |
| SEMA3F | Serna domain, immunoglobulin domain | SEQ ID NOS: 11884- |
| | (Ig), short basic domain, secreted, | 11890 |
| | (semaphorin) 3F | |
| SEMA3G | Serna domain, immunoglobulin domain | SEQ ID NOS: 11891- |
| | (Ig), short basic domain, secreted, | 11893 |
| | (semaphorin) 3G | |
| SEMA4A | Serna domain, immunoglobulin domain | SEQ ID NOS: 11894- |
| | (Ig), transmembrane domain (TM) and short | 11902 |
| | cytoplasmic domain, (semaphorin) 4A | |
| SEMA4B | Serna domain, immunoglobulin domain | SEQ ID NOS: 11903- |
| | (Ig), transmembrane domain (TM) and short | 11913 |
| | cytoplasmic domain, (semaphorin) 4B | |
| SEMA4C | Serna domain, immunoglobulin domain | SEQ ID NOS: 11914- |
| | (Ig), transmembrane domain (TM) and short | 11916 |
| | cytoplasmic domain, (semaphorin) 4C | |
| SEMA4D | Sema domain, immunoglobulin domain | SEQ ID NOS: 11917- |
| | (Ig), transmembrane domain (TM) and short | 11930 |
| | cytoplasmic domain, (semaphorin) 4D | |
| SEMA4F | Sema domain, immunoglobulin domain | SEQ ID NOS: 11931- |
| | (Ig), transmembrane domain (TM) and short | 11939 |
| | cytoplasmic domain, (semaphorin) 4F | |
| SEMA4G | Sema domain, immunoglobulin domain | SEQ ID NOS: 11940- |
| | (Ig), transmembrane domain (TM) and short | 11947 |
| | cytoplasmic domain, (semaphorin) 4G | |
| SEMA5A | Sema domain, seven thrombospondin | SEQ ID NOS: 11948- |
| | repeats (type 1 and type 1-like), | 11949 |
| | transmembrane domain (TM) and short | |
| | cytoplasmic domain, (semaphorin) 5A | |
| SEMA6A | Sema domain, transmembrane domain | SEQ ID NOS: 11950- |
| | (TM), and cytoplasmic domain, | 11957 |
| | (semaphorin) 6A | |
| SEMA6C | Sema domain, transmembrane domain | SEQ ID NOS: 11958- |
| | (TM), and cytoplasmic domain, | 11963 |
| | (semaphorin) 6C | |
| SEMA6D | Sema domain, transmembrane domain | SEQ ID NOS: 11964- |
| | (TM), and cytoplasmic domain, | 11977 |
| | (semaphorin) 6D | |
| SEMG1 | Semenogelin I | SEQ ID NO: 11978 |
| SEMG2 | Semenogelin II | SEQ ID NO: 11979 |
| SEPN1 | Selenoprotein N, 1 | SEQ ID NOS: 11850- |
| | | 11853 |
| SEPP1 | Selenoprotein P, plasma, 1 | SEQ ID NOS: 11856- |
| | | 11861 |
| SEPT15 | 15 kDa selenoprotein | SEQ ID NOS: 11840- |
| | | 11846 |
| SEPT9 | Septin 9 | SEQ ID NOS: 11980- |
| | | 12016 |
| SERPINA1 | Serpin peptidase inhibitor, clade A (alpha-1 | SEQ ID NOS: 12017- |
| | antiproteinase, antitrypsin), member 1 | 12033 |
| SERPINA10 | Serpin peptidase inhibitor, clade A (alpha-1 | SEQ ID NOS: 12034- |
| | anti proteinase, antitrypsin), member 10 | 12037 |
| SERPINA11 | Serpin peptidase inhibitor, clade A (alpha-1 | SEQ ID NO: 12038 |
| | antiproteinase, antitrypsin), member 11 | |
| SERPINA12 | Serpin peptidase inhibitor, clade A (alpha-1 | SEQ ID NOS: 12039- |
| | anti proteinase, antitrypsin), member 12 | 12040 |
| SERPINA3 | Serpin peptidase inhibitor, clade A (alpha-1 | SEQ ID NOS: 673- |
| | antiproteinase, antitrypsin), member 3 | 12047 |
| SERPINA4 | Serpin peptidase inhibitor, clade A (alpha-1 | SEQ ID NOS: 12048- |
| | antiproteinase, antitrypsin), member 4 | 12050 |
| SERPINA5 | Serpin peptidase inhibitor, clade A (alpha-1 | SEQ ID NOS: 12051- |
| | antiproteinase, antitrypsin), member 5 | 12062 |
| SERPINA6 | Serpin peptidase inhibitor, clade A (alpha-1 | SEQ ID NOS: 12063- |
| | antiproteinase, antitrypsin), member 6 | 12065 |
| SERPINA7 | Serpin peptidase inhibitor, clade A (alpha-1 | SEQ ID NOS: 12066- |
| | antiproteinase, antitrypsin), member 7 | 12067 |
| SERPINA9 | Serpin peptidase inhibitor, clade A (alpha-1 | SEQ ID NOS: 12068- |
| | antiproteinase, antitrypsin), member 9 | 12074 |
| SERPINB2 | Serpin peptidase inhibitor, clade B | SEQ ID NOS: 12075- |
| | (ovalbumin), member 2 | 12079 |
| SERPINC1 | Serpin peptidase inhibitor, clade C | SEQ ID NOS: 12080- |
| | (antithrombin), member 1 | 12081 |
| SERPIND1 | Serpin peptidase inhibitor, clade D (heparin | SEQ ID NOS: 12082- |
| | cofactor), member 1 | 12083 |
| SERPINE1 | Serpin peptidase inhibitor, clade E (nexin. | SEQ ID NO: 12084 |
| | plasminogen activator inhibitor type 1), | |
| | member 1 | |
| SERPINE2 | Serpin peptidase inhibitor, clade E (nexin, | SEQ ID NOS: 12085- |
| | plasminogen activator inhibitor type 1), | 12091 |
| | member 2 | |
| SERPINE3 | Serpin peptidase inhibitor, clade E (nexin, | SEQ ID NOS: 12092- |
| | plasminogen activator inhibitor type 1), | 12095 |
| | member 3 | |
| SERPINF1 | Serpin peptidase inhibitor, clade F (alpha-2 | SEQ ID NOS: 12096- |
| | antiplasmin, pigment epithelium derived | 12104 |
| | factor), member 1 | |
| SERPINF2 | Serpin peptidase inhibitor, clade F (alpha-2 | SEQ ID NOS: 12105- |
| | antiplasmin, pigment epithelium derived | 12109 |
| | factor), member 2 | |
| SERPING1 | Serpin peptidase inhibitor, clade G (C1 | SEQ ID NOS: 12110- |
| | inhibitor), member 1 | 12120 |
| SERPINH1 | Serpin peptidase inhibitor, clade H (heat | SEQ ID NOS: 12121- |
| | shock protein 47), member 1, (collagen | 12135 |
| | binding protein 1) | |
| SERPINI1 | Serpin peptidase inhibitor, clade I | SEQ ID NOS: 12136- |
| | (neuroserpin), member 1 | 12140 |
| SERPINI2 | Serpin peptidase inhibitor, clade I (pancpin), | SEQ ID NOS: 12141- |
| | member 2 | 12147 |
| SETD8 | SET domain containing (lysine | SEQ ID NOS: 7589- |
| | methyltransferase) 8 | 7592 |
| SEZ6L2 | Seizure related 6 homolog (mouse)-like 2 | SEQ ID NOS: 12148- |
| | | 12154 |
| SFRP1 | Secreted frizzled-related protein 1 | SEQ ID NOS: 12155- |
| | | 12156 |
| SFRP2 | Secreted frizzled-related protein 2 | SEQ ID NO: 12157 |
| SFRP4 | Secreted frizzled-related protein 4 | SEQ ID NOS: 12158- |
| | | 12159 |
| SFRP5 | Secreted frizzled-related protein 5 | SEQ ID NO: 12160 |
| SFTA2 | Surfactant associated 2 | SEQ ID NOS: 12161- |
| | | 12162 |
| SFTPA1 | Surfactant protein A1 | SEQ ID NOS: 12163- |
| | | 12167 |
| SFTPA2 | Surfactant protein A2 | SEQ ID NOS: 12168- |
| | | 12172 |
| SFTPB | Surfactant protein B | SEQ ID NOS: 12173- |
| | | 12177 |
| SFTPD | Surfactant protein D | SEQ ID NOS: 12178- |
| | | 12179 |
| SFXN5 | Sideroflexin 5 | SEQ ID NOS: 12180- |
| | | 12184 |
| SGCA | Sarcoglycan, alpha (50 kDa dystrophin- | SEQ ID NOS: 12185- |
| | associated glycoprotein) | 12192 |
| SGSH | N-sulfoglucosamine sulfohydrolase | SEQ ID NOS: 12193- |
| | | 12201 |
| SH3RF3 | SH3 domain containing ring finger 3 | SEQ ID NO: 12202 |
| SHBG | Sex hormone-binding globulin | SEQ ID NOS: 12203- |
| | | 12221 |
| SHE | Src homology 2 domain containing E | SEQ ID NOS: 12222- |
| | | 12224 |
| SHH | Sonic hedgehog | SEQ ID NOS: 12225- |
| | | 12228 |
| SHKBP1 | SH3KBP1 binding protein 1 | SEQ ID NOS: 12229- |
| | | 12244 |
| SIAE | Sialic acid acetylesterase | SEQ ID NOS: 12245- |
| | | 12247 |
| SIDT2 | SID1 transmembrane family, member 2 | SEQ ID NOS: 12248- |
| | | 12257 |
| SIGLEC10 | Sialic acid binding Ig-like lectin 10 | SEQ ID NOS: 12258- |
| | | 12266 |
| SIGLEC6 | Sialic acid binding Ig-like lectin 6 | SEQ ID NOS: 12267- |
| | | 12272 |
| SIGLEC7 | Sialic acid binding Ig-like lectin 7 | SEQ ID NOS: 12273- |
| | | 12277 |
| SIGLECL1 | SIGLEC family like 1 | SEQ ID NOS: 12278- |
| | | 12283 |
| SIGMAR1 | Sigma non-opioid intracellular receptor 1 | SEQ ID NOS: 12284- |
| | | 12287 |
| SIL1 | SIL1 nucleotide exchange factor | SEQ ID NOS: 12288- |
| | | 12296 |
| SIRPB1 | Signal-regulatory protein beta 1 | SEQ ID NOS: 12297- |
| | | 12309 |
| SIRPD | Signal-regulatory protein delta | SEQ ID NOS: 12310- |
| | | 12312 |
| SLAMF1 | Signaling lymphocytic activation molecule | SEQ ID NOS: 12313- |
| | family member 1 | 12315 |
| SLAMF7 | SLAM family member 7 | SEQ ID NOS: 12316- |
| | | 12324 |
| SLC10A3 | Solute carrier family 10, member 3 | SEQ ID NOS: 12325- |
| | | 12329 |
| SLC15A3 | Solute carrier family 15 (oligopeptide | SEQ ID NOS: 12330- |
| | transporter), member 3 | 12335 |
| SLC25A14 | Solute carrier family 25 (mitochondrial | SEQ ID NOS: 12336- |
| | carrier, brain), member 14 | 12342 |
| SLC25A25 | Solute carrier family 25 (mitochondrial | SEQ ID NOS: 12343- |
| | carrier; phosphate carrier), member 25 | 12349 |
| SLC2A5 | Solute carrier family 2 (facilitated | SEQ ID NOS: 12350- |
| | glucose/fructose transporter), member 5 | 12358 |
| SLC35E3 | Solute carrier family 35, member E3 | SEQ ID NOS: 12359- |
| | | 12360 |
| SLC39A10 | Solute carrier family 39 (zinc transporter), | SEQ ID NOS: 12361- |
| | member 10 | 12367 |
| SLC39A14 | Solute carrier family 39 (zinc transporter), | SEQ ID NOS: 12368- |
| | member 14 | 12378 |
| SLC39A4 | Solute carrier family 39 (zinc transporter), | SEQ ID NOS: 12379- |
| | member 4 | 12381 |
| SLC39A5 | Solute carrier family 39 (zinc transporter), | SEQ ID NOS: 12382- |
| | member 5 | 12388 |
| SLC3A1 | Solute carrier family 3 (amino acid | SEQ ID NOS: 12389- |
| | transporter heavy chain), member 1 | 12398 |
| SLC51A | Solute carrier family 51, alpha subunit | SEQ ID NOS: 12399- |
| | | 12403 |
| SLC52A2 | Solute carrier family 52 (riboflavin | SEQ ID NOS: 12404- |
| | transporter), member 2 | 12414 |
| SLC5A6 | Solute carrier family 5 | SEQ ID NOS: 12415- |
| | (sodium/multivitamin and iodide | 12425 |
| | cotransporter), member 6 | |
| SLC6A9 | Solute carrier family 6 (neurotransmitter | SEQ ID NOS: 12426- |
| | transporter, glycine), member 9 | 12433 |
| SLC8A1 | Solute carrier family 8 (sodium/calcium | SEQ ID NOS: 12434- |
| | exchanger), member 1 | 12445 |
| SLC8B1 | Solute carrier family 8 | SEQ ID NOS: 12446- |
| | (sodium/lithium/calcium exchanger), | 12456 |
| | member B1 | |
| SLC9A6 | Solute carrier family 9, subfamily A | SEQ ID NOS: 12457- |
| | (NHE6, cation proton antiporter 6), member | 12468 |
| | 6 | |
| SLCO1A2 | Solute carrier organic anion transporter | SEQ ID NOS: 12469- |
| | family, member 1A2 | 12481 |
| SLIT1 | Slit guidance ligand 1 | SEQ ID NOS: 12482- |
| | | 12485 |
| SLIT2 | Slit guidance ligand 2 | SEQ ID NOS: 12486- |
| | | 12494 |
| SLIT3 | Slit guidance ligand 3 | SEQ ID NOS: 12495- |
| | | 12497 |
| SLITRK3 | SLIT and NTRK-like family, member 3 | SEQ ID NOS: 12498- |
| | | 12500 |
| SLPI | Secretory leukocyte peptidase inhibitor | SEQ ID NO: 12501 |
| SLTM | SAFB-like, transcription modulator | SEQ ID NOS: 12502- |
| | | 12515 |
| SLURP1 | Secreted LY6/PLAUR domain containing 1 | SEQ ID NO: 12516 |
| SMARCA2 | SWI/SNF related, matrix associated, actin | SEQ ID NOS: 12517- |
| | dependent regulator of chromatin, subfamily | 12562 |
| | a, member 2 | |
| SMG6 | SMG6 nonsense mediated mRNA decay | SEQ ID NOS: 12563- |
| | factor | 12574 |
| SMIM7 | Small integral membrane protein 7 | SEQ ID NOS: 12575- |
| | | 12591 |
| SMOC1 | SPARC related modular calcium binding 1 | SEQ ID NOS: 12592- |
| | | 12593 |
| SMOC2 | SPARC related modular calcium binding 2 | SEQ ID NOS: 12594- |
| | | 12598 |
| SMPDL3A | Sphingomyelin phosphodiesterase, acid-like | SEQ ID NOS: 12599- |
| | 3A | 12600 |
| SMPDL3B | Sphingomyelin phosphodiesterase, acid-like | SEQ ID NOS: 12601- |
| | 3B | 12605 |
| SMR3A | Submaxillary gland androgen regulated | SEQ ID NO: 12606 |
| | protein 3A | |
| SMR3B | Submaxillary gland androgen regulated | SEQ ID NOS: 12607- |
| | protein 3B | 12609 |
| SNED1 | Sushi, nidogen and EGF-like domains 1 | SEQ ID NOS: 12610- |
| | | 12616 |
| SNTB1 | Syntrophin, beta 1 (dystrophin-associated | SEQ ID NOS: 12617- |
| | protein A1, 59 kDa, basic component 1) | 12619 |
| SNTB2 | Syntrophin, beta 2 (dystrophin-associated | SEQ ID NOS: 12620- |
| | protein A1, 59 kDa, basic component 2) | 12624 |
| SNX14 | Sorting nexin 14 | SEQ ID NOS: 12625- |
| | | 12636 |
| SOD3 | Superoxide dismutase 3, extracellular | SEQ ID NOS: 12637- |
| | | 12638 |
| SOST | Sclerostin | SEQ ID NO: 12639 |
| SOSTDC1 | Sclerostin domain containing 1 | SEQ ID NOS: 12640- |
| | | 12641 |
| SOWAHA | Sosondowah ankyrin repeat domain family | SEQ ID NO: 12642 |
| | member A | |
| SPACA3 | Sperm acrosome associated 3 | SEQ ID NOS: 12643- |
| | | 12645 |
| SPACA4 | Sperm acrosome associated 4 | SEQ ID NO: 12646 |
| SPACA5 | Sperm acrosome associated 5 | SEQ ID NOS: 12647- |
| | | 12648 |
| SPACA5B | Sperm acrosome associated 5B | SEQ ID NO: 12649 |
| SPACA7 | Sperm acrosome associated 7 | SEQ ID NOS: 12650- |
| | | 12653 |
| SPAG11A | Sperm associated antigen 11A | SEQ ID NOS: 12654- |
| | | 12662 |
| SPAG11B | Sperm associated antigen 11B | SEQ ID NOS: 12663- |
| | | 12671 |
| SPARC | Secreted protein, acidic, cysteine-rich | SEQ ID NOS: 12672- |
| | (osteonectin) | 12676 |
| SPARCL1 | SPARC-like 1 (hevin) | SEQ ID NOS: 12677- |
| | | 12686 |
| SPATA20 | Spermatogenesis associated 20 | SEQ ID NOS: 12687- |
| | | 12700 |
| SPESP1 | Sperm equatorial segment protein 1 | SEQ ID NO: 12701 |
| SPINK1 | Serine peptidase inhibitor, Kazal type 1 | SEQ ID NOS: 12702- |
| | | 12703 |
| SPINK13 | Serine peptidase inhibitor, Kazal type 13 | SEQ ID NOS: 12704- |
| | (putative) | 12706 |
| SPINK14 | Serine peptidase inhibitor, Kazal type 14 | SEQ ID NOS: 12707- |
| | (putative) | 12708 |
| SPINK2 | Serine peptidase inhibitor, Kazal type 2 | SEQ ID NOS: 12709- |
| | (acrosin-trypsin inhibitor) | 12714 |
| SPINK4 | Serine peptidase inhibitor, Kazal type 4 | SEQ ID NOS: 12715- |
| | | 12716 |
| SPINK5 | Serine peptidase inhibitor, Kazal type 5 | SEQ ID NOS: 12717- |
| | | 12722 |
| SPINK6 | Serine peptidase inhibitor, Kazal type 6 | SEQ ID NOS: 12723- |
| | | 12725 |
| SPINK7 | Serine peptidase inhibitor, Kazal type 7 | SEQ ID NOS: 12726- |
| | (putative) | 12727 |
| SPINK8 | Serine peptidase inhibitor, Kazal type 8 | SEQ ID NO: 12728 |
| | (putative) | |
| SPINK9 | Serine peptidase inhibitor, Kazal type 9 | SEQ ID NOS: 12729- |
| | | 12730 |
| SPINT1 | Serine peptidase inhibitor, Kunitz type 1 | SEQ ID NOS: 12731- |
| | | 12738 |
| SPINT2 | Serine peptidase inhibitor, Kunitz type, 2 | SEQ ID NOS: 12739- |
| | | 12746 |
| SPINT3 | Serine peptidase inhibitor, Kunitz type, 3 | SEQ ID NO: 12747 |
| SPINT4 | Serine peptidase inhibitor, Kunitz type 4 | SEQ ID NO: 12748 |
| SPOCK1 | Sparc/osteonectin, cwcv and kazal-like | SEQ ID NOS: 12749- |
| | domains proteoglycan (testican) 1 | 12752 |
| SPOCK2 | Sparc/osteonectin, cwcv and kazal-like | SEQ ID NOS: 12753- |
| | domains proteoglycan (testican) 2 | 12756 |
| SPOCK3 | Sparc/osteonectin, cwcv and kazal-like | SEQ ID NOS: 12757- |
| | domains proteoglycan (testican) 3 | 12782 |
| SPON1 | Spondin 1, extracellular matrix protein | SEQ ID NO: 12783 |
| SPON2 | Spondin 2, extracellular matrix protein | SEQ ID NOS: 12784- |
| | | 12793 |
| SPP1 | Secreted phosphoprotein 1 | SEQ ID NOS: 12794- |
| | | 12798 |
| SPP2 | Secreted phosphoprotein 2, 24 kDa | SEQ ID NOS: 12799- |
| | | 12801 |
| SPRN | Shadow of prion protein homolog | SEQ ID NO: 12802 |
| | (zebrafish) | |
| SPRYD3 | SPRY domain containing 3 | SEQ ID NOS: 12803- |
| | | 12806 |
| SPRYD4 | SPRY domain containing 4 | SEQ ID NO: 12807 |
| SPTY2D1-AS1 | SPTY2D1 antisense RNA 1 | SEQ ID NOS: 12808- |
| | | 12813 |
| SPX | Spexin hormone | SEQ ID NOS: 12814- |
| | | 12815 |
| SRGN | Serglycin | SEQ ID NO: 12816 |
| SRL | Sarealumenin | SEQ ID NOS: 12817- |
| | | 12819 |
| SRP14 | Signal recognition particle 14 kDa | SEQ ID NOS: 12820- |
| | (homologous Alu RNA binding protein) | 12823 |
| SRPX | Sushi-repeat containing protein, X-linked | SEQ ID NOS: 12824- |
| | | 12827 |
| SRPX2 | Sushi-repeat containing protein, X-linked 2 | SEQ ID NOS: 12828- |
| | | 12831 |
| SSC4D | Scavenger receptor cysteine rich family, 4 | SEQ ID NO: 12832 |
| | domains | |
| SSC5D | Scavenger receptor cysteine rich family, 5 | SEQ ID NOS: 12833- |
| | domains | 12836 |
| SSPO | SCO-spondin | SEQ ID NO: 12837 |
| SSR2 | Signal sequence receptor, beta (translocon- | SEQ ID NOS: 12838- |
| | associated protein beta) | 12847 |
| SST | Somatostatin | SEQ ID NO: 12848 |
| ST3GAL1 | ST3 beta-galactoside alpha-2,3- | SEQ ID NOS: 12849- |
| | sialyltransferase 1 | 12856 |
| ST3GAL4 | ST3 beta-galactoside alpha-2,3- | SEQ ID NOS: 12857- |
| | sialyltransferase 4 | 12872 |
| ST6GAL1 | ST6 beta-galactosamide alpha-2,6- | SEQ ID NOS: 12873- |
| | sialyltranferase 1 | 12888 |
| ST6GALNAC2 | ST6 (alpha-N-acetyl-neuraminyl-2,3-beta- | SEQ ID NOS: 12889- |
| | galactosyl-1,3)-N-acetylgalactosaminide | 12893 |
| | alpha-2,6-sialyltransferase 2 | |
| ST6GALNAC5 | ST6 (alpha-N-acetyl-neuraminyl-2,3-beta- | SEQ ID NOS: 12894- |
| | galactosyl-1,3)-N-acetylgalactosaminide | 12895 |
| | alpha-2,6-sialyltransferase 5 | |
| ST6GALNAC6 | ST6 (alpha-N-acetyl-neuraminyl-2,3-beta- | SEQ ID NOS: 12896- |
| | galactosyl-1,3)-N-acetylgalactosaminide | 12903 |
| | alpha-2,6-sialyltransferase 6 | |
| ST8SIA2 | ST8 alpha-N-acetyl-neuraminide alpha-2,8- | SEQ ID NOS: 12904- |
| | sialyltransferase 2 | 12906 |
| ST8SIA4 | ST8 alpha-N-acetyl-neuraminide alpha-2,8- | SEQ ID NOS: 12907- |
| | sialyltransferase 4 | 12909 |
| ST8SIA6 | ST8 alpha-N-acetyl-neuraminide alpha-2,8- | SEQ ID NOS: 12910- |
| | sialyltransferase 6 | 12911 |
| STARD7 | StAR-related lipid transfer (START) | SEQ ID NOS: 12912- |
| | domain containing 7 | 12913 |
| STATH | Statherin | SEQ ID NOS: 12914- |
| | | 12916 |
| STC1 | Stanniocalcin 1 | SEQ ID NOS: 12917- |
| | | 12918 |
| STC2 | Stanniocalcin 2 | SEQ ID NOS: 12919- |
| | | 12921 |
| STMND1 | Stathmin domain containing 1 | SEQ ID NOS: 12922- |
| | | 12923 |
| STOML2 | Stomatin (EPB72)-like 2 | SEQ ID NOS: 12926- |
| | | 12929 |
| STOX1 | Storkhead box 1 | SEQ ID NOS: 12930- |
| | | 12934 |
| STRC | Stereocilin | SEQ ID NOS: 12935- |
| | | 12940 |
| SUCLG1 | Succinate-CoA ligase, alpha subunit | SEQ ID NOS: 12941- |
| | | 12942 |
| SUDS3 | SDS3 homolog, SIN3A corepressor | SEQ ID NO: 12943 |
| | complex component | |
| SULF1 | Sulfatase 1 | SEQ ID NOS: 12944- |
| | | 12954 |
| SULF2 | Sulfatase 2 | SEQ ID NOS: 12955- |
| | | 12959 |
| SUMF1 | Sulfatase modifying factor 1 | SEQ ID NOS: 12960- |
| | | 12964 |
| SUMF2 | Sulfatase modifying factor 2 | SEQ ID NOS: 12965- |
| | | 12978 |
| SUSD1 | Sushi domain containing 1 | SEQ ID NOS: 12979- |
| | | 12984 |
| SUSD5 | Sushi domain containing 5 | SEQ ID NOS: 12985- |
| | | 12986 |
| SVEP1 | Sushi, von Willebrand factor type A, EGF | SEQ ID NOS: 12987- |
| | and pentraxin domain containing 1 | 12989 |
| SWSAP1 | SWIM-type zinc finger 7 associated protein | SEQ ID NO: 12990 |
| | 1 | |
| SYAP1 | Synapse associated protein 1 | SEQ ID NO: 12991 |
| SYCN | Syncollin | SEQ ID NO: 12992 |
| TAC1 | Tachykinin, precursor 1 | SEQ ID NOS: 12993- |
| | | 12995 |
| TAC3 | Tachykinin 3 | SEQ ID NOS: 12996- |
| | | 13005 |
| TAC4 | Tachykinin 4 (hemokinin) | SEQ ID NOS: 13006- |
| | | 13011 |
| TAGLN2 | Transgelin 2 | SEQ ID NOS: 13012- |
| | | 13015 |
| TAPBP | TAP binding protein (tapasin) | SEQ ID NOS: 13016- |
| | | 13021 |
| TAPBPL | TAP binding protein-like | SEQ ID NOS: 13022- |
| | | 13023 |
| TBL2 | Transducin (beta)-like 2 | SEQ ID NOS: 13024- |
| | | 13036 |
| TBX10 | T-box 10 | SEQ ID NO: 13037 |
| TCF12 | Transcription factor 12 | SEQ ID NOS: 13038- |
| | | 13051 |
| TCN1 | Transcobalamin I (vitamin B12 binding | SEQ ID NO: 13052 |
| | protein, R binder family) | |
| TCN2 | Transcobalamin II | SEQ ID NOS: 13053- |
| | | 13056 |
| TCTN1 | Tectonic family member 1 | SEQ ID NOS: 13057- |
| | | 13075 |
| TCTN3 | Tectonic family member 3 | SEQ ID NOS: 13076- |
| | | 13080 |
| TDP2 | Tyrosyl-DNA phosphodiesterase 2 | SEQ ID NOS: 13081- |
| | | 13082 |
| TEK | TEK tyrosine kinase, endothelial | SEQ ID NOS: 13097- |
| | | 13101 |
| TEPP | Testis, prostate and placenta expressed | SEQ ID NOS: 13102- |
| | | 13103 |
| TEX101 | Testis expressed 101 | SEQ ID NOS: 13104- |
| | | 13105 |
| TEX264 | Testis expressed 264 | SEQ ID NOS: 13106- |
| | | 13117 |
| TF | Transferrin | SEQ ID NOS: 13121- |
| | | 13127 |
| TFAM | Transcription factor A, mitochondrial | SEQ ID NOS: 13128- |
| | | 13130 |
| TFF1 | Trefoil factor 1 | SEQ ID NO: 13131 |
| TFF2 | Trefoil factor 2 | SEQ ID NO: 13132 |
| TFF3 | Trefoil factor 3 (intestinal) | SEQ ID NOS: 13133- |
| | | 13135 |
| TFPI | Tissue factor pathway inhibitor (lipoprotein- | SEQ ID NOS: 13136- |
| | associated coagulation inhibitor) | 13145 |
| TFPI2 | Tissue factor pathway inhibitor 2 | SEQ ID NOS: 13146- |
| | | 13147 |
| TG | Thyroglobulin | SEQ ID NOS: 13148- |
| | | 13157 |
| TGFB1 | Transforming growth factor, beta 1 | SEQ ID NOS: 13158- |
| | | 13159 |
| TGFB2 | Transforming growth factor, beta 2 | SEQ ID NOS: 13160- |
| | | 13161 |
| TGFB3 | Transforming growth factor, beta 3 | SEQ ID NOS: 13162- |
| | | 13163 |
| TGFBI | Transforming growth factor, beta-induced, | SEQ ID NOS: 13164- |
| | 68 kDa | 13171 |
| TGFBR1 | Transforming growth factor, beta receptor 1 | SEQ ID NOS: 13172- |
| | | 13181 |
| TGFBR3 | Transforming growth factor, beta receptor | SEQ ID NOS: 13182- |
| | III | 13188 |
| THBS1 | Thrombospondin 1 | SEQ ID NOS: 13189- |
| | | 13190 |
| THBS2 | Thrombospondin 2 | SEQ ID NOS: 13191- |
| | | 13193 |
| THBS3 | Thrombospondin 3 | SEQ ID NOS: 13194- |
| | | 13198 |
| THBS4 | Thrombospondin 4 | SEQ ID NOS: 13199- |
| | | 13200 |
| THOC3 | THO complex 3 | SEQ ID NOS: 13201- |
| | | 13210 |
| THPO | Thrombopoietin | SEQ ID NOS: 13211- |
| | | 13216 |
| THSD4 | Thrombospondin, type I, domain containing | SEQ ID NOS: 13217- |
| | 4 | 13220 |
| THY1 | Thy-1 cell surface antigen | SEQ ID NOS: 13221- |
| | | 13226 |
| TIE1 | Tyrosine kinase with immunoglobulin-like | SEQ ID NOS: 13227- |
| | and EGF-like domains 1 | 13228 |
| TIMMDC1 | Translocase of inner mitochondrial | SEQ ID NOS: 13229- |
| | membrane domain containing 1 | 13236 |
| TIMP1 | TIMP metallopeptidase inhibitor 1 | SEQ ID NOS: 13237- |
| | | 13241 |
| TIMP2 | TIMP metallopeptidase inhibitor 2 | SEQ ID NOS: 13242- |
| | | 13246 |
| TIMP3 | TIMP metallopeptidase inhibitor 3 | SEQ ID NO: 13247 |
| TIMP4 | TIMP metallopeptidase inhibitor 4 | SEQ ID NO: 13248 |
| TINAGL1 | Tubulointerstitial nephritis antigen-like 1 | SEQ ID NOS: 13249- |
| | | 13251 |
| TINF2 | TERF1 (TRF1)-interacting nuclear factor 2 | SEQ ID NOS: 13252- |
| | | 13261 |
| TLL2 | Tolloid-like 2 | SEQ ID NO: 13262 |
| TLR1 | Toll-like receptor 1 | SEQ ID NOS: 13263- |
| | | 13268 |
| TLR3 | Toll-like receptor 3 | SEQ ID NOS: 13269- |
| | | 13271 |
| TM2D2 | TM2 domain containing 2 | SEQ ID NOS: 13272- |
| | | 13277 |
| TM2D3 | TM2 domain containing 3 | SEQ ID NOS: 13278- |
| | | 13285 |
| TM7SF3 | Transmembrane 7 superfamily member 3 | SEQ ID NOS: 13286- |
| | | 13300 |
| TM9SF1 | Transmembrane 9 superfamily member 1 | SEQ ID NOS: 13301- |
| | | 13311 |
| TMCO6 | Transmembrane and coiled-coil domains 6 | SEQ ID NOS: 13312- |
| | | 13319 |
| TMED1 | Transmembrane p24 trafficking protein 1 | SEQ ID NOS: 13320- |
| | | 13326 |
| TMED2 | Transmembrane p24 trafficking protein 2 | SEQ ID NOS: 13327- |
| | | 13329 |
| TMED3 | Transmembrane p24 trafficking protein 3 | SEQ ID NOS: 13330- |
| | | 13333 |
| TMED4 | Transmembrane p24 trafficking protein 4 | SEQ ID NOS: 13334- |
| | | 13336 |
| TMED5 | Transmembrane p24 trafficking protein 5 | SEQ ID NOS: 13337- |
| | | 13340 |
| TMED7 | Transmembrane p24 trafficking protein 7 | SEQ ID NOS: 13341- |
| | | 13342 |
| TMED7- | TMED7-TICAM2 readthrough | SEQ ID NOS: 13343- |
| TICAM2 | | 13344 |
| TMEM108 | Transmembrane protein 108 | SEQ ID NOS: 13345- |
| | | 13353 |
| TMEM116 | Transmembrane protein 116 | SEQ ID NOS: 13354- |
| | | 13365 |
| TMEM119 | Transmembrane protein 119 | SEQ ID NOS: 13366- |
| | | 13369 |
| TMEM155 | Transmembrane protein 155 | SEQ ID NOS: 13370- |
| | | 13373 |
| TMEM168 | Transmembrane protein 168 | SEQ ID NOS: 13374- |
| | | 13379 |
| TMEM178A | Transmembrane protein 178A | SEQ ID NOS: 13380- |
| | | 13381 |
| TMEM179 | Transmembrane protein 179 | SEQ ID NOS: 13382- |
| | | 13387 |
| TMEM196 | Transmembrane protein 196 | SEQ ID NOS: 13388- |
| | | 13392 |
| TMEM199 | Transmembrane protein 199 | SEQ ID NOS: 13393- |
| | | 13396 |
| TMEM205 | Transmembrane protein 205 | SEQ ID NOS: 13397- |
| | | 13410 |
| TMEM213 | Transmembrane protein 213 | SEQ ID NOS: 13411- |
| | | 13414 |
| TMEM25 | Transmembrane protein 25 | SEQ ID NOS: 13415- |
| | | 13431 |
| TMEM30C | Transmembrane protein 30C | SEQ ID NO: 13432 |
| TMEM38B | Transmembrane protein 38B | SEQ ID NOS: 13433- |
| | | 13437 |
| TMEM44 | Transmembrane protein 44 | SEQ ID NOS: 13438- |
| | | 13447 |
| TMEM52 | Transmembrane protein 52 | SEQ ID NOS: 13448- |
| | | 13452 |
| TMEM52B | Transmembrane protein 52B | SEQ ID NOS: 13453- |
| | | 13455 |
| TMEM59 | Transmembrane protein 59 | SEQ ID NOS: 13456- |
| | | 13463 |
| TMEM67 | Transmembrane protein 67 | SEQ ID NOS: 13464- |
| | | 13475 |
| TMEM70 | Transmembrane protein 70 | SEQ ID NOS: 13476- |
| | | 13478 |
| TMEM87A | Transmembrane protein 87A | SEQ ID NOS: 13479- |
| | | 13488 |
| TMEM94 | Transmembrane protein 94 | SEQ ID NOS: 13489- |
| | | 13504 |
| TMEM95 | Transmembrane protein 95 | SEQ ID NOS: 13505- |
| | | 13507 |
| TMIGD1 | Transmembrane and immunoglobulin | SEQ ID NOS: 13508- |
| | domain containing 1 | 13509 |
| TMPRSS12 | Transmembrane (C-terminal) protease, | SEQ ID NOS: 13510- |
| | serine 12 | 13511 |
| TMPRSS5 | Transmembrane protease, serine 5 | SEQ ID NOS: 13512- |
| | | 13523 |
| TMUB1 | Transmembrane and ubiquitin-like domain | SEQ ID NOS: 13524- |
| | containing 1 | 13530 |
| TMX2 | Thioredoxin-related transmembrane protein | SEQ ID NOS: 13531- |
| | 2 | 13538 |
| TMX3 | Thioredoxin-related transmembrane protein | SEQ ID NOS: 13539- |
| | 3 | 13546 |
| TNC | Tenascin C | SEQ ID NOS: 13547- |
| | | 13555 |
| TNFAIP6 | Tumor necrosis factor, alpha-induced | SEQ ID NO: 13556 |
| | protein 6 | |
| TNFRSF11A | Tumor necrosis factor receptor superfamily, | SEQ ID NOS: 13557- |
| | member 11a, NFKB activator | 13561 |
| TNFRSF11B | Tumor necrosis factor receptor superfamily, | SEQ ID NOS: 13562- |
| | member 11b | 13563 |
| TNFRSF12A | Tumor necrosis factor receptor superfamily, | SEQ ID NOS: 13564- |
| | member 12A | 13569 |
| TNFRSF14 | Tumor necrosis factor receptor superfamily, | SEQ ID NOS: 13570- |
| | member 14 | 13576 |
| TNFRSF18 | Tumor necrosis factor receptor superfamily, | SEQ ID NOS: 13577- |
| | member 18 | 13580 |
| TNFRSF1A | Tumor necrosis factor receptor superfamily, | SEQ ID NOS: 13581- |
| | member 1A | 13589 |
| TNFRSF1B | Tumor necrosis factor receptor superfamily, | SEQ ID NOS: 13590- |
| | member 1B | 13591 |
| TNFRSF25 | Tumor necrosis factor receptor superfamily, | SEQ ID NOS: 13592- |
| | member 25 | 13603 |
| TNFRSF6B | Tumor necrosis factor receptor superfamily, | SEQ ID NO: 13604 |
| | member 6b, decoy | |
| TNFSF11 | Tumor necrosis factor (ligand) superfamily, | SEQ ID NOS: 13605- |
| | member 11 | 13609 |
| TNFSF12 | Tumor necrosis factor (ligand) superfamily, | SEQ ID NOS: 13610- |
| | member 12 | 13611 |
| TNFSF12- | TNFSF12-TNFSF13 readthrough | SEQ ID NO: 13612 |
| TNFSF13 | | |
| TNFSF15 | Tumor necrosis factor (ligand) superfamily, | SEQ ID NOS: 13613- |
| | member 15 | 13614 |
| TNN | Tenascin N | SEQ ID NOS: 13615- |
| | | 13617 |
| TNR | Tenascin R | SEQ ID NOS: 13618- |
| | | 13620 |
| TNXB | Tenascin XB | SEQ ID NOS: 13621- |
| | | 13627 |
| TOMM7 | Translocase of outer mitochondrial | SEQ ID NOS: 13634- |
| | membrane 7 homolog (yeast) | 13637 |
| TOP1MT | Topoisomerase (DNA) I, mitochondrial | SEQ ID NOS: 13638- |
| | | 13652 |
| TOR1A | Torsin family 1, member A (torsin A) | SEQ ID NO: 13653 |
| TOR1B | Torsin family 1, member B (torsin B) | SEQ ID NOS: 13654- |
| | | 13655 |
| TOR2A | Torsin family 2, member A | SEQ ID NOS: 13656- |
| | | 13662 |
| TOR3A | Torsin family 3, member A | SEQ ID NOS: 13663- |
| | | 13667 |
| TPD52 | Tumor protein D52 | SEQ ID NOS: 13668- |
| | | 13680 |
| TPO | Thyroid peroxidase | SEQ ID NOS: 13681- |
| | | 13691 |
| TPP1 | Tripeptidyl peptidase I | SEQ ID NOS: 13692- |
| | | 13709 |
| TPSAB1 | Tryptase alpha/beta 1 | SEQ ID NOS: 13710- |
| | | 13712 |
| TPSB2 | Tryptase beta 2 (gene/pseudogene) | SEQ ID NOS: 13713- |
| | | 13715 |
| TPSD1 | Tryptase delta 1 | SEQ ID NOS: 13716- |
| | | 13717 |
| TPST1 | Tyrosylprotein sulfotransferase 1 | SEQ ID NOS: 13718- |
| | | 13720 |
| TPST2 | Tyrosylprotein sulfotransferase 2 | SEQ ID NOS: 13721- |
| | | 13729 |
| TRABD2A | TraB domain containing 2A | SEQ ID NOS: 13730- |
| | | 13732 |
| TRABD2B | TraB domain containing 2B | SEQ ID NO: 13733 |
| TREH | Trehalase (brush-border membrane | SEQ ID NOS: 13734- |
| | glycoprotein) | 13736 |
| TREM1 | Triggering receptor expressed on myeloid | SEQ ID NOS: 13737- |
| | cells 1 | 13740 |
| TREM2 | Triggering receptor expressed on myeloid | SEQ ID NOS: 13741- |
| | cells 2 | 13743 |
| TRH | Thyrotropin-releasing hormone | SEQ ID NOS: 13744- |
| | | 13745 |
| TRIM24 | Tripartite motif containing 24 | SEQ ID NOS: 13746- |
| | | 13747 |
| TRIM28 | Tripartite motif containing 28 | SEQ ID NOS: 13748- |
| | | 13753 |
| TRIO | Trio Rho guanine nucleotide exchange | SEQ ID NOS: 13754- |
| | factor | 13760 |
| TRNP1 | TMF1-regulated nuclear protein 1 | SEQ ID NOS: 13761- |
| | | 13762 |
| TSC22D4 | TSC22 domain family, member 4 | SEQ ID NOS: 13763- |
| | | 13766 |
| TSHB | Thyroid stimulating hormone, beta | SEQ ID NOS: 13767- |
| | | 13768 |
| TSHR | Thyroid stimulating hormone receptor | SEQ ID NOS: 13769- |
| | | 13776 |
| TSKU | Tsukushi, small leucine rich proteoglycan | SEQ ID NOS: 13777- |
| | | 13781 |
| TSLP | Thymic stromal lymphopoietin | SEQ ID NOS: 13782- |
| | | 13784 |
| TSPAN3 | Tetraspanin 3 | SEQ ID NOS: 13785- |
| | | 13790 |
| TSPAN31 | Tetraspanin 31 | SEQ ID NOS: 13791- |
| | | 13797 |
| TSPEAR | Thrombospondin-type laminin G domain | SEQ ID NOS: 13798- |
| | and EAR repeats | 13801 |
| TTC13 | Tetratricopeptide repeat domain 13 | SEQ ID NOS: 13802- |
| | | 13808 |
| TTC19 | Tetratricopeptide repeat domain 19 | SEQ ID NOS: 13809- |
| | | 13814 |
| TTC9B | Tetratricopeptide repeat domain 9B | SEQ ID NO: 13815 |
| TTLL11 | Tubulin tyrosine ligase-like family member | SEQ ID NOS: 13816- |
| | 11 | 13820 |
| TTR | Transthyretin | SEQ ID NOS: 13821- |
| | | 13823 |
| TWSG1 | Twisted gastrulation BMP signaling | SEQ ID NOS: 13824- |
| | modulator 1 | 13826 |
| TXNDC12 | Thioredoxin domain containing 12 | SEQ ID NOS: 13827- |
| | (endoplasmic reticulum) | 13829 |
| TXNDC15 | Thioredoxin domain containing 15 | SEQ ID NOS: 13830- |
| | | 13836 |
| TXNDC5 | Thioredoxin domain containing 5 | SEQ ID NOS: 13837- |
| | (endoplasmic reticulum) | 13838 |
| TXNRD2 | Thioredoxin reductase 2 | SEQ ID NOS: 13839- |
| | | 13851 |
| TYRP1 | Tyrosinase-related protein 1 | SEQ ID NOS: 13852- |
| | | 13854 |
| UBAC2 | UBA domain containing 2 | SEQ ID NOS: 13855- |
| | | 13859 |
| UBALD1 | UBA-like domain containing 1 | SEQ ID NOS: 13860- |
| | | 13868 |
| UBAP2 | Ubiquitin associated protein 2 | SEQ ID NOS: 13869- |
| | | 13875 |
| UBXN8 | UBX domain protein 8 | SEQ ID NOS: 13876- |
| | | 13882 |
| UCMA | Upper zone of growth plate and cartilage | SEQ ID NOS: 13883- |
| | matrix associated | 13884 |
| UCN | Urocortin | SEQ ID NO: 13885 |
| UCN2 | Urocortin 2 | SEQ ID NO: 13886 |
| UCN3 | Urocortin 3 | SEQ ID NO: 13887 |
| UGGT2 | UDP-glucose glycoprotein | SEQ ID NOS: 13888- |
| | glucosyltransferase 2 | 13893 |
| UGT1A10 | UDP glucuronosyltransferase 1 family, | SEQ ID NOS: 13894- |
| | polypeptide A10 | 13895 |
| UGT2A1 | UDP glucuronosyltransferase 2 family, | SEQ ID NOS: 13896- |
| | polypeptide A1, complex locus | 13900 |
| UGT2B11 | UDP glucuronosyltransferase 2 family, | SEQ ID NO: 13901 |
| | polypeptide B11 | |
| UGT2B28 | UDP glucuronosyltransferase 2 family, | SEQ ID NOS: 13902- |
| | polypeptide B28 | 13903 |
| UGT2B4 | UDP glucuronosyltransferase 2 family, | SEQ ID NOS: 13904- |
| | polypeptide B4 | 13907 |
| UGT2B7 | UDP glucuronosyltransferase 2 family, | SEQ ID NOS: 13908- |
| | polypeptide B7 | 13911 |
| UGT3A1 | UDP glycosyltransferase 3 family, | SEQ ID NOS: 13912- |
| | polypeptide A1 | 13917 |
| UGT3A2 | UDP glycosyltransferase 3 family, | SEQ ID NOS: 13918- |
| | polypeptide A2 | 13921 |
| UGT8 | UDP glycosyltransferase 8 | SEQ ID NOS: 13922- |
| | | 13924 |
| ULBP3 | UL16 binding protein 3 | SEQ ID NOS: 13925- |
| | | 13926 |
| UMOD | Uromodulin | SEQ ID NOS: 13927- |
| | | 13938 |
| UNC5C | Unc-5 netrin receptor C | SEQ ID NOS: 13939- |
| | | 13943 |
| UPK3B | Uroplakin 3B | SEQ ID NOS: 13944- |
| | | 13946 |
| USP11 | Ubiquitin specific peptidase 11 | SEQ ID NOS: 13947- |
| | | 13950 |
| USP14 | Ubiquitin specific peptidase 14 (tRNA- | SEQ ID NOS: 13951- |
| | guanine transglycosylase) | 13957 |
| USP3 | Ubiquitin specific peptidase 3 | SEQ ID NOS: 13958- |
| | | 13973 |
| UTS2 | Urotensin 2 | SEQ ID NOS: 13984- |
| | | 13986 |
| UTS2B | Urotensin 2B | SEQ ID NOS: 13987- |
| | | 13992 |
| UTY | Ubiquitously transcribed tetratricopeptide | SEQ ID NOS: 13993- |
| | repeat containing, Y-linked | 14005 |
| UXS1 | UDP-glucuronate decarboxylase 1 | SEQ ID NOS: 14006- |
| | | 14013 |
| VASH1 | Vasohibin 1 | SEQ ID NOS: 14014- |
| | | 14016 |
| VCAN | Versican | SEQ ID NOS: 14017- |
| | | 14023 |
| VEGFA | Vascular endothelial growth factor A | SEQ ID NOS: 14024- |
| | | 14049 |
| VEGFB | Vascular endothelial growth factor B | SEQ ID NOS: 14050- |
| | | 14052 |
| VEGFC | Vascular endothelial growth factor C | SEQ ID NO: 14053 |
| VGF | VGF nerve growth factor inducible | SEQ ID NOS: 14055- |
| | | 14057 |
| VIP | Vasoactive intestinal peptide | SEQ ID NOS: 14058- |
| | | 14060 |
| VIPR2 | Vasoactive intestinal peptide receptor 2 | SEQ ID NOS: 14061- |
| | | 14064 |
| VIT | Vitrin | SEQ ID NOS: 14065- |
| | | 14072 |
| VKORC1 | Vitamin K epoxide reductase complex, | SEQ ID NOS: 14073- |
| | subunit 1 | 14080 |
| VLDLR | Very low density lipoprotein receptor | SEQ ID NOS: 14081- |
| | | 14083 |
| VMO1 | Vitelline membrane outer layer 1 homolog | SEQ ID NOS: 14084- |
| | (chicken) | 14087 |
| VNN1 | Vanin 1 | SEQ ID NO: 14088 |
| VNN2 | Vanin 2 | SEQ ID NOS: 14089- |
| | | 14102 |
| VNN3 | Vanin 3 | SEQ ID NOS: 14103- |
| | | 14114 |
| VOPP1 | Vesicular, overexpressed in cancer, | SEQ ID NOS: 14115- |
| | prosurvival protein 1 | 14127 |
| VPREB1 | Pre-B lymphocyte 1 | SEQ ID NOS: 14128- |
| | | 14129 |
| VPREB3 | Pre-B lymphocyte 3 | SEQ ID NOS: 14130- |
| | | 14131 |
| VPS37B | Vacuolar protein sorting 37 homolog B | SEQ ID NOS: 14132- |
| | (S. cerevisiae) | 14134 |
| VPS51 | Vacuolar protein sorting 51 homolog | SEQ ID NOS: 14135- |
| | (S. cerevisiae) | 14146 |
| VSIG1 | V-set and immunoglobulin domain | SEQ ID NOS: 14147- |
| | containing 1 | 14149 |
| VSIG10 | V-set and immunoglobulin domain | SEQ ID NOS: 14150- |
| | containing 10 | 14151 |
| VSTM1 | V-set and transmembrane domain | SEQ ID NOS: 14152- |
| | containing 1 | 14158 |
| VSTM2A | V-set and transmembrane domain | SEQ ID NOS: 14159- |
| | containing 2A | 14162 |
| VSTM2B | V-set and transmembrane domain | SEQ ID NO: 14163 |
| | containing 2B | |
| VSTM2L | V-set and transmembrane domain | SEQ ID NOS: 14164- |
| | containing 2 like | 14166 |
| VSTM4 | V-set and transmembrane domain | SEQ ID NOS: 14167- |
| | containing 4 | 14168 |
| VTN | Vitronectin | SEQ ID NOS: 14169- |
| | | 14170 |
| VWA1 | Von Willebrand factor A domain containing | SEQ ID NOS: 14171- |
| | 1 | 14174 |
| VWA2 | Von Willebrand factor A domain containing | SEQ ID NOS: 14175- |
| | 2 | 14176 |
| VWA5B2 | Von Willebrand factor A domain containing | SEQ ID NOS: 14177- |
| | 5B2 | 14178 |
| VWA7 | Von Willebrand factor A domain containing | SEQ ID NO: 14179 |
| | 7 | |
| VWC2 | Von Willebrand factor C domain containing | SEQ ID NO: 14180 |
| | 2 | |
| VWC2L | Von Willebrand factor C domain containing | SEQ ID NOS: 14181- |
| | protein 2-like | 14182 |
| VWCE | Von Willebrand factor C and EGF domains | SEQ ID NOS: 14183- |
| | | 14187 |
| VWDE | Von Willebrand factor D and EGF domains | SEQ ID NOS: 14188- |
| | | 14193 |
| VWF | Von Willebrand factor | SEQ ID NOS: 14194- |
| | | 14196 |
| WDR25 | WD repeat domain 25 | SEQ ID NOS: 14197- |
| | | 14203 |
| WDR81 | WD repeat domain 81 | SEQ ID NOS: 14204- |
| | | 14213 |
| WDR90 | WD repeat domain 90 | SEQ ID NOS: 14214- |
| | | 14221 |
| WFDC1 | WAP four-disulfide core domain 1 | SEQ ID NOS: 14222- |
| | | 14224 |
| WFDC10A | WAP four-disulfide core domain 10A | SEQ ID NO: 14225 |
| WFDC10B | WAP four-disulfide core domain 10B | SEQ ID NOS: 14226- |
| | | 14227 |
| WFDC11 | WAP four-disulfide core domain 11 | SEQ ID NOS: 14228- |
| | | 14230 |
| WFDC12 | WAP four-disulfide core domain 12 | SEQ ID NO: 14231 |
| WFDC13 | WAP four-disulfide core domain 13 | SEQ ID NO: 14232 |
| WFDC2 | WAP four-disulfide core domain 2 | SEQ ID NOS: 14233- |
| | | 14237 |
| WFDC3 | WAP four-disulfide core domain 3 | SEQ ID NOS: 14238- |
| | | 14241 |
| WFDC5 | WAP four-disulfide core domain 5 | SEQ ID NOS: 14242- |
| | | 14243 |
| WFDC6 | WAP four-disulfide core domain 6 | SEQ ID NOS: 14244- |
| | | 14245 |
| WFDC8 | WAP four-disulfide core domain 8 | SEQ ID NOS: 14246- |
| | | 14247 |
| WFIKKN1 | WAP, follistatin/kazal, immunoglobulin, | SEQ ID NO: 14248 |
| | kunitz and netrin domain containing 1 | |
| WFIKKN2 | WAP, follistatin/kazal, immunoglobulin, | SEQ ID NOS: 14249- |
| | kunitz and netrin domain containing 2 | 14250 |
| WIF1 | WNT inhibitory factor 1 | SEQ ID NOS: 14255- |
| | | 14257 |
| WISP1 | WNT1 inducible signaling pathway protein | SEQ ID NOS: 14258- |
| | 1 | 14262 |
| WISP2 | WNT1 inducible signaling pathway protein | SEQ ID NOS: 14263- |
| | 2 | 14265 |
| WISP3 | WNT1 inducible signaling pathway protein | SEQ ID NOS: 14266- |
| | 3 | 14273 |
| WNK1 | WNK lysine deficient protein kinase 1 | SEQ ID NOS: 14274- |
| | | 14287 |
| WNT1 | Wingless-type MMTV integration site | SEQ ID NOS: 14288- |
| | family, member 1 | 14289 |
| WNT10B | Wingless-type MMTV integration site | SEQ ID NOS: 14290- |
| | family, member 10B | 14294 |
| WNT11 | Wingless-type MMTV integration site | SEQ ID NOS: 14295- |
| | family, member 11 | 14297 |
| WNT16 | Wingless-type MMTV integration site | SEQ ID NOS: 14298- |
| | family, member 16 | 14299 |
| WNT2 | Wingless-type MMTV integration site | SEQ ID NOS: 14300- |
| | family member 2 | 14302 |
| WNT3 | Wingless-type MMTV integration site | SEQ ID NO: 14303 |
| | family, member 3 | |
| WNT3A | Wingless-type MMTV integration site | SEQ ID NO: 14304 |
| | family, member 3A | |
| WNT5A | Wingless-type MMTV integration site | SEQ ID NOS: 14305- |
| | family, member 5A | 14308 |
| WNT5B | Wingless-type MMTV integration site | SEQ ID NOS: 14309- |
| | family, member 5B | 14315 |
| WNT6 | Wingless-type MMTV integration site | SEQ ID NO: 14316 |
| | family, member 6 | |
| WNT7A | Wingless-type MMTV integration site | SEQ ID NO: 14317 |
| | family, member 7A | |
| WNT7B | Wingless-type MMTV integration site | SEQ ID NOS: 14318- |
| | family, member 7B | 14322 |
| WNT8A | Wingless-type MMTV integration site | SEQ ID NOS: 14323- |
| | family, member 8A | 14326 |
| WNT8B | Wingless-type MMTV integration site | SEQ ID NO: 14327 |
| | family, member 8B | |
| WNT9A | Wingless-type MMTV integration site | SEQ ID NO: 14328 |
| | family, member 9A | |
| WNT9B | Wingless-type MMTV integration site | SEQ ID NOS: 14329- |
| | family, member 9B | 14331 |
| WSB1 | WD repeat and SOCS box containing 1 | SEQ ID NOS: 14332- |
| | | 14341 |
| WSCD1 | WSC domain containing 1 | SEQ ID NOS: 14342- |
| | | 14351 |
| WSCD2 | WSC domain containing 2 | SEQ ID NOS: 14352- |
| | | 14355 |
| XCL1 | Chemokine (C motif) ligand 1 | SEQ ID NO: 14356 |
| XCL2 | Chemokine (C motif) ligand 2 | SEQ ID NO: 14357 |
| XPNPEP2 | X-prolyl aminopeptidase (aminopeptidase | SEQ ID NOS: 14358- |
| | P) 2, membrane-bound | 14359 |
| XXbac- | | SEQ ID NOS: 679- 680 |
| BPG116M5.17 | | |
| XXbac- | | SEQ ID NO: 681 |
| BPG181M17.5 | | |
| XXbac- | | SEQ ID NO: 682 |
| BPG32J3.20 | | |
| XXYLT1 | Xyloside xylosyltransferase 1 | SEQ ID NOS: 14360- |
| | | 14365 |
| XYLT1 | Xylosyltransferase I | SEQ ID NO: 14366 |
| XYLT2 | Xylosyltransferase II | SEQ ID NOS: 14367- |
| | | 14372 |
| ZFYVE21 | Zinc finger, FYVE domain containing 21 | SEQ ID NOS: 14373- |
| | | 14377 |
| ZG16 | Zymogen granule protein 16 | SEQ ID NO: 14378 |
| ZG16B | Zymogen granule protein 16B | SEQ ID NOS: 14379- |
| | | 14382 |
| ZIC4 | Zic family member 4 | SEQ ID NOS: 14383- |
| | | 14391 |
| ZNF207 | Zinc finger protein 207 | SEQ ID NOS: 14392- |
| | | 14402 |
| ZNF26 | Zinc finger protein 26 | SEQ ID NOS: 14403- |
| | | 14406 |
| ZNF34 | Zinc finger protein 34 | SEQ ID NOS: 14407- |
| | | 14410 |
| ZNF419 | Zinc finger protein 419 | SEQIDNOS: 14411- |
| | | 14425 |
| ZNF433 | Zinc finger protein 433 | SEQ ID NOS: 14426- |
| | | 14435 |
| ZNF449 | Zinc finger protein 449 | SEQ ID NOS: 14436- |
| | | 14437 |
| ZNF488 | Zinc finger protein 488 | SEQ ID NOS: 14438- |
| | | 14439 |
| ZNF511 | Zinc finger protein 511 | SEQ ID NOS: 14440- |
| | | 14441 |
| ZNF570 | Zinc finger protein 570 | SEQ ID NOS: 14442- |
| | | 14447 |
| ZNF691 | Zinc finger protein 691 | SEQ ID NOS: 14448- |
| | | 14455 |
| ZNF98 | Zinc finger protein 98 | SEQ ID NOS: 14456- |
| | | 14459 |
| ZPBP | Zona pellucida binding protein | SEQ ID NOS: 14460- |
| | | 14463 |
| ZPBP2 | Zona pellucida binding protein 2 | SEQ ID NOS: 14464- |
| | | 14467 |
| ZSCAN29 | Zinc finger and SCAN domain containing | SEQ ID NOS: 14468- |
| | 29 | 14474 |

### Cas-Clover

[0613] The disclosure provides a composition comprising a guide RNA and a fusion protein or a sequence encoding the fusion protein wherein the fusion protein comprises a dCas9 and a Clo051 endonuclease or a nuclease domain thereof.

### Small Cas9 (SaCas9)

[0614] The disclosure provides compositions comprising a small, Cas9 (Cas9) operatively-linked to an effector. In certain embodiments, the disclosure provides a fusion protein comprising, consisting essentially of or consisting of a DNA localization component and an effector molecule, wherein the effector comprises a small, Cas9 (Cas9). In certain embodiments, a small Cas9 construct of the disclosure may comprise an effector comprising a type IIS endonuclease.

[0615] Amino acid sequence of Staphylococcus aureus Cas9 with an active catalytic site.

(SEQ ID NO: 17051)

| | |
|---|---|
| 1 | mkrnyilgld igitsvgygi idyetrdvid agvrlfkean |
| | vennegrrsk rgarrlkrrr |
| 61 | rhriqrvkkl lfdynlltdh selsginpye arvkglsgkl |
| | seeefsaall hlakrrgvhn |
| 121 | vneveedtgn elstkeqisr nskaleekyv aelqlerlkk |
| | dgevrgsinr fktsdvvkea |
| 181 | kgllkvqkay hqldqsfidt yidlletrrt yyegpgegsp |
| | fgwkdikewy emlmghctyf |
| 241 | peelrsvkya ynadlynaln dlnnlvitrd enekleyyek |
| | fqiienvfkq kkkptlkqia |
| 301 | keilvneedi kgyrvtstgk peftnlkvyh dikditarke |
| | iienaelldq iakiltiyqs |
| 361 | sediqeeltn lnseltqeei egisnikgyt gthnlslkai |
| | nlildelwht ndnqiaifnr |
| 421 | lklvpkkvdl sqqkeipttl vddfilspvv krsfiqsikv |
| | inaiikkygl pndiiielar |
| 481 | eknskdaqkm inemqkrnrq tnerieeiir ttgkanakyl |
| | iekiklhdmq egkclyslea |
| 541 | ipledllnnp fnyevdhiip rsvsfdnsfn nkvlvkqeen |
| | skkgnrtpfq ylsssdskis |
| 601 | yetfkkhiln lakgkgrisk tkkeylleer dinrfsvqkd |
| | finrnlvdtr yatrglmnll |
| 661 | rsyfrvnnld vkvksinggf tsflrrkwkf kkernkgykh |
| | haedaliian adfifkewkk |
| 721 | ldkakkvmen qmfeekqaes mpeieteqey keifitphqi |
| | khikdfkdyk yshrvdkkpn |
| 781 | relindtlys trkddkgntl ivnnlnglyd kdndklkkli |
| | nkspekllmy hhdpqtyqkl |
| 841 | klimeqygde knplykyyee tgnyltkysk kdngpvikki |
| | kyygnklnah lditddypns |
| 901 | rnkvvklslk pyrfdvyldn gvykfvtvkn ldvikkenyy |
| | evnskcyeea kklkkisnqa |
| 961 | efiasfynnd likingelyr vigvnndlln rievnmidit |
| | yreylenmnd krppriikti |
| 1021 | asktqsikky stdilgnlye vkskkhpqii kkg |

Inactivated Small Cas9 (dSaCas9)

[0616] The disclosure provides compositions comprising an inactivated, small, Cas9 (dSaCas9) operatively-linked to an effector. In certain embodiments, the disclosure provides a fusion protein comprising, consisting essentially of or consisting of a DNA localization component and an effector molecule, wherein the effector comprises a small, inactivated Cas9 (dSaCas9). In certain embodiments, a small, inactivated Cas9 (dSaCas9) construct of the disclosure may comprise an effector comprising a type IIS endonuclease.

[0617] dSaCas9 Sequence: D10A and N580A mutations (bold, capitalized, and underlined) inactivate the catalytic site.

(SEQ ID NO: 17052)

| | |
|---|---|
| 1 | mkrnyilglA igitsvgvgi idyetrdvid agvrlfkean |
| | vennegrrsk rgarrlkrrr |
| 61 | rhriqrvkkl lfdynlltdh selsginpye arvkglsqkl |
| | seeefsaall hlakrrgvhn |
| 121 | vneveedtgn elstkeqisr nskaleekyv aelqlerlkk |
| | dgevrgsinr fktsdyvkea |
| 181 | kqllkvqkay hqldgsfidt yidlletrrt yyegpgegsp |
| | fgwkdikewy emlmghctyf |
| 241 | peelrsvkya ynadlynaln dlnnlvitrd enekleyyek |
| | fqiienvfkq kkkptlkgia |
| 301 | keilvneedi kgyrvtstgk peftnlkvyh dikditarke |
| | iienaelldq iakiltiyqs |
| 361 | sediqeeltn lnseltqeei egisnlkgyt gthnlslkai |
| | nlildelwht ndnqiaifnr |
| 421 | lklvpkkvdl sqqkeipttl vddfilspvv krsfiqsikv |
| | inaiikkygl pndiiielar |
| 481 | eknskdaqkm inemqkrnrq tnerieeiir ttgkenakyl |
| | iekiklhdmq egkclyslea |
| 541 | ipledllnnp fnyevdhiip rsvsfdnsfn nkvlvkqeeA |
| | skkgnrtpfq ylsssdskis |
| 601 | yetfkkhiln lakgkgrisk tkkeylleer dinrftvqkd |
| | finrnlvdtr yatrglmnll |
| 661 | rsyfrvnnld vkvksinggf tsflrrkwkf kkernkgykh |
| | haedaliian adfifkewkk |
| 721 | ldkakkvmen qmfeekqaes mpeieteqey keifitphqi |
| | khikdfkdyk yshrvdkkpn |
| 781 | relindtlys trkddkgntl ivnnlnglyd kdndklkkli |
| | nkspekllmy hhdpqtyqkl |
| 841 | klimegygde knplykyyee tgnyltkysk kdngpvikki |
| | kyygnklnah lditddypns |
| 901 | rnkvvklslk pyrfdvyldn gvykfvtvkn ldvikkenyy |
| | evnskoyeea kklkkisnqa |
| 961 | efiasfynnd likingelyr vigvnndlln rievnmidit |
| | yreylenmnd krppriikti |
| 1021 | asktqsikky stdilgnlye vkskkhpqii kkg |

Inactivated Cas9 (dCas9)

[0618] The disclosure provides compositions comprising an inactivated Cas9 (dCas9) operatively-linked to an effector. In certain embodiments, the disclosure provides a fusion protein comprising, consisting essentially of or consisting of a DNA localization component and an effector molecule, wherein the effector comprises an inactivated Cas9 (dCas9). In certain embodiments, an inactivated Cas9 (dCas9) construct of the disclosure may comprise an effector comprising a type IIS endonuclease.

[0619] In certain embodiments, the dCas9 of the disclosure comprises a dCas9 isolated or derived from Staphyloccocus pyogenes. In certain embodiments, the dCas9 comprises a dCas9 with substitutions at positions 10 and 840 of the amino acid sequence of the dCas9 which inactivate the catalytic site. In certain embodiments, these substitutions are D10A and H840A. In certain embodiments, the amino acid sequence of the dCas9 comprises the sequence of:

(SEQ ID NO: 17053)

| | |
|---|---|
| 1 | XDKKYSIGLA IGTNSVGWAV ITDEYKVPSK KFKVLGNTDR |
| | HSIKKNLIGA LLFDSGETAE |
| 61 | ATRLKRTARR RYTRRKNRIC YLQEIFSNEM AKVDDSFFHR |
| | LEESFLVEED KKHERHPIFG |
| 121 | NIVDEVAYHE KYPTIYHLRK KLVDSTDKAD LRLIYLALAH |
| | MIKFRGHFLI EGDLNPDNSD |
| 181 | VDKLFIQLVQ TYNQLFEENP INASGVDAKA ILSARLSKSR |
| | RLENLIAQLP GEKKNGLFGN |
| 241 | LIALSLGLTP NFKSNFDLAE DAKLQLSKDT YDDDLDNLLA |
| | QIGDQYADLF LAAKNLSDAI |
| 301 | LLSDILRVNT EITKAPLSAS MIKRYDEHHQ DLTLLKALVR |
| | QQLPEKYKEI FFDQSKNGYA |
| 361 | GYIDGGASQE EFYKFIKPIL EKMDGTEELL VKLNREDLLR |
| | KQRTFDNGSI PHQILGELH |
| 421 | AILRRQEDFY PFLKDNREKI EKILTFRIPY YVGPLARGNS |
| | RFAWMTRKSE ETITPWNFEE |
| 481 | VVDKGASAQS FIERMTNFDK NLPNEKVLPK HSLLYEYFTV |
| | YNELTKVKYV TEGMRKPAFL |
| 541 | SGEQKKAIVD LLFKTNRKVT VKQLKEDYFK KIECFDSVEI |
| | SGVEDRFNAS LGTYHDLLKI |
| 601 | IKDKDFLDNE ENEDILEDIV LTLTLFEDRE MIEERLKTYA |
| | HLFDDKVMKQ LKRRRYTGWG |
| 661 | RLSRKLINGI RDKQSGKTIL DFLKSDGFAN RNFMQLIHDD |
| | SLTFKEDIQK AQVSGQGDSL |
| 721 | HEHIANLAGS PAIKKGILQT VKVVDELVKV MGRHKPENIV |
| | IEMARENQTT QKGQKNSRER |
| 781 | MKRIEEGIKE LGSQILKEHP VENTQLQNEK LYLYYLQNGR |
| | DMYVDQELDI NRLSDYDVDA |
| 841 | IVPQSFLKDD SIDNKVLTRS DKNRGKSDNV PSEEVVKKMK |
| | NYWRQLLNAK LITQRKFDNL |
| 901 | TKAERGGLSE LDKAGFIKRQ LVETRQITKH VAQILDSRMN |
| | TKYDENDKLI REVKVITLKS |
| 961 | KLVSDERKDF QFYKVREINN YHHAHDAYLN AVVGTALIKK |
| | YPKLESEFVY GDYKVYDVRK |
| 1021 | MIAKSEQEIG KATAKYFFYS NIMNFFKTEI TLANGEIRKR |
| | PLIETNGETG EIVWDKGRDF |
| 1081 | ATVRKVLSMP QVNIVKKTEV QTGGESKESI LPKRNSDKLI |
| | ARKKDWDPKK YGGFDSPTVA |
| 1141 | YSVLVVAKVE KGKSKKLKSV KELLGITIME RSSFEKNPID |
| | FLEAKGYKEV KKDLIIKLPK |
| 1201 | YSLFELENGR KRMLASAGEL QKGNELALPS KYVNFLYLAS |
| | HYEKLKGSPE DNEQKQLFVE |
| 1261 | QHKHYIDEII EQISEFSKRV ILADANLDKV LSAYNKHRDK |
| | PIREQAENII HLFTLTNLGA |
| 1321 | PAAFKYFDTT IDRKRYTSTK EVLDATLIHQ SITGLYETRI |
| | DLSQLGGD. |

[0620] In certain embodiments, the amino acid sequence of the dCas9 comprises the sequence of:

(SEQ ID NO: 17054)

| | |
|---|---|
| 1 | MDKKYSIGLA IGTNSVGWAV ITDEYKVPSK KFKVLGNTDR |
| | HSIKKNLIGA LLFDSGETAE |
| 61 | ATPLKRTARR RYTRRKNPIC YLQEIFSNEM AKVDDSFFER |
| | LEESELVEED KKHERHPIFG |
| 121 | NIVDEVAYHE KYPTIYHLRK KLVDSTDKAD LRLIYLALSH |
| | MIKFRGHFLI EGDLNPDNSD |
| 181 | VDKLFIQLVQ TYNOLFEENP INASGVDAKA ILSARLSKSR |
| | RLENLIAQLP GEKKNGLFGN |
| 241 | LIALSLGLTP NEKSNFDLAE DAKLQLSKDT YDDDLDNLLA |
| | QIGDQYADLF LAAKNLSDAI |
| 301 | LLSDILRVNT EITKAPLSAS MIKRYDEHHQ DLTLLKALVR |
| | QQLPEKYKEI FFDQSKNGYA |
| 361 | GYIDGGASQE EFYKFIKPIL EKMDGTEELL VKLNREDLLR |
| | KQRTFDNGSI PHQIHLGELH |
| 421 | AILPPQEDFY PFLKDNREKI EKILTFRIPY YVGPLARGNS |
| | RFAWMTRKSE ETITPWNFEE |
| 481 | YVDKGASAQS FIERMTNFDK NLPNEKVLPK HSLLYEYFTV |
| | YNELTKVKYV TEGMRKPAFL |
| 541 | SGEQKKAIVD LLFKTNRKVT VKQLKEDYFK KIECFDSVEI |
| | SGVEDRFNAS LGTYHDLLKI |
| 601 | IKDKDFLDNE ENEDILEDIV LTLTLFEDRE MIEEPIKTYA |
| | HLFDDKVMKQ LKRRRYTGWG |
| 661 | RLSRKLINGI RDKQSGKTIL DFLKSDGFAN RNFMQLIHDD |
| | SLTFKEDIQK AQVSGQGDSL |
| 721 | HEHIANLAGS PAIKKGILQT VKVVDELVKV MGRHKPENIV |
| | IEMARENQTT QKGQKNSRER |
| 781 | MKRIEEGIKE LGSQILKEHP VENTQLQNEK LYLYYLQNGR |
| | DMYVDQELDI NRLSDYDVDA |
| 841 | IVPQSFLKDD SIDNKVLTRS DKNRGKSDNV PSEEVVKKMK |
| | NYWRQLLNAK LITQRKFDNL |
| 901 | TKAERGGLSE LDKAGFIKRQ LVETRQITKH VAQILDSRMN |
| | TKYDENDKLI REVKVITLKS |
| 961 | KLVSDFRKDF QFYKVREINN YHHAHDAYLN AVVGTALIKK |
| | YPKLESEFVY GDYKVYDVRK |
| 1021 | MIAKSEQEIG KATAKYFFYS NIMNFFKTEI TLANGEIRKR |
| | PLIETNGETG EIVWDKGRDF |
| 1081 | ATVRKVLSMP QVNIVKKTEV QTGGFSKESI LPKRNSDKLI |
| | ARKKDWDPKK YGGFDSPTVA |
| 1141 | YSVLVVAKVE KGKSKKLKSV KELLGITIME RSSFEKNPID |
| | FLEAKGYKEV KKDLIIKLPK |
| 1201 | YSLFELENGR KRMLASAGEL QKGNELALPS KYVNFLYLAS |
| | HYEKLKGSPE DNEQKQLFVE |
| 1261 | QHKHYLDEII EQISEFSKRV ILADANLDKV LSAYNKHRDK |
| | PIREQAENII HLFTLTNLGA |
| 1321 | PAAFKYFDTT IDRKRYTSTK EVLDATLIHQ SITGLYETRI |
| | DLSQLGGD. |

### Clo051 Endonuclease

[0621] An exemplary Clo051 nuclease domain may comprise, consist essentially of or consist of, the amino acid sequence of:

(SEQ ID NO: 17055)
EGIKSNISILKDELRGQISHISHEYLSLIDLAFDSKQNRLFEMKVLELLV
NEYGFKGRHLGGSRKPDGIVYSTTLEDNFGIIVDTKAYSEGYSLPISQAD
EMERYVRENSNRDEEVNPNKWWENFSEEVKKYYFVFISGSFKGKFEEQLR
RLSMTTGVNGSAVNVVNLLLGAEKIRSGEMTIEELERAMFNNSEFILKY.

### Cas-Clover Fusion Protein

[0622] In certain embodiments, an exemplary dCas9-Clo051 fusion protein (embodiment 1) may comprise, consist essentially of or consist of, the amino acid sequence of (Clo051 sequence underlined, linker bold italics, dCas9 sequence (Streptoccocus pyogenes) in italics):

(SEQ ID NO: 17056)
MAPKKKRKVEGIKSNISLLKDELRGQISHISHEYLSLIDLAFDSKQNRLFE
MKVLELLVNEYGFKGRHLGGSRKPDGINYSTTLEDNFGIIVDTKAYSEGYS
LPISQADEMERYVRENSNRDEEVNPNKWWENFSEEVKKYYFVFISGSFKGK
FEEQLRRLSMTTGVNGSAVNVVNLLLGAEKIRSGEMTIEELERAMFNNSEF
ILKY DKKYSIGLAIGTNSVGWAVITDEYKVPSKKFKVLGNTDRHSI
KKNLIGALLFDSGETAEATRLKRTARRRYTRRKNRICYLQEIFSNEMAKVD
DSFFHRLEESFLVEEDKKHERHPIFGNIVDEVAYHEKYPTIYHLRKKLVDS
TDKADLRLIYLALAHMIKFRGHFLIEGDLNPDNSDVDKLFIQLVQTYNQLF
EENPINASGVDAKAILSARLSKSRRLENLIAQLPGEKKNGLFGNLIALSLG
LTPNFKSNFDLAEDAKLQLSKDTYDDDLDNLLAQIGDQYADLFLAAKNLSD
AILLSDILRVNTEITKAPLSASMIKRYDEHHQDLTLLKALVRQQLPEKYKE
IFFDQSKNGYAGYIDGGASQEEFYKFIKPILEKMDGTEELLVKLNREDLLR
KQRTFDNGSIPHQIHLGELHAILRRQEDFYPFLKDNREKIEKILTFRIPYY
VGPLARGNSRFAWMTRKSEETITPWNFEEVVDKGASAQSFIERMTNFDKNL
PNEKVLPKHSLLYEYFTVYNELTKVKYVTEGMRKPAFLSGEQKKAIVDLLF
KTNRKVTVKQLKEDYFKKIECFDSVEISGVEDRFNASLGTYHDLLKIIKDK
DFLDNEENEDILEDIVLTLTLFEDREMIEERLKTYAHLFDDKVMKQLKRRR
YTGWGRLSRKLINGIRDKQSGKTILDFLKSDGFANRNFMQLIHDDSLTFKE
DIQKAQVSGQGDSLHEHIANLAGSPAIKKGILQTVKVVDELVKVMGRHKPE
NIVIEMARENQTTQKGQKNSRERMKRIEEGIKELGSQILKEHPVENTQLQN
EKLYLYYLQNGRDMYVDQELDINRLSDYDVDAIVPQSFLKDDSIDNKVLTR
SDKNRGKSDNVPSEEVVKKMKNYWRQLLNAKLITQRKFDNLTKAERGGLSE
LDKAGFIKRQLVETRQITKHVAQILDSRMNTKYDENDKLIREVKVITLKSK
LVSDFRKDFQFYKVREINNYHHAHDAYLNAVVGTALIKKYPKLESEFVYGD
YKVYDVRKMIAKSEQEIGKATAKYFFYSNIMNFFKTEITLANGEIRKRPLI
ETNGETGEIVWDKGRDFATVRKVLSMPQVNIVKKTEVQTGGFSKESILPKR
NSDKLIARKKDWDPKKYGGFDSPTVAYSVLVVAKVEKGKSKKLKSVKELLG
ITIMERSSFEKNPIDFLEAKGYKEVKKDLIIKLPKYSLFELENGRKRMLAS
AGELQKGNELALPSMYVNFLYLASHYEKLKGSPEDNEQKQLPVEQHKHYLD
EIIEQSSBFSKRVILADANLDKVLSAYNKHRDKPIREQAENIIHLFTLTNL
GAPAAFKYFDTTIDRKRYTSTKEVLDATLIHQSITGLYETRIDLSQLGGDG
SPKKKRKVSS.

[0623] In certain embodiments, an exemplary dCas9-Clo051 fusion protein (embodiment 1) may comprise, consist essentially of or consist of, the nucleic acid sequence of (dCas9 sequence derived from Streptoccocus pyogenes):

(SEQ ID NO: 17057)

| | |
|---|---|
| 1 | atggcaccaa agaagaaaag aaaagtggag ggcatcaagt |
| | caaacatcag cctgctgaaa |
| 61 | gacgaactgc ggggacagat tagtcacatc agtcacgagt |
| | acctgtcact gattgatctg |
| 121 | gccttcgaca gcaagcagaa tagactgttt gagatgaaag |
| | tgctggaact gctggtcaac |
| 181 | gagtatggct tcaagggcag acatctgggc gggtctagga |
| | aacctgacgg catcgtgtac |
| 241 | agtaccacac tggaagacaa cttcggaatc attgtcgata |
| | ccaaggctta ttccgagggc |
| 301 | tactctctgc caattagtca ggcagatgag atggaaaggt |
| | acqtgcgcga aaactcaaat |
| 361 | agggacgagg aagtcaaccc caataagtgg tgggagaatt |
| | tcagcgagga agtgaagaaa |
| 421 | tactacttcg tctttatctc aggcagcttc aaagggaagt |
| | ttgaggaaca gctgcggaga |
| 481 | ctgtccatga ctaccggggt gaacggatct gctgtcaacg |
| | tggtcaatct gctgctgggc |
| 541 | gcagaaaaga tcaggtccgg ggagatgaca attgaggaac |
| | tggaacgcgc catgttcaac |
| 601 | aattctgagt ttatcctgaa gtatggaggc gggggaagcg |
| | ataagaaata ctccatcgga |
| 661 | ctggccattg gcaccaattc cgtgggctgg gctgtcatca |
| | cagacgagta caaggtgcca |
| 721 | agcaagaagt tcaaggtcct ggggaacacc gatcgccaca |
| | gtatcaagaa aaatctgatt |
| 781 | ggagccctgc tgttcgactc aggcgagact gctgaagcaa |
| | cccgactgaa gcggactgct |
| 841 | aggcgccgat atacccggag aaaaaatcgg atctgctacc |
| | tgcaggaaat tttcagcaac |
| 901 | gagatggcca aggtggacga tagtttcttt caccgcctgg |
| | aggaatcatt cctggtggag |
| 961 | gaagataaga aacacgagcg gcatcccatc tttggcaaca |
| | ttgtggacga agtcgcttat |
| 1021 | cacgagaagt accctactat ctatcatctg aggaagaaac |
| | tggtggactc caccgataag |
| 1081 | gcagacctgc gcctgatcta tctggccctg gctcacatga |
| | tcaagttccg ggggcatttt |
| 1141 | ctgatcgagg gagatctgaa ccctgacaat tctgatgtgg |
| | acaagctgtt catccagctg |
| 1201 | gtccagacat acaatcagct gtttgaggaa aacccaatta |
| | atgcctcagg cgtggacgca |
| 1261 | aaggccatcc tgagcgccag actgtccaaa tctaggcgcc |
| | tggaaaacct gatcgctcag |
| 1321 | ctgccaggag agaagaaaaa cggcctgttt gqqaatctga |
| | ttgcactgtc cctgggcctg |
| 1381 | acacccaact tcaagtctaa ttttgatctg gccgaggacg |
| | ctaagctgca gctgtccaaa |
| 1441 | gacacttatg acgatgacct ggataacctg ctggctcaga |
| | tcggcgatca gtacgcagac |
| 1501 | ctgttcctgg ccgctaagaa tctgagtgac gccatcctgc |
| | tgtcagatat tctgcgcgtg |
| 1561 | aacacagaga ttactaaggc cccactgagt gcttcaatga |
| | tcaaaagata tgacgagcac |
| 1621 | catcaggatc tgaccctgct gaaggctctg gtgaggcagc |
| | agctgcccga gaaatacaag |
| 1681 | gaaatcttct ttgatcagag caagaatgga tacgccggct |
| | atattgacgg cggggcttcc |
| 1741 | caggaggagt tctacaagtt catcaagccc attctggaaa |
| | agatggacgg caccgaggaa |
| 1801 | ctgctggtga agctgaatcg ggaggacctg ctgagaaaac |
| | agaggacatt tgataacgga |
| 1861 | agcatccctc accagattca tctgggcgaa ctgcacgcca |
| | tcctgcgacg gcaggaggac |
| 1921 | ttctacccat ttctgaagga taaccgcqag aaaatcgaaa |
| | agatcctgac cttcagaatc |
| 1981 | ccctactatg tggggcctct ggcacgggga aataqtagat |
| | ttgcctggat gacaagaaag |
| 2041 | tcagaggaaa ctatcacccc ctggaacttc gaggaagtgg |
| | tcgataaagg cgctagcgca |
| 2101 | cagtccttca ttgaaaggat gacaaatttt gacaagaacc |
| | tgccaaatga gaaggtgctg |
| 2161 | cccaaacaca gcctgctgta cgaatatttc acagtgtata |
| | acgagctgac taaagtgaag |
| 2221 | tacgtcaccg aagggatgcg caagcccgca ttcctgtccg |
| | gagagcagaa gaaagccatc |
| 2281 | gtggacctgc tgtttaagac aaatcggaaa gtgactgtca |
| | aacagctgaa ggaagactat |
| 2341 | ttcaagaaaa ttgagtgttt cgattcagtg gaaatcagcg |
| | gcgtcgagga caggtttaac |
| 2401 | gcctccctgg ggacctacca cgatctgctg aagatcatca |
| | aggataagga cttcctggac |
| 2461 | aacgaggaaa atgaggacat cctggaggac attgtgctga |
| | cactgactct gtttgaggat |
| 2521 | cgcgaaatga tcgaggaacg actgaagact tatgcccatc |
| | tgttcgatga caaagtgatg |
| 2581 | aagcagctga aaagaaggcg ctacaccqga tggggacgcc |
| | tqagccgaaa actgatcaat |
| 2641 | gggattagag acaagcagag cggaaaaact atcctggact |
| | ttctgaagtc cgatggcttc |
| 2701 | gccaacagga acttcatgca gctgattcac gatgactctc |
| | tgaccttcaa ggaggacatc |
| 2761 | cagaaagcac aggtgtctgg ccagggggac agtctgcacg |
| | agcatatcgc aaacctggcc |
| 2821 | ggcagccccg ccatcaagaa agggattctg cagaccgtga |
| | aggtggtgga cgaactggtc |
| 2881 | aaggtcatgg gacgacacaa acctgagaac atcgtgattg |
| | agatggcccg cgaaaatcag |
| 2941 | acaactcaga agggccagaa aaacagtcga gaacggatga |
| | agagaatcga ggaaggcatc |
| 3001 | aaggagctgg ggtcacagat cctgaaggag catcctgtgg |
| | aaaacactca gctgcagaat |
| 3061 | gagaaactgt atctgtacta totgcagaat ggacgggata |
| | tgtacgtgga ccaggagctg |
| 3121 | gatattaaca gactgagtga ttatgacgtg gatgccatcg |
| | tccctcagag cttcctgaag |
| 3181 | gatgactcca ttgacaacaa ggtgctgacc aggtccgaca |
| | agaaccgcgg caaatcagat |
| 3241 | aatgtqccaa gcgaggaagt ggtcaagaaa atgaaqaact |
| | actggaggca gctgctgaat |
| 3301 | gccaagctga tcacacagcg gaaatttgat aacctgacta |
| | aggcagaaag aggaggcctg |
| 3361 | tctgagctgg acaaggccgg cttcatcaag cggcagctgg |
| | tggagacaag acagatcact |
| 3421 | aagcacgtcg ctcagattct ggatagcaga atgaacacaa |
| | agtacgatga aaacgacaag |
| 3481 | ctgatcaggg aggtgaaagt cattactctg aaatccaagc |
| | tggtgtctga ctttagaaag |
| 3541 | gatttccagt tttataaagt cagggagatc aacaactacc |
| | accatgctca tgacgcatac |
| 3601 | ctgaacgcag tggtcgggac cgccctgatt aagaaatacc |
| | ccaagctgga gtccgagttc |
| 3661 | gtgtacggag actataaagt gtacgatgtc cggaagatga |
| | tcgccaaatc tgagcaggaa |
| 3721 | attggcaagg ccaccgctaa gtatttcttt tacagtaaca |
| | tcatgaattt ctttaagacc |
| 3781 | gaaatcacac tggcaaatgg ggagatcaga aaaaggcctc |
| | tgattgagac caacggggag |
| 3841 | acaggagaaa tcgtgtggga caagggaagg gattttgcta |
| | ccgtgcgcaa agtcctgtcc |
| 3901 | atgccccaag tgaatattgt caagaaaact gaagtgcaga |
| | ccgggggatt ctctaaggag |
| 3961 | agtattctgc ctaagcgaaa ctctgataaa ctgatcgccc |
| | ggaagaaaga ctgggacccc |
| 4021 | aagaagtatg gcgggttcga ctctccaaca gtggcttaca |
| | gtgtcctggt ggtcgcaaag |
| 4081 | gtggaaaagg ggaagtccaa gaaactgaag tctgtcaaag |
| | agctgctggg aatcactatt |
| 4141 | atggaacgca gctccttcga gaagaatcct atcgattttc |
| | tggaagccaa gggctataaa |
| 4201 | gaggtgaaga aagacctgat cattaagctg ccaaaatact |
| | cactgtttga gctggaaaac |
| 4261 | ggacgaaagc gaatgctggc aagcgccgga gaactgcaga |
| | agggcaatga gctggccctg |
| 4321 | ccctccaaat acgtgaactt cctgtatctg gctagccact |
| | acgagaaact gaaggggtcc |
| 4381 | cctgaggata acgaacagaa gcagctgttt gtggagcagc |
| | acaaacatta tctggacgag |
| 4441 | atcattgaac agatttcaga gttcagcaag agagtgatcc |
| | tggctgacgc aaatctggat |
| 4501 | aaagtcctga gcgcatacaa caagcaccga gacaaaccaa |
| | tccgggagca ggccgaaaat |
| 4561 | atcattcatc tgttcaccct gacaaacctg ggcgcccctg |
| | cagccttcaa gtattttgac |
| 4621 | accacaatcg atcggaagag atacacttct accaaagagg |
| | tqctggatgc taccctgatc |
| 4681 | caccagagta ttaccggcct gtatgagaca cgcatcgacc |
| | tgtcacagct gggaggcgat |
| 4741 | gggagcccca agaaaaagcg gaaggtgtct agttaa. |

[0624] In certain embodiments, the nucleic acid sequence encoding a dCas9-Clo051 fusion protein (embodiment 1) of the disclosure may comprise a DNA. In certain embodiments, the nucleic acid sequence encoding a dCas9-Clo051 fusion protein (embodiment 1) of the disclosure may comprise an RNA.

[0625] In certain embodiments, an exemplary dCas9-Clo051 fusion protein (embodiment 2) may comprise, consist essentially of or consist of, the amino acid sequence of (Clo051 sequence underlined, linker bold italics, dCas9 sequence (Streptoccocus pyogenes) in italics):

(SEQ ID NO: 17058)

| | |
|---|---|
| 1 | MPKKKRKVEG IKSNISLLKD ELRGQISHIS HEYLSLIDLA |
| | FDSKQNRLFE MKVLELLVNE |
| 61 | YGFKGRHLGG SRKPDGIVYS TTLEDNEGII VDTKAYSEGY |
| | SLPISQADEM ERYVRENSNR |
| 121 | DEEVNPNKWW ENFSEEVKKY YFVFISGSFK GKFEEQLRRL |
| | SMTTGVNGSA VNVVNLLLGA |
| 181 | EKIRSGEMTI EELERAMENN SEFILKY DRKYSIGL |
| | AIGTNSVGWA VITDEYKVPS |
| 241 | KKFKVLGNTD RHSIKKNLIG ALLFDSGETA EATRLKRTAR |
| | RRYTRRRNRI CYLQEIFSNE |
| 301 | MAKVDDSFFH RLEESFLVEE DKKHERHPIF GNIVDEVAYH |
| | EKYPTIYHLR KKLVDSTDKA |
| 361 | DLRLIYLALA HMIKERGHFL IEGDLNPDNS DVDRIFIQLV |
| | QTYNQLFEEN PINASGVDAK |
| 421 | AILSARLSKS RRLENLIAQL PGEKKNGLFG NLIALSLGLT |
| | PNFKSNFDLA EDAKLQLSKD |
| 481 | TYDDDLDNLL AQIGDOYADL FLAAENLSDA ILLSDILRVN |
| | TEITKAPLSA SMIKRYDEHH |
| 541 | QDLTILKALV RQQLPEKYKE IFFDQSRNGY AGYIDGGASQ |
| | EEFYKFIKPI LEKMDGTEEL |
| 601 | LVKLNREDLL RKQRTEDNGS IPHQIHLGEL HAILRRQEDF |
| | YPFLKDNREK IEKILTFRIP |
| 661 | YYVGPLARGN SRFAWMTRKS EETITPWNFE EVVDKGASAQ |
| | SFIERMTNFD KNLPNEKVLP |
| 721 | KHSLLYEYFT VYNELTKVKY VTEGMRKPAF LSGEQRRAIV |
| | DLLFKTNRKV TVKQLKEDYF |
| 781 | KKIECFDSVE TSGVEDRFNA SLGTYRDLLK IIKDKDFLDN |
| | EENEDILEDI VLTLTLFEDR |
| 841 | EMIEEPLKTY AHLFDDKVMK QLKRRRYTGW GRLSRKLING |
| | IRDKQSGKTI LDFLKSDGFA |
| 901 | NRNFMQLIHD DSLTFKEDIQ KAQVSGQGDS LHEHTANLAG |
| | SPAIKKGTLQ TVKVVDELVK |
| 961 | VMGRHKPENI VIEMARENQT TQKGQKNSRE RMKRIEEGIK |
| | ELGSQILKEH PVENTQLQNE |
| 1021 | KLYLYYLQNG RDMYVDQELD INRLSDYDVD AIVPQSFLKD |
| | DSIDNKVLTR SDKNRGKSDN |
| 1081 | VPSEEVVKKM KNYWRQLLNA KLITQRKFDN LTRAERGGLS |
| | ELDKAGFIKR QLVETRQITK |
| 1141 | HVAQILDSRM NTKYDENDKL IREVRVITLK SKLVSDFRKD |
| | FQTYKVREIN NYHHAHDAYL |
| 1201 | NAVVGIALIK KYPKLESEFV YGDYKVYDVR KMIAKSEQEI |
| | GKATAKYFFY SNIMNFFKTE |
| 1261 | ITLANGEIRK RPLIETNGET GEIVWDKGRD FATVRKVLSM |
| | PQVNIVKKTE VQTGGFSKES |
| 1321 | ILPKRNSDKL IARKKDWDPK KYGGEDSPTV AYSVLVVAKV |
| | EKGKSKKLKS VKELLGITIM |
| 1381 | ERSSFEKNPI DFLEAKGYRE VKKDLIIKLP KYSLFELENG |
| | RKRMLASAGE LQKGNELALP |
| 1441 | SKYVNFLYLA SHYEKLKGSP EDNEQKQLFV EQHKHYLDEI |
| | IEQISEFSKR VILADANLDK |
| 1501 | VLSAYNKHRD KPIREQAENI IHLFTLTNLG APAAFKYFDT |
| | TIDRKRYTST KEVLDATLIH |
| 1561 | QSITGLYETR IDLSQLGGDG SPKKKRKV. |

[0626] In certain embodiments, an exemplary dCas9-Clo051 fusion protein (embodiment 2) may comprise, consist essentially of or consist of, the nucleic acid sequence of (dCas9 sequence derived from Streptoccocus pyogenes):

(SEQ ID NO: 17059)

| | |
|---|---|
| 1 | atgcctaaga agaagcggaa ggtggaaggc atcaaaagca |
| | acatctccct cctgaaagac |
| 61 | gaactccggg ggcagattag ccacattagt cacgaatacc |
| | tctccctcat cgacctggct |
| 121 | ttcgatagca agcagaacag gctctttgag atgaaagtgc |
| | tggaactgct cgtcaatgag |
| 181 | tacgggttca agggtcgaca cctcggcgga tctaggaaac |
| | cagacggcat cgtgtatagt |
| 241 | accacactgg aagacaactt tgggatcatt gtggatacca |
| | aggcatactc tgagggttat |
| 301 | agtctgccca tttcacaggc cgacgagatg gaacggtacg |
| | tgcgcgagaa ctcaaataga |
| 361 | gatgaggaag tcaaccctaa caagtggtgg gagaacttct |
| | ctgaggaagt gaagaaatac |
| 421 | tacttcgtct ttatcagcgg gtccttcaag ggtaaatttg |
| | aggaacagct caggagactg |
| 481 | agcatgacta ccggcgtgaa tggcagcgcc gtcaacgtgg |
| | tcaatctgct cctgggcgct |
| 541 | gaaaagattc ggagcggaga gatgaccatc gaagagctgg |
| | agagggcaat gtttaataat |
| 601 | agcgagttta tcctgaaata cggtggcggt ggatccgata |
| | aaaagtattc tattggttta |
| 661 | gccatcggca ctaattccgt tggatgggct gtcataaccg |
| | atgaatacaa agtaccttca |
| 721 | aagaaattta aggtgttggg gaacacagac cgtcattcga |
| | ttaaaaagaa tcttatcggt |
| 781 | gccctcctat tcgatagtgg cgaaacggca gaggcgactc |
| | gcctgaaacg aaccgctcgg |
| 841 | agaaggtata cacgtcgcaa gaaccgaata tgttacttac |
| | aagaaatttt tagcaatgag |
| 901 | atggccaaag ttgacgattc tttctttcac cgtttggaag |
| | agtccttcct tgtcgaagag |
| 961 | gacaagaaac atgaacggca ccccatcttt ggaaacatag |
| | tagatgaggt ggcatatcat |
| 1021 | gaaaagtacc caacgattta tcacctcaga aaaaagctag |
| | ttgactcaac tgataaagcg |
| 1081 | gacctgaggt taatctactt ggctcttgcc catatgataa |
| | agttccgtgg gcactttctc |
| 1141 | attgagggtg atctaaatcc ggacaactcg gatgtcgaca |
| | aactgttcat ccagttagta |
| 1201 | caaacctata atcagttgtt tgaagagaac cctataaatg |
| | caagtggcgt ggatgcgaag |
| 1261 | gctattctta gcgcccgcct ctctaaatcc cgacggctag |
| | aaaacctgat cgcacaatta |
| 1321 | cccggagaga agaaaaatgg gttgttcggt aaccttatag |
| | cgctctcact aggcctgaca |
| 1381 | ccaaatttta agtcgaactt cgacttagct gaagatgcca |
| | aattgcagct tagtaaggac |
| 1441 | acgtacgatg acgatctcga caatctactg gcacaaattg |
| | gagatcagta tgcggactta |
| 1501 | tttttggctg ccaaaaacct tagcgatgca atcctcctat |
| | ctgacatact gagagttaat |
| 1561 | actgagatta ccaaggcgcc gttatccgct tcaatgatca |
| | aaaggtacga tgaacatcac |
| 1621 | caagacttga cacttctcaa ggccctagtc cgtcagcaac |
| | tgcctgagaa atataaggaa |
| 1681 | atattctttg atcagtcgaa aaacgggtac gcaggttata |
| | ttgacggcgg agcgagtcaa |
| 1741 | gaggaattct acaagtttat caaacccata ttagagaaga |
| | tggatgggac ggaagagttg |
| 1801 | cttgtaaaac tcaatcgcga agatctactg cgaaagcagc |
| | ggactttcga caacggtagc |
| 1861 | attccacatc aaatccactt aggcgaattg catgctatac |
| | ttagaaggca ggaggatttt |
| 1921 | tatccgttcc tcaaagacaa tcgtgaaaag attgagaaaa |
| | tcctaacctt tcgcatacct |
| 1981 | tactatgtgg gacccctggc ccgagggaac tctcggttcg |
| | catggatgac aagaaagtcc |
| 2041 | gaagaaacga ttactccatg gaattttgag gaagttgtcg |
| | ataaaggtgc gtcagctcaa |
| 2101 | tcgttcatcg agaggatgac caactttgac aagaatttac |
| | cgaacgaaaa agtattgcct |
| 2161 | aagcacagtt tactttacga gtatttcaca gtgtacaatg |
| | aactcacgaa agttaagtat |
| 2221 | gtcactgagg gcatgcgtaa acccgccttt ctaagcggag |
| | aacagaagaa agcaatagta |
| 2281 | gatctgttat tcaagaccaa ccgcaaagtg acagttaagc |
| | aattgaaaga ggactacttt |
| 2341 | aagaaaattg aatgcttcga ttctgtcgag atctccgggg |
| | tagaagatcg atttaatgcg |
| 2401 | tcacttggta cgtatcatga cctcctaaag ataattaaag |
| | ataaggactt cctggataac |
| 2461 | gaagagaatg aagatatctt agaagatata gtgttgactc |
| | ttaccctctt tgaagatcgg |
| 2521 | gaaatgattg aggaaagact aaaaacatac gctcacctgt |
| | tcgacgataa ggttatgaaa |
| 2581 | cagttaaaga ggcgtcgcta tacgggctgg ggacgattgt |
| | cgcggaaact tatcaacggg |
| 2641 | ataagagaca agcaaagtgg taaaactatt ctcgattttc |
| | taaagagcga cggcttcgcc |
| 2701 | aataggaact ttatgcagct gatccatgat gactctttaa |
| | ccttcaaaga ggatatacaa |
| 2761 | aaggcacagg tttccggaca aggggactca ttgcacgaac |
| | atattgcgaa tcttgctggt |
| 2821 | tcgccagcca tcaaaaaggg catactccag acagtcaaag |
| | tagtggatga gctagttaag |
| 2881 | gtcatgggac gtcacaaacc ggaaaacatt gtaatcgaga |
| | tggcacgcga aaatcaaacg |
| 2941 | actcagaagg ggcaaaaaaa cagtcgagag cggatgaaga |
| | gaatagaaga gggtattaaa |
| 3001 | gaactgggca gccagatctt aaaggagcat cctgtggaaa |
| | atacccaatt gcagaacgag |
| 3061 | aaactttacc tctattacct acaaaatgga agggacatgt |
| | atgttgatca ggaactggac |
| 3121 | ataaaccgtt tatctgatta cgacgtcgat gccattgtac |
| | cccaatcctt tttgaaggac |
| 3181 | gattcaatcg acaataaagt gcttacacgc tcggataaga |
| | accgagggaa aagtgacaat |
| 3241 | gttccaagcg aggaagtcgt aaagaaaatg aagaactatt |
| | ggcggcagct cctaaatgcg |
| 3301 | aaactgataa cgcaaagaaa gttcgataac ttaactaaag |
| | ctgagagggg tggcttgtct |
| 3361 | gaacttgaca aggccggatt tattaaacgt cagctcgtgg |
| | aaacccgcca aatcacaaag |
| 3421 | catgttgcac agatactaga ttcccgaatg aatacgaaat |
| | acgacgagaa cgataagctg |
| 3481 | attcgggaag tcaaagtaat cactttaaag tcaaaattgg |
| | tgtcggactt cagaaaggat |
| 3541 | tttcaattct ataaagttag ggagataaat aactaccacc |
| | atgcgcacqa cgcttatctt |
| 3601 | aatgccgtcg tagggaccgc actcattaag aaatacccga |
| | agctagaaag tgagtttgtg |
| 3661 | tatggtgatt acaaagttta tgacgtccgt aagatgatcg |
| | cgaaaagcqa acaggagata |
| 3721 | ggcaaggcta cagccaaata cttcttttat tctaacatta |
| | tgaatttctt taagacggaa |
| 3781 | atcactctgg caaacggaga gatacgcaaa cgacctttaa |
| | ttgaaaccaa tggggagaca |
| 3841 | ggtgaaatcg tatgggataa gggccgggac ttcgcgacgg |
| | tgagaaaagt tttgtccatg |
| 3901 | ccccaagtca acatagtaaa gaaaactgag gtgcagaccg |
| | gagggttttc aaaggaatcg |
| 3961 | attcttccaa aaaggaatag tgataagctc atcgctcgta |
| | aaaaggactg ggacccgaaa |
| 4021 | aagtacggtg gcttcgatag ccctacagtt gcctattctg |
| | tcctagtagt ggcaaaagtt |
| 4081 | gagaagggaa aatccaagaa actgaagtca gtcaaagaat |
| | tattggggat aacgattatg |
| 4141 | gagcgctcgt cttttgaaaa gaaccccatc gacttccttg |
| | aggcgaaagg ttacaaggaa |
| 4201 | gtaaaaaagg atctcataat taaactacca aagtatagtc |
| | tgtttgagtt agaaaatggc |
| 4261 | cgaaaacgga tgttggctag cgccggagag cttcaaaagg |
| | ggaacgaact cgcactaccg |
| 4321 | tctaaatacg tgaatttcct gtatttagcg tcccattacg |
| | agaagttgaa aggttcacct |
| 4381 | gaagataacg aacagaagca actttttgtt gagcagcaca |
| | aacattatct cgacgaaatc |
| 4441 | atagagcaaa tttcggaatt cagtaagaga gtcatcctag |
| | ctgatgccaa tctggacaaa |
| 4501 | gtattaagcg catacaacaa gcacagggat aaacccatac |
| | gtgagcaggc ggaaaatatt |
| 4561 | atccatttgt ttactcttac caacctcggc gctccagccg |
| | cattcaagta ttttgacaca |
| 4621 | acgatagatc gcaaacgata cacttctacc aaggaggtgc |
| | tagacgcgac actgattcac |
| 4681 | caatccatca cgggattata tgaaactcgg atagatttgt |
| | cacagcttgg gggtgacgga |
| 4741 | tcccccaaga agaagaggaa agtctga. |

In certain embodiments, the nucleic acid sequence encoding a dCas9-Clo051 fusion protein (embodiment 2) of the disclosure may comprise a DNA. In certain embodiments, the nucleic acid sequence encoding a dCas9-Clo051 fusion protein (embodiment 2) of the disclosure may comprise an RNA.

### Transposition Systems

[0627] Exemplary transposon/transposase systems of the disclosure include, but are not limited to, piggyBac® transposons and transposases, Sleeping Beauty transposons and transposases, Helraiser transposons and transposases and Tol2 transposons and transposases.

[0628] The piggyBac® transposase recognizes transposon-specific inverted terminal repeat sequences (ITRs) on the ends of the transposon, and moves the contents between the ITRs into TTAA chromosomal sites. The piggyBac® transposon system has no payload limit for the genes of interest that can be included between the ITRs. In certain embodiments, and, in particular, those embodiments wherein the transposon is a piggyBac transposon, the transposase is a piggyBac® or a Super piggyBac™ (SPB) transposase. In certain embodiments, and, in particular, those embodiments wherein the transposase is a Super piggyBac™ (SPB) transposase, the sequence encoding the transposase is an mRNA sequence.

[0629] In certain embodiments of the methods of the disclosure, the transposase enzyme is a piggyBac® (PB) transposase enzyme. The piggyBac® (PB) transposase enzyme may comprise or consist of an amino acid sequence at least 75%, 80%, 85%, 90%, 95%, 99% or any percentage in between identical to:

(SEQ ID NO: 14487)

| | |
|---|---|
| 1 | MGSSIDDEHI LSALLQDDE LVGEDSDSEI SDHVSEDDVQ |
| | SDTEEAFIDE VHEVQPTSSG |
| 61 | SEILDEQNVI EQPGSSLASN RILTLPQRTI PGKNKHCWST |
| | SKSTRRSRVS ALNIVRSQRG |
| 121 | PTRMCRNIYD PLLCFKLFFT DEIISEIVKW TNAEISLKRR |
| | ESMTGATFRD TNEDEIYAFF |
| 181 | GILVMTAVRK DNHMSTDDLF DPSLSMVYVS VMSRDREDFL |
| | IRCLRMDDKS IRPTLRENDV |
| 241 | FTPVRKIWDL FIHQCIQNYT PGAHLTIDEQ LLGFRGRCPF |
| | RMYIPNKPSK YGIKILMMCD |
| 301 | SGTKYMINGM PYLGRGTQTN GVPLGEYYVK ELSKPVHGSC |
| | RNITCDNWFT SIPLAKNLLQ |
| 361 | EPYKLTIVGT VRSNKREIPE VLKNSRSRPV GTSMFCFDGP |
| | LTLVSYKPKP AKMVYLLSSC |
| 421 | DEDASINEST GKPQMVMYYN QTKGGVDTLD QMCSVMTCSR |
| | KTNRWPMALL YGMINIACIN |
| 481 | SFIIYSHNVS SKGEKVQSRK KFMRNLYMSL TSSFMRKRLE |
| | APTLKRYLRD NISNILPNEV |
| 541 | PGTSDDSTEE PVMKKRTYCT YCPSKIRRKA NASCKKCKKV |
| | ICREHNIDMC QSCF. |

[0630] In certain embodiments of the methods of the disclosure, the transposase enzyme is a piggyBac® (PB) transposase enzyme that comprises or consists of an amino acid sequence having an amino acid substitution at one or more of positions 30, 165, 282, or 538 of the sequence:

(SEQ ID NO: 14487)

| | |
|---|---|
| 1 | MGSSIDDEHI LSALLQDDE LVGEDSDSEI SDHVSEDDVQ |
| | SDTEEAFIDE VHEVQPTSSG |
| 61 | SEILDEQNVI EQPGSSLASN RILTLPQRTI PGKNKHCWST |
| | SKSTRRSRVS ALNIVRSQRG |
| 121 | PTRMCRNIYD PLLCFKLFFT DEIISEIVKW TNAEISLKRR |
| | ESMTGATFRD TNEDEIYAFF |
| 181 | GILVMTAVRK DNHMSTDDLF DPSLSMVYVS VMSRDREDFL |
| | IRCLRMDDKS IRPTLRENDV |
| 241 | FTPVRKIWDL FIHQCIQNYT PGAHLTIDEQ LLGFRGRCPF |
| | RMYIPNKPSK YGIKILMMCD |
| 301 | SGTKYMINGM PYLGRGTQTN GVPLGEYYVK ELSKPVHGSC |
| | RNITCDNWFT SIPLAKNLLQ |
| 361 | EPYKLTIVGT VRSNKREIPE VLKNSRSRPV GTSMFCFDGP |
| | LTLVSYKPKP AKMVYLLSSC |
| 421 | DEDASINEST GKPQMVMYYN QTKGGVDTLD QMCSVMTCSR |
| | KTNRWPMALL YGMINIACIN |
| 481 | SFIIYSHNVS SKGEKVQSRK KFMRNLYMSL TSSFMRKRLE |
| | APTLKRYLRD NISNILPNEV |
| 541 | PGTSDDSTEE PVMKKRTYCT YCPSKIRRKA NASCKKCKKV |
| | ICREHNIDMC QSCF. |

[0631] In certain embodiments, the transposase enzyme is a piggyBac® (PB) transposase enzyme that comprises or consists of an amino acid sequence having an amino acid substitution at two or more of positions 30, 165, 282, or 538 of the sequence of SEQ ID NO: 14487. In certain embodiments, the transposase enzyme is a piggyBac® (PB) transposase enzyme that comprises or consists of an amino acid sequence having an amino acid substitution at three or more of positions 30, 165, 282, or 538 of the sequence of SEQ ID NO: 14487. In certain embodiments, the transposase enzyme is a piggyBac® (PB) transposase enzyme that comprises or consists of an amino acid sequence having an amino acid substitution at each of the following positions 30, 165, 282, and 538 of the sequence of SEQ ID NO: 14487. In certain embodiments, the amino acid substitution at position 30 of the sequence of SEQ ID NO: 14487 is a substitution of a valine (V) for an isoleucine (I). In certain embodiments, the amino acid substitution at position 165 of the sequence of SEQ ID NO: 14487 is a substitution of a serine (S) for a glycine (G). In certain embodiments, the amino acid substitution at position 282 of the sequence of SEQ ID NO: 14487 is a substitution of a valine (V) for a methionine (M). In certain embodiments, the amino acid substitution at position 538 of the sequence of SEQ ID NO: 14487 is a substitution of a lysine (K) for an asparagine (N).

[0632] In certain embodiments of the methods of the disclosure, the transposase enzyme is a Super piggyBac™ (SPB) transposase enzyme. In certain embodiments, the Super piggyBac™ (SPB) transposase enzymes of the disclosure may comprise or consist of the amino acid sequence of the sequence of SEQ ID NO: 14487 wherein the amino acid substitution at position 30 is a substitution of a valine (V) for an isoleucine (I), the amino acid substitution at position 165 is a substitution of a serine (S) for a glycine (G), the amino acid substitution at position 282 is a substitution of a valine (V) for a methionine (M), and the amino acid substitution at position 538 is a substitution of a lysine (K) for an asparagine (N). In certain embodiments, the Super piggyBac™ (SPB) transposase enzyme may comprise or consist of an amino acid sequence at least 75%, 80%, 85%, 90%, 95%, 99% or any percentage in between identical to:

(SEQ ID NO: 14484)

| | |
|---|---|
| 1 | MGSSIDDEHI LSALLQDDE LVGEDSDSEI SDHVSEDDVQ |
| | SDTEEAFIDE VHEVQPTSSG |
| 61 | SEILDEQNVI EQPGSSLASN RILTLPQRTI PGKNKHCWST |
| | SKSTRRSRVS ALNIVRSQRG |
| 121 | PTRMCRNIYD PLLCFKLFFT DEIISEIVKW TNAEISLKRR |
| | ESMTGATFRD TNEDEIYAFF |
| 181 | GILVMTAVRK DNHMSTDDLF DPSLSMVYVS VMSRDREDFL |
| | IRCLRMDDKS IRPTLRENDV |
| 241 | FTPVRKIWDL FIHQCIQNYT PGAHLTIDEQ LLGFRGRCPF |
| | RMYIPNKPSK YGIKILMMCD |
| 301 | SGTKYMINGM PYLGRGTQTN GVPLGEYYVK ELSKPVHGSC |
| | RNITCDNWFT SIPLAKNLLQ |
| 361 | EPYKLTIVGT VRSNKREIPE VLKNSRSRPV GTSMFCFDGP |
| | LTLVSYKPKP AKMVYLLSSC |
| 421 | DEDASINEST GKPQMVMYYN QTKGGVDTLD QMCSVMTCSR |
| | KTNRWPMALL YGMINIACIN |
| 481 | SFIIYSHNVS SKGEKVQSRK KFMRNLYMSL TSSFMRKRLE |
| | APTLKRYLRD NISNILPNEV |
| 541 | PGTSDDSTEE PVMKKRTYCT YCPSKIRRKA NASCKKCKKV |
| | ICREHNIDMC QSCF. |

[0633] In certain embodiments of the methods of the disclosure, including those embodiments wherein the transposase comprises the above-described mutations at positions 30, 165, 282 and/or 538, the piggyBac® or Super piggyBac™ transposase enzyme may further comprise an amino acid substitution at one or more of positions 3, 46, 82, 103, 119, 125, 177, 180, 185, 187, 200, 207, 209, 226, 235, 240, 241, 243, 258, 296, 298, 311, 315, 319, 327, 328, 340, 421, 436, 456, 470, 486, 503, 552, 570 and 591 of the sequence of SEQ ID NO: 14487 or SEQ ID NO: 14484. In certain embodiments, including those embodiments wherein the transposase comprises the above-described mutations at positions 30, 165, 282 and/or 538, the piggyBac® or Super piggyBac™ transposase enzyme may further comprise an amino acid substitution at one or more of positions 46, 119, 125, 177, 180, 185, 187, 200, 207, 209, 226, 235, 240, 241, 243, 296, 298, 311, 315, 319, 327, 328, 340, 421, 436, 456, 470, 485, 503, 552 and 570. In certain embodiments, the amino acid substitution at position 3 of SEQ ID NO: 14487 or SEQ ID NO: 14484 is a substitution of an asparagine (N) for a serine (S). In certain embodiments, the amino acid substitution at position 46 of SEQ ID NO: 14487 or SEQ ID NO: 14484 is a substitution of a serine (S) for an alanine (A). In certain embodiments, the amino acid substitution at position 46 of SEQ ID NO: 14487 or SEQ ID NO: 14484 is a substitution of a threonine (T) for an alanine (A). In certain embodiments, the amino acid substitution at position 82 of SEQ ID NO: 14487 or SEQ ID NO: 14484 is a substitution of a tryptophan (W) for an isoleucine (I). In certain embodiments, the amino acid substitution at position 103 of SEQ ID NO: 14487 or SEQ ID NO: 14484 is a substitution of a proline (P) for a serine (S). In certain embodiments, the amino acid substitution at position 119 of SEQ ID NO: 14487 or SEQ ID NO: 14484 is a substitution of a proline (P) for an arginine (R). In certain embodiments, the amino acid substitution at position 125 of SEQ ID NO: 14487 or SEQ ID NO: 14484 is a substitution of an alanine (A) a cysteine (C). In certain embodiments, the amino acid substitution at position 125 of SEQ ID NO: 14487 or SEQ ID NO: 14484 is a substitution of a leucine (L) for a cysteine (C). In certain embodiments, the amino acid substitution at position 177 of SEQ ID NO: 14487 or SEQ ID NO: 14484 is a substitution of a lysine (K) for a tyrosine (Y). In certain embodiments, the amino acid substitution at position 177 of SEQ ID NO: 14487 or SEQ ID NO: 14484 is a substitution of a histidine (H) for a tyrosine (Y). In certain embodiments, the amino acid substitution at position 180 of SEQ ID NO: 14487 or SEQ ID NO: 14484 is a substitution of a leucine (L) for a phenylalanine (F). In certain embodiments, the amino acid substitution at position 180 of SEQ ID NO: 14487 or SEQ ID NO: 14484 is a substitution of an isoleucine (I) for a phenylalanine (F). In certain embodiments, the amino acid substitution at position 180 of SEQ ID NO: 14487 or SEQ ID NO: 14484 is a substitution of a valine (V) for a phenylalanine (F). In certain embodiments, the amino acid substitution at position 185 of SEQ ID NO: 14487 or SEQ ID NO: 14484 is a substitution of a leucine (L) for a methionine (M). In certain embodiments, the amino acid substitution at position 187 of SEQ ID NO: 14487 or SEQ ID NO: 14484 is a substitution of a glycine (G) for an alanine (A). In certain embodiments, the amino acid substitution at position 200 of SEQ ID NO: 14487 or SEQ ID NO: 14484 is a substitution of a tryptophan (W) for a phenylalanine (F). In certain embodiments, the amino acid substitution at position 207 of SEQ ID NO: 14487 or SEQ ID NO: 14484 is a substitution of a proline (P) for a valine (V). In certain embodiments, the amino acid substitution at position 209 of SEQ ID NO: 14487 or SEQ ID NO: 14484 is a substitution of a phenylalanine (F) for a valine (V). In certain embodiments, the amino acid substitution at position 226 of SEQ ID NO: 14487 or SEQ ID NO: 14484 is a substitution of a phenylalanine (F) for a methionine (M). In certain embodiments, the amino acid substitution at position 235 of SEQ ID NO: 14487 or SEQ ID NO: 14484 is a substitution of an arginine (R) for a leucine (L). In certain embodiments, the amino acid substitution at position 240 of SEQ ID NO: 14487 or SEQ ID NO: 14484 is a substitution of a lysine (K) for a valine (V). In certain embodiments, the amino acid substitution at position 241 of SEQ ID NO: 14487 or SEQ ID NO: 14484 is a substitution of a leucine (L) for a phenylalanine (F). In certain embodiments, the amino acid substitution at position 243 of SEQ ID NO: 14487 or SEQ ID NO: 14484 is a substitution of a lysine (K) for a proline (P). In certain embodiments, the amino acid substitution at position 258 of SEQ ID NO: 14487 or SEQ ID NO: 14484 is a substitution of a serine (S) for an asparagine (N). In certain embodiments, the amino acid substitution at position 296 of SEQ ID NO: 14487 or SEQ ID NO: 14484 is a substitution of a tryptophan (W) for a leucine (L). In certain embodiments, the amino acid substitution at position 296 of SEQ ID NO: 14487 or SEQ ID NO: 14484 is a substitution of a tyrosine (Y) for a leucine (L). In certain embodiments, the amino acid substitution at position 2% of SEQ ID NO: 14487 or SEQ ID NO: 14484 is a substitution of a phenylalanine (F) for a leucine (L). In certain embodiments, the amino acid substitution at position 298 of SEQ ID NO: 14487 or SEQ ID NO: 14484 is a substitution of a leucine (L) for a methionine (M). In certain embodiments, the amino acid substitution at position 298 of SEQ ID NO: 14487 or SEQ ID NO: 14484 is a substitution of an alanine (A) for a methionine (M). In certain embodiments, the amino acid substitution at position 298 of SEQ ID NO: 14487 or SEQ ID NO: 14484 is a substitution of a valine (V) for a methionine (M). In certain embodiments, the amino acid substitution at position 311 of SEQ ID NO: 14487 or SEQ ID NO: 14484 is a substitution of an isoleucine (I) for a proline (P). In certain embodiments, the amino acid substitution at position 311 of SEQ ID NO: 14487 or SEQ ID NO: 14484 is a substitution of a valine for a proline (P). In certain embodiments, the amino acid substitution at position 315 of SEQ ID NO: 14487 or SEQ ID NO: 14484 is a substitution of a lysine (K) for an arginine (R). In certain embodiments, the amino acid substitution at position 319 of SEQ ID NO: 14487 or SEQ ID NO: 14484 is a substitution of a glycine (G) for a threonine (T). In certain embodiments, the amino acid substitution at position 327 of SEQ ID NO: 14487 or SEQ ID NO: 14484 is a substitution of an arginine (R) for a tyrosine (Y). In certain embodiments, the amino acid substitution at position 328 of SEQ ID NO: 14487 or SEQ ID NO: 14484 is a substitution of a valine (V) for a tyrosine (Y). In certain embodiments, the amino acid substitution at position 340 of SEQ ID NO: 14487 or SEQ ID NO: 14484 is a substitution of a glycine (G) for a cysteine (C). In certain embodiments, the amino acid substitution at position 340 of SEQ ID NO: 14487 or SEQ ID NO: 14484 is a substitution of a leucine (L) for a cysteine (C). In certain embodiments, the amino acid substitution at position 421 of SEQ ID NO: 14487 or SEQ ID NO: 14484 is a substitution of a histidine (H) for the aspartic acid (D). In certain embodiments, the amino acid substitution at position 436 of SEQ ID NO: 14487 or SEQ ID NO: 14484 is a substitution of an isoleucine (I) for a valine (V). In certain embodiments, the amino acid substitution at position 456 of SEQ ID NO: 14487 or SEQ ID NO: 14484 is a substitution of a tyrosine (Y) for a methionine (M). In certain embodiments, the amino acid substitution at position 470 of SEQ ID NO: 14487 or SEQ ID NO: 14484 is a substitution of a phenylalanine (F) for a leucine (L). In certain embodiments, the amino acid substitution at position 485 of SEQ ID NO: 14487 or SEQ ID NO: 14484 is a substitution of a lysine (K) for a serine (S). In certain embodiments, the amino acid substitution at position 503 of SEQ ID NO: 14487 or SEQ ID NO: 14484 is a substitution of a leucine (L) for a methionine (M). In certain embodiments, the amino acid substitution at position 503 of SEQ ID NO: 14487 or SEQ ID NO: 14484 is a substitution of an isoleucine (I) for a methionine (M). In certain embodiments, the amino acid substitution at position 552 of SEQ ID NO: 14487 or SEQ ID NO: 14484 is a substitution of a lysine (K) for a valine (V). In certain embodiments, the amino acid substitution at position 570 of SEQ ID NO: 14487 or SEQ ID NO: 14484 is a substitution of a threonine (T) for an alanine (A). In certain embodiments, the amino acid substitution at position 591 of SEQ ID NO: 14487 or SEQ ID NO: 14484 is a substitution of a proline (P) for a glutamine (Q). In certain embodiments, the amino acid substitution at position 591 of SEQ ID NO: 14487 or SEQ ID NO: 14484 is a substitution of an arginine (R) for a glutamine (Q).

[0634] In certain embodiments of the methods of the disclosure, including those embodiments wherein the transposase comprises the above-described mutations at positions 30, 165, 282 and/or 538, the piggyBac® transposase enzyme may comprise or the Super piggyBac™ transposase enzyme may further comprise an amino acid substitution at one or more of positions 103, 194, 372, 375, 450, 509 and 570 of the sequence of SEQ ID NO: 14487 or SEQ ID NO: 14484. In certain embodiments of the methods of the disclosure, including those embodiments wherein the transposase comprises the above-described mutations at positions 30, 165, 282 and/or 538, the piggyBac® transposase enzyme may comprise or the Super piggyBac™ transposase enzyme may further comprise an amino acid substitution at two, three, four, five, six or more of positions 103, 194, 372, 375, 450, 509 and 570 of the sequence of SEQ ID NO: 14487 or SEQ ID NO: 14484. In certain embodiments, including those embodiments wherein the transposase comprises the above-described mutations at positions 30, 165, 282 and/or 538, the piggyBac® transposase enzyme may comprise or the Super piggyBac™ transposase enzyme may further comprise an amino acid substitution at positions 103, 194, 372, 375, 450, 509 and 570 of the sequence of SEQ ID NO: 14487 or SEQ ID NO: 14484. In certain embodiments, the amino acid substitution at position 103 of SEQ ID NO: 14487 or SEQ ID NO: 14484 is a substitution of a proline (P) for a serine (S). In certain embodiments, the amino acid substitution at position 194 of SEQ ID NO: 14487 or SEQ ID NO: 14484 is a substitution of a valine (V) for a methionine (M). In certain embodiments, the amino acid substitution at position 372 of SEQ ID NO: 14487 or SEQ ID NO: 14484 is a substitution of an alanine (A) for an arginine (R). In certain embodiments, the amino acid substitution at position 375 of SEQ ID NO: 14487 or SEQ ID NO: 14484 is a substitution of an alanine (A) for a lysine (K). In certain embodiments, the amino acid substitution at position 450 of SEQ ID NO: 14487 or SEQ ID NO: 14484 is a substitution of an asparagine (N) for an aspartic acid (D). In certain embodiments, the amino acid substitution at position 509 of SEQ ID NO: 14487 or SEQ ID NO: 14484 is a substitution of a glycine (G) for a serine (S). In certain embodiments, the amino acid substitution at position 570 of SEQ ID NO: 14487 or SEQ ID NO: 14484 is a substitution of a serine (S) for an asparagine (N). In certain embodiments, the piggyBac® transposase enzyme may comprise a substitution of a valine (V) for a methionine (M) at position 194 of SEQ ID NO: 14487. In certain embodiments, including those embodiments wherein the piggyBac® transposase enzyme may comprise a substitution of a valine (V) for a methionine (M) at position 194 of SEQ ID NO: 14487, the piggyBac® transposase enzyme may further comprise an amino acid substitution at positions 372, 375 and 450 of the sequence of SEQ ID NO: 14487 or SEQ ID NO: 14484. In certain embodiments, the piggyBac® transposase enzyme may comprise a substitution of a valine (V) for a methionine (M) at position 194 of SEQ ID NO: 14487, a substitution of an alanine (A) for an arginine (R) at position 372 of SEQ ID NO: 14487, and a substitution of an alanine (A) for a lysine (K) at position 375 of SEQ ID NO: 14487. In certain embodiments, the piggyBac® transposase enzyme may comprise a substitution of a valine (V) for a methionine (M) at position 194 of SEQ ID NO: 14487, a substitution of an alanine (A) for an arginine (R) at position 372 of SEQ ID NO: 14487, a substitution of an alanine (A) for a lysine (K) at position 375 of SEQ ID NO: 14487 and a substitution of an asparagine (N) for an aspartic acid (D) at position 450 of SEQ ID NO: 14487.

[0635] The sleeping beauty transposon is transposed into the target genome by the Sleeping Beauty transposase that recognizes ITRs, and moves the contents between the ITRs into TA chromosomal sites. In various embodiments, SB transposon-mediated gene transfer, or gene transfer using any of a number of similar transposons, may be used in the compositions and methods of the disclosure.

[0636] In certain embodiments, and, in particular, those embodiments wherein the transposon is a Sleeping Beauty transposon, the transposase is a Sleeping Beauty transposase or a hyperactive Sleeping Beauty transposase (SB100X).

[0637] In certain embodiments of the methods of the disclosure, the Sleeping Beauty transposase enzyme comprises an amino acid sequence at least 75%, 80%, 85%, 90%, 95%, 99% or any percentage in between identical to:

(SEQ ID NO: 14485)

| | |
|---|---|
| 1 | MGKSKEISQD LRKKIVIDLHK SGSSLGAISK RLKVPRSSVQ |
| | TIVRKYKHHG TTQPSYRSGR |
| 61 | RPVLSPRDER TLVRKVQINP RTTAKDLVKM LEETGTKVSI |
| | STVKRVLYRH NLKGRSARKK |
| 121 | PLLQNRHKKP RLRFATAHGD KDRTFWRNVL WSDETKIELF |
| | GHNDHRYVWR KKGEACKPKN |
| 181 | TIPTVKHGGG SIMLWGCFAA GGTGAIHKID GIMRKENYVD |
| | ILKQHLKTSV RKLKLGRKWV |
| 241 | FQMDNDPKHT SKVVAKWLKD NKVKVLEWPS QSPDLNPIEN |
| | LWAELKKRVR ARRPTNLTQL |
| 301 | HQLCQEEWAK IHPTYCGKLV EGYPKRLTQV KQFKGNATKY. |

[0638] In certain embodiments of the methods of the disclosure, the hyperactive Sleeping Beauty (SB100X) transposase enzyme comprises an amino acid sequence at least 75%, 80%, 85%, 90%, 95%, 99% or any percentage in between identical to:

(SEQ ID NO: 14486)

| | |
|---|---|
| 1 | MGKSKEISQD LRKKIVIDLHK SGSSLGAISK RLKVPRSSVQ |
| | TIVRKYKHHG TTQPSYRSGR |
| 61 | RPVLSPRDER TLVRKVQINP RTTAKDLVKM LEETGTKVSI |
| | STVKRVLYRH NLKGRSARKK |
| 121 | PLLQNRHKKP RLRFATAHGD KDRTFWRNVL WSDETKIELF |
| | GHNDHRYVWR KKGEACKPKN |
| 181 | TIPTVKHGGG SIMLWGCFAA GGTGAIHKID GIMRKENYVD |
| | ILKQHLKTSV RKLKLGRKWV |
| 241 | FQMDNDPKHT SKVVAKWLKD NKVKVLEWPS QSPDLNPIEN |
| | LWAELKKRVR ARRPTNLTQL |
| 301 | HQLCQEEWAK IHPTYCGKLV EGYPKRLTQV KQFKGNATKY. |

[0639] The Helraiser transposon is transposed by the Helitron transposase. Helitron transposases mobilize the Helraiser transposon, an ancient element from the bat genome that was active about 30 to 36 million years ago. An exemplary Helraiser transposon of the disclosure includes Helibat1, which comprises a nucleic acid sequence comprising:

(SEQ ID NO: 17006)

| | |
|---|---|
| 1 | TCCTATATAA TAAAAGAGAA ACATGCAAAT TGACCTCCC |
| | TCCGCTACGC TCAAGCCACG |
| 61 | CCCACCAGCC AATCAGAAGT GACTATGCAA ATTAACCCAA |
| | CAAAGATGGC AGTTAAATTT |
| 121 | GCATACGCAG GTGTCAAGCG CCCCAGGAGG CAACGGCGGC |
| | CGCGGGCTCC CAGGACCTTC |
| 181 | GCTGGCCCCG GGAGGCGAGG CCGGCCGCGC CTAGCCACAC |
| | CCGCGGGCTC CCGGGACCTT |
| 241 | CGCCAGCAGA GAGCAGAGCG GGAGAGCGGG CGGAGAGCGG |
| | GAGGTTTGGA GGACTTGGCA |
| 301 | GAGCAGGAGG CCGCTGGACA TAGAGCAGAG CGAGAGAGAG |
| | GGTGGCTTGG AGGGCGTGGC |
| 361 | TCCCTCTGTC ACCCCAGCTT CCTCATCACA GCTGTGGAAA |
| | CTGACAGCAG GGAGGAGGAA |
| 421 | GTCCCACCCC CACAGAATCA GCCAGAATCA GCCGTTGGTC |
| | AGACAGCTCT CAGCGGCCTG |
| 481 | ACAGCCAGGA CTCTCATTCA CCTGCATCTC AGACCGTGAC |
| | AGTAGAGAGG TGGGACTATG |
| 541 | TCTAAAGAAC AACTGTTGAT ACAACGTAGC TCTGCAGCCG |
| | AAAGATGCCG GCGTTATCGA |
| 601 | CAGAAAATGT CTGCAGAGCA ACGTGCGTCT GATCTTGAAA |
| | GAAGGCGGCG CCTGCAACAG |
| 661 | AATGTATCTG AAGAGCAGCT ACTGGAAAAA CGTCGCTCTG |
| | AAGCCGAAAA ACAGCGGCGT |
| 721 | CATCGACAGA AAATGTCTAA AGACCAACGT GCCTTTGAAG |
| | TTGAAAGAAG GCGGTGGCGA |
| 781 | CGACAGAATA TGTCTAGAGA ACAGTCATCA ACAAGTACTA |
| | CCAATACCGG TAGGAACTGC |
| 841 | CTTCTCAGCA AAAATGGAGT ACATGAGGAT GCAATTCTCG |
| | AACATAGTTG TGGTGGAATG |
| 901 | ACTGTTCGAT GTGAATTTTG CCTATCACTA AATTTCTCTG |
| | ATGAAAAACC ATCCGATGGG |
| 961 | AAATTTACTC GATGTTGTAG CAAAGGGAAA GTCTGTCCAA |
| | ATGATATACA TTTTCCAGAT |
| 1021 | TACCCGGCAT ATTTAAAAAG ATTAATGACA AACGAAGATT |
| | CTGACAGTAA AAATTTCATG |
| 1081 | GAAAATATTC GTTCCATAAA TAGTTCTTTT GCTTTTGCTT |
| | CCATGGGTGC AAATATTGCA |
| 1141 | TCGCCATCAG GATATGGGCC ATACTGTTTT AGAATACACG |
| | GACAAGTTTA TCACCGTACT |
| 1201 | GGAACTTTAC ATCCTTCGGA TGGTGTTTCT CGGAAGTTTG |
| | CTCAACTCTA TATTTTGGAT |
| 1261 | ACAGCCGAAG CTACAAGTAA AAGATTAGCA ATGCCAGAAA |
| | ACCAGGGCTG CTCAGAAAGA |
| 1321 | CTCATGATCA ACATCAACAA CCTCATGCAT GAAATAAATG |
| | AATTAACAAA ATCGTACAAG |
| 1381 | ATGCTACATG AGGTAGALAA GGAAGCCCAA TCTGAAGCAG |
| | CAGCAAAAGG TATTGCTCCC |
| 1441 | ACAGAAGTAA CAATGGCGAT TAAATACGAT CGTAACAGTG |
| | ACCCAGGTAG ATATAATTCT |
| 1501 | CCCCGTGTAA CCGAGGTTGC TGTCATATTC AGAAACGAAG |
| | ATGGAGAACC TCCTTTTGAA |
| 1561 | AGGGACTTGC TCATTCATTG TAAACCAGAT CCCAATAATC |
| | CAAATGCCAC TAAAATGAAA |
| 1621 | CAAATCAGTA TCCTGTTTCC TACATTAGAT GCAATGACAT |
| | ATCCTATTCT TTTTCCACAT |
| 1681 | GGTGAAAAAG GCTGGGGAAC AGATATTGCA TTAAGACTCA |
| | GAGACAACAG TGTAATCGAC |
| 1741 | AATAATACTA GACAALATGT AAGGACACGA GTCACACAAA |
| | TGCAGTATTA TGGATTTCAT |
| 1801 | CTCTCTGTGC GGGACACGTT CAATCCTATT TTAAATGCAG |
| | GAAAATTAAC TCAACAGTTT |
| 1861 | ATTGTGGATT CATATTCAAA AATGGAGGCC AATCGGATAA |
| | ATTTCATCAA AGCAAACCAA |
| 1921 | TCTAAGTTGA GAGTTGAAAA ATATAGTGGT TTGATGGATT |
| | ATCTCAAATC TAGATCTGAA |
| 1981 | AATGACAATG TGCCGATTGG TAAAATGATA ATACTTCCAT |
| | CATCTTTTGA GGGTAGTCCC |
| 2041 | AGAAATATGC AGCAGCGATA TCAGGATGCT ATGGCAATTG |
| | TAACGAAGTA TGGCAAGCCC |
| 2101 | GATTTATTCA TAACCATGAC ATGCAACCCC AAATGGGCAG |
| | ATATTACAAA CAATTTACAA |
| 2161 | CGCTGGCAAA AAGTTGAALA CAGACCTGAC TTGGTAGCCA |
| | GAGTTTTTLA TATTAAGCTG |
| 2221 | AATGCTCTTT TALATGATAT ATGTAAATTC CATTTATTTG |
| | GCAAAGTAAT AGCTAAAATT |
| 2281 | CATGTCATTG AATTTCAGAA ACGCGGACTG CCTCACGCTC |
| | ACATATTATT GATATTAGAT |
| 2341 | AGTGAGTCCA AATTACGTTC AGAAGATGAC ATTGACCGTA |
| | TAGTTAAGGC AGAAATTCCA |
| 2401 | GATGAAGACC AGTGTCCTCG ACTTTTTCAA ATTGTAAAAT |
| | CAAATATGGT ACATGGACCA |
| 2461 | TGTGGAATAC AAAATCCAAA TAGTCCATGT ATGGAAAATG |
| | GAAAATGTTC AAAGGGATAT |
| 2521 | CCAAAAGAAT TTCAAAATGC GACCATTGGA AATATTGATG |
| | GATATCCCAA ATACAAACGA |
| 2581 | AGATCTGGTA GCACCATGTC TATTGGALAT AAAGTTGTCG |
| | ATAACACTTG GATTGTCCCT |
| 2641 | TATAACCCGT ATTTGTGCCT TAAATATAAC TGTCATATAA |
| | ATGTTGAAGT CTGTGCATCA |
| 2701 | ATTAAAAGTG TCAAATATTT ATTTAAATAC ATCTATAAAG |
| | GGCACGATTG TGGAAATATT |
| 2761 | CAAATTTCTG AAAAAAATAT TATCAATCAT GACGAAGTAC |
| | AGGACTTCAT TGACTCCAGG |
| 2821 | TATGTGAGCG CTCCTGAGGC TGTTTGGAGA CTTTTTGCAA |
| | TGCGAATGCA TGACCAATCT |
| 2881 | CATGCAATCA CAAGATTAGC TATTCATTTG CCAAATGATC |
| | AGAATTTGTA TTTTCATACC |
| 2941 | GATGATTTTG CTGAAGTTTT AGATAGGGCT AAAAGGCATA |
| | ACTCGACTTT GATGGCTTGG |
| 3001 | TTCTTATTGA ATAGAGAAGA TTCTGATGCA CGTAATTATT |
| | ATTATTGGGA GATTCCACAG |
| 3061 | CATTATGTGT TTAATAATTC TTTGTGGACA AAACGCCGAA |
| | AGGGTGGGAA TAAAGTATTA |
| 3121 | GGTAGACTGT TCACTGTGAG CTTTAGAGAA CCAGAACGAT |
| | ATTACCTTAG ACTTTTGCTT |
| 3181 | CTGCATGTAA AAGGTGCGAT AAGTTTTGAG GATCTGCGAA |
| | CTGTAGGAGG TGTAACTTAT |
| 3241 | GATACATTTC ATGAAGCTGC TAAACACCGA GGATTATTAC |
| | TTGATGACAC TATCTGGAAA |
| 3301 | GATACGATTG ACGATGCAAT CATCCTTAAT ATGCCCAAAC |
| | AACTACGGCA ACTTTTTGCA |
| 3361 | TATATATGTG TGTTTGGATG TCCTTCTGCT GCAGACAAAT |
| | TATGGGATGA GAATAAATCT |
| 3421 | CATTTTATTG AAGATTTCTG TTGGAAATTA CACCGAAGAG |
| | AAGGTGCCTG TGTGAACTGT |
| 3481 | GAAATGCATG CCCTTAACGA AATTCAGGAG GTATTCACAT |
| | TGCATGGAAT GAAATGTTCA |
| 3541 | CATTTCAAAC TTCCGGACTA TCCTTTATTA ATGAATGCAA |
| | ATACATGTGA TCAATTGTAC |
| 3601 | GAGCAACAAC AGGCAGAGGT TTTGATAAAT TCTCTGAATG |
| | ATGAACAGTT GGCAGCCTTT |
| 3661 | CAGACTATAA CTTCAGCCAT CGAAGATCAA ACTGTACACC |
| | CCAAATGCTT TTTCTTGGAT |
| 3721 | GGTCCAGGTG GTAGTGGAAA AACATATCTG TATAAAGTTT |
| | TAACACATTA TATTAGAGGT |
| 3781 | CGTGGTGGTA CTGTTTTACC CACAGCATCT ACAGGAATTG |
| | CTGCAAATTT ACTTCTTGGT |
| 3841 | GGAAGAACCT TTCATTCCCA ATATAAATTA CCAATTCCAT |
| | TAAATGAAAC TTCAATTTCT |
| 3901 | AGACTCGATA TAAAGAGTGA AGTTGCTAAA ACCATTAAAA |
| | AGGCCCAACT TCTCATTATT |
| 3961 | GATGAATGCA CCATGGCATC CAGTCATGCT ATAAACGCCA |
| | TAGATAGATT ACTAAGAGAA |
| 4021 | ATTATGAATT TGAATGTTGC ATTTGGTGGG AAAGTTCTCC |
| | TTCTCGGAGG GGATTTTCGA |
| 4081 | CAATGTCTCA GTATTGTACC ACATGCTATG CGATCGGCCA |
| | TAGTACAAAC GAGTTTAAAG |
| 4141 | TACTGTAATG TTTGGGGATG TTTCAGAAAG TTGTCTCTTA |
| | AAACAAATAT GAGATCAGAG |
| 4201 | GATTCTGCTT ATAGTGAATG GTTAGTAAAA CTTGGAGATG |
| | GCAAACTTGA TAGCAGTTTT |
| 4261 | CATTTAGGAA TGGATATTAT TGAAATCCCC CATGAAATGA |
| | TTTGTAACGG ATCTATTATT |
| 4321 | GAAGCTACCT TTGGAAATAG TATATCTATA GATAATATTA |
| | AAAATATATC TAAACGTGCA |
| 4381 | ATTCTTTGTC CAAAAAATCA GCATGTTCAA AAATTAAATG |
| | AAGAAATTTT GGATATACTT |
| 4441 | GATGGAGATT TTCACACATA TTTGAGTGAT GATTCCATTG |
| | ATTCAACAGA TGATGCTGAA |
| 4501 | AAGGAAAATT TTCCCATCGA ATTTCTTAAT AGTATTACTC |
| | CTTCGGGAAT GGCGTGTCAT |
| 4561 | AAATTAAAAT TGAAAGTGGG TGCAATCATC ATGCTATTGA |
| | GAAATCTTLA TAGTAAATGG |
| 4621 | GGTCTTTGTA ATGGTACTAG ATTTATTATC AAAAGATTAC |
| | CACCTAACAT TATCGAAGCT |
| 4681 | GAAGTATTAA CAGGATCTGC AGAGGGAGAG GTTGTTCTGA |
| | TTCCAAGAAT TGATTTGTCC |
| 4741 | CCATCTGACA CTGGCCTCCC ATTTAAATTA ATTCGAAGAC |
| | AGTTTCCCGT GATGCCAGCA |
| 4801 | TTTGCGATGA CTATTAATAA ATCACAAGGA CAAACTCTAG |
| | ACAGAGTAGG AATATTCCTA |
| 4861 | CCTGAACCCG TTTTCGCACA TGGTCAGTTA TATGTTGCTT |
| | TCTCTCGAGT TCGAAGAGCA |
| 4921 | TGTGACGTTA AAGTTAAAGT TGTAAATACT TCATCACAAG |
| | GGAAATTAGT CAAGCACTCT |
| 4981 | GAAAGTGTTT TTACTCTTAA TGTGGTATAC AGGGAGATAT |
| | TAGAATAAGT TTAATCACTT |
| 5041 | TATCAGTCAT TGTTTGCATC AATGTTGTTT TTATATCATG |
| | TTTTTGTTGT TTTTATATCA |
| 5101 | TGTCTTTGTT GTTGTTATAT CATGTTGTTA TTGTTTATTT |
| | ATTAATAAAT TTATGTATTA |
| 5161 | TTTTCATATA CATTTTACTC ATTTCCTTTC ATCTCTCACA |
| | CTTCTATTAT AGAGAAAGGG |
| 5221 | CAAATAGCAA TATTAAAATA TTTCCTCTAA TTAATTCCCT |
| | TTLAATGTGC ACGAATTTCG |
| 5281 | TGCACCGGGC CACTAG. |

[0640] Unlike other transposases, the Helitron transposase does not contain an RNase-H like catalytic domain, but instead comprises a RepHel motif made up of a replication initiator domain (Rep) and a DNA helicase domain. The Rep domain is a nuclease domain of the HUH superfamily of nucleases.

[0641] An exemplary Helitron transposase of the disclosure comprises an amino acid sequence comprising:

(SEQ ID NO: 14501)

| | |
|---|---|
| 1 | MSKEQLLIQR SSAAERCRRY RQKMSAEQRA SDLERRRRLQ |
| | QNVSEEQLLE KRRSEAEKQR |
| 61 | RHRQKMSKDQ RAFEVERRRW RRQNMSREQS STSTTNTGRN |
| | CLLSKNGVHE DAILEHSCGG |
| 121 | MTVRCEFCLS LNFSDEKPSD GKFTRCCSKG KVCPNDIHEP |
| | DYPAYLKRLM TNEDSDSKNF |
| 181 | MENIRSINSS FAFASMGANI ASPSGYGPYC FRIHGQVYHR |
| | TGTLHPSDGV SRKFAQIYIL |
| 241 | DTAEATSKRL AMPENQGCSE RLMININNLM HEINELTKSY |
| | KMLHEVEKEA QSEAAAKGIA |
| 301 | PTEVTMAIKY DRNSDPGRYN SPRVTEVAVI FRNEDGEPPF |
| | ERDLLIHCKP DPNNPNATKM |
| 361 | KQISILFPTL DAMTYPILFP HGEKGWGTDI ALRLRDNSVI |
| | DNNTRQNVRT RVTQMQYYGF |
| 421 | HLSVRDTFNP ILNAGKLTQQ FIVDSYSKME ANRINFIKAN |
| | QSKLRVEKYS GLMDYLKSRS |
| 481 | ENDNVPIGKM IILPSSFEGS PRNMQQRYQD AMAIVTKYGK |
| | PDLFITMTCN PKWADITNNL |
| 541 | QRWQKVENRP DLVARVFNIK LNAILNDICK FHLFGKVIAK |
| | IHVIEFQKRG LPHAEILLIL |
| 601 | DSESKLRSED DIDRIVKAEI PDEDQCPRLF QIVYSNMVHG |
| | PCGIQNPNSP CMENGKCSKG |
| 661 | YPKEFQNATI GNIDGYPKYK RRSGSTMSIG NKVVDNTWIV |
| | PYNPYLCLKY NCHINVEVCA |
| 721 | SIKSVKYLFK YIYKGHDCAN IQISEKNIIN HDEVQDFIDS |
| | RYVSAPEAVW RLFAMRMHDQ |
| 781 | SHAITRLAIH LPNDQNLYFH TDDFAEVLDR AKRHNSTLMA |
| | WELLNREDSD ARNYYYWEIP |
| 841 | QHYVENNSLW TKRRKGGNKV LGRLFTVSFR EPERYYLRLL |
| | LLHVKGAISF EDLRTVGGVT |
| 901 | YDTFHEAAKH RGLLLDDTIW KDTIDDAIIL NMPKQLRQLF |
| | AYICVFGCPS AADKLWDENK |
| 961 | SHFIEDFCWK LHRREGACVN CEMHALNEIQ EVETLEGMKC |
| | SHFKLPDYPL LMNANTCDQL |
| 1021 | YEQQQAEVLI NSINDEQLAA FQTITSAIED QTVHPKCFFL |
| | DGPGGSGKTY LYKVITHYIR |
| 1081 | GRGGTVLPTA STGIAANLLL GGRTFHSQYK LPIPLNETSI |
| | SRLDIKSEVA KTIKKAQLLI |
| 1141 | IDECTMASSH AINAIDRLLR EIMNLNVAFG GKVILLGGDF |
| | RQCLSIVPHA MRSAIVQTSL |
| 1201 | KYCNVWGCFR KLSLKTNMRS EDSAYSEWLV KIGDGKLDSS |
| | FHLGMDIIEI PHEMICNGSI |
| 1261 | IEATFGNSIS IDNIKNISKR AILCPKNEHV QKLNEEILDI |
| | LDGDFHTYLS DDSIDSTDDA |
| 1321 | EKENFPIEFL NSITPSGMPC HKLKLKVGAI IMILRNLNSK |
| | WGLCNGTRFI IKRIRPNIIE |
| 1381 | AEVLTGSAEG EVVLIPPIDL SPSDTGLPFK LIRRQFPVMP |
| | AFAMTINKSQ GQTLDRVGIF |
| 1441 | LPEPVFAHGQ LYVAFSRVRR ACDVKVKVVN TSSQGKLVKH |
| | SESVFTLNVV YREILE. |

[0642] In Helitron transpositions, a hairpin close to the 3′ end of the transposon functions as a terminator. However, this hairpin can be bypassed by the transposase, resulting in the transduction of flanking sequences. In addition, Helraiser transposition generates covalently closed circular intermediates. Furthermore, Helitron transpositions can lack target site duplications. In the Helraiser sequence, the transposase is flanked by left and right terminal sequences termed LTS and RTS. These sequences terminate with a conserved 5′-TC/CTAG-3′ motif. A 19 bp palindromic sequence with the potential to form the hairpin termination structure is located 11 nucleotides upstream of the RTS and consists of the sequence

(SEQ ID NO: 14500)
GTGCACGAATTTCGTGCACCGGCCACTAG.

[0643] Tol2 transposons may be isolated or derived from the genome of the medaka fish, and may be similar to transposons of the hAT family. Exemplary Tol2 transposons of the disclosure are encoded by a sequence comprising about 4.7 kilobases and contain a gene encoding the Tol2 transposase, which contains four exons. An exemplary Tol2 transposase of the disclosure comprises an amino acid sequence comprising the following:

(SEQ ID NO: 14502)

| | |
|---|---|
| 1 | MEEVCDSSAA ASSTVQNQPQ DQEHPWIPYLR EFFSLSGVNK |
| | DSFKMKCVLC LPLNKEISAF |
| 61 | KSSPSNLRKE IERMHPNYLK NYSKLTAQKR KIGTSTHASS |
| | SKQLKVDSVF PVKEVSPVTV |
| 121 | NKAILRYIIQ GLHPFSTVDL PSFKELISTL QPGISVITRP |
| | TLRSKIAEAA LIMEQKVTAA |
| 181 | MSEVEWIATT TDCWTARRKS FIGVTAHWIN PGSLERHSAA |
| | LACKRLMGSH TFEVLASAMN |
| 241 | DIHSEYEIRD KVVCTTTDSG SNFMKAFRVF GVENNDIETE |
| | ARRCESDDTD SEGCGEGSDG |
| 301 | VEFQDASRVL DQDDGFEFQL PKHQKCACHL LNLVSSVDAQ |
| | KALSNEHYKK LYRSVFGKCQ |
| 361 | ALWNKSSRSA LPAEAVESES RLQLLRPNQT RWNSTFMAVD |
| | RILQICKEAG EGALRNICTS |
| 421 | LEVPMFNPAE MLFLTEWANT MRPVAKVLDI LQAETNTQLG |
| | WLLPSVHQLS LKLQRLHHSL |
| 481 | RYCDPLVDAI QQGIQTRFKH MFEDPEIIAA AILLPKFRTS |
| | WTNDETIIKR GMDYIRVHLE |
| 541 | PLDHKKELAN SSSDDEDFFA SLKPTTHEAS KELDGYLACV |
| | SDTRESLLTF PAICSLSIKT |
| 501 | NTPLPASAAC ERLFSTAGLL FSPKPARLDT NNFENQLLLK |
| | LNLREYNFE. |

[0644] An exemplary Tol2 transposon of the disclosure, including inverted repeats, subterminal sequences and the Tol2 transposase, is encoded by a nucleic acid sequence comprising the following:

(SEQ ID NO: 17007)

| | |
|---|---|
| 1 | CAGAGGTGTA AAGTACTTGA GTAATTTTAC TTGATTACTG |
| | TACTTAAGTA TTATTTTTGG |
| 61 | GGATTTTTAC TTTACTTGAG TACAATTAAA AATCAATACT |
| | TTTACTTTTA CTTAATTACA |
| 121 | TTTTTTTAGA AAAAAAAGTA CTTTTTACTC CTTACAATTT |
| | TATTTACAGT CAAAAAGTAC |
| 181 | TTATTTTTTG GAGATCACTT CATTCTATTT TCCCTTGCTA |
| | TTACCAAACC AATTGAATTG |
| 241 | CGCTGATGCC CAGTTTAATT TAAATGTTAT TTATTCTGCC |
| | TATGALLATC GTTTTCACAT |
| 301 | TATATGAAAT TGGTCAGACA TGTTCATTGG TCCTTTGGAA |
| | GTGACGTCAT GTCACATCTA |
| 361 | TTACCACAAT GCACAGCACC TTGACCTGGA AATTAGGGAA |
| | ATTATAACAG TCAATCAGTG |
| 421 | GAAGAAAATG GAGGAAGTAT GTGATTCATC AGCAGCTGCG |
| | AGCAGCACAG TCCAAAATCA |
| 481 | GCCACAGGAT CAAGAGCACC CGTGGCCGTA TCTTCGCGAA |
| | TTCTTTTCTT TAAGTGGTGT |
| 541 | AAATAAAGAT TCATTCAAGA TGAAATGTGT CCTCTGTCTC |
| | CCGCTTAATA AAGAAATATC |
| 601 | GGCCTTCAAA AGTTCGCCAT CAAACCTAAG GAAGCATATT |
| | GAGGTAAGTA CATTAAGTAT |
| 661 | TTTGTTTTAC TGATAGTTTT TTTTTTTTTT TTTTTTTTTT |
| | TTTTTGGGTG TGCATGTTTT |
| 721 | GACGTTGATG GCGCGCCTTT TATATGTGTA GTAGGCCTAT |
| | TTTCACTAAT GCATGCGATT |
| 781 | GACAATATAA GGCTCACGTA ATAAAATGCT AAAATGCATT |
| | TGTAATTGGT AACGTTAGGT |
| 841 | CCACGGGAAA TTTGGCGCCT ATTGCAGCTT TGAATAATCA |
| | TTATCATTCC GTGCTCTCAT |
| 901 | TGTGTTTGAA TTCATGCAAA ACACAAGAAA ACCAAGCGAG |
| | AAATTTTTTT CCAAACATGT |
| 961 | TGTATTGTCA AAACGGTAAC ACTTTACAAT GAGGTTGATT |
| | AGTTCATGTA TTAACTAACA |
| 1021 | TTAAATAACC ATGAGCAATA CATTTGTTAC TGTATCTGTT |
| | AATGTTTGTT AACGTTAGTT |
| 1081 | AATAGAANTA CAGATGTTCA TTGTTTGTTC ATGTTAGTTC |
| | ACAGTGCATT AACTAATGTT |
| 1141 | AACAAGATAT AAAGTATTAG TAAATGTTGA AATTAACATG |
| | TATACGTGCA GTTCATTATT |
| 1201 | AGTTCATGTT AACTAATGTA GTTAACTAAC GAACCTTATT |
| | GTAAAAGTGT TACCATCAAA |
| 1261 | ACTAATGTAA TGAAATCAAT TCACCCTGTC ATGTCAGCCT |
| | TAGAGTCCTG TGTTTTTGTC |
| 1321 | AATATAATCA GAAATAAAAT TAATGTTTGA TTGTCACTAA |
| | ATGCTACTGT ATTTCTAAAA |
| 1381 | TCAACAAGTA TTTAACATTA TAAAGTGTGC AATTGGCTGC |
| | AAATGTCAGT TTTATTAAAG |
| 1441 | GGTTAGTTCA CCCAAAAATG AAAATAATGT CATTAATGAC |
| | TCGCCCTCAT GTCGTTCCAA |
| 1501 | GCCCGTAAGA CCTCCGTTCA TCTTCAGAAC ACAGTTTAAG |
| | ATATTTTAGA TTTAGTCCGA |
| 1561 | GAGCTTTCTG TGCCTCCATT GAGAATGTAT GTACGGTATA |
| | CTGTCCATGT CCAGAAAGGT |
| 1621 | AATAAAAACA TCAAAGTAGT CCATGTGACA TCAGTGGGTT |
| | AGTTAGAATT TTTTGAAGCA |
| 1681 | TCGAATACAT TTTGGTCCAA AAATAACAAA ACCTACGACT |
| | TTATTCGGCA TTGTATTCTC |
| 1741 | TTCCGGGTCT GTTGTCAATC CGCGTTCACG ACTTCGCAGT |
| | GACGCTACAA TGCTGAATAA |
| 1801 | AGTCGTAGGT TTTGTTATTT TTGGACCAAA ATGTATTTTC |
| | GATGCTTCAA ATAATTCTAG |
| 1861 | CTAACCCACT GATGTCACAT GGACTACTTT GATGTTTTTA |
| | TTACCTTTCT GGACATGGAC |
| 1921 | AGTATACCGT ACATACATTT TCAGTGGAGG GACAGAAAGC |
| | TCTCGGACTA AATCTAAAAT |
| 1981 | ATCTTAAACT GTGTTCCGAA GATGAACGGA GGTGTTACGG |
| | GCTTGGAACG ACATGAGGGT |
| 2041 | GAGTCATTAA TGACATCTTT TCATTTTTGG GTGAACTAAC |
| | CCTTTAATGC TGTAATCAGA |
| 2101 | GAGTGTATGT GTAATTGTTA CATTTATTGC ATACAATATA |
| | AATATTTATT TGTTGTTTTT |
| 2161 | ACAGAGAATG CACCCAAATT ACCTCAAAAA CTACTCTAAA |
| | TTGAGAGCAC AGAAGAGAAA |
| 2221 | GATCGGGACC TCCACCCATG CTTCCAGCAG TAAGCAACTG |
| | AAAGTTGACT CAGTTTTCCC |
| 2281 | AGTCAAAGAT GTGTCTCCAG TCACTGTGAA CAAAGCTATA |
| | TTAAGGTACA TCATTCAAGG |
| 2341 | ACTTCATCCT TTCAGCACTG TTGATCTGCC ATCATTTAAA |
| | GAGCTGATTA GTACACTGCA |
| 2401 | GCCTGGCATT TCTGTCATTA CAAGGCCTAC TTTACGGTCC |
| | AAGATAGCTG AAGCTGCTCT |
| 2461 | GATCATGAAA CAGAAAGTGA CTGCTGCCAT GAGTGAAGTT |
| | GAATGGATTG CAACCACAAC |
| 2521 | GGATTGTTGG ACTGCACGTA GAAAGTCATT CATTGGTGTA |
| | ACTGCTCACT GGATCAACCC |
| 2581 | TGGAAGTCTT GAAAGACATT CCGCTGCACT TGCCTGCAAA |
| | AGATTAATGG GCTCTCATAC |
| 2641 | TTTTGAGGTA CTGGCCAGTG CCATGAATGA TATCCACTCA |
| | GAGTATGAAA TACGTGACAA |
| 2701 | GGTTGTTTGC ACAACCACAG ACAGTGGTTC CAACTTTATG |
| | AAGGCTTTCA GAGTTTTTGG |
| 2761 | TGTGGAAAAC AATGATATCG AGACTGAGGC AAGAAGGTGT |
| | GAAAGTGATG ACACTGATTC |
| 2821 | TGAAGGCTGT GGTGAGGGAA GTGATGGTGT GGAATTCCAA |
| | GATGCCTCAC GAGTCCTGGA |
| 2881 | CCAAGACGAT GGCTTCGAAT TCCAGCTACC AAAACATCAA |
| | AAGTGTGCCT GTCACTTACT |
| 2941 | TAACCTAGTC TCAAGCGTTG ATGCCCAAAA AGCTCTCTCA |
| | AATGAAGACT ACAAGAAACT |
| 3001 | CTACAGATCT GTCTTTGGCA AATGCCAAGC TTTATGGAAT |
| | AAAAGCAGCC GATCGGCTCT |
| 3061 | AGCAGCTGAA GCTGTTGAAT CAGAAAGCCG GCTTCAGCTT |
| | TTAAGGCCAA ACCAAACGCG |
| 3121 | GTGGAATTCA ACTTTTATGG CTGTTGACAG AATTCTTCAA |
| | ATTTGCAAAG AAGCAGGAGA |
| 3181 | AGGCGCAGTT CGGAATATAT GCACCTCTCT TGAGGTTCCA |
| | ATGTAAGTGT TTTTCCCCTC |
| 3241 | TATCGATGTA AACAAATGTG GGTTGTTTTT GTTTAATACT |
| | CTTTGATTAT GCTGATTTCT |
| 3301 | CCTGTAGGTT TAATCCAGCA GAAATGCTGT TCTTGACAGA |
| | GTGGGCCAAC ACAATGCGTC |
| 3361 | CAGTTGCAAA AGTACTCGAC ATCTTGCAAG CGGAAACGAA |
| | TACACAGCTG GGGTGGCTGC |
| 3421 | TGCCTAGTGT CCATCAGTTA AGCTTGAAAC TTCAGCGACT |
| | CCACCATTCT CTCAGGTACT |
| 3481 | GTGACCCACT TGTGGATGCC CTACAACAAG GAATCCAAAC |
| | ACGATTCAAG CATATGTTTG |
| 3541 | AAGATCCTGA GATCATAGCA GCTGCCATCC TTCTCCCTAA |
| | ATTTCGGACC TCTTGGACAA |
| 3601 | ATGATGAAAC CATCATAAAA CGAGGTAAAT GAATGCAAGC |
| | AACATACACT TGACGAATTC |
| 3661 | TAATCTGGGC AACCTTTGAG CCATACCAAA ATTATTCTTT |
| | TATTTATTTA TTTTTGCACT |
| 3721 | TTTTAGGAAT GTTATATCCC ATCTTTGGCT GTGATCTCAA |
| | TATGAATATT GATGTAAAGT |
| 3781 | ATTCTTGCAG CAGGTTGTAG TTATCCCTCA GTGTTTCTTG |
| | AAACCAAACT CATATGTATC |
| 3841 | ATATGTGGTT TGGAAATGCA GTTAGATTTT ATGCTAAAAT |
| | AAGGGATTTG CATGATTTTA |
| 3901 | GATGTAGATG ACTGCACGTA AATGTAGTTA ATGACAAAAT |
| | CCATAALATT TGTTCCCAGT |
| 3961 | CAGAAGCCCC TCAACCAAAC TTTTCTTTGT GTCTGCTCAC |
| | TGTGCTTGTA GGCATGGACT |
| 4021 | ACATCAGAGT GCATCTGGAG CCTTTGGACC ACAAGAAGGA |
| | ATTGGCCAAC AGTTCATCTG |
| 4081 | ATGATGAAGA TTTTTTCGCT TCTTTGAAAC CGACAACACA |
| | TGAAGCCAGC AAAGAGTTGG |
| 4141 | ATGGATATCT GGCCTGTGTT TCAGACACCA GGGAGTCTCT |
| | GCTCACGTTT CCTGCTATTT |
| 4201 | GCAGCCTCTC TATCAAGACT AATACACCTC TTCCCGCATC |
| | GGCTGCCTGT GAGAGGCTTT |
| 4261 | TCAGCACTGC AGGATTGCTT TTCAGCCCCA AAAGAGCTAG |
| | GCTTGACACT AACAATTTTG |
| 4321 | AGAATCAGCT TCTACTGAAG TTAAATCTGA GGTTTTACAA |
| | CTTTGAGTAG CGTGTACTGG |
| 4381 | CATTAGATTG TCTGTCTTAT AGTTTGATAA TTAAATACAA |
| | ACAGTTCTAA AGCAGGATAA |
| 4441 | AACCTTGTAT GCATTTCATT TAATGTTTTT TGAGATTAAA |
| | AGCTTALACA AGAATCTCTA |
| 4501 | GTTTTCTTTC TTGCTTTTAC TTTTACTTCC TTAATACTCA |
| | AGTACAATTT TAATGGAGTA |
| 4561 | CTTTTTTACT TTTACTCAAG TAAGATTCTA GCCAGATACT |
| | TTTACTTTTA ATTGAGTAAA |
| 4621 | ATTTTCCCTA AGTACTTGTA CTTTCACTTG AGTAAAATTT |
| | TTGAGTACTT TTTACACCTC |
| 4681 | TG. |

[0645] Exemplary transposon/transposase systems of the disclosure include, but are not limited to, piggyBac® and piggyBac-like transposons and transposases.

[0646] PiggyBac® and piggyBac-like transposases recognizes transposon-specific inverted terminal repeat sequences (ITRs) on the ends of the transposon, and moves the contents between the ITRs into TTAA or TTAT chromosomal sites. The piggyBac or piggyBac-like transposon system has no payload limit for the genes of interest that can be included between the ITRs.

[0647] In certain embodiments, and, in particular, those embodiments wherein the transposon is a piggyBac® transposon, the transposase is a piggyBac®, Super piggyBac™ (SPB) transposase. In certain embodiments, and, in particular, those embodiments wherein the transposase is a piggyBac®, Super piggyBac™ (SPB), the sequence encoding the transposase is an mRNA sequence.

[0648] In certain embodiments of the methods of the disclosure, the transposase enzyme is a piggyBac® or piggyBac-like transposase enzyme.

[0649] In certain embodiments of the methods of the disclosure, the transposase enzyme is a piggyBac® or a piggyBac-like transposase enzyme. The piggyBac® (PB) or piggyBac-like transposase enzyme may comprise or consist of an amino acid sequence at least 5%, 10%, 15%, 20%, 25%, 30%, 35%, 40%, 45%, 50%, 55%, 60%, 65%, 70%, 75%, 80%, 85%, 90%, 95%, 99% or any percentage in between identical to:

(SEQ ID NO: 14487)

| | |
|---|---|
| 1 | MGSSLDDEHI LSALLQSDDE LVGEDSDSEI SDHVSEDDVQ |
| | SDTEEAFIDE VHEVQPTSSG |
| 61 | SEILDEQNVI EQPGSSLASN RILTLPQPTI RGKNKHCWST |
| | SKSTRRSRVS ALNIVRSQRG |
| 121 | PTRMCPNIYD PLLCFKLFFT DEIISEIVKW TNAEISLKRR |
| | ESMTGATFRD TNEDEIYAFF |
| 181 | GILVMTAVRK DNHMSTDDLF DRSLSMVYVS VMSRDRFDFL |
| | IRCLRMDDKS IRPTLRENDV |
| 241 | FTPVRKIWDL FIHQCIQNYT PGAHLTIDEQ LLGERGRCPF |
| | RMYIPNKPSK YGIKILMMCD |
| 301 | SGTKYMINGM PYLGRGTQTN GVPLGEYYVK ELSKPVHGSC |
| | RNITCDNWFT SIPLAKNLLQ |
| 361 | EPYKLTIVGT VRSNKREIPE VLKNSRSRPV GTSMFCFDGP |
| | LTLVSYKPKP AKMVYLLSSC |
| 421 | DEDASINEST GKPQMVMYYN QTKGGVDTLD QMCSVMTCSR |
| | KTNRWPMALL YGMINIACIN |
| 481 | SFIIYSHNVS SKGEKVQSRK KFMPNLYMSL TSSFMRKRLE |
| | APTLKRYLRD NISNILPNEV |
| 541 | PGTSDDSTEE PVMKKRTYCT YCPSKIRRKA NASCKKCKKV |
| | ICREHNIDMC QSCF. |

[0650] In certain embodiments of the methods of the disclosure, the transposase enzyme is a piggyBac® or piggyBac-like transposase enzyme that comprises or consists of an amino acid sequence having an amino acid substitution at one or more of positions 30, 165, 282, or 538 of the sequence:

(SEQ ID NO: 14487)

| | |
|---|---|
| 1 | MGSSLDDEHI LSALLQSDDE LVGEDSDSEI SDHVSEDDVQ |
| | SDTEEAFIDE VHEVQPTSSG |
| 61 | SEILDEQNVI EQPGSSLASN RILTLPQPTI RGKNKHCWST |
| | SKSTRRSRVS ALNIVRSQRG |
| 121 | PTRMCPNIYD PLLCFKLFFT DEIISEIVKW TNAEISLKRR |
| | ESMTGATFRD TNEDEIYAFF |
| 181 | GILVMTAVRK DNHMSTDDLF DRSLSMVYVS VMSRDRFDFL |
| | IRCLRMDDKS IRPTLRENDV |
| 241 | FTPVRKIWDL FIHQCIQNYT PGAHLTIDEQ LLGERGRCPF |
| | RMYIPNKPSK YGIKILMMCD |
| 301 | SGTKYMINGM PYLGRGTQTN GVPLGEYYVK ELSKPVHGSC |
| | RNITCDNWFT SIPLAKNLLQ |
| 361 | EPYKLTIVGT VRSNKREIPE VLKNSRSRPV GTSMFCFDGP |
| | LTLVSYKPKP AKMVYLLSSC |
| 421 | DEDASINEST GKPQMVMYYN QTKGGVDTLD QMCSVMTCSR |
| | KTNRWPMALL YGMINIACIN |
| 481 | SFIIYSHNVS SKGEKVQSRK KFMPNLYMSL TSSFMRKRLE |
| | APTLKRYLRD NISNILPNEV |
| 541 | PGTSDDSTEE PVMKKRTYCT YCPSKIRRKA NASCKKCKKV |
| | ICREHNIDMC QSCF. |

[0651] In certain embodiments, the transposase enzyme is a piggyBac® or piggyBac-like transposase enzyme that comprises or consists of an amino acid sequence having an amino acid substitution at two or more of positions 30, 165, 282, or 538 of the sequence of SEQ ID NO: 14487. In certain embodiments, the transposase enzyme is a piggyBac® or piggyBac-like transposase enzyme that comprises or consists of an amino acid sequence having an amino acid substitution at three or more of positions 30, 165, 282, or 538 of the sequence of SEQ ID NO: 14487. In certain embodiments, the transposase enzyme is a piggyBac® or piggyBac-like transposase enzyme that comprises or consists of an amino acid sequence having an amino acid substitution at each of the following positions 30, 165, 282, and 538 of the sequence of SEQ ID NO: 14487. In certain embodiments, the amino acid substitution at position 30 of the sequence of SEQ ID NO: 14487 is a substitution of a valine (V) for an isoleucine (I). In certain embodiments, the amino acid substitution at position 165 of the sequence of SEQ ID NO: 14487 is a substitution of a serine (S) for a glycine (G). In certain embodiments, the amino acid substitution at position 282 of the sequence of SEQ ID NO: 14487 is a substitution of a valine (V) for a methionine (M). In certain embodiments, the amino acid substitution at position 538 of the sequence of SEQ ID NO: 14487 is a substitution of a lysine (K) for an asparagine (N).

[0652] In certain embodiments of the methods of the disclosure, the transposase enzyme is a Super piggyBac™ (SPB) or piggyBac-like transposase enzyme. In certain embodiments, the Super piggyBac™ (SPB) or piggyBac-like transposase enzyme of the disclosure may comprise or consist of the amino acid sequence of the sequence of SEQ ID NO: 14487 wherein the amino acid substitution at position 30 is a substitution of a valine (V) for an isoleucine (I), the amino acid substitution at position 165 is a substitution of a serine (S) for a glycine (G), the amino acid substitution at position 282 is a substitution of a valine (V) for a methionine (M), and the amino acid substitution at position 538 is a substitution of a lysine (K) for an asparagine (N). In certain embodiments, the Super piggyBac™ (SPB) or piggyBac-like transposase enzyme may comprise or consist of an amino acid sequence at least 5%, 10%, 15%, 20%, 25%, 30%, 35%, 40%, 45%, 50%, 55%, 60%, 65%, 70%, 75%, 80%, 85%, 90%, 95%, 99% or any percentage in between identical to:

(SEQ ID NO: 14484)

| | |
|---|---|
| 1 | MGSSLDDEHI LSALLQSDDE LVGEDSDSEI SDHVSEDDVQ |
| | SDTEEAFIDE VHEVQPTSSG |
| 61 | SEILDEQNVI EQPGSSLASN RILTLPQPTI RGKNKHCWST |
| | SKSTRRSRVS ALNIVRSQRG |
| 121 | PTRMCPNIYD PLLCFKLFFT DEIISEIVKW TNAEISLKRR |
| | ESMTGATFRD TNEDEIYAFF |
| 181 | GILVMTAVRK DNHMSTDDLF DRSLSMVYVS VMSRDRFDFL |
| | IRCLRMDDKS IRPTLRENDV |
| 241 | FTPVRKIWDL FIHQCIQNYT PGAHLTIDEQ LLGERGRCPF |
| | RMYIPNKPSK YGIKILMMCD |
| 301 | SGTKYMINGM PYLGRGTQTN GVPLGEYYVK ELSKPVHGSC |
| | RNITCDNWFT SIPLAKNLLQ |
| 361 | EPYKLTIVGT VRSNKREIPE VLKNSRSRPV GTSMFCFDGP |
| | LTLVSYKPKP AKMVYLLSSC |
| 421 | DEDASINEST GKPQMVMYYN QTKGGVDTLD QMCSVMTCSR |
| | KTNRWPMALL YGMINIACIN |
| 481 | SFIIYSHNVS SKGEKVQSRK KFMPNLYMSL TSSFMRKRLE |
| | APTLKRYLRD NISNILPNEV |
| 541 | PGTSDDSTEE PVMKKRTYCT YCPSKIRRKA NASCKKCKKV |
| | ICREHNIDMC QSCF. |

[0653] In certain embodiments of the methods of the disclosure, including those embodiments wherein the transposase comprises the above-described mutations at positions 30, 165, 282 and/or 538, the piggyBac®, Super piggyBac™ or piggyBac-like transposase enzyme may further comprise an amino acid substitution at one or more of positions 3, 46, 82, 103, 119, 125, 177, 180, 185, 187, 200, 207, 209, 226, 235, 240, 241, 243, 258, 296, 298, 311, 315, 319, 327, 328, 340, 421, 436, 456, 470, 486, 503, 552, 570 and 591 of the sequence of SEQ ID NO: 14487 or SEQ ID NO: 14484. In certain embodiments, including those embodiments wherein the transposase comprises the above-described mutations at positions 30, 165, 282 and/or 538, the piggyBac®, Super piggyBac™ or piggyBac-like transposase enzyme may further comprise an amino acid substitution at one or more of positions 46, 119, 125, 177, 180, 185, 187, 200, 207, 209, 226, 235, 240, 241, 243, 296, 298, 311, 315, 319, 327, 328, 340, 421, 436, 456, 470, 485, 503, 552 and 570. In certain embodiments, the amino acid substitution at position 3 of SEQ ID NO: 14487 or SEQ ID NO: 14484 is a substitution of an asparagine (N) for a serine (S). In certain embodiments, the amino acid substitution at position 46 of SEQ ID NO: 14487 or SEQ ID NO: 14484 is a substitution of a serine (S) for an alanine (A). In certain embodiments, the amino acid substitution at position 46 of SEQ ID NO: 14487 or SEQ ID NO: 14484 is a substitution of a threonine (T) for an alanine (A). In certain embodiments, the amino acid substitution at position 82 of SEQ ID NO: 14487 or SEQ ID NO: 14484 is a substitution of a tryptophan (W) for an isoleucine (I). In certain embodiments, the amino acid substitution at position 103 of SEQ ID NO: 14487 or SEQ ID NO: 14484 is a substitution of a proline (P) for a serine (S). In certain embodiments, the amino acid substitution at position 119 of SEQ ID NO: 14487 or SEQ ID NO: 14484 is a substitution of a proline (P) for an arginine (R). In certain embodiments, the amino acid substitution at position 125 of SEQ ID NO: 14487 or SEQ ID NO: 14484 is a substitution of an alanine (A) a cysteine (C). In certain embodiments, the amino acid substitution at position 125 of SEQ ID NO: 14487 or SEQ ID NO: 14484 is a substitution of a leucine (L) for a cysteine (C). In certain embodiments, the amino acid substitution at position 177 of SEQ ID NO: 14487 or SEQ ID NO: 14484 is a substitution of a lysine (K) for a tyrosine (Y). In certain embodiments, the amino acid substitution at position 177 of SEQ ID NO: 14487 or SEQ ID NO: 14484 is a substitution of a histidine (H) for a tyrosine (Y). In certain embodiments, the amino acid substitution at position 180 of SEQ ID NO: 14487 or SEQ ID NO: 14484 is a substitution of a leucine (L) for a phenylalanine (F). In certain embodiments, the amino acid substitution at position 180 of SEQ ID NO: 14487 or SEQ ID NO: 14484 is a substitution of an isoleucine (I) for a phenylalanine (F). In certain embodiments, the amino acid substitution at position 180 of SEQ ID NO: 14487 or SEQ ID NO: 14484 is a substitution of a valine (V) for a phenylalanine (F). In certain embodiments, the amino acid substitution at position 185 of SEQ ID NO: 14487 or SEQ ID NO: 14484 is a substitution of a leucine (L) for a methionine (M). In certain embodiments, the amino acid substitution at position 187 of SEQ ID NO: 14487 or SEQ ID NO: 14484 is a substitution of a glycine (G) for an alanine (A). In certain embodiments, the amino acid substitution at position 200 of SEQ ID NO: 14487 or SEQ ID NO: 14484 is a substitution of a tryptophan (W) for a phenylalanine (F). In certain embodiments, the amino acid substitution at position 207 of SEQ ID NO: 14487 or SEQ ID NO: 14484 is a substitution of a proline (P) for a valine (V). In certain embodiments, the amino acid substitution at position 209 of SEQ ID NO: 14487 or SEQ ID NO: 14484 is a substitution of a phenylalanine (F) for a valine (V). In certain embodiments, the amino acid substitution at position 226 of SEQ ID NO: 14487 or SEQ ID NO: 14484 is a substitution of a phenylalanine (F) for a methionine (M). In certain embodiments, the amino acid substitution at position 235 of SEQ ID NO: 14487 or SEQ ID NO: 14484 is a substitution of an arginine (R) for a leucine (L). In certain embodiments, the amino acid substitution at position 240 of SEQ ID NO: 14487 or SEQ ID NO: 14484 is a substitution of a lysine (K) for a valine (V). In certain embodiments, the amino acid substitution at position 241 of SEQ ID NO: 14487 or SEQ ID NO: 14484 is a substitution of a leucine (L) for a phenylalanine (F). In certain embodiments, the amino acid substitution at position 243 of SEQ ID NO: 14487 or SEQ ID NO: 14484 is a substitution of a lysine (K) for a proline (P). In certain embodiments, the amino acid substitution at position 258 of SEQ ID NO: 14487 or SEQ ID NO: 14484 is a substitution of a serine (S) for an asparagine (N). In certain embodiments, the amino acid substitution at position 296 of SEQ ID NO: 14487 or SEQ ID NO: 14484 is a substitution of a tryptophan (W) for a leucine (L). In certain embodiments, the amino acid substitution at position 296 of SEQ ID NO: 14487 or SEQ ID NO: 14484 is a substitution of a tyrosine (Y) for a leucine (L). In certain embodiments, the amino acid substitution at position 296 of SEQ ID NO: 14487 or SEQ ID NO: 14484 is a substitution of a phenylalanine (F) for a leucine (L). In certain embodiments, the amino acid substitution at position 298 of SEQ ID NO: 14487 or SEQ ID NO: 14484 is a substitution of a leucine (L) for a methionine (M). In certain embodiments, the amino acid substitution at position 298 of SEQ ID NO: 14487 or SEQ ID NO: 14484 is a substitution of an alanine (A) for a methionine (M). In certain embodiments, the amino acid substitution at position 298 of SEQ ID NO: 14487 or SEQ ID NO: 14484 is a substitution of a valine (V) for a methionine (M). In certain embodiments, the amino acid substitution at position 311 of SEQ ID NO: 14487 or SEQ ID NO: 14484 is a substitution of an isoleucine (I) for a proline (P). In certain embodiments, the amino acid substitution at position 311 of SEQ ID NO: 14487 or SEQ ID NO: 14484 is a substitution of a valine for a proline (P). In certain embodiments, the amino acid substitution at position 315 of SEQ ID NO: 14487 or SEQ ID NO: 14484 is a substitution of a lysine (K) for an arginine (R). In certain embodiments, the amino acid substitution at position 319 of SEQ ID NO: 14487 or SEQ ID NO: 14484 is a substitution of a glycine (G) for a threonine (T). In certain embodiments, the amino acid substitution at position 327 of SEQ ID NO: 14487 or SEQ ID NO: 14484 is a substitution of an arginine (R) for a tyrosine (Y). In certain embodiments, the amino acid substitution at position 328 of SEQ ID NO: 14487 or SEQ ID NO: 14484 is a substitution of a valine (V) for a tyrosine (Y). In certain embodiments, the amino acid substitution at position 340 of SEQ ID NO: 14487 or SEQ ID NO: 14484 is a substitution of a glycine (G) for a cysteine (C). In certain embodiments, the amino acid substitution at position 340 of SEQ ID NO: 14487 or SEQ ID NO: 14484 is a substitution of a leucine (L) for a cysteine (C). In certain embodiments, the amino acid substitution at position 421 of SEQ ID NO: 14487 or SEQ ID NO: 14484 is a substitution of a histidine (H) for the aspartic acid (D). In certain embodiments, the amino acid substitution at position 436 of SEQ ID NO: 14487 or SEQ ID NO: 14484 is a substitution of an isoleucine (I) for a valine (V). In certain embodiments, the amino acid substitution at position 456 of SEQ ID NO: 14487 or SEQ ID NO: 14484 is a substitution of a tyrosine (Y) for a methionine (M). In certain embodiments, the amino acid substitution at position 470 of SEQ ID NO: 14487 or SEQ ID NO: 14484 is a substitution of a phenylalanine (F) for a leucine (L). In certain embodiments, the amino acid substitution at position 485 of SEQ ID NO: 14487 or SEQ ID NO: 14484 is a substitution of a lysine (K) for a serine (S). In certain embodiments, the amino acid substitution at position 503 of SEQ ID NO: 14487 or SEQ ID NO: 14484 is a substitution of a leucine (L) for a methionine (M). In certain embodiments, the amino acid substitution at position 503 of SEQ ID NO: 14487 or SEQ ID NO: 14484 is a substitution of an isoleucine (I) for a methionine (M). In certain embodiments, the amino acid substitution at position 552 of SEQ ID NO: 14487 or SEQ ID NO: 14484 is a substitution of a lysine (K) for a valine (V). In certain embodiments, the amino acid substitution at position 570 of SEQ ID NO: 14487 or SEQ ID NO: 14484 is a substitution of a threonine (T) for an alanine (A). In certain embodiments, the amino acid substitution at position 591 of SEQ ID NO: 14487 or SEQ ID NO: 14484 is a substitution of a proline (P) for a glutamine (Q). In certain embodiments, the amino acid substitution at position 591 of SEQ ID NO: 14487 or SEQ ID NO: 14484 is a substitution of an arginine (R) for a glutamine (Q).

[0654] In certain embodiments of the methods of the disclosure, including those embodiments wherein the transposase comprises the above-described mutations at positions 30, 165, 282 and/or 538, the piggyBac® or piggyBac-like transposase enzyme or may comprise or the Super piggyBac™ transposase enzyme may further comprise an amino acid substitution at one or more of positions 103, 194, 372, 375, 450, 509 and 570 of the sequence of SEQ ID NO: 14487 or SEQ ID NO: 14484. In certain embodiments of the methods of the disclosure, including those embodiments wherein the transposase comprises the above-described mutations at positions 30, 165, 282 and/or 538, the piggyBac® or piggyBac-like transposase enzyme may comprise or the Super piggyBac™ transposase enzyme may further comprise an amino acid substitution at two, three, four, five, six or more of positions 103, 194, 372, 375, 450, 509 and 570 of the sequence of SEQ ID NO: 14487 or SEQ ID NO: 14484. In certain embodiments, including those embodiments wherein the transposase comprises the above-described mutations at positions 30, 165, 282 and/or 538, the piggyBac® or piggyBac-like transposase enzyme may comprise or the Super piggyBac™ transposase enzyme may further comprise an amino acid substitution at positions 103, 194, 372, 375, 450, 509 and 570 of the sequence of SEQ ID NO: 14487 or SEQ ID NO: 14484. In certain embodiments, the amino acid substitution at position 103 of SEQ ID NO: 14487 or SEQ ID NO: 14484 is a substitution of a proline (P) for a serine (S). In certain embodiments, the amino acid substitution at position 194 of SEQ ID NO: 14487 or SEQ ID NO: 14484 is a substitution of a valine (V) for a methionine (M). In certain embodiments, the amino acid substitution at position 372 of SEQ ID NO: 14487 or SEQ ID NO: 14484 is a substitution of an alanine (A) for an arginine (R). In certain embodiments, the amino acid substitution at position 375 of SEQ ID NO: 14487 or SEQ ID NO: 14484 is a substitution of an alanine (A) for a lysine (K). In certain embodiments, the amino acid substitution at position 450 of SEQ ID NO: 14487 or SEQ ID NO: 14484 is a substitution of an asparagine (N) for an aspartic acid (D). In certain embodiments, the amino acid substitution at position 509 of SEQ ID NO: 14487 or SEQ ID NO: 14484 is a substitution of a glycine (G) for a serine (S). In certain embodiments, the amino acid substitution at position 570 of SEQ ID NO: 14487 or SEQ ID NO: 14484 is a substitution of a serine (S) for an asparagine (N). In certain embodiments, the piggyBac® or piggyBac-like transposase enzyme may comprise a substitution of a valine (V) for a methionine (M) at position 194 of SEQ ID NO: 14487. In certain embodiments, including those embodiments wherein the piggyBac® or piggyBac-like transposase enzyme may comprise a substitution of a valine (V) for a methionine (M) at position 194 of SEQ ID NO: 14487, the piggyBac® or piggyBac-like transposase enzyme may further comprise an amino acid substitution at positions 372, 375 and 450 of the sequence of SEQ ID NO: 14487 or SEQ ID NO: 14484. In certain embodiments, the piggyBac® or piggyBac-like transposase enzyme may comprise a substitution of a valine (V) for a methionine (M) at position 194 of SEQ ID NO: 14487, a substitution of an alanine (A) for an arginine (R) at position 372 of SEQ ID NO: 14487, and a substitution of an alanine (A) for a lysine (K) at position 375 of SEQ ID NO: 14487. In certain embodiments, the piggyBac™ or piggyBac-like transposase enzyme may comprise a substitution of a valine (V) for a methionine (M) at position 194 of SEQ ID NO: 14487, a substitution of an alanine (A) for an arginine (R) at position 372 of SEQ ID NO: 14487, a substitution of an alanine (A) for a lysine (K) at position 375 of SEQ ID NO: 14487 and a substitution of an asparagine (N) for an aspartic acid (D) at position 450 of SEQ ID NO: 14487.

[0655] In certain embodiments, the piggyBac® or piggyBac-like transposase enzyme is isolated or derived from an insect. In certain embodiments, the insect is Trichoplusia ni (GenBank Accession No. AAA87375; SEQ ID NO: 16796), Argyrogramma agnata (GenBank Accession No. GU477713; SEQ ID NO: 14534, SEQ ID NO: 16797), Anopheles gambiae (GenBank Accession No. XP_312615 (SEQ ID NO: 16798); GenBank Accession No. XP_320414 (SEQ ID NO: 16799); GenBank Accession No. XP_310729 (SEQ ID NO: 16800)), Aphis gossypii (GenBank Accession No. GU329918; SEQ ID NO: 16801, SEQ ID NO: 16802), Acyrthosiphon pisum (GenBank Accession No. XP_001948139; SEQ ID NO: 16803), Agrotis ipsilon (GenBank Accession No. GU477714; SEQ ID NO: 14537, SEQ ID NO: 16804), Bombyx mori (GenBank Accession No. BAD11135; SEQ ID NO: 14505), Chilo suppressalis (GenBank Accession No. JX294476; SEQ ID NO: 16805, SEQ ID NO: 16806), Drosophila melanogaster (GenBank Accession No. AAL39784; SEQ ID NO: 16807), Helicoverpa armigera (GenBank Accession No. ABS18391; SEQ ID NO: 14525), Heliothis virescens (GenBank Accession No. ABD76335; SEQ ID NO: 16808), Macdunnoughia crassisigna (GenBank Accession No. EU287451; SEQ ID NO: 16809, SEQ ID NO: 16810), Pectinophora gossypiella (GenBank Accession No. GU270322; SEQ ID NO: 14530, SEQ ID NO: 16811), Tribolium castaneum (GenBank Accession No. XP_001814566; SEQ ID NO: 16812), Ctenoplusia agnata (also called Argyrogramma agnata), Messour bouvieri, Megachile rotundata, Bombus impatiens, Manestra brassicae, Mayetiola destructor or Apis mellifera.

[0656] In certain embodiments, the piggyBac® or piggyBac-like transposase enzyme is isolated or derived from an insect. In certain embodiments, the insect is Trichoplusia ni (AAA87375).

[0657] In certain embodiments, the piggyBac® or piggyBac-like transposase enzyme is isolated or derived from an insect. In certain embodiments, the insect is Bombyx mori (BAD11135).

[0658] In certain embodiments, the piggyBac® or piggyBac-like transposase enzyme is isolated or derived from a crustacean. In certain embodiments, the crustacean is Daphnia pulicaria (AAM76342, SEQ ID NO: 16813).

[0659] In certain embodiments, the piggyBac® or piggyBac-like transposase enzyme is isolated or derived from a vertebrate. In certain embodiments, the vertebrate is Xenopus tropicalis (GenBank Accession No. BAF82026; SEQ ID NO: 14518), Homo sapiens (GenBank Accession No. NP_689808; SEQ ID NO: 16814), Mus musculus (GenBank Accession No. NP_741958; SEQ ID NO: 16815), Macaca fascicularis (GenBank Accession No. AB179012; SEQ ID NO: 16816, SEQ ID NO: 16817). Rattus norvegicus (GenBank Accession No. XP_220453; SEQ ID NO: 16818) or Myotis lucifugus.

[0660] In certain embodiments, the piggyBac® or piggyBac-like transposase enzyme is isolated or derived from a urochordate. In certain embodiments, the urochordate is Ciona intestinalis (GenBank Accession No. XP_002123602; SEQ ID NO: 16819).

[0661] In certain embodiments, the piggyBac® or piggyBac-like transposase inserts a transposon at the sequence 5′-TTAT-3′ within a chromosomal site (a TTAT target sequence).

[0662] In certain embodiments, the piggyBac® or piggyBac-like transposase inserts a transposon at the sequence 5′-TTAA-3′ within a chromosomal site (a TTAA target sequence).

[0663] In certain embodiments, the target sequence of the piggyBac® or piggyBac-like transposon comprises or consists of 5′-CTAA-3′, 5′-TTAG-3′, 5′-ATAA-3′, 5′-TCAA-3′, 5′AGTT-3′. 5′-ATTA-3′, 5′-GTTA-3′, 5′-TTGA-3′. 5′-TTTA-3′, 5′-TTAC-3′, 5′-ACTA-3′, 5′-AGGG-3′, 5′-CTAG-3′, 5′-TGAA-3′, 5′-AGGT-3′, 5′-ATCA-3′, 5′-CTCC-3′, 5′-TAAA-3′, 5′-TCTC-3′, 5′TGAA-3′, 5′-AAAT-3′, 5′-AATC-3′, 5′-ACAA-3′, 5′-ACAT-3, 5′-ACTC-3′, 5′-AGTG-3′, 5′-ATAG-3′, 5′-CAAA-3′, 5′-CACA-3′, 5′-CATA-3′, 5′-CCAG-3′, 5′-CCCA-3′, 5′-CGTA-3-, 5′-GTCC-3′, 5′-TAAG-3′, 5′-TCTA-3′, 5′-TGAG-3′, 5′-TGTT-3′, 5-TTCA-3′5′-TTCT-3′ and 5′-TTTT-3′.

[0664] In certain embodiments of the methods of the disclosure, the transposase enzyme is a piggyBac® or piggyBac-like transposase enzyme. In certain embodiments, the piggyBac® or piggyBac-like transposase enzyme is isolated or derived from Bombyx mori. The piggyBac® or piggyBac-like transposase enzyme may comprise or consist of an amino acid sequence at least 5%, 10%, 15%, 20%, 25%, 30%, 35%, 40%, 45%, 50%, 55%, 60%, 65%, 70%, 75%, 80%, 85%, 90%, 95%, 99% or any percentage in between identical to:

(SEQ ID NO: 14504)

| | |
|---|---|
| 1 | MDIERQEERI RAMLEEELSD YSDESSSEDE TDHCSEHEVN |
| | YDTEEERIDS VDVPSNSRQE |
| 61 | EANAIIANES DSDPDDDLPL SLVRQRASAS RQVSGPFYTS |
| | KDGTKWYKNC QRPNVRLRSE |
| 121 | NIVTEQAQVK NIARDASTEY ECWNIFVTSD MLQEILTHTN |
| | SSIRHRQTKT AAENSSAETS |
| 181 | FYMQETTLCE LKALIALLYL AGLIKSNRQS LKDLWRTDGT |
| | GVDIFRTTMS LQRFQFLQNN |
| 241 | IRFDDKSTRD ERKQTDNMAA FRSIFDQFVQ CCQNAYSPSE |
| | FLTIDEMLLS FRGRCLFRVY |
| 301 | IPNKPAKYGI KILALVDAKN FDVVNLEVYA GKQPSGPYAV |
| | SNRPFEVVER LIQPVARSHR |
| 361 | NVTFDNWFTG YELMLHLLNE YRLTSVGTVR KNKRQIPESF |
| | IRTDRQPNSS VFGFQKDITL |
| 421 | VSYAPKKNKV VVVMSTMHHD NSIDESTGEK QKPEMITFYN |
| | STKAGVDVVD ELSANYNVSR |
| 481 | NSKRWPMTLF YGVLNMAAIN ACIIYRPNKN VTIKRTEFIR |
| | SLGLSMIYEH LHSRNKKKNI |
| 541 | PTYLRQRIEK QLGEPSPRHV NVPGRYVRCQ DCPYKKDRKT |
| | KHSCNACAKP ICMEHAKFLC |
| 601 | ENCAELDSSL. |

[0665] The piggyBac® (PB) or piggyBac-like transposase enzyme may comprise or consist of an amino acid sequence at least 5%, 10%, 15%, 20%, 25%, 30%, 35%, 40%, 45%, 50%, 55%, 60%, 65%, 70%, 75%, 80%, 85%, 90%, 95%, 99% or any percentage in between identical to:

(SEQ ID NO: 14505)

| | |
|---|---|
| 1 | MDIERQEERI RAMLEEELSD YSDESSSEDE TDHCSEHEVN |
| | YDTEEERIDS VDVPSNSRQE |
| 61 | EANAIIANES DSDPDDDLPL SLVRQRASAS RQVSGPFYTS |
| | KDGTKWYKNC QRPNVRLRSE |
| 121 | NIVTEQAQVK NIARDASTEY ECWNIFVTSD MLQEILTHTN |
| | SSIRHRQTKT AAENSSAETS |
| 181 | FYMQETTLCE LKALIALLYL AGLIKSNRQS LKDLWRTDGT |
| | GVDIFRTTMS LQRFQFLQNN |
| 241 | IRFDDKSTRD ERKQTDNMAA FRSIFDQFVQ CCQNAYSPSE |
| | FLTIDEMLLS FRGRCLFRVY |
| 301 | IPNKPAKYGI KILALVDAKN FYVVNLEVYA GKQPSGPYAV |
| | SNRPFEVVER LIQPVARSHR |
| 361 | NVTFDNWFTG YELMLHLLNE YRLTSVGTVR KNKRQIPESF |
| | IRTDRQPNSS VFGFQKDITL |
| 421 | VSYAPKKNKV VVVMSTMHHD NSIDESTGEK QKPEMITFYN |
| | STKAGVDVVD ELSANYNVSR |
| 481 | NSKRWPMTLF YGVLNMAAIN ACIIYRPNKN VTIKRTEFIR |
| | SLGLSMIYEH LHSRNKKKNI |
| 541 | PTYLRQRIEK QLGEPSPRHV NVPGRYVRCQ DCPYKKDRKT |
| | KHSCNACAKP ICMEHAKFLC |
| 601 | ENCAELDSSL. |

[0666] In certain embodiments, the piggyBac® or piggyBac-like transposase is fused to a nuclear localization signal. In certain embodiments, the amino acid sequence of the piggyBac® or piggyBac-like transposase fused to a nuclear localization signal is encoded by a polynucleotide sequence comprising:

(SEQ ID NO: 14629)

| | |
|---|---|
| 1 | atggcaccca aaaagaaacg taaagtgatg gacattgaaa |
| | gacaggaaga aagaatcagg |
| 61 | gcgatgctcg aagaagaact gagcgactac tccgacgaat |
| | cgtcatcaga ggatgaaacc |
| 121 | gaccactgta gcgagcatga ggttaactac gacaccgagg |
| | aggagagaat cgactctgtg |
| 181 | gatgtgccct ccaactcacg ccaagaagag gccaatgcaa |
| | ttatcgcaaa cgaatcggac |
| 241 | agcgatccag acgatgatct gccactgtcc ctcgtgcgcc |
| | agcgggccag cgcttcgaga |
| 301 | caagtgtcag gtccattcta cacttcgaag gacggcacta |
| | agtggtacaa gaattgccag |
| 361 | cgacctaacg tcagactccg ctccgagaat atcgtqaccg |
| | aacaggctca ggtcaagaat |
| 421 | atcgcccgcg acgcctcgac tgagtacgag tgttggaata |
| | tcttcgtgac ttcggacatg |
| 481 | ctgcaagaaa ttctgacgca caccaacagc tcgattaggc |
| | atcgccagac caagactgca |
| 541 | gcggagaact catcggccga aacctccttc tatatgcaag |
| | agactactct gtgcgaactg |
| 601 | aaggcgctga ttgcactgct gtacttggcc ggcctcatca |
| | aatcaaatag gcagagcctc |
| 661 | aaagatctct ggagaacgga tggaactgga gtggatatct |
| | ttcggacgac tatgagcttg |
| 721 | cagcggttcc agtttctgca aaacaatatc agattcgacg |
| | acaagtccac ccgggacgaa |
| 781 | aggaaacaga ctgacaacat ggctgcgttc cggtcaatat |
| | tcgatcagtt tgtgcagtgc |
| 841 | tgccaaaacg cttatagccc atcggaattc ctgaccatcg |
| | acgaaatgct tctctccttc |
| 901 | cgggggcgct gcctgttccg agtgtacatc ccgaacaagc |
| | cggctaaata cggaatcaaa |
| 961 | atcctggccc tggtggacgc caagaatttc tacgtcgtga |
| | atctcgaagt gtacgcagga |
| 1021 | aagcaaccgt cgggaccgta cgctgtttcg aaccgcccgt |
| | ttgaagtcgt cgagcggctt |
| 1081 | attcagccgg tggccagatc ccaccgcaat gttaccttcg |
| | acaattggtt caccggctac |
| 1141 | gagctgatgc ttcaccttct gaacgagtac cggctcacta |
| | gcgtggggac tgtcaggaag |
| 1201 | aacaagcggc agatcccaga atccttcatc cgcaccgacc |
| | gccagcctaa ctcgtccgtg |
| 1261 | ttcggatttc aaaaggatat cacgcttgtc tcgtacgccc |
| | ccaagaaaaa caaggtcgtg |
| 1321 | gtcgtgatga gcaccatgca tcacgacaac agcatcgacg |
| | agtcaaccgg agaaaagcaa |
| 1381 | aagcccgaga tgatcacctt ctacaattca actaaggccg |
| | gcgtcgacgt cgtggatgaa |
| 1441 | ctgtgcgcga actataacgt gtcccggaac tctaagcggt |
| | ggcctatgac tctcttctac |
| 1501 | ggagtgctga atatggccgc aatcaacgcg tgcatcatct |
| | accgcaccaa caagaacgtg |
| 1561 | accatcaagc gcaccgagtt catcagatcg ctgggtttga |
| | gcatgatcta cgagcacctc |
| 1621 | cattcacgga acaagaagaa gaatatccct acttacctga |
| | ggcagcgtat cgagaagcag |
| 1681 | ttgggagaac caagcccgcg ccacgtgaac gtgccggggc |
| | gctacgtgcg gtgccaagat |
| 1741 | tgcccgtaca aaaaggaccg caaaaccaaa agatcgtgta |
| | acgcgtgcgc caaacctatc |
| 1801 | tgcatggagc atgccaaatt tctgtgtgaa aattgtgctg |
| | aactcgattc ctccctg. |

[0667] In certain embodiments, the piggyBac® or piggyBac-like transposase is hyperactive. A hyperactive piggyBac or piggyBac-like transposase is a transposase that is more active than the naturally occurring variant from which it is derived. In certain embodiments, the hyperactive piggyBac or piggyBac-like transposase enzyme is isolated or derived from Bombyx mori. In certain embodiments, the piggyBac® or piggyBac-like transposase is a hyperactive variant of SEQ ID NO: 14505. In certain embodiments, the hyperactive piggyBac or piggyBac-like transposase comprises a sequence that is at least 90% identical to:

(SEQ ID NO: 14576)

| | |
|---|---|
| 1 | MDIERQEERI RAMLEEELSD YSDESSSEDE TDHCSEHEVN |
| | YDTEEERIDS VDVPSNSRQE |
| 61 | EANAIIANES DSDPDDDLPL SLVRQRASAS RQVSGPFYTS |
| | KDGTKWYKNC QRPNVRLRSE |
| 121 | NIVTEQAQVK NIARDASTEY ECWNIFVTSD MLQEILTHTN |
| | SSIRHRQTKT AAENSSAETS |
| 181 | FYMQETTLCE LKALIALLYL AGLIKSNRQS LKDLWRTDGT |
| | GVDIFRTTMS LQRFQFLQNN |
| 241 | IRFDDKSTRD ERKQTDNMAA FRSIFDQFVQ SCQNAYSPSE |
| | FLTIDEMLLS FRGRCLFRVY |
| 301 | IPNKPAKYGI KILALVDAKN FDVVNLEVYA GKQPSGPYAV |
| | SNRPFEVVER LIQPVARSHR |
| 361 | NVTFDNWFTG YELMLHLLNE YRLTSVGTVR KNKRQIPESF |
| | IRTDRQPNSS VFGFQKDITL |
| 421 | VSYAPKKNKV VVVMSTMHHD NSIDESTGEK QKPEMITFYN |
| | STKAGVDVVD ELSANYNVSR |
| 481 | NSKRWPMTLF YGVLNMAAIN ACIIYRPNKN VTIKRTEFIR |
| | SLGLSMIYEH LHSRNKKKNI |
| 541 | PTYLRQRIEK QLGEPSPRHV NVPGRYVRCQ DCPYKKDRKT |
| | KHSCNACAKP ICMEHAKFLC |
| 601 | ENCAELDSHL. |

[0668] In certain embodiments, the hyperactive piggyBac or piggyBac-like transposase comprises SEQ ID NO: 14576. In certain embodiments, the hyperactive piggyBac or piggyBac-like transposase comprises a sequence of:

(SEQ ID NO: 14630)

| | |
|---|---|
| 1 | MDIERQEERI RAMLEEELSD YSDESSSEDE TDHCSEHEVN |
| | YDTEEERIDS VDVPSNSRQE |
| 61 | EANAIIANES DSDPDDDLPL SLVRQRASAS RQVSGPFYTS |
| | KDGTKWYKNC QRPNVRLRSE |
| 121 | NIVTEQAQVK NIARDASTEY ECWNIFVTSD MLQEILTHTN |
| | SSIRHRQTKT AAENSSAETS |
| 181 | FYMQETTLCE LKALIALLYL AGLIKSNRQS LKDLWRTDGT |
| | GVDIFRTTMS LQRFQFLLNN |
| 241 | IRFDDKSTRD ERKQTDNMAA FRSIFDQFVQ SCQNAYSPSE |
| | FLTIDEMLLS FRGRCLFRVY |
| 301 | IPNKPAKYGI KILALVDAKN FDVHNLEVYA GKQPSGPYAV |
| | SNRPFEVVER LIQPVARSHR |
| 361 | NVTFDNWFTG YEVMLHLLNE YRLTSVGTVR KNKRQIPESF |
| | IRTDRQPNSS VFGFQKDITL |
| 421 | VSYAPKKNKV VVVMSTMHHD NSIDESTGEK QKPEMITFYN |
| | STKAGVDVVD ELSANYNVSR |
| 481 | NSKRWPMTLF YGVLNMAAIN ACIIYRTNKN VTIKRTEFIR |
| | SLGLSMIYEH LHSRNKKKNI |
| 541 | PTYLRQRIEK QLGEPSPRHV NVPGRYVRCQ DCPYKKDRKT |
| | KRSCNACAKP ICMEHAKFLC |
| 601 | ENCAHLDS. |

[0669] In certain embodiments, the hyperactive piggyBac or piggyBac-like transposase comprises a sequence of;

(SEQ ID NO: 14631)

| | |
|---|---|
| 1 | MDIERQEERI RAMLEEELSD YSDESSSEDE TDHCSEHEVN |
| | YDTEEERIDS VDVPSNSRQE |
| 61 | EANAIIANES DSDPDDDLPL SLVRQRASAS RQVSGPFYTS |
| | KDGTKWYKNC QRPNVRLRSE |
| 121 | NIVTEQAQVK NIARDASTEY ECWNIFVTSD MLQEILTHTN |
| | SSIRHRQTKT AAENSSASTS |
| 181 | FYMQETTLCE LKALIALLYI AGLIKSNRQS LKDLWRTDGT |
| | GVDIFRTTMS LQRFQFLLNN |
| 241 | IRFDDKSTRD ERKQTDNMAA FRSIFDQFVQ SCQNAYSPSE |
| | FLTIDEMLLS FRGRCLFRVY |
| 301 | IPNKPAKYGI KILALVDAKN FDVVNLEVYA GKQPSGPYAV |
| | SNRPFEVVER LIQPVARSHR |
| 361 | NVTFDNWFTG YELMLHLLNE YRLTSVGTVR KNKRQIPESF |
| | IRTDRQPNSS VFGFQKDITL |
| 421 | VSYAPKKNKV VVVMSTMHHD NSIDESTGEK QKPEMITFYN |
| | STKAGVDVVD ELSANYNVSR |
| 481 | NSKRWPMTLF YGVLNMAAIN ACIIYRPNKN VTIKRTEFIR |
| | SLGLSMIYEH LHSRNKKKNI |
| 541 | PTYLRQRIEK QLGEPSPRHV NVPGRYVRCQ DCPYKKDRKT |
| | KHSCNACAKP ICMEHAKFLC |
| 601 | ENCAELDSSL. |

[0670] In certain embodiments, the hyperactive piggyBac or piggyBac-like transposase comprises a sequence of:

(SEQ ID NO: 14632)

| | |
|---|---|
| 1 | MDIERQEERI RAMLEEELSD YSDESSSEDE TDHCSEHEVN |
| | YDTEEERIDS VDVPSNSRQE |
| 61 | EANAIIANES DSDPDDDLPL SLVRQRASAS RQVSGPFYTS |
| | KDGTKWYKNC QRPNVRLRSE |
| 121 | NIVTEQAQVK NIARDASTEY ECWNIFVTSD MLQEILTHTN |
| | SSIRHRQTKT AAENSSAETS |
| 181 | FYMQETTLCE LKALIGLLYI AGLIKSNRQS LKDLWRTDGT |
| | GVDIFRTTMS LQRFQFLLNN |
| 241 | IRFDDKSTRD ERKQTDNMAA FRSIFDQFVQ SCQNAYSPSE |
| | FLTIDEMLLS FRGRCLFRVY |
| 301 | IPNKPAKYGI KILALVDAKN FYVKNLEVYA GKQPSGPYAV |
| | SNRPFEVVER LIQPVARSHR |
| 361 | NVTFDNWFTG YELMLHLLNE YRLTSVGTVR KNKRQIPENF |
| | IRTDRQPNSS VFGFQKDITL |
| 421 | VSYAPKKNKV VVVMSTMHHD NSIDESTGEK QKPEMITFYN |
| | STKAGVDVVD ELSANYNVSR |
| 481 | NSKRWPMTLF YGVLNMAAIN ACIIYRTNKN VTIKRTEFIR |
| | SLGLSMIYEH LHSRNKKKNI |
| 541 | PTYLRQRIEK QLGEPSPRHV NVPGRYVRCQ DCPYKKDRKT |
| | KRSCNACAKP ICMEHAKFLC |
| 601 | ENCAELDSSL. |

[0671] In certain embodiments, the hyperactive piggyBac or piggyBac-like transposase comprises a sequence of:

(SEQ ID NO: 14633)

| | |
|---|---|
| 1 | MDIERQEERI RAMLEEELSD YSDESSSEDE TDHCSEHEVN |
| | YDTEEERIDS VDVPSNSRQE |
| 61 | EANAIIANES DSDPDDDLPL SLVRQRASAS RQVSGPFYTS |
| | KDGTKWYKNC QRPNVRLRSE |
| 121 | NIVTEQAQVK NIARDASTEY ECWNIFVTSD MLQEILTHTN |
| | SSIRHRQTKT AAENSSAETS |
| 181 | FYMQETTLCE LKALIGLLYI AGLIKSNRQS LKDLWRTDGT |
| | GVDIFRTTMS LQRFQFLQNN |
| 241 | IRFDDKSTRD ERKQTDNMAA FRSIFDQFVQ SCQNAYSPSE |
| | FLTIDEMLLS FRGRCLFRVY |
| 301 | IPNKPAKYGI KILALVDAKN FYVKNLEVYA GKQPSGPYAV |
| | SNRPFEVVER LIQPVARSHR |
| 361 | NVTFDNWFTG YELMLHLLNE YRLTSVGTVR KNKRQIPESF |
| | IRTDRQPNSS VFGFQKDITL |
| 421 | VSYAPKKNKV VVVMSTMHHD NSIDESTGEK QKPEMITFYN |
| | STKAGVDVVD ELCANYNVSR |
| 481 | NSKRWPMTLF YGVLNMAAIN ACIIYRTNKN VTIKRTEFIR |
| | SLGLSMIYEH LHSRNKKKNI |
| 541 | PTYLRQRIEK QLGEPSPRHV NVPGRYVRCQ DCPYKKDRKT |
| | KRSCNACAKP ICMEHAKFLC |
| 601 | ENCAELDSSL. |

[0672] In certain embodiments, the hyperactive piggyBac or piggyBac-like transposase comprises a sequence of:

(SEQ ID NO: 14634)

| | |
|---|---|
| 1 | MDIERQEERI RAMLEEELSD YSDESSSEDE TDHCSEHEVN |
| | YDTEEERIDS VDVPSNSRQE |
| 61 | EANAIIANES DSDPDDDLPL SLVRQRASAS RQVSGPFYTS |
| | KDGTKWYKNC QRPNVRLRSE |
| 121 | NIVTEQAQVK NIARDASTEY ECWNIFVTSD MLQEILTHTN |
| | SSIRHRQTKT AAENSSAETS |
| 181 | FYMQETTLCE LKALIALLYL AGLIKSNRQS LKDLWRTDGT |
| | GVDIFRTTMS LQRFQFLQNN |
| 241 | IRFDDKSTRD ERKQTDNMAA FRSIFDQFVQ CCQNAYSPSE |
| | FLTIDEMLLS FRGRCLFRVY |
| 301 | IPNKPAKYGI KILALVDAKN DYVVNLEVYA GKQPSGPYAV |
| | SNRPFEVVER LIQPVARSHR |
| 361 | NVTFDNWFTG YELMLHLLNE YRLTSVGTVR KNKRQIPESF |
| | IRTDRQPNSS VFGFQKDITL |
| 421 | VSYAPKKNKV VVVMSTMHHD NSIDESTGEK QKPEMITFYN |
| | STKAGVDVVD ELSANYNVSR |
| 481 | NSKRWPMTLF YGVLNMAAIN ACIIYRTNKN VTIKRTEFIR |
| | SLGLSMIYEH LHSRNKKKNI |
| 541 | PTYLRQRIEK QLGEPSPRHV NVKGRYVRCQ DCPYKKDRKT |
| | KRSCNACAKP ICMEHAKFLC |
| 601 | ENCAELDSSL. |

[0673] In certain embodiments, the hyperactive piggyBac or piggyBac-like transposase is more active than the transposase of SEQ ID NO: 14505. In certain embodiments, the hyperactive piggyBac or piggyBac-like transposase is at least 90%, at least 95%, at least 96%, at least 97%, at least 98%, or at least 99% or any percentage in between identical to SEQ ID NO: 14505.

[0674] In certain embodiments, the hyperactive piggyBac or piggyBac-like transposase comprises an amino acid substitution at a position selected from 92, 93, 96, 97, 165, 178, 189, 196, 200, 201, 211, 215, 235, 238, 246, 253, 258, 261, 263, 271, 303, 321, 324, 330, 373, 389, 399, 402, 403, 404, 448, 473, 484, 507, 523, 527, 528, 543, 549, 550, 557.601, 605, 607, 609, 610 or a combination thereof (relative to SEQ ID NO: 14505). In certain embodiments, the hyperactive piggyBac or piggyBac-like transposase comprises an amino acid substitution of Q92A, V93L, V93M, P96G, F97H, F97C, H165E, H165W, E178S, E178H, C189P, A196G, L200I, A201Q, L211A, W215Y, G219S, Q235Y, Q235G, Q238L, K246I, K253V, M258V, F261L, S263K, C271S, N303R, F321W, F321D, V324K, V324H, A330V, L373C, L373V, V389L, S399N, R402K, T403L, D404Q, D404S, D404M, N441R, G448W, E449A, V469T, C473Q, R484K T507C, G523A, I527M, Y528K Y543I, E549A, K550M, P557S, E601V, E605H, E605W, D607H, S609H, L610I or any combination thereof. In certain embodiments, the hyperactive piggyBac or piggyBac-like transposase comprises an amino acid substitution of Q92A, V93L, V93M, P96G, F97H, F97C, H165E, H165W, E178S, E178H, C189P, A196G. L200I, A201Q, L211A, W215Y, G219S, Q235Y, Q235G, Q238L, K246I, K253V, M258V, F261L, S263K, C271S, N303R, F321W, F321D, V324K, V324H, A330V, L373C, L373V, V389L, S399N, R402K, T403L, D404Q, D404S, D404M. N441R, G448W, E449A, V469T, C473Q, R484K T507C, G523A, I527M, Y528K Y543I, E549A, K550M, P557S, E601V, E605H, E605W, D607H, S609H and L610I.

[0675] In certain embodiments, the hyperactive piggyBac or piggyBac-like transposase comprises one or more substitutions of an amino acid that is not wild type, wherein the one or more substitutions a for wild type amino acid comprises a substitution of E4X, A12X, M13X, L14X, E15X, D20X, E24X, S25X, S26X, S27X, D32X, H33X, E36X, E44X, E45X, E46X, I48X, D49X, R58X, A62X, N63X, A64X, I65X, I66X, N68X, E69X, D71X, S72X, D76X, P79X, R84X, Q85X, A87X, S88X, Q92X, V93X, S94X, G95X, P96X, F97X, Y98X, T99X, I145X, S149X, D150X, L152X, E154X, T157X, N160X, S161X, S162X, H165X, R166X, T168X, K169X, T170X, A171X, E173X, S175X, S176X, E178X, T179X, M183X, Q184X, T186X, T187X, L188X, C189X, L194X, I195X, A196X, L198X, L200X, A201X, L203X, I204X, K205X, A206X, N207X, Q209X, S210X, L21 X, K212X, D213X, L214X, W215X, R216X, T217X, G219X, V222X, D223X, I224X, T227X, M229X, Q235X, L237X, Q238X, N239X, N240X, P302X, N303X, P305X, A306X, K307X, Y308X, I310X, K311X, I312X, L313X, A314X, L315X, V316X, D317X, A318X, K319X, N320X, F321X, Y322X, V323X, V324X, L326X, E327X, V328X, A330X, Q333X, P334X, S335X, G336X, P337X, A339X, V340X, S341X, N342X, R343X, P344X, F345X, E346X, V347X, E349X, I352X, Q353X, V355X, A356X, R357X, N361X, D365X, W367X, T369X, G370X, L373X, M374X, L375X, H376X, N379X, E380X, R382X, V386X, V389X, N392X, R394X, Q395X, S399X, F400X, I401X, R402XT403X, D404X, R405X, Q406X, P407X, N408X, S409X, S410X, V411X, F412X, F414X, Q415X, I418X, T419X, L420X, N428XV432X, M434X, D440X, N441X, S442X, I443X, D444X, E445X, G448X, E449X, Q451X, K452X, M455X, I456X, T457X, F458X, S461X, A464X, V466X, Q468X, V469X, E471X, L472X, C473X, A474X, K483X, W485X, T488X, L489X, Y491X, G492X, V493X, M496X, I499X, C502X, I503X, T507X, K509X, N510X, V511X, T512X, I513X, R515X, E517X, S521X, G523X, L524X, S525X, I527X, Y528X, E529X, H532X, S533X, N535X, K536X, K537X, N539X, I540X, T542X, Y543X, Q546X, E549X, K550X, Q551X, G553X, E554X, P555X, S556X, P557X, R558X, H559X, V560X, N561X, V562X, P563X, G564X, R565X, Y566X, V567X, Q570X, D571X, P573X, Y574X, K576X, K581X, S583X, A586X, A588X, E594X, F598X, L599X, E601X, N602X, C603X, A604X, E605X, L606X, D607X, S608X, S609X or L610X (relative to SEQ ID NO: 14505). A list of hyperactive amino acid substitutions can be found in U.S. Pat. No. 10,041,077, the contents of which are incorporated herein by reference in their entirety.

[0676] In certain embodiments, the piggyBac® or piggyBac-like transposase is integration deficient. In certain embodiments, an integration deficient piggyBac or piggyBac-like transposase is a transposase that can excise its corresponding transposon, but that integrates the excised transposon at a lower frequency than a corresponding wild type transposase. In certain embodiments, the piggyBac® or piggyBac-like transposase is an integration deficient variant of SEQ ID NO: 14505.

[0677] In certain embodiments, the excision competent, integration deficient piggyBac or piggyBac-like transposase comprises one or more substitutions of an amino acid that is not wild type, wherein the one or more substitutions a for wild type amino acid comprises a substitution of R9X, A12X, M13X, D20X, Y21K, D23X, E24X, S25X, S26X, S27X, E28X, E30X, D32X, H33X, E36X, H37X, A39X, Y41X, D42X, T43X, E44X, E45X, E46X, R47X, D49X, S50X, S55X, A62X, N63X, A64X, I66X, A67X, N68X, E69X, D70X, D71X, S72X, D73X, P74X, D75X, D76X, D77X, I78X, S81X, V83X, R84X, Q85X, A87X, S88X, A89X, S90X, R91X, Q92X, V93X, S94X, G95X, P96X, F97X, Y98X, T99X, W012X, G103X, Y107X, K108X, L117X, I122X, Q128X, I312X, D135X, S137X, E139X, Y140X, I145X, S149X, D150X, Q153X, E154X, T157X, S161X, S162X, R164X, H165X, R166X, Q167X, T168X, K169X, T170X, A171X, A172X, E173X, R174X, S175X, S176X, A177X, E178X, T179X, S180X, Y182X, Q184X, E185X, T187X, L188X, C189X, L194X, I195X, A196X, L198X, L200X, A201X, L203X, I204X, K205X, N207X, Q209X, L21 X, D213X, L214X, W215X, R216X, T217X, G219X, T220X, V222X, D223X, I224X, T227X, T228X, F234X, Q235X, L237X, Q238X, N239X, N240X, N303X, K304X, I310X, I312X, L313X, A314X, L315X, V316X, D317X, A318X, K319X, N320X, F321X, Y322X, V323X, V324X, N325X, L326X, E327X, V328X, A330X, G331X. K332X, Q333X, S335X, P337X, P344X, F345X, E349X, H359X, N361X, V362X, D365X, F368X, Y371X, E372X, L373X, H376X, E380X, R382X, R382X, V386X, G387X, T388X, V389X, K391X, N392X, R394X, Q395X, E398X, S399X, F400X, I401X, R402XT403X, D404X, R405X, Q406X, P407X, N408X, S409X, S410X, Q415X, K416X, A424X, K426X, N428X, V430X, V432X, V433X, M434X, D436X, D440X, N441X, S442X, I443X, D444X, E445X, S446X, T447X, G448X, E449X, K450X, Q45IX, E454X, M455X, I456X, T457X, F458X, S461X, A464X, V466X, Q468X, V469X, C473X, A474X, N475X, N477X, K483X, R484X, P486X, T488X, L489X, G492X, V493X, M496X, I499X, I503X, Y505X, T507X, N510X, V511X, T512X, I513X, K514X, T516X, E517X, S521X, G523X, L524X, S525X, I527X, Y528X, L531X, H532X, S533X, N535X, I540X, T542X, Y543X, R545X, Q546X, E549X, L552X, G553X, E554X, P555X, S556X, P557X, R558X, H559X, V560X, N561X, V562X, P563X, G564X, V567X, Q570X, D571X, P573X, Y574X, K575X, K576X, N585X, A586X, M593X, K596X, E601X, N602X, A604X, E605X, L606X, D607X, S608X, S609X or L610X (relative to SEQ ID NO: 14505). A list of integration deficient amino acid substitutions can be found in U.S. Pat. No. 10,041,077, the contents of which are incorporated by reference in their entirety.

[0678] In certain embodiments, the integration deficient piggyBac or piggyBac-like transposase comprises a sequence of:

(SEQ ID NO: 14606)

| | |
|---|---|
| 1 | MDIERQEERI RAMLEEELSD YSDESSSEDE TDHCSEHEVN |
| | YDTEEERIDS VDVPSNSRQE |
| 61 | EANAIIANES DSDPDDDLPL SLVRQRASAS RQVSGPFYTS |
| | KDGTKWYKNC QRPNVRLRSE |
| 121 | NIVTEQAQVK NIARDASTEY ECWNIFVTSD MLQEILTHTN |
| | SSIRHRQTKT AAENSSAETS |
| 181 | FYMQETTLCE LKALIALLYL AGLIKSNRQS LKDLWRTDGT |
| | GVDIFRTTMS LQRFQFLQNN |
| 241 | IRFDDKSTRD ERKQTDNMAA FRSIFDQFVQ CCQNAYSPSE |
| | FLTIDEMLLS FRGRCLFRVY |
| 301 | IPNKPAKYGI KILALVDAKN FYVVNLEVYA GKQPSGPYAV |
| | SNRPFEVVER LIQPVARSHR |
| 361 | NVTFDNWFTG YELMLHLLNE YRLTSVGTVR KNKRQIPESF |
| | IRTDRQPNSS VFGFQKDITL |
| 421 | VSYAPKKNKV VVVMSTMHHD NSIDESTGEK QKPEMITFYN |
| | STKAGVDVVD ELCANYNVSR |
| 481 | NSKKWPMTLF YGVLNMAAIN ACIIYRTNKN VTIKRTEFIR |
| | SLGLSMMYEH LHSRNKKKNI |
| 541 | PTYLRQRIEK QLGEPSPRHV NVPGRYVRCQ DCPYKKDRKT |
| | KHSCNACAKP ICMEHAKFLC |
| 601 | ENCAELDSSL. |

In certain embodiments, the integration deficient piggyBac or piggyBac-like transposase comprises a sequence of:

(SEQ ID NO: 14607)

| | |
|---|---|
| 1 | MDIERQEERI RAMLEEELSD YSDESSSEDE TDHCSEHEVN |
| | YDTEEERIDS VDVPSNSRQE |
| 61 | EANAIIANES DSDPDDDLPL SLVRQRASAS RQVSGPFYTS |
| | KDGTKWYKNC QRPNVRLRSE |
| 121 | NIVTEQAQVK NIARDASTEY ECWNIFVTSD MLQEILTHTN |
| | SSIRHRQTKT AAENSSAETS |
| 181 | FYMQETTLCE LKALIGLLYL AGLIKSNRQS LKDLWRTDGT |
| | GVDIFRTTMS LQRFQFLQNN |
| 241 | IRFDDKSTLD ERKQTDNMAA FRSIFDQFVQ SCQNAYSPSE |
| | FLTIDEMLLS FRGRCLFRVY |
| 301 | IPNKPAKYGI KILALVDAKN FDVVNLEVYA GKQPSGPYAV |
| | SNRPFEVVER LIQPVARSHR |
| 361 | NVTFDNWFTG YELMLHLLNE YRLTSVGTVR KNKRQIPESF |
| | IRTDRQPNSS VFGFQKDITL |
| 421 | VSYAPKKNKV VVVMSTMHHD NSIDESTGEK QKPEMITFYN |
| | STKAGVDVVD ELSANYNVSR |
| 481 | NSKRWPMTLF YGVLNMAAIN ACIIYRPNKN VTIKRTEFIR |
| | SLGLSMIYEH LHSRNKKKNI |
| 541 | PTYLRQRIEK QLGEPSPRHV NVPGRYVRCQ DCPYKKDRKT |
| | KHSCNACAKP ICMEHAKFLC |
| 601 | VNCAELDSSL. |

In certain embodiments, the piggyBac® or piggyBac-like transposase that is integration deficient comprises a sequence of:

(SEQ ID NO: 14608)

| | |
|---|---|
| 1 | MDIERQEERI RAMLEEELSD YSDESSSEDE TDHCSEHEVN |
| | YDTEEERIDS VDVPSNSRQE |
| 61 | EANAIIANES DSDPDDDLPL SLVRQRASAS RQVSGPFYTS |
| | KDGTKWYKNC QRPNVRLRSE |
| 121 | NIVTEQAQVK NIARDASTEY ECWNIFVTSD MLQEILTHTN |
| | SSIRHRQTKT AAENSSAETS |
| 181 | FYMQETTLCE LKALIALLYL AGLIKSNRQS LKDLWRTDGT |
| | GVDIFRTTMS LQRFQFLLNN |
| 241 | IRFDDKSTRD ERKQTDNMAA FRSIFDQFVQ CCQNAYSPSE |
| | FLTIDEMLLS FRGRCLFRVY |
| 301 | IPNKPAKYGI KILALVDAKN FDVVNLEVYA GKQPSGPYAV |
| | SNRPFEVVER LIQPVARSHR |
| 361 | NVTFDNWFTG YECMLHLLNE YRLTSVGTVR KNKRQIPESF |
| | IRTDRQPNSS VFGFQKDITL |
| 421 | VSYAPKKNKV VVVMSTMHHD NSIDESTGEK QKPEMITFYN |
| | STKAGVDVVD ELSANYNVSR |
| 481 | NSKKWPMTLF YGVLNMAAIN ACIIYRTNKN VTIKRTEFIR |
| | SLGLSMIKEH LHSRNKKKNI |
| 541 | PTYLRQRIEK QLGEPSPRHV NVPGRYVRCQ DCPYKKDRKT |
| | KHSCNACAKP ICMEHAKFLC |
| 601 | ENCAELDSSL. |

In certain embodiments, the integration deficient transposase comprises a sequence that is at least 90% identical to SEQ ID NO: 14608.

[0679] In certain embodiments, the piggyBac® or piggyBac-like transposon is isolated or derived from Bombyx mori. In certain embodiments, the piggyBac® or piggyBac-like transposon comprises a sequence of:

(SEQ ID NO: 14506)

| | |
|---|---|
| 1 | ttatcccggc gagcatgagg cagggtatct cataccctgg |
| | taaaatttta aagttgtgta |
| 61 | ttttataaaa ttttcgtctg acaacactag cgcgctcagt |
| | agctggaggc aggagcgtgc |
| 121 | gggaggggat agtggcgtga tcgcagtgtg gcacgggaca |
| | ccggcgagat attcgtgtgc |
| 181 | aaacctgttt cgggtatgtt ataccctgcc tcattgttga |
| | cgtatttttt ttatgtaatt |
| 241 | tttccgatta ttaatttcaa ctgttttatt ggtattttta |
| | tgttatccat tgttcttttt |
| 301 | ttatgattta ctgtatcggt tgtctttcgt tcctttagtt |
| | gagttttttt ttattatttt |
| 361 | cagtttttga tcaaa. |

In certain embodiments, the piggyBac® or piggyBac-like transposon comprises a sequence of:

(SEQ ID NO: 14507)

| | |
|---|---|
| 1 | tcatattttt agtttaaaaa aataattata tgttttataa |
| | tgaaaagaat ctcattatct |
| 61 | ttcagtatta ggttgattta tattccaaag aataatattt |
| | ttgttaaatt gttgattttt |
| 121 | gtaaacctct aaatgtttgt tgctaaaatt actgtgttta |
| | agaaaaagat taataaataa |
| 181 | taataatttc ataattaaaa acttctttca ttgaatgcca |
| | ttaaataaac cattatttta |
| 241 | caaaataaga tcaacataat tgagtaaata ataataagaa |
| | caatattata gtacaacaaa |
| 301 | atatgggtat gtcataccct gccacattct tgatgtaact |
| | ttttttcacc tcatgctcgc |
| 361 | cgggttat. |

In certain embodiments, the piggyBac® or piggyBac-like transposon comprises a sequence of:

(SEQ ID NO: 14508)

| | |
|---|---|
| 1 | ttatcccggc gagcatgagg cagggtatct cataccctgg |
| | taaaatttta aagttgtgta |
| 61 | ttttataaaa ttttcgtctg acaacactag cgcgctcagt |
| | agctggaggc aggagcgtgc |
| 121 | gggaggggat agtggcgtga tcgcagtgtg gcacgggaca |
| | ccggcgagat attcgtgtgc |
| 181 | aaacctgttt cgggtatgtt ataccctgcc tcat. |

In certain embodiments, the piggyBac® (PB) or piggyBac-like transposon comprises a sequence of:

(SEQ ID NO: 14509)

| | |
|---|---|
| 1 | taaataataa taatttcata attaaaaact tctttcattg |
| | aatgccatta aataaaccat |
| 61 | tattttacaa aataagatca acataattga gtaaataata |
| | ataagaacaa tattatagta |
| 121 | caacaaaata tgggtatgtc ataccctgcc acattcttga |
| | tgtaactttt tttcacctca |
| 181 | tgctcgccgg gttat. |

[0680] In certain embodiments, the piggyBac® or piggyBac-like transposon comprises a left sequence corresponding to SEQ ID NO: 14506 and a right sequence corresponding to SEQ ID NO: 14507. In certain embodiments, one piggyBac® or piggyBac-like transposon end is at least 85%, at least 90%, at least 95%, at least 98%, at least 99% identical or any percentage in between identical to SEQ ID NO: 14506 and the other piggyBac® or piggyBac-like transposon end is at least 85%, at least 90%, at least 95%, at least 98%, at least 99% or any percentage in between identical to SEQ ID NO: 14507. In certain embodiments, the piggyBac® or piggyBac-like transposon comprises SEQ ID NO: 14506 and SEQ ID NO: 14507 or SEQ ID NO: 14509. In certain embodiments, the piggyBac® or piggyBac-like transposon comprises SEQ ID NO: 14508 and SEQ ID NO: 14507 or SEQ ID NO: 14509. In certain embodiments, the left and right transposon ends share a 16 bp repeat sequence at their ends of CCCGGCGAGCATGAGG (SEQ ID NO: 14510) immediately adjacent to the 5′-TTAT-3 target insertion site, which is inverted in the orientation in the two ends. In certain embodiments, left transposon end begins with a sequence comprising 5′-TTATCCCGGCGAGCATGAGG-3 (SEQ ID NO: 14511), and the right transposon ends with a sequence comprising the reverse complement of this sequence: 5′-CCTCATGCTCGCCGGGTTAT-3′ (SEQ ID NO: 14512).

[0681] In certain embodiments, the piggyBac® or piggyBac-like transposon comprises one end comprising at least 14, 16, 18, 20, 30 or 40 contiguous nucleotides of SEQ ID NO: 14506 or SEQ ID NO: 14508. In certain embodiments, the piggyBac® or piggyBac-like transposon comprises one end comprising at least 14, 16, 18, 20, 30 or 40 contiguous nucleotides of SEQ ID NO: 14507 or SEQ ID NO: 14509. In certain embodiments, the piggyBac® or piggyBac-like transposon comprises one end with at least 90% identity to SEQ ID NO: 14506 or SEQ ID NO: 14508. In certain embodiments, the piggyBac® or piggyBac-like transposon comprises one end with at least 90% identity to SEQ ID NO: 14507 or SEQ ID NO: 14509.

[0682] In certain embodiments, the piggyBac® or piggyBac-like transposon comprises a sequence of:

(SEQ ID NO: 14515)

| | |
|---|---|
| 1 | ttaacccggc gagcatgagg cagggtatct cataccctgg |
| | taaaatttta aagttgtgta |
| 61 | ttttataaaa ttttcgtctg acaacactag cgcgctcagt |
| | agctggaggc aggagcgtgc |
| 121 | gggaggggat agtggcgtga tcgcagtgtg gcacgggaca |
| | ccggcgagat attcgtgtgc |
| 181 | aaacctgttt cgggtatgtt ataccctgcc tcattgttga |
| | cgtatttttt ttatgtaatt |
| 241 | tttccgatta ttaatttcaa ctgttttatt ggtattttta |
| | tgttatccat tgttcttttt |
| 301 | ttatgattta ctgtatcggt tgtctttcgt tcctttagtt |
| | gagttttttt ttattatttt |
| 361 | cagtttttga tcaaa. |

[0683] In certain embodiments, the piggyBac® or piggyBac-like transposon comprises a sequence of:

(SEQ ID NO: 14516)

| | |
|---|---|
| 1 | tcatattttt agtttaaaaa aataattata tgttttataa |
| | tgaaaagaat ctcattatct |
| 61 | ttcagtatta ggttgattta tattccaaag aataatattt |
| | ttgttaaatt gttgattttt |
| 121 | gtaaacctct aaatgtttgt tgctaaaatt actgtgttta |
| | agaaaaagat taataaataa |
| 181 | taataatttc ataattaaaa acttctttca ttgaatgcca |
| | ttaaataatt cattatttta |
| 241 | caaaataaga tcaacataat tgagtaaata ataataagaa |
| | caatattata gtacaacaaa |
| 301 | atatgggtat gtcataccct tttttttttt tttttttttt |
| | ttttttcggg tagagggccg |
| 361 | aacctcctac gaggtccccg cgcaaaaggg gcgcgcgggg |
| | tatgtgagac tcaacgatct |
| 421 | gcatggtgtt gtgagcagac cgcgggccca aggattttag |
| | agcccaccca ctaaacgact |
| 481 | cctctgcact cttacacccg acgtccgatc ccctccgagg |
| | tcagaacccg gatgaggtag |
| 541 | gggggctacc gcggtcaaca ctacaaccag acggcgcggc |
| | tcaccccaag gacgcccagc |
| 601 | cgacggagcc ttcgaggcga atcgaaggct ctgaaacgtc |
| | ggccgtctcg gtacggcagc |
| 661 | ccgtcgggcc gcccagacgg tgccgctggt gtcccggaat |
| | accccgctgg accagaacca |
| 721 | gcctgccggg tcgggacgcg atacaccgtc gaccggtcgc |
| | tctaatcact ccacggcagc |
| 781 | gcgctagagt gctggta. |

[0684] In certain embodiments, the piggyBac® or piggyBac-like transposon comprises a sequence of CCCGGCGAGCATGAGG (SEQ ID NO: 14510). In certain embodiments, the piggyBac® or piggyBac-like transposon comprises an ITR sequence of SEQ ID NO: 14510. In certain embodiments, the piggyBac® or piggyBac-like transposon comprises a sequence of TTATCCCGGCGAGCATGAGG (SEQ ID NO: 14511). In certain embodiments, the piggyBac® or piggyBac-like transposon comprises at least 16 contiguous nucleotides from SEQ ID NO: 14511. In certain embodiments, the piggyBac® or piggyBac-like transposon comprises a sequence of CCTCATGCTCGCCGGGTTAT (SEQ ID NO: 14512). In certain embodiments, the piggyBac® or piggyBac-like transposon comprises at least 16 contiguous nucleotides from SEQ ID NO: 14512. In certain embodiments, the piggyBac® or piggyBac-like transposon comprises one end comprising at least 16 contiguous nucleotides from SEQ ID NO: 14511 and one end comprising at least 16 contiguous nucleotides from SEQ ID NO: 14512. In certain embodiments, the piggyBac® or piggyBac-like transposon comprises SEQ ID NO: 14511 and SEQ ID NO: 14512. In certain embodiments, the piggyBac® or piggyBac-like transposon comprises a sequence of TTAACCCGGCGAGCATGAGG (SEQ ID NO: 14513). In certain embodiments, the piggyBac® or piggyBac-like transposon comprises a sequence of CCTCATGCTCGCCGGGTTAA (SEQ ID NO: 14514).

[0685] In certain embodiments, the piggyBac® or piggyBac-like transposon may have ends comprising SEQ ID NO: 14506 and SEQ ID NO: 14507, or a variant of either or both of these having at least 90% sequence identity to SEQ ID NO: 14506 or SEQ ID NO: 14507, and the piggyBac® or piggyBac-like transposase has the sequence of SEQ ID NO: 14504 or SEQ ID NO: 14505, or a sequence at least 5%, 10%, 15%, 20%, 25%, 30%, 35%, 40%, 45%, 50%, 55%, 60%, 65%, 70%, 75%, 80%, 85%, 90%, 95%, 99% or any percentage in between identity to SEQ ID NO: 14504 or SEQ ID NO: 14505. In certain embodiments, the piggyBac® or piggyBac-like transposon comprises a heterologous polynucleotide inserted between a pair of inverted repeats, where the transposon is capable of transposition by a piggyBac® or piggyBac-like transposase having at least 5%, 10%, 15%, 20%, 25%, 30%, 35%, 40%, 45%, 50%, 55%, 60%, 65%, 70%, 75%, 80%, 85%, 90%, 95%, 99% or any percentage in between identity to SEQ ID NO: 14504 or SEQ ID NO: 14505. In certain embodiments, the transposon comprises two transposon ends, each of which comprises SEQ ID NO: 14510 in inverted orientations in the two transposon ends. In certain embodiments, each inverted terminal repeat (ITR) is at least 90% identical to SEQ ID NO: 14510.

[0686] In certain embodiments, the piggyBac® or piggyBac-like transposon is capable of insertion by a piggyBac® or piggyBac-like transposase at the sequence 5′-TTAT-3 within a target nucleic acid. In certain embodiments, one end of the piggyBac® or piggyBac-like transposon comprises at least 16 contiguous nucleotides from SEQ ID NO: 14506 and the other transposon end comprises at least 16 contiguous nucleotides from SEQ ID NO: 14507. In certain embodiments, one end of the piggyBac® or piggyBac-like transposon comprises at least 17, at least 18, at least 19, at least 20, at least 22, at least 25, at least 30 contiguous nucleotides from SEQ ID NO: 14506 and the other transposon end comprises at least 17, at least 18, at least 19, at least 20, at least 22, at least 25, at least 30 contiguous nucleotides from SEQ ID NO: 14507.

[0687] In certain embodiments, the piggyBac® or piggyBac-like transposon comprises transposon ends (each end comprising an ITR) corresponding to SEQ ID NO: 14506 and SEQ ID NO: 14507, and has a target sequence corresponding to 5′-TTAT3′. In certain embodiments, the piggyBac® or piggyBac-like transposon also comprises a sequence encoding a transposase (e.g. SEQ ID NO: 14505). In certain embodiments, the piggyBac® or piggyBac-like transposon comprises one transposon end corresponding to SEQ ID NO: 14506 and a second transposon end corresponding to SEQ ID NO: 14516. SEQ ID NO: 14516 is very similar to SEQ ID NO: 14507, but has a large insertion shortly before the ITR. Although the ITR sequences for the two transposon ends are identical (they are both identical to SEQ ID NO: 14510), they have different target sequences: the second transposon has a target sequence corresponding to 5′-TTAA-3′, providing evidence that no change in ITR sequence is necessary to modify the target sequence specificity. The piggyBac® or piggyBac-like transposase (SEQ ID NO: 14504), which is associated with the 5′-TTAA-3′ target site differs from the 5′-TTAT-3′-associated transposase (SEQ ID NO: 14505) by only 4 amino acid changes (D322Y, S473C, A507T, H582R). In certain embodiments, the piggyBac® or piggyBac-like transposase (SEQ ID NO: 14504), which is associated with the 5′-TTAA-3′ target site is less active than the 5′-TTAT-3′-associated piggyBac® or piggyBac-like transposase (SEQ ID NO: 14505) on the transposon with 5′-TTAT-3′ ends. In certain embodiments, piggyBac® or piggyBac-like transposons with 5′-TTAA-3′ target sites can be converted to piggyBac® or piggyBac-like transposases with 5′-TTAT-3 target sites by replacing 5′-TTAA-3′ target sites with 5′-TTAT-3′. Such transposons can be used either with a piggyBac® or piggyBac-like transposase such as SEQ ID NO: 14504 which recognizes the 5′-TTAT-3′ target sequence, or with a variant of a transposase originally associated with the 5′-TTAA-3′ transposon. In certain embodiments, the high similarity between the 5′-TTAA-3′ and 5′-TTAT-3′ piggyBac® or piggyBac-like transposases demonstrates that very few changes to the amino acid sequence of a piggyBac® or piggyBac-like transposase alter target sequence specificity. In certain embodiments, modification of any piggyBac® or piggyBac-like transposon-transposase gene transfer system, in which 5′-TTAA-3′ target sequences are replaced with 5′-TTAT-3′-target sequences, the ITRs remain the same, and the transposase is the original piggyBac® or piggyBac-like transposase or a variant thereof resulting from using a low-level mutagenesis to introduce mutations into the transposase. In certain embodiments, piggyBac® or piggyBac-like transposon transposase transfer systems can be formed by the modification of a 5′-TTAT-3′-active piggyBac® or piggyBac-like transposon-transposase gene transfer systems in which 5′-TTAT-3′ target sequences are replaced with 5′-TTAA-3′-target sequences, the ITRs remain the same, and the piggyBac® or piggyBac-like transposase is the original transposase or a variant thereof.

[0688] In certain embodiments, the piggyBac® or piggyBac-like transposon is isolated or derived from Bombyx mori. In certain embodiments, the piggyBac® or piggyBac-like transposon comprises a sequence of:

(SEQ ID NO: 14577)

| | |
|---|---|
| 1 | cccggcgagc atgaggcagg gtatctcata ccctggtaaa |
| | attttaaagt tgtgtatttt |
| 61 | ataaaatttt cgtctgacaa cactagcgcg ctcagtagct |
| | ggaggcagga gcgtgcggga |
| 121 | ggggatagtg gcgtgatcgc agtgtggcac gggacaccgg |
| | cgagatattc gtgtgcaaac |
| 181 | ctgtttcggg tatgttatac cctgcctcat tgttgacgta t. |

In certain embodiments, the piggyBac® or piggyBac-like transposon comprises a sequence of:

(SEQ ID NO: 14578)

| | |
|---|---|
| 1 | tttaagaaaa agattaataa ataataataa tttcataatt |
| | aaaaacttct ttcattgaat |
| 61 | gccattaaat aaaccattat tttacaaaat aagatcaaca |
| | taattgagta aataataata |
| 121 | agaacaatat tatagtacaa caaaatatgg gtatgtcata |
| | ccctgccaca ttcttgatgt |
| 181 | aacttttttt cacctcatgc tcgccggg. |

In certain embodiments, the transposon comprises at least 16 contiguous bases from SEQ ID NO: 14577 and at least 16 contiguous bases from SEQ ID NO: 14578, and inverted terminal repeats that are at least 87% identical to CCCGGCGAGCATGAGG (SEQ ID NO: 14510). In certain embodiments, the piggyBac® or piggyBac-like transposon comprises a sequence of:

(SEQ ID NO: 14595)

| | |
|---|---|
| 1 | cccggcgagc atgaggcagg gtatctcata ccctggtaaa |
| | attttaaagt tgtgtatttt |
| 61 | ataaaatttt cgtctgacaa cactagcgcg ctcagtagct |
| | ggaggcagga gcgtgcggga |
| 121 | ggggatagtg gcgtgatcgc agtgtggcac gggacaccgg |
| | cgagatattc gtgtgcaaac |
| 181 | ctgtttcggg tatgttatac cctgcctcat tgttgacgta |
| | ttttttttat gtaatttttc |
| 241 | cgattattaa tttcaactgt tttattggta tttttatgtt |
| | atccattgtt ctttttttat |
| 301 | gatttactgt atcggttgtc tttcgttcct ttagttgagt |
| | ttttttttat tattttcagt |
| 361 | ttttgatcaa a. |

In certain embodiments, the piggyBac® or piggyBac-like transposon comprises a sequence of:

(SEQ ID NO: 14596)

| | |
|---|---|
| 1 | tcatattttt agtttaaaaa aataattata tgttttataa |
| | tgaaaagaat ctcattatct |
| 61 | ttcagtatta ggttgattta tattccaaag aataatattt |
| | ttgttaaatt gttgattttt |
| 121 | gtaaacctct aaatgtttgt tgctaaaatt actgtgttta |
| | agaaaaagat taataaataa |
| 181 | taataatttc ataattaaaa acttctttca ttgaatgcca |
| | ttaaataaac cattatttta |
| 241 | caaaataaga tcaacataat tgagtaaata ataataagaa |
| | caatattata gtacaacaaa |
| 301 | atatgggtat gtcataccct gccacattct tgatgtaact |
| | ttttttcacc tcatgctcgc |
| 361 | cggg. |

[0689] In certain embodiments, the piggyBac® or piggyBac-like transposon comprises SEQ ID NO: 14595 and SEQ ID NO: 14596, and is transposed by the piggyBac or piggyBac-like transposase of SEQ ID NO: 14505. In certain embodiments, the ITRs of SEQ ID NO: 14595 and SEQ ID: 14596 are not flanked by a 5′-TTAA-3′ sequence. In certain embodiments, the ITRs of SEQ ID NO: 14595 and SEQ ID: 14596 are flanked by a 5′-TTAT-3′ sequence.

[0690] In certain embodiments, the piggyBac® or piggyBac-like transposon comprises a sequence of:

(SEQ ID NO: 14597)

| | |
|---|---|
| 1 | cccggcgagc atgaggcagg gtatctcata ccctggtaaa |
| | attttaaagt tgtgtatttt |
| 61 | ataaaatttt cgtctgacaa cactagcgcg ctcagtagct |
| | ggaggcagga gcgtgcggga |
| 121 | ggggatagtg gcgtgatcgc agtgtggcac gggacaccgg |
| | cgagatattc gtgtgcaaac |
| 181 | ctgtttcggg tatgttatac cctgcctcat tgttgacgta |
| | ttttttttat gtaatttttc |
| 241 | cgattattaa tttcaactgt tttattggta tttttatgtt |
| | atccattgtt ctttttttat |
| 301 | g. |

In certain embodiments, the piggyBac® or piggyBac-like transposon comprises a sequence of:

(SEQ ID NO: 14598)

| | |
|---|---|
| 1 | cagggtatct cataccctgg taaaatttta aagttgtgta |
| | ttttataaaa ttttcgtctg |
| 61 | acaacactag cgcgctcagt agctggaggc aggagcgtgc |
| | gggaggggat agtggcgtga |
| 121 | tcgcagtgtg gcacgggaca ccggcgagat attcgtgtgc |
| | aaacctgttt cgggtatgtt |
| 181 | ataccctgcc tcattgttga cgtatttttt ttatgtattt |
| | tttccgatta ttaatttcaa |
| 241 | ctgttttatt ggtattttta tgttatccat tgttcttttt |
| | ttatg. |

In certain embodiments, the piggyBac® or piggyBac-like transposon comprises a sequence of:

(SEQ ID NO: 14599)

| | |
|---|---|
| 1 | cagggtatct cataccctgg taaaatttta aagttgtgta |
| | ttttataaaa ttttcgtctg |
| 61 | acaacactag cgcgctcagt agctggaggc aggagcgtgc |
| | gggaggggat agtggcgtga |
| 121 | tcgcagtgtg gcacgggaca ccggcgagat attcgtgtgc |
| | aaacctgttt cgggtatgtt |
| 181 | ataccctgcc tcattgttga cgtat. |

In certain embodiments, the left end of the piggyBac or piggyBac-like transposon comprises a sequence of SEQ ID NO: 14577, SEQ ID NO: 14595, or SEQ ID NOs: 14597-14599. In certain embodiments, the left end of the piggyBac® or piggyBac-like transposon is preceded by a left target sequence.
In certain embodiments, the piggyBac® or piggyBac-like transposon comprises a sequence of:

(SEQ ID NO: 14600)

| | |
|---|---|
| 1 | tcatattttt agtttaaaaa aataattata tgttttataa |
| | tgaaaagaat ctcattatct |
| 61 | ttcagtatta ggttgattta tattccaaag aataatattt |
| | ttgttaaatt gttgattttt |
| 121 | gtaaacctct aaatgtttgt tgctaaaatt actgtgttta |
| | agaaaaagat taataaataa |
| 181 | taataatttc ataattaaaa acttctttca ttgaatgcca |
| | ttaaataaac cattatttta |
| 241 | caaaataaga tcaacataat tgagtaaata ataataagaa |
| | caatattata gtacaacaaa |
| 301 | atatgggtat gtcataccct gccacattct tgatgtaact |
| | ttttttcacc tcatgctcgc |
| 361 | cggg. |

In certain embodiments, the piggyBac® or piggyBac-like transposon comprises a sequence of:

(SEQ ID NO: 14601)

| | |
|---|---|
| 1 | tttaagaaaa agattaataa ataataataa tttcataatt |
| | aaaaacttct ttcattgaat |
| 61 | gccattaaat aaaccattat tttacaaaat aagatcaaca |
| | taattgagta aataataata |
| 121 | agaacaatat tatagtacaa caaaatataa gtatgtcata |
| | ccctgccaca ttcttgatgt |
| 181 | aacttttttt ca. |

In certain embodiments, the piggyBac® or piggyBac-like transposon comprises a sequence of:

(SEQ ID NO: 14602)

| | |
|---|---|
| 1 | cccggcgagc atgaggcagg gtatctcata ccctggtaaa |
| | attttaaagt tgtgtatttt |
| 61 | ataaaatttt cgtctgacaa cactagcgcg ctcagtagct |
| | ggaggcagga gcgtgcggga |
| 121 | ggggatagtg gcgtgatcgc agtgtggcac gggacaccgg |
| | cgagatattc gtgtgcaaac |
| 181 | ctgtttcggg tatgttatac cctgcctcat tgttgacgta |
| | tttttttLat gtaatttttc |
| 241 | cgattattaa tttcaactgt tttattggta tttttatgtt |
| | atccattgtt ctttttttat |
| 301 | gatttactgt atcggttgtc tttcgttcct ttagttgagt |
| | ttttttttat tattttcagt |
| 361 | ttttgatcaa a. |

[0691] In certain embodiments, the right end of the piggyBac® or piggyBac-like transposon comprises a sequence of SEQ ID NO: 14578, SEQ ID NO: 14596, or SEQ ID NOs: 14600-14601. In certain embodiments, the right end of the piggyBac® or piggyBac-like transposon is followed by a right target sequence. In certain embodiments, the transposon is transposed by the transposase of SEQ ID NO: 14505. In certain embodiments, the left and right ends of the piggyBac® or piggyBac-like transposon share a 16 bp repeat sequence of SEQ ID NO: 14510 in inverted orientation and immediately adjacent to the target sequence. In certain embodiments, the left transposon end begins with SEQ ID NO: 14510, and the right transposon end ends with the reverse complement of SEQ ID NO: 14510, 5′-CCTCATGCTCGCCGGG-3′ (SEQ ID NO: 14603). In certain embodiments, the piggyBac® or piggyBac-like transposon comprises an ITR with at least 93%, at least 87%, or at least 81% or any percentage in between identity to SEQ ID NO: 14510 or SEQ ID NO: 14603. In certain embodiments, the piggyBac® or piggyBac-like transposon comprises a target sequence followed by a left transposon end comprising a sequence selected from SEQ ID NOs: 88, 105 or 107 and a right transposon end comprising SEQ ID NO: 14578 or 106 followed by a target sequence, in certain embodiments, the piggyBac® or piggyBac like transposon comprises one end that comprises a sequence that is at least 90%, at least 95% or at least 99% or any percentage in between identical to SEQ ID NO: 14577 and one end that comprises a sequence that is at least 90%, at least 95% or at least 99% or any percentage in between identical to SEQ ID NO: 14578. In certain embodiments, one transposon end comprises at least 14, at least 16, at least 18 or at least 20 contiguous bases from SEQ ID NO: 14577 and one transposon end comprises at least 14, at least 16, at least 18 or at least 20 contiguous bases from SEQ ID NO: 14578.

[0692] In certain embodiments, the piggyBac® or piggyBac-like transposon comprises two transposon ends wherein each transposon ends comprises a sequence that is at least 81% identical, at least 87% identical or at least 93% identical or any percentage in between identical to SEQ ID NO: 14510 in inverted orientation in the two transposon ends. One end may further comprise at least 14, at least 16, at least 18 or at least 20 contiguous bases from SEQ ID NO: 14599, and the other end may further comprise at least 14, at least 16, at least 18 or at least 20 contiguous bases from SEQ ID NO: 14601. The piggyBac® or piggyBac-like transposon may be transposed by the transposase of SEQ ID NO: 14505, and the transposase may optionally be fused to a nuclear localization signal.

[0693] In certain embodiments, the piggyBac® or piggyBac-like transposon comprises SEQ ID NO: 14595 and SEQ ID NO: 14596 and the piggyBac® or piggyBac-like transposase comprises SEQ ID NO: 14504 or SEQ ID NO: 14505. In certain embodiments, the piggyBac® or piggyBac-like transposon comprises SEQ ID NO: 14597 and SEQ ID NO: 14596 and the piggyBac® or piggyBac-like transposase comprises SEQ ID NO: 14504 or SEQ ID NO: 14505. In certain embodiments, the piggyBac® or piggyBac-like transposon comprises SEQ ID NO: 14595 and SEQ ID NO: 14578 and the piggyBac® or piggyBac-like transposase comprises SEQ ID NO: 14504 or SEQ ID NO: 14505. In certain embodiments, the piggyBac® or piggyBac-like transposon comprises SEQ ID NO: 14602 and SEQ ID NO: 14600 and the piggyBac® or piggyBac-like transposase comprises SEQ ID NO: 14504 or SEQ ID NO: 14505.

[0694] In certain embodiments, the piggyBac® or piggyBac-like transposon comprises a left end comprising 1, 2, 3, 4, 5, 6, or 7 sequences selected from ATGAGGCAGGGTAT (SEQ ID NO: 14614), ATACCCTGCCTCAT (SEQ ID NO: 14615), GGCAGGGTAT (SEQ ID NO: 14616), ATACCCTGCC (SEQ ID NO: 14617), TAAAATTTTA (SEQ ID NO: 14618), ATTTTATAAAAT (SEQ ID NO: 14619), TCATACCCTG (SEQ ID NO: 14620) and TAAATAATAATAA (SEQ ID NO: 14621). In certain embodiments, the piggyBac® or piggyBac-like transposon comprises a right end comprising 1, 2 or 3 sequences selected from SEQ ID NO: 14617, SEQ ID NO: 14620 and SEQ ID NO: 14621.

[0695] In certain embodiments of the methods of the disclosure, the transposase enzyme is a piggyBac® or piggyBac-like transposase enzyme. In certain embodiments, the piggyBac® or piggyBac-like transposase enzyme is isolated or derived from Xenopus tropicalis. The piggyBac® or piggyBac-like transposase enzyme may comprise or consist of an amino acid sequence at least 5%, 10%, 15%, 20%, 25%, 30%, 35%, 40%, 45%, 50%, 55%, 60%, 65%, 70%, 75%, 80%, 85%, 90%, 95%, 99% or any percentage in between identical to:

(SEQ ID NO: 14517)

| | |
|---|---|
| 1 | MAKPEYSAEE AAAHCMASSS EEFSGSDSEY VPPASESDSS |
| | TEESWCSSST VSALEEPMEV |
| 61 | DEDVDDLEDQ EAGDRADAAA GGEPAWGPPC NFPPEIPPFT |
| | TVPGVKVDTS NFEPINFFQL |
| 121 | FMTEAILQDM VLYTNVYAEQ YLTQNPLPRY ARAHAWHPTD |
| | IAEMKRFVGL TLAMGLIKAN |
| 181 | SLESYWDTTT VLSIPVFSAT MSRNRYQLLL RFLHFNNNAT |
| | AVPPDQPGHD RLHKLRPLID |
| 241 | SLSERFAAVY TPCQNICIDE SLLLFKGRLQ FRQYIPSKRA |
| | RYGIKFYKLC ESSSGYTSYF |
| 301 | LIYEGKDSKL DPPGCPPDLT VSGKINWELI SPLLGQGFHL |
| | YVDNFYSSIP LFTALYCLDT |
| 361 | PACGTINRNR KGLPRALLDK KLNRGETYAL RKNELLAIKF |
| | FDKKNVFMLT SIHDESVIRE |
| 421 | QRVGRPPKNK PLCSKEYSKY MGGVDRTDQL QHYYNATRKT |
| | RAWYKKVGIY LIQMALRNSY |
| 481 | IVYKAAVPGP KLSYYKYQLQ ILPALLFGGV EEQTVPEMPP |
| | SDNVARLIGK HFIDTLPPTP |
| 541 | GKQRPOKGCK VCRKRGIRRD TRYYCPKCPR NPGLCFKPCF |
| | EIYHTQLHY. |

[0696] In some embodiments, the piggyBac® or piggyBac-like transposase is a hyperactive variant of SEQ ID NO: 14517. In certain embodiments, the piggyBac® or piggyBac-like transposase is an integration defective variant of SEQ ID NO: 14517. The piggyBac® or piggyBac-like transposase enzyme may comprise or consist of an amino acid sequence at least 5%, 10%, 15%, 20%, 25%, 30%, 35%, 40%, 45%, 50%, 55%, 60%, 65%, 70%, 75%, 80%, 85%, 90%, 95%, 99% or any percentage in between identical to:

(SEQ ID NO: 14518)

| | |
|---|---|
| 1 | MAKRFYSAEE AAAHCMAPSS EEFSGSDSEY VPPASESDSS |
| | TEESWCSSST VSALEEPMEV |
| 61 | DEDVDDLEDQ EAGDRADAAA GGEPAWGPPC NFPPEIPPFT |
| | TVPGVKVDTS NFEPINFFQL |
| 121 | FMTEAILQDM VLYTNVYAEQ YLTQNPLPRY ARAHAWHPTD |
| | IAEMKRFVGL TLAMGLIKAN |
| 181 | SLESYWNTTT VLSIPVFSAT MSRNRYQLLI RELHFNNNAT |
| | AYPPDQPDHD RDHKLPLID |
| 241 | SLSERFAAVY TPCQNICIDE SLLLFKGRLR FRQYIPSKRA |
| | RYGIKFYKLC ESSSGYTSYF |
| 301 | LIYEGKDSKL DPPGCPPDLT VSGKIVWELI SPLLGQGFHL |
| | YVDNFYSSIP LFTALYCLDT |
| 361 | PACGTINRTR KGLPRALLDK KLNRGETYAL RKNELLAIKF |
| | FDKKNVFMLT SIHDESVIRE |
| 421 | QRVGRPPKNK PLCSKEYSKY MGGVDRTDQL QHYYNATRKT |
| | SAWYKKVGIY LIQMALRNSY |
| 481 | IVYKAAVPGP KLSYYKYQLQ ILPALLFGGV EEQTVPEMLP |
| | SDNVARLIGK HFIDTLPPTP |
| 541 | GKQRPQKGCK VCRKRGIRRD TRYYCPKCPR NPGLCFKPCF |
| | EIYHTQLHY. |

[0697] In certain embodiments, the piggyBac® or piggyBac-like transposase is isolated or derived from Xenopus tropicalis. In certain embodiments, the piggyBac® or piggyBac-like transposase is a hyperactive piggyBac or piggyBac-like transposase. In certain embodiments, the hyperactive piggyBac or piggyBac-like transposase comprises a sequence at least 90% identical to:

(SEQ ID NO: 14572)

| | |
|---|---|
| 1 | MAKRFYSAEE AAAHCSASSS EEFSGSDSEY VPPASESDSS |
| | TEESWCSSST VSALEEPMEV |
| 61 | DEDVDDLEDQ EAGDRADAAA GGEPAWGPPC NFPPEIPPFT |
| | TVPGVKVDTS NFEPINFFQL |
| 121 | FMTEAILOM VLYTNVYAEQ YLTQNPLTRG ARAHAWHPTD |
| | IAEMKRFVGL TLAMGLIKAN |
| 181 | SIESYWDTTT VLSIPVFGAT MSRNRYQLLL RFLHFNNNAT |
| | AVPPDQPGHD REEKLRPLID |
| 241 | SLSERFANVY TPCQNICIDE SLMLFKGRLQ FRQYIPSKRA |
| | RYGIKFYKLC ESSTGYTSYF |
| 301 | LIYEGKDSKL DPPGCPPDLT VSGKIVWELI SPLLGQGFEL |
| | YVDNFYSSIP LFTALYCLNT |
| 361 | PACGTINPNR KGLPRALLDK KLNRGETYAL RKNELLAIKF |
| | FDKKNVFMLT SIHDESVIRE |
| 421 | QRVGRPPKNK PLCSKEYSKY MGGVDPTDQL QHYYNATRKT |
| | RHWYKKVGIY LIQMALPNSY |
| 481 | IVYKAAVPGP KLSYYKYQLQ ILPALLFGGV EEQTVPEMPD |
| | SDNVARLIGK HFIDTLPPTP |
| 541 | GKQRPQKGCK VCRKRGIRRD TRYYCPKCPR NPGLCRKPCF |
| | EIYHTQLHY. |

[0698] In certain embodiments, piggyBac® or piggyBac-like transposase is a hyperactive piggyBac or piggyBac-like transposase. A hyperactive piggyBac or piggyBac-like transposase is a transposase that is more active than the naturally occurring variant from which it is derived. In certain embodiments, a hyperactive piggyBac or piggyBac-like transposase is more active than the transposase of SEQ ID NO: 14517. In certain embodiments, the hyperactive piggyBac or piggyBac-like transposase comprises a sequence of:

(SEQ ID NO: 14572)

| | |
|---|---|
| 1 | MAKRFYSAEE AAAHCSASSS EEFSGSDSEY VPPASESDSS |
| | TEESWCSSST VSALEEPMEV |
| 61 | DEDVDDLEDQ EAGDRADAAA GGEPAWGPPC NFPPEIPPFT |
| | TVPGVKVDTS NFEPINFFQL |
| 121 | FMTEAILQDM VLYTNVYAEQ YLTQPLTRG ARAHAWHPTD |
| | IAEMKRFVGL TLAMGLIKAN |
| 181 | SIESYWDTTT VLSIPVFGAT MSRNRYQLLL RFLHFNNNAT |
| | AVPPDQPGHD RLHKLRPLID |
| 241 | SLSERFANVY TPCQNICIDE SLMLFKGRLQ FRQYIPSKRA |
| | RYGIKFYKLC ESSTGYTSYF |
| 301 | LIYEGKDSKL DPPGCPPDLT VSGKIVWELI SPLLGQGFHL |
| | YVDNFYSSIP LFTALYCLNT |
| 361 | PACGTINRNR KGLPRALLDK KLNRGETYAL RKNELLAIKF |
| | FDKKNVFMLT SIHDESVIRE |
| 421 | QRVGRPPKNK PLCSKEYSKY MGGVDRTDQL QHYYNATRKT |
| | RHWYKKVGIY LIQMALRNSY |
| 481 | IVYKAAVPGP KLSYYKYQLQ ILPALLFGGV EEQTVPEMPD |
| | SDNVARLIGK HFIDTLPPTP |
| 541 | GKQRPQKGCK VCRKRGIRRD TRYYCPKCPR NPGLCRKPCF |
| | EIYHTQLHY. |

[0699] In certain embodiments, the hyperactive piggyBac or piggyBac-like transposase comprises a sequence of.

(SEQ ID NO: 14624)

| | |
|---|---|
| 1 | MAKRFYSAEE AAAHCMASSS EEFSGSDSEY VPPASESDSS |
| | TEESWCSSST VSALEEPMEV |
| 61 | DEDVDDLEDQ EAGDRADAAA GGEPAWGPPC NFPPEIPPFT |
| | TVPGVKVDTS NFEPINFFQL |
| 121 | FMTEAILQDM VLYTNVYAEQ YLTQNPLTRY ARAHAWHPTD |
| | IAEMKRFVGL TLAMGLIKAN |
| 181 | SLESYWDTTT VLSIPVFSAT MSRNRYQLLL RFLHFNNNAT |
| | AVPPDQPGHD RLHKLRPLID |
| 241 | SLSERFAAVY TPCQNICIDE SLLLFKGRLQ FRQYIPSKRA |
| | RYGIKFYKLC ESSSGYTSYF |
| 301 | LIYEGKDSKL DPPGCPPDLT VSGKIVWELI SPLLGQGFHL |
| | YVDNFYSSIP LFTALYCLNT |
| 361 | PACGTINRNR KGLPRALLDK KLNRGETYAL RKNELLAIKF |
| | FDKKNVFMLT SIHDESVIRE |
| 421 | QRVGRPPKNK PLCSKEYSKY MGGVDRTDQL QHYYNATRKT |
| | RHWYKKVGIY LIQMALRNSY |
| 481 | IVYKAAVTGP KLSYYKYQLQ ILPAILFGGV EEQTVTEMPP |
| | SDNVARLIGK HFIDTLPPTP |
| 541 | GKQPTQKGCK VCRKRGIRRD TRYYCPKCPR NPGLCRKPCF |
| | EIYHTQLHY. |

[0700] In certain embodiments, the hyperactive piggyBac or piggyBac-like transposase comprises a sequence of:

(SEQ ID NO: 14625)

| | |
|---|---|
| 1 | MAKRFYSAEE AAAHCMASSS EEFSGSDSEY VPPASESDSS |
| | TEESWCSSST VSALEEPMEV |
| 61 | DEDVDDDEDQ EAGDRADAAA GGEPAWGPPC NFPPEIPPFT |
| | TVPGVKVDTS NFEPINFFQL |
| 121 | FMTEAILQDM VLYTNVYAEQ YLTQNPLPRY ARAHAWHPTD |
| | IAEMKRFVGL TLAMGLIKAN |
| 181 | SLESYWDTTT VLSIPVFSAT MSRNRYQLLL KFLHFNNEAT |
| | AVPPDQPGHD RLHKLRPLID |
| 241 | SLSERFAAVY TPCQNICIDE SLLLFKGRLQ FRQYIPSKRA |
| | RYGIKFYKLC ESSSGYTSYF |
| 301 | LIYEGKDSKL DPPGCPPDLT VSGKIVWELI SPLLGQGFHL |
| | YVDNFYSSIP LFTALYCLNT |
| 361 | PACGTINRNR KGLPRALLDK KLNRGETYAL RKNELLAIKF |
| | FDKKNVFMLT SIHDESVIRE |
| 421 | QRVGRPPKNK PLCSKEYSKY MGGVDRTDQL QHYYNATRKT |
| | RHWYKKVGIY LIQMALRNSY |
| 481 | IVYKAAVPGP KLSYYKYQLQ ILPALLFGGV EEQTVPEMPP |
| | SDNVARLIGK HFIDTLPPTP |
| 541 | GKQRPQKGCK VCRKRGIRRD TRYYCPKCPR NPGLCRKPCF |
| | EIYHTQLHY. |

[0701] In certain embodiments, the hyperactive piggyBac or piggyBac-like transposase comprises a sequence of:

(SEQ ID NO: 14627)

| | |
|---|---|
| 1 | MAKRFYSAEE ALAHCMASSS EQTSGSDSEY VPPASESDSS |
| | TEESWCSSST VSALEEPMEV |
| 61 | DEDVDDLEDQ EAGDRADAAA GGEPAWGPPC NFPPEIPPFT |
| | TVPGVKVDTS NFEPINFFQL |
| 121 | FMTEAILQDM VLYTNVYAEQ YLTQNPLTRY ARAHAWHPTD |
| | IAEMKRFVGL TLAMGLIKAN |
| 181 | SIESYWDTTT VLSIPVFGAT MSRNRYQLLL RFLHENNNAT |
| | AYPPDQPGHD RLHKLRPLID |
| 241 | SLSERFANVY TPCQNICIDE SLLLFKGRLQ FRQYIPSKRA |
| | RYGIKFYKLC ESSSGYTSYF |
| 301 | LIYEGKDSKL DPPGCPPDLT VSGKIVWELI SPLLGQGFHL |
| | YVDNFYSSIP LETALYCLNT |
| 361 | PACGTINRNR KGLPRALLDK KLNRGETYAL RKNELLAIKF |
| | FDKKNVFMLT SIHDESVIRE |
| 421 | QRVGRKPKNK PLCSKEYSKY MGGVDRTDOL QHYYNATRKT |
| | RHWYKKVGIY LIQMALRNSY |
| 481 | IVYKAAVPGP KLSYYKYQLQ ILPALLFGGV EEQTVTEMPP |
| | SDNVARLIGK HFIDTLPPTP |
| 541 | GKQRPQKGCK VCRKRGIRRD TRYYCPKCPR NPGLCRKPCF |
| | EIYETQLHY. |

[0702] In certain embodiments, the hyperactive piggyBac or piggyBac-like transposase comprises a sequence of:

(SEQ ID NO: 14628)

| | |
|---|---|
| 1 | MAKREYSAEE AAAECSASSS EEFSGSDSEY VPPASESDSS |
| | TEESWCSSST VSALEEPMEV |
| 61 | DEDVDDLEDQ EAGDRADAAA GGEPAWGPPC NFPPEIPPFT |
| | TVPGVKVDTS NEEPINFFQL |
| 121 | FMTEAILQM VLYTNVYAEQ YLTQPLTRG ARAHAWHPTD |
| | IAEMKRFVGL TLAMGLIKAN |
| 181 | SLESYWDTTT VLSIPVFGAT MSRNRYQLLL RFLHFNNNAT |
| | AVPPDQPGHD RLHKLRPLID |
| 241 | SLSERFANVY TPCQNICIDE SLMLFKGRLQ FRQYIPSKRA |
| | RYGIKFYKLC ESSTGYTSYF |
| 301 | LIYEGKDSKL DPPGCPPDLT VSGKIVWELI SPLLGOGFHL |
| | YVDNFYSSIP LFTALYCLNT |
| 361 | PACGTINPNR KGLPRALLDK KLNRGETYAL RKNELLAIKF |
| | FDKKNVFMLT SIHDESVIRE |
| 421 | QRVGRPPKNK PLCSKEYSKY MGGVDRTDQL QHYYNATRKT |
| | RHWYKKVGIY LIQMALRNSY |
| 481 | IVYKAAVPGP KLSYYKYQLQ ILPALLFGGV EEQTVPEMPP |
| | SDNVARLIGK HFIDTLPPTP |
| 541 | GKQRPQKGCK VCRKRGIRRD TRYYCPKCPR NPGLCRKPCF |
| | EIYHTQLHY. |

[0703] In certain embodiments, the hyperactive piggyBac or piggyBac-like transposase comprises a sequence of:

(SEQ ID NO: 16820)

| | |
|---|---|
| 1 | MAKRFYSAEE AAAHCMASSS EEFSGSDSEY VPPASESDSS |
| | TEESWCSSST VSALEEPMEV |
| 61 | DEDVDDDEDQ EAGDRADAAA GGEPAWGPPC NFPPEIPPFT |
| | TVPGVKVDTS NFEPINFFQL |
| 121 | FMTEAILQDM VLYTNVYAEQ YLTQNPLTRY ARAHAWHPTD |
| | IAEMKRFVGL TLAMGLIKAN |
| 181 | SLESYWDTTT VLSIPVFGAT MSRNRYQLLL RELHFNNNAT |
| | AVPPDQPGHD RLHKLRPLID |
| 241 | SLSERFANVY TPCQNICIDE SLLLFKGRLQ FRQYIPSKRA |
| | RYGIKFYKLC ESSSGYTSYF |
| 301 | LIYEGKDSKL DPPGCPPDLT VSGKIVWELI SPLLGQGFHL |
| | YVDNFYSSIP LFTALYCLNT |
| 361 | PACGTINRNR KGLPRALLDK KLNRGETYAL RKNELLAIKF |
| | FDKKNVFMLT SIHDESVIRE |
| 421 | QRVGRPPKNK PLCSKEYSKY MGGVDRTDQL QHYYNATRKT |
| | RHWYKKVGIY LIQMALRNSY |
| 481 | IVYKAAVPGP KLSYYKYQLQ ILPALLFGGV EEQTVPEMPP |
| | SDNVARLIGK HFIDTLPPTP |
| 541 | GKQRPQKGCK VCRKRGIRRD TRYYCPKCPR NPGLCRKPCF |
| | EIYHTQLHY. |

[0704] In certain embodiments, the hyperactive piggyBac or piggyBac-like transposase comprises an amino acid substitution at a position selected from amino acid 6, 7, 16, 19, 20, 21, 22, 23, 24, 26, 28, 31, 34, 67, 73, 76, 77, 88, 91, 141, 145, 146, 148, 150, 157, 162, 179, 182, 189, 192, 193, 196, 198, 200, 210, 212, 218, 248, 263, 270, 294, 297, 308, 310, 333, 336, 354.357, 358, 359, 377, 423, 426, 428, 438, 447, 450, 462, 469, 472, 498, 502, 517, 520, 523, 533, 534, 576, 577, 582, 583 or 587 (relative to SEQ ID NO: 14517). In certain embodiments, the hyperactive piggyBac or piggyBac-like transposase comprises an amino acid substitution of Y6C, S7G. M16S, S19G, S20Q, S20G, S20D, E21D, E22Q, F23T, F23P. S24Y, S26V, S28Q, V31K, A34E, L67A, G73H, A76V, D77N, P88A, N91D, Y141Q, Y141A, N145E, N145V, P146T, P146V, P146K, P148T, P148H, Y150G, Y150S, Y150C, H157Y, A162C, A179K, L182I, L182V, T189G, L192H, S193N, S193K, V196I, S198G, T200W, L210H. F212N, N218E, A248N, L263M, Q270L, S294T. T297M, S308R, L310R, L333M, Q336M, A354H, C357V, L358F, D359N, L377I, V 423H, P426K, K428R, S438A. T447G, T447A, L450V, A462H, A462Q, I469V, I472L, Q498M, L502V, E517I, P520D, P520G, N523S, I533E, D534A, F576R, F576E, K577I, I582R, Y583F, L587Y or L587W, or any combination thereof including at least 1, 2, 3, 4, 5, 6, 7, 8, 9, 10 or all of these mutations (relative to SEQ ID NO: 14517).

[0705] In certain embodiments, the hyperactive piggyBac or piggyBac-like transposase comprises one or more substitutions of an amino acid that is not wild type, wherein the one or more substitutions a for wild type amino acid comprises a substitution of A2X, K3X, R4X, F5X, Y6X, S7X, A11X, A13X, C15X, M16X, A17X, S18X, S19X, S20X, E21X, E22X, F23X, S24X, G25X, 26X, D27X, S28X, E29X, E42X, E43X, S44X, C46X, S47X, S48X, S49X, T50X, V51X, S52X, A53X, L54X, E55X, E56X, P57X, M58X, E59X, E62X, D63X, V64X, D65X, D66X, L67X, E68X, D69X, Q70X, E71X, A72X, G73X, D74X, R75X, A76X, D77X, A78X, A79X, A80X, G81X, G82X, E83X, P84X, A85X, W86X, G87X, P88X, P89X, C90X, N91X, F92X, P93X, E95X, I96X, P97X, P98X, F99X, T100X, T101X, P103X, G104X, V105X. K106X, V107X, D108X, T109X, N111X, P114X, I115X, N116X. F117X, F118X, Q119X, M122X, T123X, E124X, A125X, I126X, L127X, Q128X, D129X, M130X, L132X, Y133X, V126X, Y127X. A138X, E139X. Q140X, Y141X, L142X. Q144X, N145X, P146X, L147X, P148X, Y150X, A151X, A155X, H157X, P158X, I161X, A162X, V168X, T171X, L172X, A173X, M174X, I177X, A179X, L182X, D187X, T188X, T189X, T190X, L192X, S193X, I194X, P195X, V196X, S198X, A199X, T200X, S202X, L208X, L209X, L210X, R211X, F212X, F215X, N217X, N218X, A219X, T220X, A221X, V222X, P224X, D225X, Q226X, P227X, H229X, R231X, H233X, L235X, P237X, I239X, D240X, L242X, S243X, E244X, R244X, F246X, A247X, A248X, V249X, Y250X, T251X, P252X, C253X, Q254X, I256X, C257X, I258X, D259X, E260X, S261X, L262X, L263X, L264X, F265X, K266X, G267X, R268X, L269X, Q270X, F271X, R272X, Q273X, Y274X, I275X, P276X, S277X, K278X, R279X, A280X, R281X, Y282X, G283X, I284X, K285X, F286X, Y287X, K288X, L289X, C290X, E291X, S292X, S293XS294X, G295X, Y296X, T297X, S298X, Y299X, F300X, E304X, L310X, P313X, G314X, P316X, P317X, D318X, L319X, T320X, V321X. K324X, E328X, I330X, S331X, P332X, L333X, L334X, G335X, Q336X, F338X, L340X, D343X, N344X, F345X, Y346X, S347X, L351X, F352X, A354X, L355X, Y356X, C357X, L358X, D359X, T360X, R422X, Y423X, G424X, P426X, K428X, N429X, K430X, P431X, L432X, S434X, K435X, E436X, S438X, K439X, Y440X, G443X, R446X, T447X, L450X, Q451X. N455X, T460X, R461X, A462X, K465X, V467X, G468X, I469X, Y470X, L471X, I472X, M474X, A475X, L476X, R477X, S479X, Y480X, V482XY483X, K484X, A485X, A486X, V487X, P488X, P490X, K491X, S493X, Y494X, Y495X, K496X, Y497T, Q498X, L499X, Q500X, I501X, L502X, P503X, A504X, L505X, L506X, F507X, G508X, G509X, V510X, E511X, E512X, Q513X, T514X, V515X, E517X, M518X, P519X, P520X, S521X, D522X, N523X, V524X, A525X, L527X, I528X, K530X, H531X, F532X, I533X, D534X, T535X, L536X, T539X, P540X, Q546X, K550X, R553X, K554X, R555X, G556X, I557X, R558X, R559X, D560X, T561X, Y564X, P566X, K567X, P569X, R570X. N571X, L574X, C575X, F576X, K577X, P578X, F580X, E581X, I582X, Y583X, T585X, Q586X, L587X, H588X or Y589X (relative to SEQ ID NO: 14517). A list of hyperactive amino acid substitutions can be found in U.S. Pat. No. 10,041,077, the contents of which are incorporated by reference in their entirety.

[0706] In certain embodiments, the piggyBac® or piggyBac-like transposase is integration deficient. In certain embodiments, an integration deficient piggyBac or piggyBac-like transposase is a transposase that can excise its corresponding transposon, but that integrates the excised transposon at a lower frequency than a corresponding naturally occurring transposase. In certain embodiments, the piggyBac® or piggyBac-like transposase is an integration deficient variant of SEQ ID NO: 14517. In certain embodiments, the integration deficient piggyBac or piggyBac-like transposase is deficient relative to SEQ ID NO: 14517.

[0707] In certain embodiments, the piggyBac® or piggyBac-like transposase is active for excision but deficient in integration. In certain embodiments, the integration deficient piggyBac or piggyBac-like transposase comprises a sequence that is at least 90% identical to a sequence of:

(SEQ ID NO: 14605)

| | |
|---|---|
| 1 | MAKRFYSAEE AAAHCMASSS EEFSGSDSEY VPPASESDSS |
| | TEESWCSSST VSALEEPMEV |
| 61 | DEDVDDDEDQ EAGDRADAAA GGEPAWGPPC NFPPEIPPFT |
| | TVPGVKVDTS NFEPINFFQL |
| 121 | FMTEAILQDM VLYTNVYAEQ YLTQNPLPRY ARAHAWHPTD |
| | IAEMKRFVGL TLAMGLIKAN |
| 181 | SLESYWDTTT VLSIPVFSAT MSRNRYQLLL KFLHFNNEAT |
| | AVPPDQPGHD RLHKLRPLID |
| 241 | SLSERFAAVY TPCQNICIDE SLLLFKGRLQ FRQYIPSKRA |
| | RYGIKFYKLC ESSSGYTSYF |
| 301 | LIYEGKDSKL DPPGCPPDLT VSGKIVWELI SPLLGQGFHL |
| | YVDNFYSSIP LFTALYCLDT |
| 361 | PACGTINRNR KGLPRALLDK KLNRGETYAL RKNELLAIKF |
| | FDKKNVFMLT SIHDESVIRE |
| 421 | QRVGRPPKNK PLCSKEYSKY MGGVDRTDQL QHYYNATRKT |
| | RHWYKKVGIY LIQMALRNSY |
| 481 | IVYKAAVPGP KLSYYKYQLQ ILPALLFGGV EEQTVPEMPP |
| | SDNVARLIGK HFIDTLPPTP |
| 541 | GKQRPQKGCK VCRKRGIRRD TRYYCPKCPR NPGLCRKPCF |
| | EIYHTQLHYG RR. |

[0708] In certain embodiments, the integration deficient piggyBac or piggyBac-like transposase comprises a sequence that is at least 90% identical to a sequence of:

(SEQ ID NO: 14604)

| | |
|---|---|
| 1 | MAKRFYSAEE AAAHCMASSS EEFSGSDSEY VPPASESDSS |
| | TEESWCSSST VSALEEPMEV |
| 61 | DEDVDDDEDQ EAGDRADAAA GGEPAWGPPC NFPPEIPPFT |
| | TVPGVKVDTS NFEPINFFQL |
| 121 | FMTEAILQDM VLYTNVYAEQ YLTQNPLPRY ARAHAWHPTD |
| | IAEMKRFVGL TLAMGLIKAN |
| 181 | SLESYWDTTT VLSIPVFSAT MSRNRYQLLL KFLHFNNEAT |
| | AVPPDQPGHD RLHKLRPLID |
| 241 | SLSERFAAVY TPCQNICIDE SLLLFKGRLQ FRQYIPSKRA |
| | RYGIKFYKLC ESSSGYTSYF |
| 301 | LIYEGKDSKL DPPGCPPDLT VSGKIVWELI SPLLGQGFHL |
| | YVDNFYSSIP LFTALYCLDT |
| 361 | PACGTINRNR KGLPRALLDK KLNRGETYAL RKNELLAIKF |
| | FDKKNVFMLT SIHDESVIRE |
| 421 | QRVGRPPKNK PLCSKEYSKY MGGVDRTDQL QHYYNATRKT |
| | RHWYKKVGIY LIQMALRNSY |
| 481 | IVYKAAVPGP KLSYYKYQLQ ILPALLFGGV EEQTVPEMPP |
| | SDNVARLIGK HFIDTLPPTP |
| 541 | GKQRPQKGCK VCRKRGIRRD TRYYCPKCPR NPGLCRKPCF |
| | EIYHTQLHYG. |

[0709] In certain embodiments, the integration deficient piggyBac or piggyBac-like transposase comprises a sequence that is at least 90% identical to a sequence of:

(SEQ ID NO: 14611)

| | |
|---|---|
| 1 | MAKRFYSAEE AAAHCMASSS EEFSGSDSEY VPPASESDSS |
| | TEESWCSSST VSALEEPMEV |
| 61 | DEDVDDDEDQ EAGDRADAAA GGEPAWGPPC NFPPEIPPFT |
| | TVPGVKVDTS NFEPINFFQL |
| 121 | FMTEAILQDM VLYTNVYAEQ YLTQNPLPRY ARAHAWHPTD |
| | IAEMKRFVGL TLAMGLIKAN |
| 181 | SLESYWDTTT VLSIPVFSAT MSRNRYQLLL KFLHFNNEAT |
| | AVPPDQPGHD RLHKLRPLID |
| 241 | SLSERFAAVY TPCQNICIDE SLLLFKGRLQ FRQYIPSKRA |
| | RYGIKFYKLC ESSSGYTSYF |
| 301 | LIYEGKDSKL DPPGCPPDLT VSGKIVWELI SPLLGQGFHL |
| | YVDNFYSSIP LFTALYCLDT |
| 361 | PACGTINRNR KGLPRALLDK KLNRGETYAL RKNELLAIKF |
| | FDKKNVFMLT SIHDESVIRE |
| 421 | QRVGRPPKNK PLCSKEYSKY MGGVDRTDQL QHYYNATRKT |
| | RHWYKKVGIY LIQMALRNSY |
| 481 | IVYKAAVPGP KLSYYKYQLQ ILPALLFGGV EEQTVPEMPP |
| | SDNVARLIGK HFIDTLPPTP |
| 541 | GKQRPQKGCK VCRKRGIRRD TRYYCPKCPR NPGLCRKPCF |
| | EIYHTQLHYG RR. |

[0710] In certain embodiments, the integration deficient piggyBac or piggyBac-like transposase comprises SEQ ID NO: 14611. In certain embodiments, the integration deficient piggyBac or piggyBac-like transposase comprises a sequence that is at least 90% identical to a sequence of:

(SEQ ID NO: 14612)

| | |
|---|---|
| 1 | MAKRFYSAEE AAAHCMASSS EEFSGSDSEY VPPASESDSS |
| | TEESWCSSST VSALEEPMEV |
| 61 | DEDVDDDEDQ EAGDRADAAA GGEPAWGPPC NFPPEIPPFT |
| | TVPGVKVDTS NFEPINFFQL |
| 121 | FMTEAILQDM VLYTNVYAEQ YLTQNPLPRY ARAHAWHPTD |
| | IAEMKRFVGL TLAMGLIKAN |
| 181 | SLESYWDTTT VLSIPVFSAT MSRNRYQLLL KFLHFNNEAT |
| | AVPPDQPGHD RLHKLRPLID |
| 241 | SLSERFAAVY TPCQNICIDE SLLLFKGRLQ FRQYIPSKRA |
| | RYGIKFYKLC ESSSGYTSYF |
| 301 | LIYEGKDSKL DPPGCPPDLT VSGKIVWELI SPLLGQGFHL |
| | YVDNFYSSIP LFTALYCLDT |
| 361 | PACGTINRNR KGLPRALLDK KLNRGETYAL RKNELLAIKF |
| | FDKKNVFMLT SIHDESVIRE |
| 421 | QRVGRPPKNK PLCSKEYSKY MGGVDRTDQL QHYYNATRKT |
| | RHWYKKVGIY LIQMALRNSY |
| 481 | IVYKAAVPGP KLSYYKYQLQ ILPALLFGGV EEQTVPEMPP |
| | SDNVARLIGK HFIDTLPPTP |
| 541 | GKQRPQKGCK VCRKRGIRRD TRYYCPKCPR NPGLCRKPCF |
| | EIYHTQLHYG RR. |

[0711] In certain embodiments, the integration deficient piggyBac or piggyBac-like transposase comprises SEQ ID NO: 14612. In certain embodiments, the integration deficient piggyBac or piggyBac-like transposase comprises a sequence that is at least 90% identical to a sequence of;

(SEQ ID NO: 14613)

| | |
|---|---|
| 1 | MAKRFYSAEE AAAHCMASSS EEFSGSDSEY VPPASESDSS |
| | TEESWCSSST VSALEEPMEV |
| 61 | DEDVDDDEDQ EAGDRADAAA GGEPAWGPPC NFPPEIPPFT |
| | TVPGVKVDTS NFEPINFFQL |
| 121 | FMTEAILQDM VLYTNVYAEQ YLTQNPLPRY ARAHAWHPTD |
| | IAEMKRFVGL TLAMGLIKAN |
| 181 | SLESYWDTTT VLSIPVFSAT MSRNRYQLLL KFLHFNNEAT |
| | AVPPDQPGHD RLHKLRPLID |
| 241 | SLSERFAAVY TPCQNICIDE SLLLFKGRLQ FRQYIPSKRA |
| | RYGIKFYKLC ESSSGYTSYF |
| 301 | LIYEGKDSKL DPPGCPPDLT VSGKIVWELI SPLLGQGFHL |
| | YVDNFYSSIP LFTALYCLDT |
| 361 | PACGTINRNR KGLPRALLDK KLNRGETYAL RKNELLAIKF |
| | FDKKNVFMLT SIHDESVIRE |
| 421 | QRVGRPPKNK PLCSKEYSKY MGGVDRTDQL QHYYNATRKT |
| | RHWYKKVGIY LIQMALRNSY |
| 481 | IVYKAAVPGP KLSYYKYQLQ ILPALLFGGV EEQTVPEMPP |
| | SDNVARLIGK HFIDTLPPTP |
| 541 | GKQRPQKGCK VCRKRGIRRD TRYYCPKCPR NPGLCRKPCF |
| | EIYHTQLHYG RR. |

[0712] In certain embodiments, the integration deficient piggyBac or piggyBac-like transposase comprises SEQ ID NO: 14613. In certain embodiments, the integration deficient piggyBac or piggyBac-like transposase comprises an amino acid substitution wherein the Asn at position 218 is replaced by a Glu or an Asp (N218D or N218E) (relative to SEQ ID NO: 14517).

[0713] In certain embodiments, the excision competent, integration deficient piggyBac or piggyBac-like transposase comprises one or more substitutions of an amino acid that is not wild type, wherein the one or more substitutions a for wild type amino acid comprises a substitution of A2X, K3X, R4X, F5X, Y6X, S7X, A8X, E9X, E10X, A11X, A12X, A13X, H14X, C15X, M16X, A17X, S18X, S19X, S20X, E2IX, E22X, F23X, S24X, G25X, 26X, D27X, S28X, E29X, V31X, P32X, P33X, A34X, S35X, E36X, S37X, D38X, S39X, S40X, T41X, E42X, E43X, S44X, W45X, C46X, S47X, S48X, S49X, T50X, V51X, S52X, A53X, L54X, E55X, E56X, P57X, M58X, E59X, V60X, M122X, T123X, E124X, A125X, L127X, Q128X, D129X, L132X, Y133X, V126X, Y127X, E139X, Q140X, Y141X, L142X, T143X, Q144X, N145X, P146X, L147X, P148X, R149X, Y150X, A151X, H154X, H157X, P158X, T159X, D160X, I161X, A162X, E163X, M164X, K165X, R166X, F167X, V168X, G169X, L170X, T171X, L172X, A173X, M174X, G175X, L176X, I177X, K178X, A179X, N180X, S181X, L182X, S184X, Y185X, D187X, T188X, T189X, T190X, V191X, L192X, S193X, I194X, P195X, V196X, F197X, S198X, A199X, T200X, M201X, S202X, R203X, N204X, R205X, Y206X, Q207X, L208X, L209X, L210X, R211X, F212X, L213X, H241X, F215X, N216X, N217X, N218X, A219X, T220X, A221X, V222X, P223X, P224X, D225X, Q226X, P227X, G228X, H229X, D230X, R231X, H233X, K234X, L235X, R236X, L238X, I239X, D240X, L242X, S243X, E244X, R244X, F246X, A247X, A248X, V249X, Y250X, T251X, P252X, C253X, Q254X, N255X, I256X, C257X, I258X, D259X, E260X, S261X, L262X, L263X, L264X, F265X, K266X, G267X, R268X, L269X, Q270X, F271X, R272X, Q273X, Y274X, I275X, P276X, S277X, K278X, R279X, A280X, R281X, Y282X, G283X, I284X, K285X, F286X, Y287X, K288X, L289X, C290X, E291X, S292X, S293X, S294X, G295X, Y296X, T297X, S298X, Y299X, F300X, I302X, E304X, G305X, K306X, D307X, S308X, K309X, L310X, D311X, P312X, P313X, G314X, C315X, P316X, P317X, D318X, L319X, T320X, V321X, S322X, G323X, K324X, I325X, V326X, W327X, E328X, L329X, I330X, S331X, P332X, L333X, L334X, G335X, Q336X, F338X, H339X, L340X, V342X, N344X, F345X, Y346X, S347X, S348X, I349X, L351X, T353X, A354X, Y356X, C357X, L358X, D359X, T360X, P361X, A362X, C363X, G364X, I366X, N367X, R368X, D369X, K371X, G372X, L373X, R375X, A376X, L377X, L378X, D379X, K380X, K381X, L382X, N383X, R384XG385X, T387X, Y388X, A389X, L390X, K392X, N393X, E394X, A397X, K399X, F400X, F401X, D402X, N405X, L406X, L409X, R422X, Y423X, G424X, E425X, P426X, K428X, N429X, K430X, P431X, L432X, S434X, K435X, E436X, S438X, K439X, Y440X, G442X, G443X, V444X, R446X, T447X, L450X, Q451X, H452X, N455X, T457X, R458X, T460X, R461X, A462X, Y464X, K465X, V467X, G468X, I469X, L471X, I472X, Q473X, M474X, L476X, R477X, N478X, S479X, Y480X, V482XY483X, K484X, A485X, A486X, V487X, P488X, G489X, P490X, K491X, L492X, S493X, Y494X, Y495X, K496X, Q498X, L499X, Q500X, I501X, L502X, P503X, A504X, L505X, L506X, F507X, G508X, G509X, V510X, E511X, E512X, Q513X, T514X, V515X, E517X, M518X, P519X, P520X, S521X, D522X, N523X, V524X, A525X, L527X, I528X, G529X, K530X, F532X, I533X, D534X, T535X, L536X, P537X, P538X, T539X, P540X, G541X, F542X, Q543X, R544X, P545X, Q546X, K547X, G548X, C549X, K550X, V551X, C552X, R553X, K554X, R555X, G556X, I557X, R558X, R559X, D560X, T561X, R562X, Y563X, Y564X, C565X, P566X, K567X, C568X, P569X, R570X, N571X, P572X, G573X, L574X, C575X, F576X, K577X, P578X, C579X, F580X, E581X, I582X, Y583X, H584X, T585X, Q586X, L587X, H588X or Y589X (relative to SEQ ID NO: 14517). A list of excision competent, integration deficient amino acid substitutions can be found in U.S. Pat. No. 10,041,077, the contents of which are incorporated by reference in their entirety.

[0714] In certain embodiments, the piggyBac® or piggyBac-like transposase is fused to a nuclear localization signal. In certain embodiments, SEQ ID NO: 14517 or SEQ ID NO: 14518 is fused to a nuclear localization signal. In certain embodiments, the amino acid sequence of the piggyBac® or piggyBac like transposase fused to a nuclear localization signal is encoded by a polynucleotide sequence comprising:

(SEQ ID NO: 14626)

| | |
|---|---|
| 1 | atggcaccca aaaagaaacg taaagtgatg gccaaaagat |
| | tttacagcgc cgaagaagca |
| 61 | gcagcacatt gcatggcatc gtcatccgaa gaattctcgg |
| | ggagcgattc cgaatatgtc |
| 121 | ccaccqgcct cggaaagcga ttcgagcact gaggagtcgt |
| | ggtgttcctc ctcaactgtc |
| 181 | tcggctcttg aggagccgat ggaagtggat gaggatgtgg |
| | acgacttgga ggaccaggaa |
| 241 | gccggagaca gggccgacgc tgccgcggga ggggagccgg |
| | cgtggggacc tccatgcaat |
| 301 | tttcctcccg aaatcccacc gttcactact gtgccgggag |
| | tgaaggtcga cacgtccaac |
| 361 | ttcgaaccga tcaatttctt tcaactcttc atgactgaag |
| | cgatcctgca agatatggtg |
| 421 | ctctacacta atgtgtacgc cgagcagtac ctgactcaaa |
| | acccgctgcc tcgctacgcg |
| 481 | agagcgcatg cgtggcaccc gaccgatatc gcggagatga |
| | agcggttcgt gggactgacc |
| 541 | ctcgcaatgg gcctgatcaa ggccaacagc ctcgagtcat |
| | actgggatac cacgactgtg |
| 601 | cttagcattc cggtgttctc cgctaccatg tcccgtaacc |
| | gctaccaact cctgctgcgg |
| 661 | ttcctccact tcaacaacaa tgcgaccgct gtgccacctg |
| | accagccagg acacgacaga |
| 721 | ctccacaagc tgcggccatt gatcgactcg ctgagcgagc |
| | gattcgccgc ggtgtacacc |
| 781 | ccttqccaaa acatttgcat cgacgagtcg cttctgctgt |
| | ttaaaggccg gcttcagttc |
| 841 | cgccagtaca tcccatcgaa gcgcgctcgc tatggtatca |
| | aattctacaa actctgcgag |
| 901 | tcgtccagcg gctacacgtc atacttcttg atctacgagg |
| | ggaaggactc taagctggac |
| 961 | ccaccggggt gtccaccgga tcttactgtc tccggaaaaa |
| | tcgtgtggga actcatctca |
| 1021 | cctctcctcg gacaaggctt tcatctctac gtcgacaatt |
| | tctactcatc gatccctctg |
| 1081 | ttcaccgccc tctactgcct ggatactcca gcctgtggga |
| | ccattaacag aaaccggaag |
| 1141 | ggtctgccga gagcactgct ggataagaag ttgaacaggg |
| | gagagactta cgcgctgaga |
| 1201 | aagaacgaac tcctcgccat caaattcttc gacaagaaaa |
| | atgtgtttat gctcacctcc |
| 1261 | atccacgacg aatccgtcat ccgggagcag cgcgtgggca |
| | ggccgccgaa aaacaagccg |
| 1321 | ctgtgctcta aggaatactc caagtacatg gggggtgtcg |
| | accggaccga tcagctgcag |
| 1381 | cattactaca acgccactag aaagacccgg gcctggtaca |
| | agaaagtogg catctacctg |
| 1441 | atccaaatgg cactgaggaa ttcgtatatt gtctacaagg |
| | ctgccgttcc gggcccgaaa |
| 1501 | ctgtcatact acaagtacca gcttcaaatc ctgccqgcgc |
| | tgctgttcgg tggagtggaa |
| 1561 | gaacagactg tgcccgagat gccgccatcc gacaacgtgg |
| | cccggttgat cggaaagcac |
| 1621 | ttcattgata ccctgcctcc gacgcctgga aagcagcggc |
| | cacagaaggg atgcaaagtt |
| 1681 | tgccgcaagc gcggaatacg gcgcgatacc cgctactatt |
| | gcccgaagtg cccccgcaat |
| 1741 | cccggactgt gtttcaagcc ctgttttgaa atctaccaca |
| | cccagttgca ttac. |

[0715] In certain embodiments, the piggyBac® or piggyBac-like transposon is isolated or derived from Xenopus tropicalis. In certain embodiments, the piggyBa®c or piggyBac-like transposon comprises a sequence of:

(SEQ ID NO: 14519)

| | |
|---|---|
| 1 | ttaacctttt tactgccaat gacgcatggg atacgtcgtg |
| | gcagtaaaag ggcttaaatg |
| 61 | ccaacgacgc gtcccatacg ttgttggcat tttaagtctt |
| | ctctctgcag cggcagcatg |
| 121 | tgccgccgct gcagagagtt tctagcgatg acagcccctc |
| | tgggcaacga gccggggggg |
| 181 | ctgtc. |

[0716] In certain embodiments, the piggyBac® or piggyBac-like transposon comprises a sequence of:

(SEQ ID NO: 14520)

| | |
|---|---|
| 1 | tttgcatttt tagacattta gaagcctata tcttgttaca |
| | gaattggaat tacacaaaaa |
| 61 | ttctaccata ttttgaaagc ttaggttqtt ctgaaaaaaa |
| | caatatattg ttttcctggg |
| 121 | taaactaaaa gtcccctcga ggaaaggccc ctaaagtgaa |
| | acagtgcaaa acgttcaaaa |
| 181 | actgtctggc aatacaagtt ccactttgac caaaacggct |
| | ggcagtaaaa gggttaa. |

[0717] In certain embodiments, the piggyBac® or piggyBac-like transposon comprises SEQ ID NO: 14519 and SEQ ID NO: 14520. In certain embodiments, the piggyBac® or piggyBac-like transposon comprises a sequence of:

(SEQ ID NO: 14521)

| | |
|---|---|
| 1 | ttaacccttt gcctgccaat cacgcatggg atacgtcgtg |
| | gcagtaaaag ggcttaaatg |
| 61 | ccaacgacgc gtcccatacg ttgttggcat tttaagtctt |
| | ctctctgcag cggcagcatg |
| 121 | tgccgccgct gcagagagtt tctagcgatg acagcccctc |
| | tgggcaacga gccggggggg |
| 181 | ctgtc. |

[0718] In certain embodiments, the piggyBac® or piggyBac-like transposon comprises a sequence of;

(SEQ ID NO: 14522)

| | |
|---|---|
| 1 | tttgcatttt tagacattta gaagcctata tcttgttaca |
| | gaattggaat tacacaaaaa |
| 61 | ttctaccata ttttgaaagc ttaggttgtt ctgaaaaaaa |
| | caatatattg ttttcctggg |
| 121 | taaactaaaa gtcccctcga ggaaaggccc ctaaagtgaa |
| | acagtgcaaa acgttcaaaa |
| 181 | actgtctggc aatacaagtt ccactttggg acaaatcggc |
| | tggcagtgaa agggttaa. |

[0719] In certain embodiments, the piggyBac® or piggyBac-like transposon comprises a sequence of;

(SEQ ID NO: 14523)

| | |
|---|---|
| 1 | ttaacctttt tactgccaat gacgcatggg atacgtcgtg |
| | gcagtaaaag ggcttaaatg |
| 61 | ccaacgacgc gtcccatacg ttgttggcat tttaattctt |
| | ctctctgcag cggcagcatg |
| 121 | tgccgccgct gcagagagtt tctagcgatg acagcccctc |
| | tgggcaacga gccggggggg |
| 181 | ctgtc. |

[0720] In certain embodiments, the piggyBac® or piggyBac-like transposon comprises SEQ ID NO: 14520 and SEQ ID NO: 14519, SEQ ID NO: 14521 or SEQ ID NO: 14523. In certain embodiments, the piggyBac® or piggyBac-like transposon comprises SEQ ID NO: 14522 and SEQ ID NO: 14519, SEQ ID NO: 14521 or SEQ ID NO: 14523. In certain embodiments, the piggyBac® or piggyBac-like transposon comprises one end comprising at least 14, 16, 18, 20, 30 or 40 contiguous nucleotides from SEQ ID NO: 14519, SEQ ID NO: 14521 or SEQ ID NO: 14523. In certain embodiments, the piggyBac® or piggyBac-like transposon comprises one end comprising at least 14, 16, 18, 20, 30 or 40 contiguous nucleotides from SEQ ID NO: 14520 or SEQ ID NO: 14522. In certain embodiments, the piggyBac® or piggyBac-like transposon comprises one end with at least 90% identity to SEQ ID NO: 14519, SEQ ID NO: 14521 or SEQ ID NO: 14523. In certain embodiments, the piggyBac® or piggyBac-like transposon comprises one end with at least 90% identity to SEQ ID NO: 14520 or SEQ ID NO: 14522. In one embodiment, one transposon end is at least 90% identical to SEQ ID NO: 14519 and the other transposon end is at least 90% identical to SEQ ID NO: 14520.

[0721] In certain embodiments, the piggyBac® or piggyBac-like transposon comprises a sequence of TTAACCTTTACTGCCA (SEQ ID NO: 14524). In certain embodiments, the piggyBac® or piggyBac-like transposon comprises a sequence of TTAACCCTTTGCCTGCCA (SEQ ID NO: 14526). In certain embodiments, the piggyBac® or piggyBac-like transposon comprises a sequence of TTAACCYTTTTACTGCCA (SEQ ID NO: 14527). In certain embodiments, the piggyBac® or piggyBac-like transposon comprises a sequence of TGGCAGTAAAAGGGTTAA (SEQ ID NO: 14529). In certain embodiments, the piggyBac® or piggyBac-like transposon comprises a sequence of TGGCAGTGAAAGGGTTAA (SEQ ID NO: 14531). In certain embodiments, the piggyBac® or piggyBac-like transposon comprises a sequence of TTAACCYTTKMCTGCCA (SEQ ID NO: 14533). In certain embodiments, one end of the piggyBac® or piggyBac-like transposon comprises a sequence selected from SEQ ID NO: 14524, SEQ ID NO: 14526 and SEQ ID NO: 14527. In certain embodiments, one end of the piggyBac® (PB) or piggyBac-like transposon comprises a sequence selected from SEQ ID NO: 14529 and SEQ ID NO: 14531. In certain embodiments, each inverted terminal repeat of the piggyBac® or piggyBac-like transposon comprises a sequence of ITR sequence of CCYTTTKMCTGCCA (SEQ ID NO: 14563). In certain embodiments, each end of the piggyBac® (PB) or piggyBac-like transposon comprises SEQ ID NO: 14563 in inverted orientations. In certain embodiments, one ITR of the piggyBac® or piggyBac-like transposon comprises a sequence selected from SEQ ID NO: 14524, SEQ ID NO: 14526 and SEQ ID NO: 14527. In certain embodiments, one ITR of the piggyBac® or piggyBac-like transposon comprises a sequence selected from SEQ ID NO: 14529 and SEQ ID NO: 14531. In certain embodiments, the piggyBac® or piggyBac-like transposon comprises SEQ ID NO: 14533 in inverted orientation in the two transposon ends.

[0722] In certain embodiments, The piggyBac® or piggyBac-like transposon may have ends comprising SEQ ID NO: 14519 and SEQ ID NO: 14520 or a variant of either or both of these having at least 90% sequence identity to SEQ ID NO: 14519 or SEQ ID NO: 14520, and the piggyBac® or piggyBac-like transposase has the sequence of SEQ ID NO: 14517 or a variant showing at least %, 10%, 15%, 20%, 25%, 30%, 35%, 40%, 45%, 50%, 55%, 60%, 65%, 70%, 75%, 80%, 85%, 90%, 95%, 99% or any percentage in between sequence identity to SEQ ID NO: 14517 or SEQ ID NO: 14518. In certain embodiments, one piggyBac® or piggyBac-like transposon end comprises at least 14 contiguous nucleotides from SEQ ID NO: 14519, SEQ ID NO: 14521 or SEQ ID NO: 14523, and the other transposon end comprises at least 14 contiguous nucleotides from SEQ ID NO: 14520 or SEQ ID NO: 14522. In certain embodiments, one transposon end comprises at least 15, at least 16, at least 17, at least 18, at least 19, at least 20, at least 22, at least 25, at least 30 contiguous nucleotides from SEQ ID NO: 14519, SEQ ID NO: 14521 or SEQ ID NO: 14523, and the other transposon end comprises at least 15, at least 16, at least 17, at least 18, at least 19, at least 20, at least 22, at least 25 or at least 30 contiguous nucleotides from SEQ ID NO: 14520 or SEQ ID NO: 14522.

[0723] In certain embodiments, the piggyBac® or piggyBac-like transposase recognizes a transposon end with a left sequence corresponding to SEQ ID NO: 14519, and a right sequence corresponding to SEQ ID NO: 14520. It will excise the transposon from one DNA molecule by cutting the DNA at the 5′-TTAA-3′ sequence at the left end of one transposon end to the 5′-TTAA-3′ at the right end of the second transposon end, including any heterologous DNA that is placed between them, and insert the excised sequence into a second DNA molecule. In certain embodiments, truncated and modified versions of the left and right transposon ends will also function as part of a transposon that can be transposed by the piggyBac® or piggyBac-like transposase. For example, the left transposon end can be replaced by a sequence corresponding to SEQ ID NO: 14521 or SEQ ID NO: 14523, the right transposon end can be replaced by a shorter sequence corresponding to SEQ ID NO: 14522. In certain embodiments, the left and right transposon ends share an 18 bp almost perfectly repeated sequence at their ends (5′-TTAACCYTTTKMCTGCCA: SEQ ID NO: 14533) that includes the 5′-TTAA-3′ insertion site, which sequence is inverted in the orientation in the two ends. That is in (SEQ ID NO: 14519) and SEQ ID NO: 14523 the left transposon end begins with the sequence 5′-TTAACCTTTTTACTGCCA-3′ (SEQ ID NO: 14524), or in (SEQ ID NO: 14521) the left transposon end begins with the sequence 5′-TTAACCCTTTGCCTGCCA-3′ (SEQ ID NO: 14526); the right transposon ends with approximately the reverse complement of this sequence: in SEQ ID NO: 14520 it ends 5′ TGGCAGTAAAAGGGTTAA-3′ (SEQ ID NO: 14529), in (SEQ ID NO: 14522) it ends 5′-TGGCAGTGAAAGGGTTAA-3′ (SEQ ID NO: 14531.) One embodiment of the disclosure is a transposon that comprises a heterologous polynucleotide inserted between two transposon ends each comprising SEQ ID NO: 14533 in inverted orientations in the two transposon ends. In certain embodiments, one transposon end comprises a sequence selected from SEQ ID NOS: 14524, SEQ ID NO: 14526 and SEQ ID NO: 14527. In some embodiments, one transposon end comprises a sequence selected from SEQ ID NO: 14529 and SEQ ID NO: 14531.

[0724] In certain embodiments, the piggyBac® (PB) or piggyBac-like transposon is isolated or derived from Xenopus tropicalis. In certain embodiments, the piggyBac or piggyBac-like transposon comprises at a sequence of:

(SEQ ID NO: 14573)

| | |
|---|---|
| 1 | ccctttgcct gccaatcacg catgggatac gtcgtggcag |
| | taaaagggct taaatgccaa |
| 61 | cgacgcgtcc catacgtt. |

[0725] In certain embodiments, the piggyBac® or piggyBac-like transposon comprises at a sequence of:

(SEQ ID NO: 14574)

| | |
|---|---|
| 1 | cctgggtaaa ctaaaagtcc cctcgaggaa aggcccctaa |
| | agtgaaacag tgcaaaacgt |
| 61 | tcaaaaactg tctggcaata caagttccac tttgggacaa |
| | atcggctggc agtgaaaggg. |

[0726] In certain embodiments, the piggyBac® or piggyBac-like transposon comprises at least 16 contiguous bases from SEQ ID NO: 14573 or SEQ ID NO: 14574, and inverted terminal repeat of CCYTTTBMCTGCCA (SEQ ID NO: 14575).

[0727] In certain embodiments, the piggyBac® or piggyBac-like transposon comprises at a sequence of:

(SEQ ID NO: 14579)

| | |
|---|---|
| 1 | ccctttgcct gccaatcacg catgggatac gtcgtggcag |
| | taaaagggct taaatgccaa |
| 61 | cgacgcgtcc catacgttgt tggcatttta agtcttctct |
| | ctgcagcggc agcatgtgcc |
| 121 | gccgctgcag agagtttcta gcgatgacag cccctctggg |
| | caacgagccg ggggggctgt |
| 181 | c. |

[0728] In certain embodiments, the piggyBac® or piggyBac-like transposon comprises at a sequence of:

(SEQ ID NO: 14580)

| | |
|---|---|
| 1 | cctttttact gccaatgacg catgggatac gtcgtggcag |
| | taaagggct taaatgccaa |
| 61 | cgacgcgtcc catacgttgt tggcatttta attcttctct |
| | ctgcagcggc agcatgtgcc |
| 121 | gccgctgcag agagtttcta gcgatgacag cccctctggg |
| | caacgagccg ggggggctgt |
| 181 | c. |

[0729] In certain embodiments, the piggyBac® or piggyBac-like transposon comprises at a sequence of:

(SEQ ID NO: 14581)

| | |
|---|---|
| 1 | cctttttact gccaatgacg catgggatac gtcgtggcag |
| | taaaagggct taaatgccaa |
| 61 | cgacgcgtcc catacgttgt tggcatttta agtcttctct |
| | ctgcagcggc agcatgtgcc |
| 121 | gccgctgcag agagtttcta gcgatgacag cccctctggg |
| | caacgagccg ggggggctgt |
| 131 | c. |

[0730] In certain embodiments, the piggyBac® or piggyBac-like transposon comprises at a sequence of:

(SEQ ID NO: 14582)

| | |
|---|---|
| 1 | cctttttact gccaatgacg catgggatac gtcgtggcag |
| | taaaagggct taaatgccaa |
| 61 | cgacgcgtcc catacgttgt tggcatttta agtcttctct |
| | ctgcagcggc agcatgtgcc |
| 121 | gccgctgcag agag. |

[0731] In certain embodiments, the piggyBac® or piggyBac-like transposon comprises at a sequence of:

(SEQ ID NO: 14583)

| | |
|---|---|
| 1 | cctttttact gccaatgacg catgggatac gtcgtggcag |
| | taaaagggct taaatgccaa |
| 61 | cgacgcgtcc catacgttgt tggcatttta agtctt. |

[0732] In certain embodiments, the piggyBac® or piggyBac-like transposon comprises at a sequence of:

(SEQ ID NO: 14584)

| | |
|---|---|
| 1 | ccctttgcct gccaatcacg catgggatac gtcgtggcag |
| | taaaagggct taaatgccaa |
| 61 | cgacgcgtcc catacgttgt tggcatttta agtctt. |

[0733] In certain embodiments, the piggyBac® or piggyBac-like transposon comprises at a sequence of:

(SEQ ID NO: 14585)

| | |
|---|---|
| 1 | ttatcctttt tactgccaat gacgcatggg atacgtcgtg |
| | gcagtaaaag ggcttaaatg |
| 61 | ccaacgacgc gtcccatacg ttgttggcat tttaagtctt |
| | ctctctgcag cggcagcatg |
| 121 | tgccgccgct gcagagagtt tctagcgatg acagcccctc |
| | tgggcaacga gccggggggg |
| 131 | ctgtc. |

[0734] In certain embodiments, the piggyBac® or piggyBac-like transposon comprises at a sequence of:

(SEQ ID NO: 14586)

| | |
|---|---|
| 1 | tttgcatttt tagacattta gaaacctata tcttgttaca |
| | gaattggaat tacacaaaaa |
| 61 | ttctaccata ttttaaaagc ttaggttgtt ctgaaaaaaa |
| | caatatattg ttttcctggg |
| 121 | taaactaaaa atcccctcga ggaaaagccc ctaaagtgaa |
| | acagtgcaaa acgttcaaaa |
| 181 | actgtctggc aatacaagtt ccactttggg acaaatcggc |
| | tggcagtaaa aggg. |

[0735] In certain embodiments, the piggyBac® or piggyBac-like transposon comprises a left transposon end sequence selected from SEQ ID NO: 14573 and SEQ ID NOs: 14579-14585. In certain embodiments, the left transposon end sequence is preceded by a left target sequence. In certain embodiments, the piggyBac® or piggyBac-like transposon comprises at a sequence of:

(SEQ ID NO: 14587)

| | |
|---|---|
| 1 | tttgcatttt tagacattta gaagcctata tcttgttaca |
| | gaattggaat tacacaaaaa |
| 61 | ttctaccata ttttgaaagc ttaggttgtt ctgaaaaaaa |
| | caatatattg ttttcctggg |
| 121 | taaactaaaa gtcccctcga ggaaaggccc ctaaagtgaa |
| | acagtgcaaa acgttcaaaa |
| 181 | actgtctggc aatacaagtt ccactttgac caaaacggct |
| | ggcagtaaaa ggg. |

[0736] In certain embodiments, the piggyBac® or piggyBac-like transposon comprises at a sequence of:

(SEQ ID NO: 14588)

| | |
|---|---|
| 1 | ttgttctgaa aaaaacaata tattgttttc ctgggtaaac |
| | taaaagtccc ctcgaggaaa |
| 61 | ggcccctaaa gtgaaacagt gcaaaacgtt caaaaactgt |
| | ctggcaatac aagttccact |
| 121 | ttgaccaaaa cggctggcag taaaaggg. |

[0737] In certain embodiments, the piggyBac® or piggyBac-like transposon comprises at a sequence of:

(SEQ ID NO: 14589)

| | |
|---|---|
| 1 | tttgcatttt tagacattta gaagcctata tcttgttaca |
| | gaattggat tacacaaaaa |
| 61 | ttctaccata ttttgaaagc ttaggttgtt ctgaaaaaaa |
| | caatatattg ttttcctggg |
| 121 | taaactaaaa gtcccctcga ggaaaggccc ctaaagtgaa |
| | acagtgcaaa acgttcaaaa |
| 181 | actgtctggc aatacaagtt ccactttgac caaaacggct |
| | ggcagtaaaa gggttat. |

[0738] In certain embodiments, the piggyBac® or piggyBac-like transposon comprises at a sequence of:

(SEQ ID NO: 14590)

| | |
|---|---|
| 1 | ttgttctgaa aaaaacaata tattgttttc ctgggtaaac |
| | taaaagtccc ctcgaggaaa |
| 61 | ggcccctaaa gtgaaacagt gcaaaacgtt caaaaactgt |
| | ctggcaatac aagttccact |
| 121 | ttgggacaaa tcggctgga gtgaaaggg. |

[0739] In certain embodiments, the piggyBac® or piggyBac-like transposon comprises a right transposon end sequence selected from SEQ ID NO: 14574 and SEQ ID NOs: 14587-14590. In certain embodiments, the right transposon end sequence is followed by a right target sequence. In certain embodiments, the left and right transposon ends share a 14 repeated sequence inverted in orientation in the two ends (SEQ ID NO: 14575) adjacent to the target sequence. In certain embodiments, the piggyBac® or piggyBac-like transposon comprises a left transposon end comprising a target sequence and a sequence that is selected from SEQ ID NOs: 14582-14584 and 14573, and a right transposon end comprising a sequence selected from SEQ ID NOs: 14588-14590 and 14574 followed by a right target sequence.

[0740] In certain embodiments, the left transposon end of the piggyBac® or piggyBac-like transposon comprises

(SEQ ID NO: 14591)

| | |
|---|---|
| 1 | atcacgcatg ggatacgtcg tggcagtaaa agggcttaaa |
| | tgccaacgac gcgtcccata |
| 61 | cgtt, |

and an ITR. In certain embodiments, the left transposon end comprises

(SEQ ID NO: 14592)

| | |
|---|---|
| 1 | atgacgcatg ggatacgtcg tggcagtaaa agggcttaaa |
| | tgccaacgac gcgtcccata |
| 61 | cgttgttggc attttaagtc tt |

and an ITR. In certain embodiments, the right transposon end of the piggyBac® or piggyBac-like transposon comprises

(SEQ ID NO: 14593)

| | |
|---|---|
| 1 | cctgggtaaa ctaaaagtcc cctcgaggaa aggcccctaa |
| | agtgaaacag tgcaaaacgt |
| 61 | tcaaaaactg tctggcaata caagttccac tttgggacaa |
| | atcggc |

and an ITR. In certain embodiments, the right transposon end comprises

(SEQ ID NO: 14594)

| | |
|---|---|
| 1 | ttgttctgaa aaaaacaata tattgttttc ctgggtaaac |
| | taaaagtccc ctcgaggaaa |
| 61 | ggcccctaaa gtgaaacagt gcaaaacgtt caaaaactgt |
| | ctggcaatac aagttccact |
| 121 | ttgaccaaaa cggc |

### and an ITR.

[0741] In certain embodiments, one transposon end comprises a sequence that is at least 90%, at least 95%, at least 99% or any percentage in between identical to SEQ ID NO: 14573 and the other transposon end comprises a sequence that is at least 90%, at least 95%, at least 99% or any percentage in between identical to SEQ ID NO: 14574. In certain embodiments, one transposon end comprises at least 14, at least 16, at least 18, at least 20 or at least 25 contiguous nucleotides from SEQ ID NO: 14573 and one transposon end comprises at least 14, at least 16, at least 18, at least 20 or at least 25 contiguous nucleotides from SEQ ID NO: 14574. In certain embodiments, one transposon end comprises at least 14, at least 16, at least 18, at least 20 from SEQ ID NO: 14591, and the other end comprises at least 14, at least 16, at least 18, at least 20 from SEQ ID NO: 14593. In certain embodiments, each transposon end comprises SEQ ID NO: 14575 in inverted orientations.

[0742] In certain embodiments, the piggyBac® or piggyBac-like transposon comprises a sequence selected from of SEQ ID NO: 14573, SEQ ID NO: 14579, SEQ ID NO: 14581, SEQ ID NO: 14582, SEQ ID NO: 14583, and SEQ ID NO: 14588, and a sequence selected from SEQ ID NO: 14587, SEQ ID NO: 14588, SEQ ID NO: 14589 and SEQ ID NO: 14586 and the piggyBac® or piggyBac-like transposase comprises SEQ ID NO: 14517 or SEQ ID NO: 14518.

[0743] In certain embodiments, the piggyBac® or piggyBac-like transposon comprises ITRs of CCCTTTGCCTGCCA (SEQ ID NO: 14622) (left ITR) and TGGCAGTGAAAGGG (SEQ ID NO: 14623) (right ITR) adjacent to the target sequences.

[0744] In certain embodiments of the methods of the disclosure, the transposase enzyme is a piggyBac® or piggyBac-like transposase enzyme. In certain embodiments, the piggyBac® or piggyBac-like transposase enzyme is isolated or derived from Helicoverpa armigera. The piggyBac® or piggyBac-like transposase enzyme may comprise or consist of an amino acid sequence at least 5%, 10%, 15%, 20%, 25%, 30%, 35%, 40%, 45%, 50%, 55%, 60%, 65%, 70%, 75%, 80%, 85%, 90%, 95%, 99% or any percentage in between identical to:

(SEQ ID NO: 14525)

| | |
|---|---|
| 1 | MASRQRLNHD EIATILENDD DYSPLDSESE KEDCVVEDDV |
| | WSDNEDAIVD FVEDTSAQED |
| 61 | PDNNIASRES PNLEVTSLTS HRIITLPQRS IRGKNNHVWS |
| | TTKGRTTGRT SAINIIRTNR |
| 121 | GPTPMCRNIV DPLLCFQLFI TDEIIHEIVK WTNVEIIVKR |
| | QNLKDISASY RDTNTMEIWA |
| 181 | LVGILTLTAV MKDNHLSTDE LFDATFSGTR YVSVMSRERF |
| | EFLIRCIRMD DKTLRPTLRS |
| 241 | DDAFLPVRKI WEIFINQCRQ NHVPGSNLTV DEQLLGFRGR |
| | CPFRMYIPNK PDKYGIKFPM |
| 301 | MCAAATKYMI DAIPYLGKST KTNGLPLGEF YVKDLTKTVH |
| | GTNRNITCDN WFTSIPLAKN |
| 361 | MLQAPYNLTI VGTIRSNKRE MPEEIKNSRS RPVGSSMFCF |
| | DGPLTLVSYK PKPSKMVFLL |
| 421 | SSCDENAVIN ESNGKPDMIL FYNQTKGGVD SFDQMCKSMS |
| | ANRKTNRWPM AVFYGMLNMA |
| 481 | FVNSYIIYCH NKINKQEKPI SRKEFMKKLS IQLTTPWMQE |
| | RLQAPTLKRT LRDNITNVLK |
| 541 | NVVPASSENI SNEPEPKKRR YCGVCSYKKR RMTKAQCCKC |
| | KKAICGEHNI DVCQDCI. |

[0745] In certain embodiments, the piggyBac® or piggyBac-like transposon is isolated or derived from Helicoverpa armigera. In certain embodiments, the piggyBac® or piggyBac-like transposon comprises a sequence of:

(SEQ ID NO: 14570)

| | |
|---|---|
| 1 | ttaaccctag aagcccaatc tacgtaaatt tgacgtatac |
| | cgcggcgaaa tatctatgtc |
| 61 | tctttcatgt ttaccgtcgg atcgccgcta acttctgaac |
| | caactcagta gccattggga |
| 121 | cctcgcagga cacagttgcg tcatctcggt aagtgccgcc |
| | attttgttgt actctctatt |
| 181 | acaacacacg tcacgtcacg tcgttgcacg tcattttgac |
| | gtataattgg gctttgtgta |
| 241 | acttttgaat ttgtttcaaa ttttttatgt ttgtgattta |
| | tttgagttaa tcgtattgtt |
| 301 | tcgttacatt tttcatataa taataatatt ttcaggttga |
| | gtacaaa. |

In certain embodiments, the piggyBac® or piggyBac-like transposon comprises a sequence of:

(SEQ ID NO: 11528)

| | |
|---|---|
| 1 | agactgtttt tttctaagag acttctaaaa tattattacg |
| | agttgattta attttatgaa |
| 61 | aacatttaaa actagttgat tttttttata attacataat |
| | tttaagaaaa agtgttagag |
| 121 | gcttgatttt tttgttgatt ttttctaaga tttgattaaa |
| | gtgccataat agtattaata |
| 181 | aagagtattt tttaacttaa aatgtatttt atttattaat |
| | taaaacttca attatgataa |
| 241 | ctcatgcaaa aatatagttc attaacagaa aaaaatagga |
| | aaactttgaa gttttgtttt |
| 301 | tacacgtcat ttttacgtat gattgggctt tatagctagt |
| | taaatatgat tgggcttcta |
| 361 | gggttaa. |

[0746] in certain embodiments of the methods of the disclosure, the transposase enzyme is a piggyBac® or piggyBac-like transposase enzyme. In certain embodiments, the piggyBac® or piggyBac-like transposase enzyme is isolated or derived from Pectinophora gossypiella. The piggyBac® or piggyBac-like transposase enzyme may comprise or consist of an amino acid sequence at least 5%, 10%, 15%, 20%, 25%, 30%, 35%, 40%, 45%, 50%, 55%, 60%, 65%, 70%, 75%, 80%, 85%, 90%, 95%, 99% or any percentage in between identical to:

(SEQ ID NO: 14530)

| | |
|---|---|
| 1 | MDLRKQDEKI RQWLEQDIEE DSKGESDNSS SETEDIVEME |
| | VHKNTSSESE VSSESDYEPV |
| 51 | CPSKRQRTQI IESEESDNSE SIRPSRPQTS RVIDSDETDE |
| | DVWSSTPQNI PRNPNVIQPS |
| 121 | SRFLYGKNKH KNSSAAKPSS VRTSRRNIIH FIPGRKERAR |
| | EVSEPIDIFS LFISEDMLQQ |
| 181 | VVTFPNAEML IRKNKYKTET FTVSPTNLEE IRALLGLLFN |
| | AAAMKSNHLP TRMLFNTHRS |
| 241 | GTIFKACMSA ERLNFLIKCL RFDDKLTRNV RQRDDRFAPI |
| | RDLWQALISN FQKWYTPGSY |
| 301 | ITVDEQLVGF RGRCSFRMYI PNKPNKYGIK LVMAADVNSK |
| | YIVNAIPYLG KGTDPQNQPL |
| 361 | ATFFIKEITS TLHGTNRNIT MDNWFTSVPL ANELLMAPYN |
| | LTLVGTLRSN KREIPEKLKN |
| 421 | SKSRAIGTSM FCYDGDKTLV SYKAKSNKVV FILSTIHDQP |
| | DINQETGKPE MIHFYNSTKG |
| 481 | AVDTVDQMCS SISTNRKTQR WPLCVFYNML NLSIINAYVV |
| | YVYNNVRNNK KPMSRRDFVI |
| 541 | KLGDQLMEPW LRQRLQTVTL RRDIKVMIQD ILGESSDLEA |
| | PVPSVSNVRK IYYLCPSKAR |
| 601 | RMTKHRCIKC KQAICGPHNI DICSRCIE. |

[0747] In certain embodiments, the piggyBac® or piggyBac-like transposon is isolated or derived from Pectinophora gossypiella. In certain embodiments, the piggyBac® or piggyBac-like transposon comprises a sequence of:

(SEQ ID NO: 14532)

| | |
|---|---|
| 1 | ttaaccctag ataactaaac attogtccgc tcgacgacgc |
| | gctatgccgc gaaattgaag |
| 61 | tttacctatt attccgcgtc ccccgccccc gccgcttttt |
| | ctagcttcct gatttgcaaa |
| 121 | atagtgcatc gcgtgacacg ctcgaggtca cacgacaatt |
| | aggtcgaaag ttacaggaat |
| 181 | ttcgtogtcc gctcgacgaa agtttagtaa ttacgtaagt |
| | ttggcaaagg taagtgaatg |
| 241 | aagtattttt ttataattat tttttaattc tttatagtga |
| | taacgtaagg tttatttaaa |
| 301 | tttattactt ttatagttat ttagccaatt gttataaatt |
| | ccttgttatt gctgaaaaat |
| 361 | ttgcctgttt tagtcaaaat ttattaactt ttcgatcgtt |
| | ttttag. |

In certain embodiments, the piggyBac® or piggyBac-like transposon comprises a sequence of:

(SEQ ID NO: 14571)

| | |
|---|---|
| 1 | tttcactaag taattttgtt cctatttagt agataagtaa |
| | cacataatta ttgtgatatt |
| 61 | caaaacttaa gaggtttaat aaataataat aaaaaaaaaa |
| | tggtttttat ttcgtagtct |
| 121 | gctcgacgaa tgtttagtta ttacgtaacc gtgaatatag |
| | tttagtagtc tagggttaa. |

[0748] In certain embodiments of the methods of the disclosure, the transposase enzyme is a piggyBac® or piggyBac-like transposase enzyme. In certain embodiments, the piggyBac® or piggyBac-like transposase enzyme is isolated or derived from Ctenoplusia agnata. The piggyBac® or piggyBac-like transposase enzyme may comprise or consist of an amino acid sequence at least 5%, 10%, 15%, 20%, 25%, 30%, 35%, 40%, 45%, 50%, 55%, 60%, 65%, 70%, 75%, 80%, 85%, 90%, 95%, 99% or any percentage in between identical to:

(SEQ ID NO: 14534)

| | |
|---|---|
| 1 | MASRQHLYQD EIANILENED DYSPHDTDSE MEDCVTQDDV |
| | RSDVEDEMVD NIGNGTSPAS |
| 61 | RHEDPETPDP SSEASNLEVT LSSHRIIILP QRSIREKNNH |
| | IWSTTKGQSS GRTAAINIVR |
| 121 | TNRGPTRMCR NIVDPEECFQ LFIKEEIVEE IVKWTNVEMV |
| | QKRVNEKDIS ASYRDTNEME |
| 181 | IWAIISMLTL SAVMKDNHLS TDELFNVSYG TRYVSVMSRE |
| | RFEFLLRLLR MGDKLLRPNL |
| 241 | RQEDAFTPVR KIWEIFINQC RLNYVPGTNL TVDEQLLGFR |
| | GRCPFRMYIP NKPDKYGIKF |
| 301 | PMVCDAATKY MVDAIPYLGK STKTQGLPLG EFYVKELTQT |
| | VHGTNRNVTC DNWFTSVPLA |
| 361 | KSLLNSPYNL TLVGTIRSNK REIPEEVKNS RSRQVGSSMF |
| | CFDGPLTLVS YKPKPSKMVF |
| 421 | LLSSCNEDAV VNQSNGKPDM ILFYNQTKGG VDSFDQMCSS |
| | MSTNRKTNRW PMAVFYGMLN |
| 481 | MAFVNSYIIY CHNMLAKKEK PLSRKDFMKK LSTDLTTPSM |
| | QKRLEAPTLK RSLRDNITNV |
| 541 | LKIVPQAAID TSFDEPEPKK RRYCGFCSYK KKRMTKTQCF |
| | KCKKPVCGEH NIDVCQDCI. |

[0749] In certain embodiments, the piggyBac® or piggyBac-like transposon is isolated or derived from Ctenoplusia agnata. In certain embodiments, the piggyBac® or piggyBac-like transposon comprises a sequence of:

(SEQ ID NO: 14535)

| | |
|---|---|
| 1 | ttaaccctag aagcccaatc tacgtcattc tgacqtqtat |
| | gtcgccgaaa atactctgtc |
| 61 | tctttctcct gcacgatcgg attgccgcga acgctcgatt |
| | caacccagtt ggcgccgaga |
| 121 | tctattggag gactgcggcg ttgattcggt aagtcccgcc |
| | attttgtcat agtaacagta |
| 181 | ttgcacgtca gcttgacqta tatttgggct ttgtgttatt |
| | tttgtaaatt ttcaacgtta |
| 241 | gtttattatt gcatcttttt gttacattac tggtttattt |
| | gcatgtatta ctcaaatatt |
| 301 | atttttattt tagcgtagaa aataca. |

In certain embodiments, the piggyBac® or piggyBac-like transposon comprises a sequence of:

(SEQ ID NO: 14536)

| | |
|---|---|
| 1 | agactgtttt ttttgtattt gcattatata ttatattcta |
| | aagttgattt aattctaaga |
| 61 | aaaacattaa aataagtttc tttttgtaaa atttaattaa |
| | ttataagaaa aagtttaagt |
| 121 | tgatctcatt ttttataaaa atttgcaatg tttccaaagt |
| | tattattgta aaagaataaa |
| 181 | taaaagtaaa ctgagtttta attgatgttt tattatatca |
| | ttatactata tattacttaa |
| 241 | ataaaacaat aactgaatgt atttctaaaa ggaatcacta |
| | gaaaatatag tgatcaaaaa |
| 301 | tttacacgtc atttttgcgt atgattgggc tttataggtt |
| | ctaaaaatat gattgggcct |
| 361 | ctagggttaa. |

In certain embodiments, the piggyBac or piggyBac-like transposon comprises an ITR sequence of CCCTAGAAGCCCAATC (SEQ ID NO: 14564).

[0750] In certain embodiments of the methods of the disclosure, the transposase enzyme is a piggyBac® or piggyBac-like transposase enzyme. In certain embodiments, the piggyBac® or piggyBac-like transposase enzyme is isolated or derived from Agrotis ipsilon. The piggyBac® (PB) or piggyBac-like transposase enzyme may comprise or consist of an amino acid sequence at least 5%, 10%, 15%, 20%, 25%, 30%, 35%, 40%, 45%, 50%, 55%, 60%, 65%, 70%, 75%, 80%, 85%, 90%, 95%, 99% or any percentage in between identical to:

(SEQ ID NO: 14537)

| | |
|---|---|
| 1 | MESRQPINQD EIATILENDD DYSPLDSDSE AEDRVVEDDV |
| | WSDNEDAMID YVEDTSRQED |
| 61 | PDNNIASQES ANTEVTSLTS HRIISLPQRS ICGKNNHVWS |
| | TTKGRTTGRT SAINIIRTNR |
| 121 | GPTRMCRNIV DPLLCFQLFI TDEIIHEIVK WTNVEMIVKR |
| | QNLIDISASY RDTNTMEMWA |
| 181 | LVGILTLTAV MKDNHLSTDE LFDATFSGTR YVSVMSPERF |
| | EFLIRCMRMD DKTLRPTLRS |
| 241 | DDAFIPVRKL WEIFINQCRL NYVPGGNLTV DEQLLGFRGR |
| | CPFRMYIPNK PDKYGIRFPM |
| 301 | MCDAATKYMI DAIPYLGKST KTNGLPLGEF YVKELTKTVH |
| | GTNRNVTCDN WFTSIPLAKN |
| 361 | MLQAPYNLTI VGTIRSNKRE IPEEIKNSRS RPVGSSMECF |
| | DGPLTLVSYK PKPSRMVFLL |
| 421 | SSCDENAVIN ESNGKPDMIL FYNQTKGGVD SFDQMCKSMS |
| | ANRKTNRWPM AVFYGMLNMA |
| 481 | FVNSYIIYCH NKINKQKKPI NRKEFMKNLS TDLTTPWMQE |
| | RLKAPTLKRT LRDNITNVLK |
| 541 | NVVPPSPANN SEEPGPKKRS YCGFCSYKKR RMTKTQFYKC |
| | KKAICGEHNI DVCQDCV. |

[0751] In certain embodiments, the piggyBac® or piggyBac-like transposon is isolated or derived from Agrotis ipsilon. In certain embodiments, the piggyBac® or piggyBac-like transposon comprises a sequence of:

(SEQ ID NO: 14538)

| | |
|---|---|
| 1 | ttaaccctag aagcccaatc tacgtaaatt tgacgtatac |
| | cgcggcgaaa tatatctgtc |
| 61 | tctttcacgt ttaccgtcgg attcccgcta acttcggaac |
| | caactcagta gccattgaga |
| 121 | actcccagga cacagttgcg tcatctcggt aagtgccgcc |
| | attttgttgt aatagacagg |
| 181 | ttgcacgtca ttttgacgta taattgggct ttgtgtaact |
| | tttqaaatta tttataattt |
| 241 | ttattgatgt gatttatttg agttaatcgt attgtttcgt |
| | tacatttttc atatgatatt |
| 301 | aatattttca gattgaatat aaa. |

In certain embodiments, the piggyBac® or piggyBac-like transposon comprises a sequence of:

(SEQ ID NO: 14539)

| | |
|---|---|
| 1 | agactgtttt ttttaaaagg cttataaagt attactattg |
| | cgtgatttaa ttttataaaa |
| 61 | atatttaaaa ccagttgatt tttttaataa ttacctaatt |
| | ttaagaaaaa atgttagaag |
| 121 | cttgatattt ttgttgattt ttttctaaga tttgattaaa |
| | aggccataat tgtattaata |
| 181 | aagagtattt ttaacttcaa atttatttta tttattaatt |
| | aaaacttcaa ttatgataat |
| 241 | acatgcaaaa atatagttca tcaacagaaa aatataggaa |
| | aactctaata gttttatttt |
| 301 | tacacgtcat ttttacgtat gattgggctt tataqctagt |
| | caaatatgat tgggcttcta |
| 361 | gggttaa. |

[0752] In certain embodiments of the methods of the disclosure, the transposase enzyme is a piggyBac® or piggyBac-like transposase enzyme. In certain embodiments, the piggyBac or piggyBac-like transposase enzyme is isolated or derived from Megachile rotundata. The piggyBac® (PB) or piggyBac-like transposase enzyme may comprise or consist of an amino acid sequence at least 5%, 10%, 15%, 20%, 25%, 30%, 35%, 40%, 45%, 50%, 55%, 60%, 65%, 70%, 75%, 80%, 85%, 90%, 95%, 99% or any percentage in between identical to:

(SEQ ID NO: 14540)

| | |
|---|---|
| 1 | MNGKDSLGEF YLDDLSDCLD CRSASSTDDE SDSSNIAIRK |
| | RCPIPLIYSD SEDEDMNNNV |
| 61 | EDNNHFVKES NRYHYQIVEK YKITSKTKKW KDVTVTEMKK |
| | FLGLIILMGQ VKKDVLYDYW |
| 121 | STDPSIETPF FSKVMSRNRF LQIMQSWHFY NNNDISPNSH |
| | RIVKIQPVID YFKEKFNNVY |
| 181 | KSDQQLSLDE CLIPWRGRLS IKTYNPAKIT KYGILVRVLS |
| | EARTGYVSNF CVYAADGKKI |
| 241 | EETVLSVIGP YKNMWHHVYQ DNYYNSVNIA KIFLKNKLRV |
| | CGTIRKNRSL PQILQTVKLS |
| 301 | RGQHQFLRNG HTLLEVWNNG KRNVNMISTI HSAQMAESRN |
| | RSPTSDCPIQ KPISIIDYNK |
| 361 | YMKGVDRADQ YISYYSIFRK TKKWTKRVVM FFINCALFNS |
| | FKVITTLNGQ KITYKNFLHK |
| 421 | AALSLIEDCG TEEQGTDLPN SEPTTTRTTS RVDHPGRLEN |
| | FGKHKLVNIV TSGQCKKPLR |
| 481 | QCRVCASKKK LSRTGFACKY CNVPLHKGDC FERYHSLKKY. |

[0753] In certain embodiments, the piggyBac® or piggyBac-like transposon is isolated or derived from Megachile rotundata. In certain embodiments, the piggyBac® or piggyBac-like transposon comprises a sequence of:

(SEQ ID NO: 14541)

| | |
|---|---|
| 1 | ttaaataatg cccactctag atgaacttaa cactttaccg |
| | accggccgtc gattattcga |
| 61 | cgtttgctcc ccagcgctta ccgaccggcc atcgattatt |
| | cgacgtttgc ttcccagcgc |
| 121 | ttaccgaccg gtcatcgact tttgatcttt ccgttagatt |
| | tggttaggtc agattgacaa |
| 181 | gtagcaagca tttcgcattc tttattcaaa taatcggtgc |
| | ttttttctaa gctttagccc |
| 241 | ttagaa. |

In certain embodiments, the piggyBac® or piggyBac-like transposon comprises a sequence of:

(SEQ ID NO: 14542)

| | |
|---|---|
| 1 | acaacttctt ttttcaacaa atattgttat atggattatt |
| | tatttattta tttatttatg |
| 61 | gtatatttta tgtttattta tttatggtta ttatggtata |
| | ttttatgtaa ataataaact |
| 121 | gaaaacgatt gtaatagatg aaataaatat tgttttaaca |
| | ctaatataat taaagtaaaa |
| 181 | gattttaata aatttcgtta ccctacaata acacgaagcg |
| | tacaatttta ccagagttta |
| 241 | ttaa. |

[0754] In certain embodiments of the methods of the disclosure, the transposase enzyme is a piggyBac® or piggyBac-like transposase enzyme. In certain embodiments, the piggyBac® or piggyBac-like transposase enzyme is isolated or derived from Bombus impatiens. The piggyBac (PB) or piggyBac-like transposase enzyme may comprise or consist of an amino acid sequence at least 5%, 10%, 15%, 20%, 25%, 30%, 35%, 40%, 45%, 50%, 55%, 60%, 65%, 70%, 75%, 80%, 85%, 90%, 95%, 99% or any percentage in between identical to:

(SEQ ID NO: 14543)

| | |
|---|---|
| 1 | MNEKNGIGEF YLDDLSDCPD SYSRSNSGDE SDGSDTIIRK |
| | RGSVIPPRYS DSEDDEINNV |
| 61 | EDNANNVENN DDIWSTNDEA IILEPFEGSP GLKIMPSSAE |
| | SVTDNVNLFF GDDFFEHLVR |
| 121 | ESNRYHYQVM EKYKIPSKAK KWTDITVPEM KKFLGLIVLM |
| | GQIKKDVLYD YWSTDPSIET |
| 181 | PFFSQVMSRN RFVQIMQSWH FCNNDNIPHD SHRLAKIQPV |
| | IDYFRRKFND VYKPCQQLSL |
| 241 | DESIIPWRGR LSIKTYNPAK ITKYGILVRV LSEAVTGYVC |
| | NFDVYAADGK KLEDTAVIEP |
| 301 | YKNIWHQIYQ DNYYNSVKMA RILLKNKVRV CGTIRKNRGL |
| | PRSLKTIQLS RGQYEFRRNH |
| 361 | QILLEVWNNG RPNVNMISTI HSAQLMESRS KSKRSDVPIQ |
| | KPNSIIDYNK YMKGVDRADQ |
| 421 | YLAYYSIFRK TKKWTKRTVM FFINCALENS FRVYTILNGK |
| | NITYKNFLHK VAVSWIEDGE |
| 481 | TNCTEQDDNL PNSEPTRRAP RLDHPGPLSN YGKHKLINIV |
| | TSGRSLKPQR QCRVCAVQKK |
| 541 | RSRTCFVCKF CNVPLHKGDC FERYHTLKKY. |

[0755] In certain embodiments, the piggyBac® or piggyBac-like transposon is isolated or derived from Bombus impatiens. In certain embodiments, the piggyBac® or piggyBac-like transposon comprises a sequence of:

(SEQ ID NO: 14544)

| | |
|---|---|
| 1 | ttaatttttt aacattttac cgaccgatag ccgattaatc |
| | gggtttttgc cgctgacgct |
| 61 | taccgaccga taacctatta atcggctttt tgtcgtcgaa |
| | gcttaccaac ctatagccta |
| 121 | cctataqtta atcggttgcc atggcgataa acaatctttc |
| | tcattatatg agcagtaatt |
| 181 | tgttatttag tactaaggta ccttgctcag ttgcgtcagt |
| | tgcgttgctt tgtaagctcc |
| 241 | cacagtttta taccaattcg aaaaacttac cgttcgcg. |

In certain embodiments, the piggyBac® or piggyBac-like transposon comprises a sequence of:

(SEQ ID NO: 14545)

| | |
|---|---|
| 1 | actatttcac atttgaacta aaaaccgttg taatagataa |
| | aataaatata atttagtatt |
| 61 | aatattatgg aaacaaaaga ttttattcaa tttaattatc |
| | ctatagtaac aaaaagcggc |
| 121 | caattttatc tgagcatacg aaaagcacag atactcccgc |
| | ccgacagtct aaaccgaaac |
| 181 | agagccggcg ccagggagaa tctgcgcctg agcagccggt |
| | cggacgtgcg tttgctgttg |
| 241 | aaccgctagt ggtcagtaaa ccagaaccag tcagtaagcc |
| | agtaactgat cagttaacta |
| 301 | gattgtatag ttcaaattga acttaatcta gtttttaagc |
| | gtttgaatgt tgtctaactt |
| 361 | cgttatatat tatattcttt ttaa. |

[0756] In certain embodiments of the methods of the disclosure, the transposase enzyme is a piggyBac® or piggyBac-like transposase enzyme. In certain embodiments, the piggyBac® or piggyBac-like transposase enzyme is isolated or derived from Mamestra brassicae. The piggyBac® (PB) or piggyBac-like transposase enzyme may comprise or consist of an amino acid sequence at least 5%, 10%, 15%, 20%, 25%, 30%, 35%, 40%, 45%, 50%, 55%, 60%, 65%, 70%, 75%, 80%, 85%, 90%, 95%, 99% or any percentage in between identical to:

(SEQ ID NO: 14546)

| | |
|---|---|
| 1 | MFSFVPNKEQ TPTVLIFCFH LKTTAAESHR PLVEAFGEQV |
| | PTVKTCERWF QRFKSGDFDV |
| 61 | DDKEEGKPPK RYEDAELQAL LDEDDAQTQK QLAEQLEVSQ |
| | QAVSNRLREG GKIQKVGRWV |
| 121 | PHELNERQRE RRKNTCEILL SRYKRKSFLH RIVTGEEKWI |
| | FFVNPKRKKS YVDPGQPATS |
| 181 | TARPNRFGKK TRLCVWWDQS GVIYYELLKP GETVNTARYQ |
| | QQLINLNRAL QRKRPEYQKR |
| 241 | QHRVIFLHDN APSHTARAVR DTLETLNWEV LPHAAYSPDL |
| | APSDYHLFAS MGHALAEQRF |
| 301 | DSYESVEEWL DEWFAAKDDE FYWRGIHKLP ERWDNCVASD |
| | GKYFE. |

[0757] In certain embodiments, the piggyBac® or piggyBac-like transposon is isolated or derived from Mamestra brassicae. In certain embodiments, the piggyBac® or piggyBac-like transposon comprises a sequence of:

(SEQ ID NO: 14547)

| | |
|---|---|
| 1 | ttattgggtt gcccaaaaag taattgcgga tttttcatat |
| | acctgtcttt taaacgtaca |
| 61 | tagggatcga actcagtaaa actttgacct tgtgaaataa |
| | caaacttgac tgtccaacca |
| 121 | ccatagtttg gcgcgaattg agcgtcataa ttgttttgac |
| | tttttgcagt caac. |

In certain embodiments, the piggyBac® or piggyBac-like transposon comprises a sequence of:

(SEQ ID NO: 14548)

| | |
|---|---|
| 1 | atgatttttt ctttttaaac caattttaat tagttaattg |
| | atataaaaat ccgcaattac |
| 61 | tttttgggca acccaataa. |

[0758] In certain embodiments of the methods of the disclosure, the transposase enzyme is a piggyBac® or piggyBac-like transposase enzyme. In certain embodiments, the piggyBac® or piggyBac-like transposase enzyme is isolated or derived from Mayetiola destructor. The piggyBac® (PB) or piggyBac-like transposase enzyme may comprise or consist of an amino acid sequence at least 5%, 10%, 15%, 20%, 25%, 30%, 35%, 40%, 45%, 50%, 55%, 60%, 65%, 70%, 75%, 80%, 85%, 90%, 95%, 99% or any percentage in between identical to:

(SEQ ID NO: 14549)

| | |
|---|---|
| 1 | MENFENWRKR RHLREVLLGH FEAKKMAES HRLLVEVYGE |
| | HALAKTQCFE WFQRFKSGDF |
| 61 | DTEDKERPGQ PKKEEDEELE ALLDEDCCQT QEELAKSLGV |
| | TQQAISKRLK AAGYIQKQGN |
| 121 | WVPHELKPRD VERRFCMSEM LLQRHKKKSF LSRIITGDEK |
| | WIHYDNSKRK KSYVKRGGRA |
| 181 | KSTPKSNLHG AKVMLCIWWD QRGVLYYELL EPGQTITGDL |
| | YRTQLIRLKQ ALAEKRPEYA |
| 241 | KRHGAVIFHH DNARPHVALP VKNYLENSGW EVLPHPPYSP |
| | DLAPSDYHLF RSMQNDLAGK |
| 301 | RFTSEQGIRK WLDSFLAAKP AKFFEKGIHE LSERWEKVIA |
| | SDGQYFE. |

[0759] In certain embodiments, the piggyBac® or piggyBac-like transposon is isolated or derived from Mayetiola destructor. In certain embodiments, the piggyBac® or piggyBac-like transposon comprises a sequence of:

(SEQ ID NO: 14550)

| | |
|---|---|
| 1 | taagacttcc aaaatttcca cccgaacttt accttccccg |
| | cgcattatgt ctctcttttc |
| 61 | accctctgat ccctggtatt gttgtcgagc acgatttata |
| | ttgggtgtac aacttaaaaa |
| 121 | ccggaattgg acgctagatg tccacactaa cgaatagtgt |
| | aaaagcacaa atttcatata |
| 181 | tacgtcattt tgaaggtaca tttgacagct atcaaaatca |
| | gtcaataaaa ctattctatc |
| 241 | tgtgtgcatc atattttttt attaact. |

In certain embodiments, the piggyBac® or piggyBac-like transposon comprises a sequence of:

(SEQ ID NO: 14551)

| | |
|---|---|
| 1 | tgcattcatt cattttgtta tcgaaataaa gcattaattt |
| | tcactaaaaa attccggttt |
| 61 | ttaagttgta cacccaatat catccttagt gacaattttc |
| | aaatggcttt cccattgagc |
| 121 | tgaaaccgtg gctctagtaa gaaaaacgcc caacccgtca |
| | tcatatgcct tttttttctc |
| 181 | aacatccg. |

[0760] In certain embodiments of the methods of the disclosure, the transposase enzyme is a piggyBac® or piggyBac-like transposase enzyme. In certain embodiments, the piggyBac® or piggyBac-like transposase enzyme is isolated or derived from Apis mellifera. The piggyBac® (PB) or piggyBac-like transposase enzyme may comprise or consist of an amino acid sequence at least 5%, 10%, 15%, 20%, 25%, 30%, 35%, 40%, 45%, 50%, 55%, 60%, 65%, 70%, 75%, 80%, 85%, 90%, 95%, 99% or any percentage in between identical to:

(SEQ ID NO: 14552)

| | |
|---|---|
| 1 | MENQKEHYRH ILLFYFRKGE NASQAHKKLC AVYGDEAIKE |
| | RQCQNWFDKF PSGDFSLKDE |
| 61 | KRSGRPVEVD DDLIKAIIDS DRHSTTREIA EKLEIVSHTCI |
| | ENHLKQLGYV QKLDTWVPHE |
| 121 | LKEKHLTQRI NSCDLLKKRN ENDPFLKRLI TGDEKWVVYN |
| | NIKRKRSWSR PREPAQTTSK |
| 181 | AGIHRKKVLL SVWWDYKGIV YFELLPPNRT INSVVYIEQL |
| | TKLNNAVEEK RPELTNRKGV |
| 241 | VFHHDNARPH TSLVTRQKLL ELGWDVLPHP PYSPDLAPSD |
| | YFLFRSLQNS LNGKNFNNDD |
| 301 | DIKSYLIQFF ANKNQKFYER GIMMLPERWQ KVIDQNGQHI TE. |

[0761] In certain embodiments, the piggyBac® or piggyBac-like transposon is isolated or derived from Apis mellifera. In certain embodiments, the piggyBac® or piggyBac-like transposon comprises a sequence of:

(SEQ ID NO: 14553)

| | |
|---|---|
| 1 | ttgggttggc aactaagtaa ttgcggattt cactcataga |
| | tggcttcagt tgaattttta |
| 61 | ggtttgctgg cgtagtccaa atgtaaaaca cattttgtta |
| | tttgatagtt ggcaattcag |
| 121 | ctgtcaatca gtaaaaaaag ttttttgatc ggttgcgtag |
| | ttttcgtttg gcgttcgttg |
| 181 | aaaa. |

In certain embodiments, the piggyBac® or piggyBac-like transposon comprises a sequence of:

(SEQ ID NO: 14554)

| | |
|---|---|
| 1 | agttatttag ttccatgaaa aaattgtctt tgattttcta |
| | aaaaaaatcc gcaattactt |
| 61 | agttgccaat ccaa. |

[0762] In certain embodiments of the methods of the disclosure, the transposase enzyme is a piggyBac® or piggyBac-like transposase enzyme. In certain embodiments, the piggyBac® or piggyBac-like transposase enzyme is isolated or derived from Messor bouvieri. The piggyBac® (PB) or piggyBac-like transposase enzyme may comprise or consist of an amino acid sequence at least 5%, 10%, 15%, 20%, 25%, 30%, 35%, 40%, 45%, 50%, 55%, 60%, 65%, 70%, 75%, 80%, 85%, 90%, 95%, 99% or any percentage in between identical to:

(SEQ ID NO: 14555)

| | |
|---|---|
| 1 | MSSEVPENVH LRHALLFLFH QKKRAAESHR LLVETYGEHA |
| | PTIRTCETWF RQFKCGDENV |
| 61 | QDKERPGRPK TFEDAELQEL LDEDSTQTQK QLAEKLNVSR |
| | VAICERLQAM GKIQKMGRWV |
| 121 | PHELNDRQME NRKIVSEMLL QRYERKSFLH RIVTGDEKWI |
| | YFENPKRKKS WLSPGEAGPS |
| 181 | TARPNRFGRK TMLCVWWDQI GVVYYELLKP GETVNTDRYR |
| | QQMINLNCAL IEKRPQYAQR |
| 241 | HDKVILQHDN APSHTAKPVK EMLKSLGWEV LSHPPYSPDL |
| | APSDYHLFAS MGHALAEQHF |
| 301 | ADFEEVKKWL DEWFSSKEKL FFWNGIHKLS ERWTKCIESN |
| | GQYFE. |

[0763] In certain embodiments, the piggyBac® or piggyBac-like transposon is isolated or derived from Messor bouvieri. In certain embodiments, the piggyBac® or piggyBac-like transposon comprises a sequence of:

(SEQ ID NO: 14556)

| | |
|---|---|
| 1 | agtcagaaat gacacctcga tcgacgacta atcgacgtct |
| | aatcgacgtc gattttatgt |
| 61 | caacatgtta ccaggtgtgt cggtaattcc tttccggttt |
| | ttccggcaga tgtcactagc |
| 121 | cataagtatg aaatgttatg atttgataca tatgtcattt |
| | tattctactg acattaacct |
| 181 | taaaactaca caagttacgt tccgccaaaa taacagcgtt |
| | atagatttat aattttttga |
| 241 | aa. |

In certain embodiments, the piggyBac® or piggyBac-like transposon comprises a sequence of:

(SEQ ID NO: 14557)

| | |
|---|---|
| 1 | ataaatttga actatccatt ctaagtaacg tgttttcttt |
| | aacgaaaaaa ccggaaaaga |
| 61 | attaccgaca ctcctggtat gtcaacatgt tattttcgac |
| | attgaatcgc gtcgattcga |
| 121 | agtcgatcga ggtgtcattt ctgact. |

[0764] In certain embodiments of the methods of the disclosure, the transposase enzyme is a piggyBac or piggyBac-like transposase enzyme. In certain embodiments, the piggyBac® or piggyBac-like transposase enzyme is isolated or derived from Trichoplusia ni. The piggyBac® (PB) or piggyBac-like transposase enzyme may comprise or consist of an amino acid sequence at least 5%, 10%, 15%, 20%, 25%, 30%, 35%, 40%, 45%, 50%, 55%, 60%, 65%, 70%, 75%, 80%, 85%, 90%, 95%, 99% or any percentage in between identical to:

(SEQ ID NO: 14558)

| | |
|---|---|
| 1 | MGSSLDDEHI LSALLQDDE LVGEDSDSEV SDHVSEDDVQ |
| | SDTEEAFIDE VHEVQPTSSG |
| 61 | SEILDEQNVI EQPGSSLASN RILTLPQRTI RGKNKHCWST |
| | SKSTRRSRVS ALNIVRSQRG |
| 121 | PTRMCRNIYD PLLCFKLFFT DEIISEIVKW TNAEISLKRR |
| | ESMTSATFRD TNEDEIYAFF |
| 181 | GILVMTAVRK DNHMSTDDLF DPSLSMVYVS VMSRDRFDFL |
| | IRCIRMDDKS IRPTLRENDV |
| 241 | FTPVRKIWDL FIHQCIQNYT PGAHLTIDEQ LLGFRGRCPF |
| | RVYIPNKPSK YGIKILMMCD |
| 301 | SGTKYMINGM PYLGRGTQTN GVPIGEYYVK ELSKPVHGSC |
| | RNITCDNWFT SIPLAKNLLQ |
| 361 | EPYKLTIVGT VRSNKREIPE VLKNSRSRPV GTSMFCFDGP |
| | LTLVSYKPKP AKMVYLLSSC |
| 421 | DEDASINEST GKPQMVMYYN QTKGGVDTLD QMCSVMTCSR |
| | KTNRWPMALL YGMINIACIN |
| 481 | SFIIYSHNVS SKGEKVQSRK KFMRNLYMSL TSSFMRKRLE |
| | APTLKRYLRD NISNILPKEV |
| 541 | PGTSDDSTEE PVMKKRTYCT YCPSKIRRKA NASCKKCKKV |
| | ICREHNIDMC QSCF. |

[0765] In certain embodiments, the piggyBac® or piggyBac-like transposon is isolated or derived from Trichoplusia ni. In certain embodiments, the piggyBac or piggyBac-like transposon comprises a sequence of:

(SEQ ID NO: 14559)

| | |
|---|---|
| 1 | ttaaccctag aaagatagtc tgcgtaaaat tgacgcatgc |
| | attcttgaaa tattgctctc |
| 61 | tctttctaaa tagcgcgaat ccgtcgctgt gcatttagga |
| | catctcagtc gccgcttgga |
| 121 | gctcccgtga ggcgtgcttg tcaatgcggt aagtgtcact |
| | gattttgaac tataacgacc |
| 181 | gcgtgagtca aaatgacgca tgattatctt ttacgtgact |
| | ttaagattt aactcatacg |
| 241 | ataattatat tgttatttca tgttctactt acgtgataac |
| | ttattata tatattttct |
| 301 | tgttatagat atc. |

[0766] In certain embodiments, the piggyBac® or piggyBac-like transposon comprises a sequence of:

(SEQ ID NO: 14560)

| | |
|---|---|
| 1 | tttgttactt tatagaagaa attttgagtt tttgtttttt |
| | tttaataaat aaataaacat |
| 61 | aaataaattg tttgttgaat ttattattag tatgtaagtg |
| | taaatataat aaaacttaat |
| 121 | atctattcaa attaataaat aaacctcgat atacagaccg |
| | ataaaacaca tgcgtcaatt |
| 181 | ttacgcatga ttatctttaa cgtacgtcac aatatgatta |
| | tctttctagg gttaa. |

[0767] In certain embodiments, the piggyBac® or piggyBac-like transposon comprises a sequence of:

(SEQ ID NO: 14561)

| | |
|---|---|
| 1 | ccctagaaag atagtctgcg taaaattgac gcatgcattc |
| | ttgaaatatt gctctctctt |
| 61 | tctaaatagc gcgaatccgt cgctgtgcat ttaggacatc |
| | tcagtcgccg cttggagctc |
| 121 | ccgtgaggcg tgcttgtcaa tgcggtaagt gtcactgatt |
| | ttgaactata acgaccgcgt |
| 181 | gagtcaaaat gacgcatgat tatcttttac gtgactttta |
| | agatttaact catacgataa |
| 241 | ttatattgtt atttcatgtt ctacttacgt gataacttat |
| | tatatatata ttttcttgtt |
| 301 | atagatatc. |

[0768] In certain embodiments, the piggyBac® or piggyBac-like transposon comprises a sequence of:

(SEQ ID NO: 14562)

| | |
|---|---|
| 1 | tttgttactt tatagaagaa attttgagtt tttgtttttt |
| | tttaataaat aaataaacat |
| 61 | aaataaattg tttgttgaat ttattattag tatgtaagtg |
| | taaatataat aaaacttaat |
| 121 | atctattcaa attaataaat aaacctcgat atacagaccg |
| | ataaaacaca tgcgtcaatt |
| 181 | ttacgcatga ttatctttaa cgtacgtcac aatatgatta |
| | tctttctagg g. |

[0769] In certain embodiments, the piggyBac® or piggyBac-like transposon comprises a sequence of:

(SEQ ID NO: 14609)

| | |
|---|---|
| 1 | tctaaatagc gcgaatccgt cgctgtgcat ttaggacatc |
| | tcagtcgccg cttggagctc |
| 61 | ccgtgaggcg tgcttgtcaa tgcggtaagt gtcactgatt |
| | ttgaactata acgaccgcgt |
| 121 | gagtcaaaat gacgcatgat tatcttttac gtgactttta |
| | agatttaact catacgataa |
| 181 | ttatattgtt atttcatgtt ctacttacgt gataacttat |
| | tatatatata ttttcttgtt |
| 241 | atagatatc. |

[0770] In certain embodiments, the piggyBac® or piggyBac-like transposon comprises a sequence of;

(SEQ ID NO: 14610)

| | |
|---|---|
| 1 | tttgttactt tatagaagaa attttgagtt tttgtttttt |
| | tttaataaat aaataaacat |
| 61 | aaataaattg tttgttgaat ttattattag tatgtaagtg |
| | taaatataat aaaacttaat |
| 121 | atctattcaa attaataaat aaacctcgat atacagaccg |
| | ataaaacaca tgcgtcaatt |
| 181 | ttacgcatga ttatctttaa cgtacgtcac aatatgatta |
| | tctttctagg g. |

[0771] In certain embodiments, the piggyBac® or piggyBac-like transposon comprises SEQ ID NO: 14561 and SEQ ID NO: 14562, and the piggyBac® or piggyBac-like transposase comprises SEQ ID NO: 14558. In certain embodiments, the piggyBac® or piggyBac-like transposon comprises SEQ ID NO: 14609 and SEQ ID NO: 14610, and the piggyBac® or piggyBac-like transposase comprises SEQ ID NO: 14558.

[0772] In certain embodiments, the piggyBac® or piggyBac-like transposon is isolated or derived from Aphis gossypii. In certain embodiments, the piggyBac® or piggyBac-like transposon comprises an ITR sequence of CCTTCCAGCGGGCGCGC (SEQ ID NO: 14565).

[0773] In certain embodiments, the piggyBac® or piggyBac-like transposon is isolated or derived from Chilo suppressalis. In certain embodiments, the piggyBac or piggyBac-like transposon comprises an ITR sequence of CCCAGATTAGCCT (SEQ ID NO: 14566).

[0774] In certain embodiments, the piggyBac® or piggyBac-like transposon is isolated or derived from Heliothis virescens. In certain embodiments, the piggyBac® or piggyBac-like transposon comprises an ITR sequence of CCCTTAATTACTCGCG (SEQ ID NO: 14567).

[0775] In certain embodiments, the piggyBac® or piggyBac-like transposon is isolated or derived from Pectinophora gossypiella. In certain embodiments, the piggyBac® or piggyBac-like transposon comprises an ITR sequence of CCCTAGATAACTAAAC (SEQ ID NO: 14568).

[0776] In certain embodiments, the piggyBac® or piggyBac-like transposon is isolated or derived from Anopheles stephensi. In certain embodiments, the piggyBac® or piggyBac-like transposon comprises an ITR sequence of CCCTAGAAAGATA (SEQ ID NO: 14569).

[0777] DNA transposons in the hAT family are widespread in plants and animals. A number of active hAT transposon systems have been identified and found to be functional, including but not limited to, the Hermes transposon, Ac transposon, hobo transposon, and the Tol2 transposon. The hAT family is composed of two families that have been classified as the AC subfamily and the Buster subfamily, based on the primary sequence of their transposases. Members of the hAT family belong to Class II transposable elements. Class II mobile elements use a cut and paste mechanism of transposition. hAT elements share similar transposases, short terminal inverted repeats, and an eight base-pairs duplication of genomic target.

[0778] Compositions and methods of the disclosure may comprise a TcBuster transposon and/or a TcBuster transposase.

[0779] Compositions and methods of the disclosure may comprise a TcBuster transposon and/or a hyperactive TcBuster transposase. A hyperactive TcBuster transposase demonstrates an increased excision and/or increased insertion frequency when compared to an excision and/or insertion frequency of a wild type TcBuster transposase. A hyperactive TcBuster transposase demonstrates an increased transposition frequency when compared to a transposition frequency of a wild type TcBuster transposase.

[0780] In some embodiments of the compositions and methods of the disclosure, a wild type TcBuster transposase comprises or consists of the amino acid sequence of:

(GenBank Accession No. ABF20545
and SEQ ID NO: 17090)

| | |
|---|---|
| 1 | MMLNWLKSGK LESQSQEQSS CYLENSNCLP PTLDSTDIIG |
| | EENKAGTTSR KKRKYDEDYL |
| 61 | NFGFTWTGDK DEPNGLCVIC EQVVNNSSLN PAKLKRHLDT |
| | KHPTLKGKSE YFKRKCNELN |
| 121 | QKKETFERYV RDDNKNLLKA SYLVSLRIAK QGEAYTIAEK |
| | LIKPCTKDLT TCVFGEKFAS |
| 181 | KVDLVPLSDT TISPRIEDMS YFCEAVLVNR LENAKCGFTL |
| | QMDESTDVAG LAILLVFVRY |
| 241 | IHESSFEEDM LFCKALPTQT TGEEIFNLLN AYFEKHSIPW |
| | NLCYHICTDG AKAMVGVIKG |
| 301 | VIARIKKLVP DIKASHCCLH RHALAVKRIP NALHEVLNDA |
| | VKMINFIKSR PLNARVFALL |
| 361 | CDDLGSLHKN LLLHTEVRWL SRGKVLTRFW ELRDEIRIFF |
| | NEREFAGKLN DTSWLQNLAY |
| 421 | IADIFSYLNE VNLSLQGPNS TIFKVNSRIN SIKSKLKLWE |
| | ECITKNNTEC FANLNDFLET |
| 481 | SNTALDPNLK SNIKEHLNGL KNTFLEYFPP TCNNISWVEN |
| | PFNECGNVDT LPIKEREQLI |
| 541 | DIRTDTTLKS SFVPDGIGPF WIKLMDEFPE ISKRAVKELM |
| | PFVTTYLCEK SFSVYVATKT |
| 601 | KYRNRLDAED DMRLQLTTIH PDIDNLCNNK QAQKSH. |

[0781] In some embodiments of the compositions and methods of the disclosure, a TcBuster Transposase comprises or consists of a sequence having at least 20%, 25%, 30%, 35%, 40%, 45%, 50%, 55%, 60%, 65%, 70%, 75%, 80%, 85%, 90%, 95%, 97%, 99% or any percentage identity in between to a wild type TcBuster transposase comprising or consisting of the amino acid sequence of:

(GenBank Accession No. ABF20545
and SEQ ID NO: 17090)

| | |
|---|---|
| 1 | MMLNWLKSGK LESQSQEQSS CYLENSNCLP PTLDSTDIIG |
| | EENKAGTTSR KKRKYDEDYL |
| 61 | NFGFTWTGDK DEPNGLCVIC EQVVNNSSLN PAKLKRHLDT |
| | KHPTLKGKSE YFKRKCNELN |
| 121 | QKKETFERYV RDDNKNLLKA SYLVSLRIAK QGEAYTIAEK |
| | LIKPCTKDLT TCVFGEKFAS |
| 181 | KVDLVPLSDT TISPRIEDMS YFCEAVLVNR LENAKCGFTL |
| | QMDESTDVAG LAILLVFVRY |
| 241 | IHESSFEEDM LFCKALPTQT TGEEIFNLLN AYFEKHSIPW |
| | NLCYHICTDG AKAMVGVIKG |
| 301 | VIARIKKLVP DIKASHCCLH RHALAVKRIP NALHEVLNDA |
| | VKMINFIKSR PLNARVFALL |
| 361 | CDDLGSLHKN LLLHTEVRWL SRGKVLTRFW ELRDEIRIFF |
| | NEREFAGKLN DTSWLQNLAY |
| 421 | IADIFSYLNE VNLSLQGPNS TIFKVNSRIN SIKSKLKLWE |
| | ECITKNNTEC FANLNDFLET |
| 481 | SNTALDPNLK SNIKEHLNGL KNTFLEYFPP TCNNISWVEN |
| | PFNECGNVDT LPIKEREQLI |
| 541 | DIRTDTTLKS SFVPDGIGPF WIKLMDEFPE ISKRAVKELM |
| | PFVTTYLCEK SFSVYVATKT |
| 601 | KYRNRLDAED DMRLQLTTIH PDIDNLCNNK QAQKSH. |

[0782] In some embodiments of the compositions and methods of the disclosure, a wild type TcBuster transposase is encoded by a nucleic acid sequence comprising or consisting of:

(GenBank Accession No. DQ481197
and SEQ ID NO: 17091)

| | |
|---|---|
| 1 | atgatgttga attggctgaa aagtggaaag cttgaaagtc |
| | aatcacagga acagagttcc |
| 61 | tgctaccttg agaactctaa ctgcctgcca ccaacgctcg |
| | attctacaga tattatcggt |
| 121 | gaagagaaca aagctggtac cacctctcgc aagaagcgga |
| | aatatgacga ggactatctg |
| 181 | aacttcggtt ttacatggac tggcgacaag gatgagccca |
| | acggactttg tgtgatttgc |
| 241 | gagcaggtag tcaacaattc ctcacttaac ccggccaaac |
| | tgaaacgcca tttggacaca |
| 301 | aagcatccga cgcttaaagg caagagcgaa tacttcaaaa |
| | gaaaatgtaa cgagctcaat |
| 361 | caaaagaagc atacttttga gcgatacgta agggacgata |
| | acaagaacct cctgaaagct |
| 421 | tcttatctcg tcagtttgag aatagctaaa cagggcgagg |
| | catataccat agcggaqaag |
| 481 | ttgatcaagc cttgcaccaa ggatctgaca acttgcgtat |
| | ttggagaaaa attcgcgagc |
| 541 | aaagttgatc tcgtccccct gtccgacacg actatttcaa |
| | ggcgaatcga agacatgagt |
| 601 | tacttctgtg aagccgtgct ggtgaacagg ttgaaaaatg |
| | ctaaatgtgg gtttacgctg |
| 661 | cagatggacg agtcaacaga tgttgccggt cttgcaatcc |
| | tgcttgtgtt tgttaggtac |
| 721 | atacatgaaa gctcttttga ggaggatatg ttgttctgca |
| | aagcacttcc cactcagacg |
| 781 | acaggggagg agattttcaa tcttctcaat gcctatttcg |
| | aaaagcactc catcccatgg |
| 841 | aatctgtgtt accacatttg cacagacggt gccaaggcaa |
| | tggtaggagt tattaaagga |
| 901 | gtcatagcga gaataaaaaa actcgtccct gatataaaag |
| | ctagccactg ttgcctgcat |
| 961 | cgccacgctt tggctgtaaa gcgaataccg aatgcattgc |
| | acgaggtgct caatgacgct |
| 1021 | gttaaaatga tcaacttcat caagtctcgg ccgttgaatg |
| | cgcgcgtctt cgctttgctg |
| 1081 | tgtgacgatt tggggagcct gcataaaaat cttcttcttc |
| | ataccgaagt gaggtggctg |
| 1141 | tctagaggaa aggtgctgac ccgattttgg gaactgagag |
| | atgaaattag aattttcttc |
| 1201 | aacgaaaggg aatttgccgg gaaattgaac gacaccagtt |
| | ggttgcaaaa tttggcatat |
| 1261 | atagctgaca tattcagtta tctgaatgaa gttaatcttt |
| | ccctgcaagg gccgaatagc |
| 1321 | acaatcttca aggtaaatag ccgcattaac agtattaaat |
| | caaagttgaa gttgtgggaa |
| 1381 | gagtgtataa cgaaaaataa cactgagtgt tttgcgaacc |
| | tcaacgattt tttggaaact |
| 1441 | tcaaacactg cgttggatcc aaacctgaag tctaatattt |
| | tggaacatct caacggtctt |
| 1501 | aagaacacct ttctggagta ttttccacct acgtgtaata |
| | atatctcctg ggtggagaat |
| 1561 | cctttcaatg aatgcggtaa cgtcgataca ctcccaataa |
| | aagagaggga acaattgatt |
| 1621 | gacatacgga ctgatacgac attgaaatct tcattcgtgc |
| | ctgatggtat aggaccattc |
| 1681 | tggatcaaac tgatggacga atttccagaa attagcaaac |
| | gagctgtcaa agagctcatg |
| 1741 | ccatttgtaa ccacttacct ctgtgagaaa tcattttccg |
| | tctatgtagc cacaaaaaca |
| 1801 | aaatatcgaa atagacttga tgctgaagac gatatgcgac |
| | tccaacttac tactatccat |
| 1861 | ccagacattg acaacctttg taacaacaag caggctcaga |
| | aatcccactg a. |

[0783] In some embodiments of the compositions and methods of the disclosure, a TcBuster Transposase comprises or consists of a sequence having at least 20%, 25%, 30%, 35%, 40%, 45%, 50%, 55%, 60%, 65%, 70%, 75%, 80%, 85%, 90%, 95%, 97%, 99% or any percentage identity in between to a wild type TcBuster transposase encoded by a nucleic acid sequence comprising or consisting of.

(GenBank Accession No. DQ481197
and SEQ ID NO: 17091)

| | |
|---|---|
| 1 | atgatgttga attggctgaa aagtggaaag cttgaaagtc |
| | aatcacagga acagagttcc |
| 61 | tgctaccttg agaactctaa ctgcctgcca ccaacgctcg |
| | attctacaga tattatcggt |
| 121 | gaagagaaca aagctggtac cacctctcgc aagaagcgga |
| | aatatgacga ggactatctg |
| 181 | aacttcggtt ttacatggac tggcgacaag gatgagccca |
| | acggactttg tgtgatttgc |
| 241 | gagcaggtag tcaacaattc ctcacttaac ccggccaaac |
| | tgaaacgcca tttggacaca |
| 301 | aagcatccga cgcttaaagg caagagcgaa tacttcaaaa |
| | gaaaatgtaa cgagctcaat |
| 361 | caaaagaagc atacttttga gcgatacgta agggacgata |
| | acaagaacct cctgaaagct |
| 421 | tcttatctcg tcagtttgag aatagctaaa cagggcgagg |
| | catataccat agcggaqaag |
| 481 | ttgatcaagc cttgcaccaa ggatctgaca acttgcgtat |
| | ttggagaaaa attcgcgagc |
| 541 | aaagttgatc tcgtccccct gtccgacacg actatttcaa |
| | ggcgaatcga agacatgagt |
| 601 | tacttctgtg aagccgtgct ggtgaacagg ttgaaaaatg |
| | ctaaatgtgg gtttacgctg |
| 661 | cagatggacg agtcaacaga tgttgccggt cttgcaatcc |
| | tgcttgtgtt tgttaggtac |
| 721 | atacatgaaa gctcttttga ggaggatatg ttgttctgca |
| | aagcacttcc cactcagacg |
| 781 | acaggggagg agattttcaa tcttctcaat gcctatttcg |
| | aaaagcactc catcccatgg |
| 841 | aatctgtgtt accacatttg cacagacggt gccaaggcaa |
| | tggtaggagt tattaaagga |
| 901 | gtcatagcga gaataaaaaa actcgtccct gatataaaag |
| | ctagccactg ttgcctgcat |
| 961 | cgccacgctt tggctgtaaa gcgaataccg aatgcattgc |
| | acgaggtgct caatgacgct |
| 1021 | gttaaaatga tcaacttcat caagtctcgg ccgttgaatg |
| | cgcgcgtctt cgctttgctg |
| 1081 | tgtgacgatt tggggagcct gcataaaaat cttcttcttc |
| | ataccgaagt gaggtggctg |
| 1141 | tctagaggaa aggtgctgac ccgattttgg gaactgagag |
| | atgaaattag aattttcttc |
| 1201 | aacgaaaggg aatttgccgg gaaattgaac gacaccagtt |
| | ggttgcaaaa tttggcatat |
| 1261 | atagctgaca tattcagtta tctgaatgaa gttaatcttt |
| | ccctgcaagg gccgaatagc |
| 1321 | acaatcttca aggtaaatag ccgcattaac agtattaaat |
| | caaagttgaa gttgtgggaa |
| 1381 | gagtgtataa cgaaaaataa cactgagtgt tttgcgaacc |
| | tcaacgattt tttggaaact |
| 1441 | tcaaacactg cgttggatcc aaacctgaag tctaatattt |
| | tggaacatct caacggtctt |
| 1501 | aagaacacct ttctggagta ttttccacct acgtgtaata |
| | atatctcctg ggtggagaat |
| 1561 | cctttcaatg aatgcggtaa cgtcgataca ctcccaataa |
| | aagagaggga acaattgatt |
| 1621 | gacatacgga ctgatacgac attgaaatct tcattcgtgc |
| | ctgatggtat aggaccattc |
| 1681 | tggatcaaac tgatggacga atttccagaa attagcaaac |
| | gagctgtcaa agagctcatg |
| 1741 | ccatttgtaa ccacttacct ctgtgagaaa tcattttccg |
| | tctatgtagc cacaaaaaca |
| 1801 | aaatatcgaa atagacttga tgctgaagac gatatgcgac |
| | tccaacttac tactatccat |
| 1861 | ccagacattg acaacctttg taacaacaag caggctcaga |
| | aatcccactg a. |

[0784] In some embodiments of the compositions and methods of the disclosure, a TcBuster Transposase comprises or consists of a naturally occurring amino acid sequence.

[0785] In some embodiments of the compositions and methods of the disclosure, a TcBuster Transposase comprises or consists of a non-naturally occurring amino acid sequence.

[0786] In some embodiments of the compositions and methods of the disclosure, a TcBuster Transposase is encoded by a sequence comprising or consisting of a naturally occurring nucleic acid sequence.

[0787] In some embodiments of the compositions and methods of the disclosure, a TcBuster Transposase is encoded by a sequence comprising or consisting of a non-naturally occurring nucleic acid sequence.

[0788] In some embodiments of the compositions and methods of the disclosure, a mutant TcBuster Transposase comprises one or more sequence variations when compared to a wild type TcBuster Transposase. In some embodiments, the wild type TcBuster Transposase comprises or consists of the amino acid sequence of SEQ ID NO: 17090. In some embodiments, the wild type TcBuster Transposase is encoded by a sequence comprising or consisting of the nucleic acid sequence of SEQ ID NO: 17091. In some embodiments, the one or more sequence variations comprises one or more of a substitution, inversion, insertion, deletion, transposition, and frameshift. In some embodiments, the one or more sequence variations comprises a modified, synthetic, artificial or non-naturally occurring amino acid. In some embodiments, the one or more sequence variations comprises a modified, synthetic, artificial or non-naturally occurring nucleic acid.

[0789] In some embodiments of the compositions and methods of the disclosure, a mutant TcBuster Transposase comprises one or more sequence variations when compared to a wild type TcBuster Transposase. In some embodiments, the one or more sequence variations comprises an amino acid substitution in one or more of a DNA Binding and Oligomerization domain, an insertion domain and a Zn-BED domain.

[0790] In some embodiments of the compositions and methods of the disclosure, a mutant TcBuster Transposase comprises one or more sequence variations when compared to a wild type TcBuster Transposase. In some embodiments, the one or more sequence variations comprises an amino acid substitution that increases a net charge a neutral pH when compared to a wild type TcBuster Transposase. In some embodiments, the wild type TcBuster Transposase comprises or consists of the amino acid sequence of SEQ ID NO: 17090. In some embodiments, the wild type TcBuster Transposase is encoded by a sequence comprising or consisting of the nucleic acid sequence of SEQ ID NO: 17091. In some embodiments, the one or more sequence variations comprises an amino acid substitution of the aspartic acid (D) at position 223 (D223), the aspartic acid (D) at position 289 (D289) and the aspartic acid (E) at position 589 (E289) of SEQ ID NO: 17090. In some embodiments, the one or more sequence variations comprises an amino acid substitution within 5, 10, 15, 20, 25, 30, 35, 40, 45, 50, 55, 60, 65, 70, 75, 80, 85, 90, 95, 100 or any number of amino acids in between of position 223, 289 and/or 289 of SEQ ID NO: 17090. In some embodiments, the one or more sequence variations comprises an amino acid substitution within 70 amino acids of position 223, 289 and/or 289 of SEQ ID NO: 17090. In some embodiments, the one or more sequence variations comprises an amino acid substitution within 80 amino acids of position 223, 289 and/or 289 of SEQ ID NO: 17090. In some embodiments, the one or more sequence variations comprises an amino acid substitution of an aspartic acid (D) or a aspartic acid (E) to a neutral amino acid, a lysine (L) or an arginine (R) (e.g. D223L, D223R, D289L, D289R, E289L, E289R of SEQ ID NO: 17090).

[0791] In some embodiments of the compositions and methods of the disclosure, a mutant TcBuster Transposase comprises one or more sequence variations when compared to a wild type TcBuster Transposase. In some embodiments, the one or more sequence variations comprises one or more of Q82E, N85S, D99A, D132A, Q151S, Q151A, E153K, E153R, A154P, Y155H, E159A, T171K, T171R, K177E, D183K, D183R, D189A, T191E, S193K, S193R, Y201A, F202D, F202K, C203I, C203V, Q221T, M222L, I223Q, E224G, S225W, D227A, R239H, E243A, E247K, P257K, P257R, Q258T, E263A, E263K, E263R, E274K, E274R, S278K, N281E, L282K, L282R, K292P, V297K, K299S, A303T, H322E, A332S, A358E, A358K, A358S, D376A, V377T, L380N, I398D, I398S, I398K, F400L, V431L, S447E, N450K, N450R, I452F, E469K, K469K, P510D, P510N, E517R, R536S, V553S, P554T, P559D, P559S, P559K, K573E, E578L, K590T, Y595L, V596A, T598I, K599A, Q615A, T618K, T618K, T618R, D622K and D622R of SEQ ID NO: 17090. In some embodiments, the one or more sequence variations comprises an amino acid substitution within 5, 10, 15, 20, 25, 30, 35, 40, 45, 50, 55, 60, 65, 70, 75, 80, 85, 90, 95, 100 or any number of amino acids in between of position 154, 155, 159, 171, 177, 183, 189, 191, 193, 201, 202, 203, 221, 223, 224, 225, 227, 239, 243, 247, 257, 258, 263, 274, 278, 281, 282, 292, 297, 299, 303, 322, 332, 358, 376, 377, 380, 398, 400, 431, 447, 450, 452, 469, 510, 517, 536, 553, 554, 559, 573, 578, 590, 595, 596, 598, 599, 615, 618, and 622 of SEQ ID NO: 17090.

[0792] In some embodiments of the compositions and methods of the disclosure, a mutant TcBuster Transposase comprises one or more sequence variations when compared to a wild type TcBuster Transposase. In some embodiments, the one or more sequence variations comprises one or more of E247K, V297K, A358K, S278K, E247R, E274R, V297R, A358R, S278R, T171R, D183R, S193R, P257K, E263R, L282K, T618K, D622R, E153K, N450K, T171K, D183K, S193K, P257R, E263K, L282R, T618R, D622K, E153R and N450R of SEQ ID NO: 17090. In some embodiments, the one or more sequence variations comprises an amino acid substitution within 5, 10, 15, 20, 25, 30, 35, 40, 45, 50, 55, 60, 65, 70, 75, 80, 85, 90, 95, 100 or any number of amino acids in between of position 153, 171, 183, 193, 247, 257, 263, 274, 278, 282, 297, 358, 450, 618, 622 of SEQ ID NO: 17090.

[0793] In some embodiments of the compositions and methods of the disclosure, a mutant TcBuster Transposase comprises one or more sequence variations when compared to a wild type TcBuster Transposase. In some embodiments, the one or more sequence variations comprises one or more of V377T/E469K, V377T/E469K/R536S, A332S, V553S/P554T, E517R, K299S, Q615A/T618K, S278K, A303T, P510D, P510N, N281S, N281E, K590T, Q258T, E247K, S447E, N85S, V297K, A358K, I452F, V377T/E469K/D189A, K573E/E578L, I452FN377T/E469K/D189A, A358K/V377T/E469K/D189A, K573E/E578L/V377T/E469K-D189A, T171R, D183R, S193R, P257K, E263R, L282K, T618K, D622R, E153K, N450K, T171K, D183K, S193K, P257R, E263K, L282R, T618R, D622K, E153R, N450R, E247K/E274K/V297K/A358K of SEQ ID NO: 17090. In some embodiments, the one or more sequence variations comprises an amino acid substitution within 5, 10, 15, 20, 25, 30, 35, 40, 45, 50, 55, 60, 65, 70, 75, 80, 85, 90, 95, 100 or any number of amino acids in between of position 85, 153, 171, 189, 193, 247, 257, 258, 263, 274, 278, 281, 282, 297, 299, 303, 332, 358, 377, 450, 469, 447, 452, 469, 510, 517, 536, 553, 554, 573, 578, 590, 615, 618, 622 of SEQ ID NO: 17090.

[0794] In some embodiments of the compositions and methods of the disclosure, a mutant TcBuster Transposase comprises one or more sequence variations when compared to a wild type TcBuster Transposase. In some embodiments, the one or more sequence variations comprises one or more of V377T/E469K, V377T/E469K-R536S, V553S/P554T, Q615A/T618K, S278K, A303T, P510D, P510N, N281 S, N281E, K590T, Q258T, E247K, S447E, N85S, V297K, A358K, I452F, V377T/E469K/D189A and K573E/E578L. In some embodiments, the one or more sequence variations comprises an amino acid substitution within 5, 10, 15, 20, 25, 30, 35, 40, 45, 50, 55, 60, 65, 70, 75, 80, 85, 90, 95, 100 or any number of amino acids in between of position 85, 189, 247, 258, 278, 281, 297, 303, 358, 377, 447, 452, 469, 510, 536, 553, 554, 573, 578, 590, 615, 618 of SEQ ID NO: 17090.

[0795] In some embodiments of the compositions and methods of the disclosure, a mutant TcBuster Transposase comprises one or more sequence variations when compared to a wild type TcBuster Transposase. In some embodiments, the one or more sequence variations comprises one or more of Q151S, Q11A, A154P, Q615A, V553S, Y155H, Y201A. F202D, F202K, C203I, C203V, F400L, I398D, I398S, I398K, V431L, P559D, P559S, P559K, M222L of SEQ ID NO: 17090. In some embodiments, the one or more sequence variations comprises an amino acid substitution within 5, 10, 15, 20, 25, 30, 35, 40, 45, 50, 55, 60, 65, 70, 75, 80, 85, 90, 95, 100 or any number of amino acids in between of position 151, 154, 615, 553, 155, 201, 202, 203, 400, 398, 431, 559, 222 of SEQ ID NO: 17090.

[0796] In some embodiments of the compositions and methods of the disclosure, a mutant TcBuster Transposase comprises one or more sequence variations when compared to a wild type TcBuster Transposase. In some embodiments, the one or more sequence variations comprises one or more of V377T, E469K, and D189A, when numbered in accordance with SEQ ID NO: 17090.

[0797] In some embodiments of the compositions and methods of the disclosure, a mutant TcBuster Transposase comprises one or more sequence variations when compared to a wild type TcBuster Transposase. In some embodiments, the one or more sequence variations comprises one or more of K573E and E578L, when numbered in accordance with SEQ ID NO: 1090.

[0798] In some embodiments, the mutant TcBuster transposase comprises amino acid substitution 1452K, when numbered in accordance with SEQ ID NO: 17090.

[0799] In some embodiments of the compositions and methods of the disclosure, a mutant TcBuster Transposase comprises one or more sequence variations when compared to a wild type TcBuster Transposase. In some embodiments, the one or more sequence variations comprises one or more of A358K, when numbered in accordance with SEQ ID NO: 17090.

[0800] In some embodiments of the compositions and methods of the disclosure, a mutant TcBuster Transposase comprises one or more sequence variations when compared to a wild type TcBuster Transposase. In some embodiments, the one or more sequence variations comprises one or more of V297K, when numbered in accordance with SEQ ID NO: 17090.

[0801] In some embodiments of the compositions and methods of the disclosure, a mutant TcBuster Transposase comprises one or more sequence variations when compared to a wild type TcBuster Transposase. In some embodiments, the one or more sequence variations comprises one or more of N85S, when numbered in accordance with SEQ ID NO: 17090.

[0802] In some embodiments of the compositions and methods of the disclosure, a mutant TcBuster Transposase comprises one or more sequence variations when compared to a wild type TcBuster Transposase. In some embodiments, the one or more sequence variations comprises one or more of I452F, V377T, E469K, and D189A, when numbered in accordance with SEQ ID NO: 17090.

[0803] In some embodiments of the compositions and methods of the disclosure, a mutant TcBuster Transposase comprises one or more sequence variations when compared to a wild type TcBuster Transposase. In some embodiments, the one or more sequence variations comprises one or more of A358K, V377T, E469K, and D189A, when numbered in accordance with SEQ ID NO: 17090.

[0804] In some embodiments of the compositions and methods of the disclosure, a mutant TcBuster Transposase comprises one or more sequence variations when compared to a wild type TcBuster Transposase. In some embodiments, the one or more sequence variations comprises one or more of V377T, E469K. D189A, K573E and E578L, when numbered in accordance with SEQ ID NO: 17090.

[0805] In some embodiments of the compositions and methods of the disclosure, a TcBuster Transposase recognizes a 5′ inverted repeat comprising or consisting of the sequence of:

(SEQ ID NO: 17092)

| | |
|---|---|
| 1 | Cagtgttctt caacctttgc catccggcgg aaccctttgt |
| | cgagatattt ttttttatgg |
| 61 | aacccttcat ttagtaatac acccagatga gattttaggg |
| | acagctgcgt tgacttgtta |
| 121 | cgaacaaggt gagcccgtgc tttggtctag ccaagggcat |
| | ggtaaagact atattcgcgg |
| 181 | cgttgtgaca atttaccgaa caactccgcg gccgggaagc |
| | cgatctcggc ttgaacgaat |
| 241 | tgttaggtgg cggtacttgg gtcgatatca aagtgcatca |
| | cttcttcccg tatgcccaac |
| 301 | tttgtataga gagccactgc gggatcgtca ccgtaatctg |
| | cttgcacgta gatcacataa |
| 361 | gcaccaagcg cgttggcctc atgottgagg agattgatga |
| | gcgcggtggc aatgccctgc |
| 421 | ctccggtgct cgccggagac tgcgagatca tagatata. |

[0806] In some embodiments of the compositions and methods of the disclosure, a TcBuster Transposase recognizes a 3′ inverted repeat comprising or consisting of the sequence of:

(SEQ ID NO: 17094)

| | |
|---|---|
| 1 | gatatcaagc ttatcqatac cgtcgacctc gagatttctg |
| | aacgattcta ggttaggatc |
| 61 | aaacaaaata caatttattt taaaactgta agttaactta |
| | cctttgcttg tctaaaccaa |
| 121 | aaacaacaac aaaactacga ccacaagtac agttacatat |
| | ttttgaaaat taaggttaag |
| 181 | tgcagtgtaa gtcaactatg cgaatggata acatgtttca |
| | acatgaaact ccgattgacg |
| 241 | catgtgcatt ctgaagagcg gcgcggccga cgtctctcga |
| | attgaagcaa tgactcgcgg |
| 301 | aaccccgaaa gcctttgggt ggaaccctag ggttccgcgg |
| | aacacaggtt gaagaacact |
| 361 | g |

[0807] In some embodiments of the compositions and methods of the disclosure, a TcBuster Transposase recognizes a 5′ inverted repeat comprising or consisting of the sequence of SEQ ID NO: 17092 and a 3′ inverted repeat comprising or consisting of the sequence of SEQ ID NO: 17093.

[0808] In some embodiments of the compositions and methods of the disclosure, a TcBuster Transposase recognizes a 5′ inverted repeat comprising or consisting of the sequence of:

(SEQ ID NO: 17094)

| | |
|---|---|
| 1 | Cctgcaggag tgttcttcaa cctttgccat ccggcggaac |
| | cctttgtcga gatatttttt |
| 61 | tttatggaac ccttcattta gtaatacacc cagatgagat |
| | tttagggaca gctgcgttga |
| 121 | cttqttacga acaaggtgag cccgtgcttt ggtaataaaa |
| | actctaaata agatttaaat |
| 181 | ttgcatttat ttaaacaaac tttaaacaaa aagataaata |
| | ttccaaataa aataatatat |
| 241 | aaaataaaaa ataaaaatta atgacttttt tgcgcttgct |
| | tattattgca caaattatca |
| 301 | atatcgggat ggatcgttgt ttttt. |

[0809] In some embodiments of the compositions and methods of the disclosure, a TcBuster Transposase recognizes a 3′ inverted repeat comprising or consisting of the sequence of:

(SEQ ID NO: 17095)

| | |
|---|---|
| 1 | Gagccaattc agcatcatat ttctgaacga ttctaggtta |
| | ggatcaaaca aaatacaatt |
| 61 | tattttaaaa ctgtaagtta acttaccttt gcttgtctaa |
| | acctaaaaca acaacaaaac |
| 121 | tacgaccaca aqtacagtta catatttttg aaaattaagg |
| | ttaagtgcag tgtaaqtcaa |
| 181 | ctatgcgaat ggataacatg tttcaacatg aaactccgat |
| | tgacgcatgt gcattctgaa |
| 241 | gagcggcgcg gccgacgtct ctcgaattga agcaatgact |
| | cgcggaaccc cgaaagcctt |
| 301 | tgggtggaac cctagggttc cgcggaacac aggttgaaga |
| | acactg. |

[0810] In some embodiments of the compositions and methods of the disclosure, a TcBuster Transposase recognizes a 5′ inverted repeat comprising or consisting of the sequence of SEQ ID NO: 17094 and a 3′ inverted repeat comprising or consisting of the sequence of SEQ ID NO: 17095.

[0811] In some embodiments of the compositions and methods of the disclosure, a TcBuster Transposase recognizes an inverted repeat comprising or consisting of a sequence having at least 5%, 10%, 15%, 20%, 25%, 30%, 35%, 40%, 45%, 50%, 55%, 60%, 65%, 70%, 75%, 80%, 85%, 90%, 95,% 97%, 99% or any percentage identify in between to one or more of SEQ ID NO: 17092, 17093, 17094 or 17095.

[0812] In some embodiments of the compositions and methods of the disclosure, a TcBuster Transposase recognizes an inverted repeat comprising or consisting of a sequence having at least In some embodiments of the compositions and methods of the disclosure, a TcBuster Transposase recognizes an inverted repeat comprising or consisting of a sequence having at least 5, 10, 15, 20, 25, 30, 35, 40, 45, 50, 55, 60, 65, 70, 75, 80, 85, 90, 95, 97, 99 or any number of contiguous nucleotides in between having between 90 and 100% identity to SEQ ID NO: 17092, 17093, 17094 or 17095 or any portion thereof.

[0813] In some embodiments of the compositions and methods of the disclosure, a TcBuster Transposase recognizes an inverted repeat comprising or consisting of a sequence having at least 5, 10, 15, 20, 25, 30, 35, 40, 45, 50, 55, 60, 65, 70, 75, 80, 85, 90, 95, 97, 99 or any number of discontinuous nucleotides in between having between 90 and 100% identity to SEQ ID NO: 17092, 17093, 17094 or 17095 or any portion thereof.

[0814] In some embodiments of the compositions and methods of the disclosure, a TcBuster transposon comprises a 3′ inverted repeat and a 5′ inverted repeat. In some embodiments of the compositions and methods of the disclosure, a TcBuster Transposase recognizes a TcBuster transposon comprising a 3′ inverted repeat and a 5′ inverted repeat comprising or consisting of a sequence having at least 5, 10, 15, 20, 25, 30, 35, 40, 45, 50, 55, 60, 65, 70, 75, 80 85, 90, 95, 97, 99 or any number of discontinuous nucleotides in between having between 90 and 100% identity to SEQ ID NO: 17092, 17093, 17094 or 17095 or any portion thereof.

[0815] As used throughout the disclosure, the singular forms “a,” “and,” and “the” include plural referents unless the context clearly dictates otherwise. Thus, for example, reference to “a method” includes a plurality of such methods and reference to “a dose” includes reference to one or more doses and equivalents thereof known to those skilled in the art, and so forth.

[0816] The term “about” or “approximately” means within an acceptable error range for the particular value as determined by one of ordinary skill in the art, which will depend in part on how the value is measured or determined, e.g., the limitations of the measurement system. For example, “about” can mean within 1 or more standard deviations. Alternatively, “about” can mean a range of up to 20%, or up to 10%, or up to 5%, or up to 1% of a given value. Alternatively, particularly with respect to biological systems or processes, the term can mean within an order of magnitude, preferably within 5-fold, and more preferably within 2-fold, of a value. Where particular values are described in the application and claims, unless otherwise stated the term “about” meaning within an acceptable error range for the particular value should be assumed.

[0817] The disclosure provides isolated or substantially purified polynucleotide or protein compositions. An “isolated” or “purified” polynucleotide or protein, or biologically active portion thereof, is substantially or essentially free from components that normally accompany or interact with the polynucleotide or protein as found in its naturally occurring environment. Thus, an isolated or purified polynucleotide or protein is substantially free of other cellular material or culture medium when produced by recombinant techniques, or substantially free of chemical precursors or other chemicals when chemically synthesized. Optimally, an “isolated” polynucleotide is free of sequences (optimally protein encoding sequences) that naturally flank the polynucleotide (i.e., sequences located at the 5′ and 3′ ends of the polynucleotide) in the genomic DNA of the organism from which the polynucleotide is derived. For example, in various embodiments, the isolated polynucleotide can contain less than about 5 kb, 4 kb, 3 kb, 2 kb, 1 kb, 0.5 kb, or 0.1 kb of nucleotide sequence that naturally flank the polynucleotide in genomic DNA of the cell from which the polynucleotide is derived. A protein that is substantially free of cellular material includes preparations of protein having less than about 30%, 20%, 10%, 5%, or 1% (by dry weight) of contaminating protein. When the protein of the disclosure or biologically active portion thereof is recombinantly produced, optimally culture medium represents less than about 30%, 20%, 10%, 5%, or 1% (by dry weight) of chemical precursors or non-protein-of-interest chemicals.

[0818] The disclosure provides fragments and variants of the disclosed DNA sequences and proteins encoded by these DNA sequences. As used throughout the disclosure, the term “fragment” refers to a portion of the DNA sequence or a portion of the amino acid sequence and hence protein encoded thereby. Fragments of a DNA sequence comprising coding sequences may encode protein fragments that retain biological activity of the native protein and hence DNA recognition or binding activity to a target DNA sequence as herein described. Alternatively, fragments of a DNA sequence that are useful as hybridization probes generally do not encode proteins that retain biological activity or do not retain promoter activity. Thus, fragments of a DNA sequence may range from at least about 20 nucleotides, about 50 nucleotides, about 100 nucleotides, and up to the full-length polynucleotide of the disclosure.

[0819] Nucleic acids or proteins of the disclosure can be constructed by a modular approach including preassembling monomer units and/or repeat units in target vectors that can subsequently be assembled into a final destination vector. Polypeptides of the disclosure may comprise repeat monomers of the disclosure and can be constructed by a modular approach by preassembling repeat units in target vectors that can subsequently be assembled into a final destination vector. The disclosure provides polypeptide produced by this method as well nucleic acid sequences encoding these polypeptides. The disclosure provides host organisms and cells comprising nucleic acid sequences encoding polypeptides produced this modular approach.

[0820] The term “antibody” is used in the broadest sense and specifically covers single monoclonal antibodies (including agonist and antagonist antibodies) and antibody compositions with polyepitopic specificity. It is also within the scope hereof to use natural or synthetic analogs, mutants, variants, alleles, homologs and orthologs (herein collectively referred to as “analogs”) of the antibodies hereof as defined herein. Thus, according to one embodiment hereof, the term “antibody hereof” in its broadest sense also covers such analogs. Generally, in such analogs, one or more amino acid residues may have been replaced, deleted and/or added, compared to the antibodies hereof as defined herein.

[0821] “Antibody fragment”, and all grammatical variants thereof, as used herein are defined as a portion of an intact antibody comprising the antigen binding site or variable region of the intact antibody, wherein the portion is free of the constant heavy chain domains (i.e. CH2, CH3, and CH4, depending on antibody isotype) of the Fc region of the intact antibody. Examples of antibody fragments include Fab, Fab′, Fab′-SH, F(ab′)₂, and Fv fragments; diabodies; any antibody fragment that is a polypeptide having a primary structure consisting of one uninterrupted sequence of contiguous amino acid residues (referred to herein as a “single-chain antibody fragment” or “single chain polypeptide”), including without limitation (1) single-chain Fv (scFv) molecules (2) single chain polypeptides containing only one light chain variable domain, or a fragment thereof that contains the three CDRs of the light chain variable domain, without an associated heavy chain moiety and (3) single chain polypeptides containing only one heavy chain variable region, or a fragment thereof containing the three CDRs of the heavy chain variable region, without an associated light chain moiety; and multispecific or multivalent structures formed from antibody fragments. In an antibody fragment comprising one or more heavy chains, the heavy chain(s) can contain any constant domain sequence (e.g. CHI in the IgG isotype) found in a non-Fc region of an intact antibody, and/or can contain any hinge region sequence found in an intact antibody, and/or can contain a leucine zipper sequence fused to or situated in the hinge region sequence or the constant domain sequence of the heavy chain(s). The term further includes single domain antibodies (“sdAB”) which generally refers to an antibody fragment having a single monomeric variable antibody domain, (for example, from camelids). Such antibody fragment types will be readily understood by a person having ordinary skill in the art.

[0822] “Binding” refers to a sequence-specific, non-covalent interaction between macromolecules (e.g., between a protein and a nucleic acid). Not all components of a binding interaction need be sequence-specific (e.g., contacts with phosphate residues in a DNA backbone), as long as the interaction as a whole is sequence-specific.

[0823] The term “comprising” is intended to mean that the compositions and methods include the recited elements, but do not exclude others. “Consisting essentially of” when used to define compositions and methods, shall mean excluding other elements of any essential significance to the combination when used for the intended purpose. Thus, a composition consisting essentially of the elements as defined herein would not exclude trace contaminants or inert carriers. “Consisting of shall mean excluding more than trace elements of other ingredients and substantial method steps. Embodiments defined by each of these transition terms are within the scope of this disclosure.

[0824] The term “epitope” refers to an antigenic determinant of a polypeptide. An epitope could comprise three amino acids in a spatial conformation, which is unique to the epitope. Generally, an epitope consists of at least 4, 5, 6, or 7 such amino acids, and more usually, consists of at least 8, 9, or 10 such amino acids. Methods of determining the spatial conformation of amino acids are known in the art, and include, for example, x-ray crystallography and two-dimensional nuclear magnetic resonance.

[0825] As used herein, “expression” refers to the process by which polynucleotides are transcribed into mRNA and/or the process by which the transcribed mRNA is subsequently being translated into peptides, polypeptides, or proteins. If the polynucleotide is derived from genomic DNA, expression may include splicing of the mRNA in a eukaryotic cell.

[0826] “Gene expression” refers to the conversion of the information, contained in a gene, into a gene product. A gene product can be the direct transcriptional product of a gene (e.g., mRNA, tRNA, rRNA, antisense RNA, ribozyme, shRNA, micro RNA, structural RNA or any other type of RNA) or a protein produced by translation of an mRNA. Gene products also include RNAs which are modified, by processes such as capping, polyadenylation, methylation, and editing, and proteins modified by, for example, methylation, acetylation, phosphorylation, ubiquitination, ADP-ribosylation, myristilation, and glycosylation.

[0827] “Modulation” or “regulation” of gene expression refers to a change in the activity of a gene. Modulation of expression can include, but is not limited to, gene activation and gene repression.

[0828] The term “operatively linked” or its equivalents (e.g., “linked operatively”) means two or more molecules are positioned with respect to each other such that they are capable of interacting to affect a function attributable to one or both molecules or a combination thereof.

[0829] Non-covalently linked components and methods of making and using non-covalently linked components, are disclosed. The various components may take a variety of different forms as described herein. For example, non-covalently linked (i.e., operatively linked) proteins may be used to allow temporary interactions that avoid one or more problems in the art. The ability of non-covalently linked components, such as proteins, to associate and dissociate enables a functional association only or primarily under circumstances where such association is needed for the desired activity. The linkage may be of duration sufficient to allow the desired effect.

[0830] A method for directing proteins to a specific locus in a genome of an organism is disclosed. The method may comprise the steps of providing a DNA localization component and providing an effector molecule, wherein the DNA localization component and the effector molecule are capable of operatively linking via a non-covalent linkage.

[0831] The term “scFv” refers to a single-chain variable fragment. scFv is a fusion protein of the variable regions of the heavy (VH) and light chains (VL) of immunoglobulins, connected with a linker peptide. The linker peptide may be from about 5 to 40 amino acids or from about 10 to 30 amino acids or about 5, 10, 15, 20, 25, 30, 35, or 40 amino acids in length. Single-chain variable fragments lack the constant Fc region found in complete antibody molecules, and, thus, the common binding sites (e.g., Protein G) used to purify antibodies. The term further includes a scFv that is an intrabody, an antibody that is stable in the cytoplasm of the cell, and which may bind to an intracellular protein.

[0832] The term “single domain antibody” means an antibody fragment having a single monomeric variable antibody domain which is able to bind selectively to a specific antigen. A single-domain antibody generally is a peptide chain of about 110 amino acids long, comprising one variable domain (VH) of a heavy-chain antibody, or of a common IgG, which generally have similar affinity to antigens as whole antibodies, but are more heat-resistant and stable towards detergents and high concentrations of urea. Examples are those derived from camelid or fish antibodies. Alternatively, single-domain antibodies can be made from common murine or human IgG with four chains.

[0833] The terms “specifically bind” and “specific binding” as used herein refer to the ability of an antibody, an antibody fragment or a nanobody to preferentially bind to a particular antigen that is present in a homogeneous mixture of different antigens. In certain embodiments, a specific binding interaction will discriminate between desirable and undesirable antigens in a sample. In certain embodiments more than about ten- to 100-fold or more (e.g., more than about 1000- or 10,000-fold). “Specificity” refers to the ability of an immunoglobulin or an immunoglobulin fragment, such as a nanobody, to bind preferentially to one antigenic target versus a different antigenic target and does not necessarily imply high affinity.

[0834] A “target site” or “target sequence” is a nucleic acid sequence that defines a portion of a nucleic acid to which a binding molecule will bind, provided sufficient conditions for binding exist.

[0835] The terms “nucleic acid” or “oligonucleotide” or “polynucleotide” refer to at least two nucleotides covalently linked together. The depiction of a single strand also defines the sequence of the complementary strand. Thus, a nucleic acid may also encompass the complementary strand of a depicted single strand. A nucleic acid of the disclosure also encompasses substantially identical nucleic acids and complements thereof that retain the same structure or encode for the same protein.

[0836] Probes of the disclosure may comprise a single stranded nucleic acid that can hybridize to a target sequence under stringent hybridization conditions. Thus, nucleic acids of the disclosure may refer to a probe that hybridizes under stringent hybridization conditions.

[0837] Nucleic acids of the disclosure may be single- or double-stranded. Nucleic acids of the disclosure may contain double-stranded sequences even when the majority of the molecule is single-stranded. Nucleic acids of the disclosure may contain single-stranded sequences even when the majority of the molecule is double-stranded. Nucleic acids of the disclosure may include genomic DNA, cDNA, RNA, or a hybrid thereof. Nucleic acids of the disclosure may contain combinations of deoxyribo- and ribo-nucleotides. Nucleic acids of the disclosure may contain combinations of bases including uracil, adenine, thymine, cytosine, guanine, inosine, xanthine hypoxanthine, isocytosine and isoguanine. Nucleic acids of the disclosure may be synthesized to comprise non-natural amino acid modifications. Nucleic acids of the disclosure may be obtained by chemical synthesis methods or by recombinant methods.

[0838] Nucleic acids of the disclosure, either their entire sequence, or any portion thereof, may be non-naturally occurring. Nucleic acids of the disclosure may contain one or more mutations, substitutions, deletions, or insertions that do not naturally-occur, rendering the entire nucleic acid sequence non-naturally occurring. Nucleic acids of the disclosure may contain one or more duplicated, inverted or repeated sequences, the resultant sequence of which does not naturally-occur, rendering the entire nucleic acid sequence non-naturally occurring. Nucleic acids of the disclosure may contain modified, artificial, or synthetic nucleotides that do not naturally-occur, rendering the entire nucleic acid sequence non-naturally occurring.

[0839] Given the redundancy in the genetic code, a plurality of nucleotide sequences may encode any particular protein. All such nucleotides sequences are contemplated herein.

[0840] As used throughout the disclosure, the term “operably linked” refers to the expression of a gene that is under the control of a promoter with which it is spatially connected. A promoter can be positioned 5′ (upstream) or 3′ (downstream) of a gene under its control. The distance between a promoter and a gene can be approximately the same as the distance between that promoter and the gene it controls in the gene from which the promoter is derived. Variation in the distance between a promoter and a gene can be accommodated without loss of promoter function.

[0841] As used throughout the disclosure, the term “promoter” refers to a synthetic or naturally-derived molecule which is capable of conferring, activating or enhancing expression of a nucleic acid in a cell. A promoter can comprise one or more specific transcriptional regulatory sequences to further enhance expression and/or to alter the spatial expression and/or temporal expression of same. A promoter can also comprise distal enhancer or repressor elements, which can be located as much as several thousand base pairs from the start site of transcription. A promoter can be derived from sources including viral, bacterial, fungal, plants, insects, and animals. A promoter can regulate the expression of a gene component constitutively or differentially with respect to cell, the tissue or organ in which expression occurs or, with respect to the developmental stage at which expression occurs, or in response to external stimuli such as physiological stresses, pathogens, metal ions, or inducing agents. Representative examples of promoters include the bacteriophage T7 promoter, bacteriophage T3 promoter, SP6 promoter, lac operator-promoter, tac promoter, SV40 late promoter, SV40 early promoter, RSV-LTR promoter, CMV IE promoter, EF-1 Alpha promoter, CAG promoter, SV40 early promoter or SV40 late promoter and the CMV IE promoter.

[0842] As used throughout the disclosure, the term “substantially complementary” refers to a first sequence that is at least 60%, 65%, 70%, 75%, 80%, 85%, 90%, 95%, 97%, 98% or 99% identical to the complement of a second sequence over a region of 8, 9, 10, 11, 12, 13, 14, 15, 16, 17, 18, 19, 20, 21, 22, 23, 24, 25, 30, 35, 40, 45, 50, 55, 60, 65, 70, 75, 80, 85, 90, 95, 100, 180, 270, 360, 450, 540, or more nucleotides or amino acids, or that the two sequences hybridize under stringent hybridization conditions.

[0843] As used throughout the disclosure, the term “substantially identical” refers to a first and second sequence are at least 60%, 65%, 70%, 75%, 80%, 85%, 90%, 95%, 97%, 98% or 99% identical over a region of 8, 9, 10, 11, 12, 13, 14, 15, 16, 17, 18, 19, 20, 21, 22, 23, 24, 25, 30, 35, 40, 45, 50, 55, 60, 65, 70, 75, 80, 85, 90, 95, 100, 180, 270, 360, 450, 540 or more nucleotides or amino acids, or with respect to nucleic acids, if the first sequence is substantially complementary to the complement of the second sequence.

[0844] As used throughout the disclosure, the term “variant” when used to describe a nucleic acid, refers to (i) a portion or fragment of a referenced nucleotide sequence: (ii) the complement of a referenced nucleotide sequence or portion thereof; (iii) a nucleic acid that is substantially identical to a referenced nucleic acid or the complement thereof; or (iv) a nucleic acid that hybridizes under stringent conditions to the referenced nucleic acid, complement thereof, or a sequences substantially identical thereto.

[0845] As used throughout the disclosure, the term “vector” refers to a nucleic acid sequence containing an origin of replication. A vector can be a viral vector, bacteriophage, bacterial artificial chromosome or yeast artificial chromosome. A vector can be a DNA or RNA vector. A vector can be a self-replicating extrachromosomal vector, and preferably, is a DNA plasmid. A vector may comprise a combination of an amino acid with a DNA sequence, an RNA sequence, or both a DNA and an RNA sequence.

[0846] As used throughout the disclosure, the term “variant” when used to describe a peptide or polypeptide, refers to a peptide or polypeptide that differs in amino acid sequence by the insertion, deletion, or conservative substitution of amino acids, but retain at least one biological activity. Variant can also mean a protein with an amino acid sequence that is substantially identical to a referenced protein with an amino acid sequence that retains at least one biological activity.

[0847] A conservative substitution of an amino acid, i.e., replacing an amino acid with a different amino acid of similar properties (e.g., hydrophilicity, degree and distribution of charged regions) is recognized in the art as typically involving a minor change. These minor changes can be identified, in part, by considering the hydropathic index of amino acids, as understood in the art. Kyte et al., J. Mol. Biol. 157: 105-132 (1982). The hydropathic index of an amino acid is based on a consideration of its hydrophobicity and charge. Amino acids of similar hydropathic indexes can be substituted and still retain protein function. In one aspect, amino acids having hydropathic indexes of +2 are substituted. The hydrophilicity of amino acids can also be used to reveal substitutions that would result in proteins retaining biological function. A consideration of the hydrophilicity of amino acids in the context of a peptide permits calculation of the greatest local average hydrophilicity of that peptide, a useful measure that has been reported to correlate well with antigenicity and immunogenicity. U.S. Pat. No. 4,554,101, incorporated fully herein by reference.

[0848] Substitution of amino acids having similar hydrophilicity values can result in peptides retaining biological activity, for example immunogenicity. Substitutions can be performed with amino acids having hydrophilicity values within +2 of each other. Both the hyrophobicity index and the hydrophilicity value of amino acids are influenced by the particular side chain of that amino acid. Consistent with that observation, amino acid substitutions that are compatible with biological function are understood to depend on the relative similarity of the amino acids, and particularly the side chains of those amino acids, as revealed by the hydrophobicity, hydrophilicity, charge, size, and other properties.

[0849] As used herein, “conservative” amino acid substitutions may be defined as set out in Tables A, B, or C below. In some embodiments, fusion polypeptides and/or nucleic acids encoding such fusion polypeptides include conservative substitutions have been introduced by modification of polynucleotides encoding polypeptides of the disclosure. Amino acids can be classified according to physical properties and contribution to secondary and tertiary protein structure. A conservative substitution is a substitution of one amino acid for another amino acid that has similar properties. Exemplary conservative substitutions are set out in Table A.

TABLE A
Conservative Substitutions I

| | |
|---|---|
| Side chain characteristics | Amino Acid |

| | | |
|---|---|---|
| Aliphatic | Non-polar | G A P I L V F |
| | Polar - uncharged | C S T M N Q |
| | Polar - charged | D E K R |

| | |
|---|---|
| Aromatic | H F W Y |
| Other | N Q D E |

[0850] Alternately, conservative amino acids can be grouped as described in Lehninger. (Biochemistry, Second Edition; Worth Publishers, Inc. NY, N.Y. (1975), pp. 71-77) as set forth in Table B.

TABLE B
Conservative Substitutions II

| | |
|---|---|
| Side Chain Characteristic | Amino Acid |

| | | |
|---|---|---|
| Non-polar (hydrophobic) | Aliphatic: | A L I V P |
| | Aromatic: | F W Y |
| | Sulfur-containing: | M |
| | Borderline: | G Y |
| Uncharged-polar | Hydroxyl: | S T Y |
| | Amides: | N Q |
| | Sulfhydryl: | C |
| | Borderline: | G Y |

| | |
|---|---|
| Positively Charged (Basic): | K R H |
| Negatively Charged (Acidic): | D E |

[0851] Alternately, exemplary conservative substitutions are set out in Table C.

TABLE C
Conservative Substitutions III

| Original Residue | Exemplary Substitution |
|---|---|
| Ala (A) | Val Leu Ile Met |
| Arg (R) | Lys His |
| Asn (N) | Gln |
| Asp (D) | Glu |
| Cys (C) | Ser Thr |
| Gln (Q) | Asn |
| Glu (E) | Asp |
| Gly (G) | Ala Val Leu Pro |
| His (H) | Lys Arg |
| Ile (I) | Leu Val Met Ala Phe |
| Leu (L) | Ile Val Met Ala Phe |
| Lys (K) | Arg His |
| Met (M) | Leu Ile Val Ala |
| Phe (F) | Trp Tyr Ile |
| Pro (P) | Gly Ala Val Leu Ile |
| Ser (S) | Thr |
| Thr (T) | Ser |
| Trp (W) | Tyr The Ile |
| Tyr (Y) | Trp Phe Thr Ser |
| Val (V) | Ile Leu Met Ala |

[0852] It should be understood that the polypeptides of the disclosure are intended to include polypeptides bearing one or more insertions, deletions, or substitutions, or any combination thereof, of amino acid residues as well as modifications other than insertions, deletions, or substitutions of amino acid residues. Polypeptides or nucleic acids of the disclosure may contain one or more conservative substitution.

[0853] As used throughout the disclosure, the term “more than one” of the aforementioned amino acid substitutions refers to 2, 3, 4, 5, 6, 7, 8, 9, 10, 11, 12, 13, 14, 15, 16, 17, 18, 19, or 20 or more of the recited amino acid substitutions. The term “more than one” may refer to 2, 3, 4, or 5 of the recited amino acid substitutions.

[0854] Polypeptides and proteins of the disclosure, either their entire sequence, or any portion thereof, may be non-naturally occurring. Polypeptides and proteins of the disclosure may contain one or more mutations, substitutions, deletions, or insertions that do not naturally-occur, rendering the entire amino acid sequence non-naturally occurring. Polypeptides and proteins of the disclosure may contain one or more duplicated, inverted or repeated sequences, the resultant sequence of which does not naturally-occur, rendering the entire amino acid sequence non-naturally occurring. Polypeptides and proteins of the disclosure may contain modified, artificial, or synthetic amino acids that do not naturally-occur, rendering the entire amino acid sequence non-naturally occurring.

[0855] As used throughout the disclosure, “sequence identity” may be determined by using the stand-alone executable BLAST engine program for blasting two sequences (bl2seq), which can be retrieved from the National Center for Biotechnology Information (NCBI) ftp site, using the default parameters (Tatusova and Madden, FEMS Microbiol Lett., 1999, 174, 247-250; which is incorporated herein by reference in its entirety). The terms “identical” or “identity” when used in the context of two or more nucleic acids or polypeptide sequences, refer to a specified percentage of residues that are the same over a specified region of each of the sequences. The percentage can be calculated by optimally aligning the two sequences, comparing the two sequences over the specified region, determining the number of positions at which the identical residue occurs in both sequences to yield the number of matched positions, dividing the number of matched positions by the total number of positions in the specified region, and multiplying the result by 100 to yield the percentage of sequence identity. In cases where the two sequences are of different lengths or the alignment produces one or more staggered ends and the specified region of comparison includes only a single sequence, the residues of single sequence are included in the denominator but not the numerator of the calculation. When comparing DNA and RNA, thymine (T) and uracil (U) can be considered equivalent. Identity can be performed manually or by using a computer sequence algorithm such as BLAST or BLAST 2.0.

[0856] As used throughout the disclosure, the term “endogenous” refers to nucleic acid or protein sequence naturally associated with a target gene or a host cell into which it is introduced.

[0857] As used throughout the disclosure, the term “exogenous” refers to nucleic acid or protein sequence not naturally associated with a target gene or a host cell into which it is introduced, including non-naturally occurring multiple copies of a naturally occurring nucleic acid, e.g., DNA sequence, or naturally occurring nucleic acid sequence located in a non-naturally occurring genome location.

[0858] The disclosure provides methods of introducing a polynucleotide construct comprising a DNA sequence into a host cell. By “introducing” is intended presenting to the plant the polynucleotide construct in such a manner that the construct gains access to the interior of the host cell. The methods of the disclosure do not depend on a particular method for introducing a polynucleotide construct into a host cell, only that the polynucleotide construct gains access to the interior of one cell of the host. Methods for introducing polynucleotide constructs into bacteria, plants, fungi and animals are known in the art including, but not limited to, stable transformation methods, transient transformation methods, and virus-mediated methods.

### Homologous Recombination

[0859] In certain embodiments of the methods of the disclosure, a modified CAR-T_{SCM} or CAR-T_{CM} of the disclosure is produced by introducing an antigen receptor into a primary human T cell of the disclosure by homologous recombination. In certain embodiments of the disclosure, the homologous recombination is induced by a single or double strand break induced by a genomic editing composition or construct of the disclosure. Homologous recombination methods of the disclosure comprise contacting a genomic editing composition or construct of the disclosure to a genomic sequence to induce at least one break in the sequence and to provide an entry point in the genomic sequence for an exogenous donor sequence composition. Donor sequence compositions of the disclosure are integrated into the genomic sequence at the induced entry point by the cell's native DNA repair machinery.

[0860] In certain embodiments of the methods of the disclosure, homologous recombination introduces a sequence encoding an antigen receptor and/or a donor sequence composition of the disclosure into a “genomic safe harbor” site. In certain embodiments, a mammalian genomic sequence comprises the genomic safe harbor site. In certain embodiments, a primate genomic sequence comprises the genomic safe harbor site. In certain embodiments, a human genomic sequence comprises the genomic safe harbor site.

[0861] Genomic safe harbor sites are able to accommodate the integration of new genetic material in a manner that ensures that the newly inserted genetic elements function reliably (for example, are expressed at a therapeutically effective level of expression) and do not cause deleterious alterations to the host genome that cause a risk to the host organism. Potential genomic safe harbors include, but are not limited to, intronic sequences of the human albumin gene, the adeno-associated virus site 1 (AAVS1), a naturally occurring site of integration of AAV virus on chromosome 19, the site of the chemokine (C-C motif) receptor 5 (CCR5) gene and the site of the human ortholog of the mouse Rosa26 locus.

[0862] In certain embodiments of the methods of the disclosure, homologous recombination introduces a sequence encoding an antigen receptor and/or a donor sequence composition of the disclosure into a sequence encoding one or more components of an endogenous T-cell receptor or a major histocompatibility complex (MHC). In certain embodiments, inducing homologous recombination within a genomic sequence encoding the endogenous T-cell receptor or the MHC disrupts the endogenous gene, and optionally, replaces part of the coding sequence of the endogenous gene with a donor sequence composition of the disclosure. In certain embodiments, inducing homologous recombination within a genomic sequence encoding the endogenous T-cell receptor or the MHC disrupts the endogenous gene, and optionally, replaces the entire coding sequence of the endogenous gene with a donor sequence composition of the disclosure. In certain embodiments of the methods of the disclosure, introduction of a sequence encoding an antigen receptor or a donor sequence composition of the disclosure by homologous recombination operably links the antigen receptor to an endogenous T cell promoter. In certain embodiments of the methods of the disclosure, introduction of a sequence encoding an antigen receptor or a donor sequence composition of the disclosure by homologous recombination operably links the antigen receptor or the therapeutic protein to a transcriptional or translational regulatory element. In certain embodiments of the methods of the disclosure, introduction of a sequence encoding an antigen receptor or a donor sequence composition of the disclosure by homologous recombination operably links the antigen receptor or the therapeutic protein to a transcriptional regulatory element. In certain embodiments, the transcriptional regulatory element comprises an endogenous T cell 5′ UTR.

[0863] In certain embodiments of the introduction step comprising a homologous recombination, a genomic editing composition contacts a genomic sequence of at least one primary T cell of the plurality of T cells. In certain embodiments of the introduction step comprising a homologous recombination, a genomic editing composition contacts a genomic sequence of a portion of primary T cells of the plurality of T cells. In certain embodiments, the portion of primary T cells is at least 1%, 2%, 5%, 7%, 10%, 15%, 20%, 25%, 30%, 35%, 40%, 45%, 50%, 55%, 60%, 65%, 70%, 75%, 80%, 85%, 90%, 95%, 97%, 99% or any percentage in between of the total number of primary T cells in the plurality of T cells. In certain embodiments of the introduction step comprising a homologous recombination, a genomic editing composition contacts a genomic sequence of each primary T cell of the plurality of T cells. In certain embodiments of the introduction step comprising a homologous recombination, a genomic editing composition induces a single strand break. In certain embodiments of the introduction step comprising a homologous recombination, a genomic editing composition induces a double strand break. In certain embodiments of the introduction step comprising a homologous recombination, the introduction step further comprises a donor sequence composition. In certain embodiments, the donor sequence composition comprises a sequence encoding the antigen receptor. In certain embodiments, the donor sequence composition comprises a sequence encoding the antigen receptor, a 5′ genomic sequence and a 3′ genomic sequence, wherein the 5′ genomic sequence is homologous or identical to a genomic sequence of the primary T cell that is 5′ to the break point induced by the genomic editing composition and the 3′ genomic sequence is homologous or identical to a genomic sequence of the primary T cell that is 3′ to the break point induced by the genomic editing composition. In certain embodiments, the 5′ genomic sequence and/or the 3′ genomic sequence comprises at least 50 bp, 100 bp, at least 200 bp, at least 300 bp, at least 400 bp, at least 500 bp, at least 600 bp, at least 700 bp, at least 800 bp, at least 900 bp, at least 1000 bp, at least 1100 bp, at least 1200 bp, at least 1300 bp, at least 1400, or at least 1500 bp, at least 1600 bp, at least 1700 bp, at least 1800 bp, at least 1900 bp, at least 2000 bp in length or any length of base pairs (bp) in between, inclusive of the end points. In certain embodiments of the introduction step comprising a homologous recombination, the genomic editing composition and donor sequence composition are contacted with the genomic sequence simultaneously or sequentially. In certain embodiments of the introduction step comprising a homologous recombination, the genomic editing composition and donor sequence composition are contacted with the genomic sequence sequentially, and the genomic editing composition is provided first. In certain embodiments of the introduction step comprising a homologous recombination, the genomic editing composition comprises a sequence encoding a DNA binding domain and a sequence encoding a nuclease domain. In certain embodiments of the introduction step comprising a homologous recombination, the genomic editing composition comprises a DNA binding domain and a nuclease domain. In certain embodiments of the genomic editing composition, the DNA binding domain comprises a guide RNA (gRNA). In certain embodiments of the genomic editing composition, the DNA binding domain comprises a DNA-binding domain of a TALEN. In certain embodiments of the genomic editing composition, the DNA binding domain comprises a DNA-binding domain of a ZFN. In certain embodiments of the genomic editing composition, the nuclease domain comprises a Cas9 nuclease or a sequence thereof. In certain embodiments of the genomic editing composition, the nuclease domain comprises an inactive Cas9 (SEQ ID NO: 17009, comprising a substitution of a Alanine (A) for Aspartic Acid (D) at position 10 (D10A) and a substitution of Alanine (A) for Histidine (H) at position 840 (H840A)). In certain embodiments of the genomic editing composition, the nuclease domain comprises a short and inactive Cas9 (SEQ ID NO: 17008, comprising a substitution of an Alanine (A) for an Aspartic Acid (D) at position 10 (D10A) and a substitution of an Alanine (A) for an Asparagine (N) at position 540 (N540A)). In certain embodiments of the genomic editing composition, the nuclease domain comprises or further comprises a type I1S endonuclease. In certain embodiments of the genomic editing composition, the type IIS endonuclease comprises AciI, MnlI, AlwI, BbvI, BccI, BceAI, BsmAI, BsmFI, BspCNI, BsrI, BtsCI, HgaI, HphI, HpyAV, MbolI, MylI, PleI, SfaNI, AcuI, BciVI, BfuAI, BmgBI, BmrI, BpmI, BpuEI, BsaI, BseRI, BsgI, BsmI, BspMI, BsrBI, BsrBI, BsrDI, BtgZI, BtsI, EarI, EciI, MmeI, NmeAIII, BbvCI, Bpu10I, BspQI, SapI, BaeI, BsaXI, CspCI, BfiI, MboII, Acc361, FokI or Clo051. In certain embodiments, the type IIS endonuclease comprises Clo051. In certain embodiments of the genomic editing composition, the nuclease domain comprises or further comprises a TALEN or a nuclease domain thereof. In certain embodiments of the genomic editing composition, the nuclease domain comprises or further comprises a ZFN or a nuclease domain thereof. In certain embodiments of the introduction step comprising a homologous recombination, the genomic editing composition induces a break in a genomic sequence and the donor sequence composition is inserted using the endogenous DNA repair mechanisms of the primary T cell. In certain embodiments of the introduction step comprising a homologous recombination, the insertion of the donor sequence composition eliminates a DNA binding site of the genomic editing composition, thereby preventing further activity of the genomic editing composition.

[0864] In certain embodiments of the methods of homologous recombination of the disclosure, the nuclease domain of a genomic editing composition or construct is capable of introducing a break at a defined location in a genomic sequence of the primary human T cell, and, furthermore, may comprise, consist essentially of or consist of, a homodimer or a heterodimer. In certain embodiments, the nuclease is an endonuclease. Effector molecules, including those effector molecules comprising a homodimer or a heterodimer, may comprise, consist essentially of or consist of, a Cas9, a Cas9 nuclease domain or a fragment thereof. In certain embodiments, the Cas9 is a catalytically inactive or “inactivated” Cas9 (dCas9). In certain embodiments, the Cas9 is a catalytically inactive or “inactivated” nuclease domain of Cas9. In certain embodiments, the dCas9 is encoded by a shorter sequence that is derived from a full length, catalytically inactivated, Cas9, referred to herein as a “small” dCas9 or dSaCas9.

[0865] In certain embodiments, the inactivated, small, Cas9 (dSaCas9) operatively-linked to an active nuclease. In certain embodiments, the disclosure provides a fusion protein comprising, consisting essentially of or consisting of a DNA binding domain and molecule nuclease, wherein the nuclease comprises a small, inactivated Cas9 (dSaCas9). In certain embodiments, the dSaCas9 of the disclosure comprises the mutations D10A and N580A (underlined and bolded) which inactivate the catalytic site. In certain embodiments, the dSaCas9 of the disclosure comprises the amino acid sequence of:

(SEQ ID NO: 17008)

| | |
|---|---|
| 1 | MRPNYILGLA IGITSVGYGI IDYETRDVID AGVRLFKEAN |
| | VENNEGRRSK RGARRLKRRR |
| 61 | RHRIQRVKKL LFDYNLLTDH SELSGINPYE ARVKGLSQKL |
| | SEEEFSAALL HLAKRRGVHN |
| 121 | VNEVEEDTGN ELSTKEQISR NSKALEEKYV AELQLERLKK |
| | DGEVRGSINR FKTSDYVKEA |
| 181 | KQLLKVQKAY HQLDQSFIDT YIDIIETRRT YYEGPGEGSP |
| | FGWKDIKEWY EMLNIGHCTYF |
| 241 | PEELRSVKYA YNADLYNALN DLNNLVITRD ENEKLEYYEK |
| | FQIIENVFKQ KKKPTLKQIA |
| 301 | KEILVNEEDI KGYRVTSTGK PEFTNLKVYE DIKDITARKE |
| | IIENAELLDQ IAKILTIYQS |
| 361 | SEDIQEELTN LNSELTQEEI EQISNLKGYT GTHNLSLKAI |
| | NLILDELWHT NDNQIAIFNR |
| 421 | LKLVPKKVDL SQQKEIPTTL VDDFILSPVV KRSFIQSIKV |
| | INAIIKKYGL PNDIIIELAR |
| 481 | EKNSKDAQKM INEMQKRNRQ TNERIEEIIR TTGKENAKYL |
| | IEKIKLHDMQ EGKCLYSLEA |
| 541 | IPLEDLLNNP ENYEVDHIIP RSVSEDNSEN NKVLVKQEEA |
| | SKKGNRTPFQ YLSSSDSKIS |
| 601 | YETFKKHILN LAKGKGRISK TKKEYLLEER DINRFSVQKD |
| | FINRHLVDTR YATRGLMNLL |
| 661 | RSYFRVNNLD VKVKSINGGF TSFLRRKWKF KKERNKGYKE |
| | HAEDALIIAN ADFIFKEWKK |
| 721 | LDKAKKVMEN QMFEEKQAES MPEIETEQEY KEIFITPHQI |
| | KHIKDFKDYK YSHRVDKKPN |
| 781 | RELINDTLYS TRKDDKGNTL IVNNLNGLYD KDNDKLKKLI |
| | NKSPEKLLMY HHDPQTYQKL |
| 841 | KLIMEQYGDE KNPLYKYYEE TGNYLTKYSK KDNGPVIKKI |
| | KYYGNKLNAH LDITDDYPNS |
| 901 | RNKVVKLSLK PYRFDVYLDN GVYKFVTVKN LDVIKKENYY |
| | EVNSKCYEEA KKLKKISKA |
| 961 | EFIASFYNND LIKINGELYR VIGVNNULLN RIEVNMIDIT |
| | YREYIENMND KRPPRIIKTI |
| 1021 | ASKTQSIKKY STDILGNLYE VKSKKHPQII KKG. |

[0866] In certain embodiments, the dCas9 of the disclosure comprises a dCas9 isolated or derived from Staphyloccocus pyogenes. In certain embodiments, the dCas9 comprises a dCas9 with substitutions at positions 10 and 840 of the amino acid sequence of the dCas9 which inactivate the catalytic site. In certain embodiments, these substitutions are D10A and H840A. In certain embodiments, the amino acid sequence of the dCas9 comprises the sequence of:

(SEQ ID NO: 17009)

| | |
|---|---|
| 1 | XDKKYSIGLA IGTNSVGWAV ITDEYKVPSK KFKVLGNTDR |
| | HSIKKNLIGA LLFDSGETAE |
| 61 | ATRLKRTARR RYTRRKNRIC YLQEIFSNEM AKVDDSFFER |
| | LEESFLVEED KKHERHPIFG |
| 121 | NIVDEVAYHE KYPTIYHLRK KLVDSTDKAD LRLIYLALAH |
| | MIKFRGHFLI EGDLNPDNSD |
| 181 | VDKLFIQLVQ TYNQLFEENP INASGVDAKA ILSARLSKSR |
| | RLENLIAQLP GEKKNGLFGN |
| 241 | LIALSLGLTP NFKSNFDLAE DAKLQLSKDT YDDDLDNLLA |
| | QIGDQYADLF LAAKNLSDAI |
| 301 | LLSDILRVNT EITKAPLSAS MIKRYDEHHQ DLTLLKALVR |
| | QQPLEKYKEI FFDQSKNGYA |
| 361 | GYIDGGASQE EFYKFIKPIL EKMDGTEELL VKLNREDLLR |
| | KQRTFDNGSI PHQIHLGELH |
| 421 | AILRRQEDFY PFLKDNREKI EKILTFRIPY YVGPLARGNS |
| | RFAWMTRKSE ETITPWNFEE |
| 481 | VVDKGASAQS FIERMTNFDK NLPNEKVLPK HSLLYEYFTV |
| | YNELTKVKYV TEGMRKPAFL |
| 541 | SGEQKKAIVD LLFKTNRKVT VKQLKEDYFK KIECFDSVEI |
| | SGVEDRFNAS LGTYHDLLKI |
| 601 | IKDKDFLDNE ENEDILEDIV LTLTLFEDRE MIEERLKTYA |
| | HLFDDKVMKQ LKRRRYTGWG |
| 661 | RLSRKLINGI RDKQSGKTIL DFLKSDGEAN RNEMQLIHDD |
| | SLTFKEDIQK AQVSGOGDSL |
| 721 | HEHIANLAGS PAIKKGILQT VKVVDELVKV MGRHKPENIV |
| | IEMARENQTT QKGQKNSRER |
| 781 | MKRIEEGIKE LGSQILKEHP VENTQLQNEK LYLYYLONGR |
| | DMYVDQELDI NRLSDYDVDA |
| 841 | IVPQSFLKDD SIDNKVLTRS DKNRGKSDNV PSEEVVKKMK |
| | NYWRQLLNAK LITQRKFDNL |
| 901 | TKAERGGLSE LDKAGFIKRQ LVETRQITKH VAQILDSRMN |
| | TKYDENDKLI REVKVITLKS |
| 961 | KLVSDFRKDF QFYKVREINN YHHAHDAYLN AVVGTALIKK |
| | YPKLESEFVY GDYKVYDVRK |
| 1021 | MIAKSEQEIG KATAKYFFYS NIMNFFKTEI TLANGEIRKR |
| | PLIETNGETG EIVWDKGRDF |
| 1081 | ATVRKVLSMP QVNIVKKTEV QTGGFSKESI LPKPNSDKLI |
| | ARKKDWDPKK YGGFDSPTVA |
| 1141 | YSVLVVAKVE KGKSKKLKSV KELLGITIME RSSFEKNPID |
| | FLEAKGYKEV KKDLIIKLPK |
| 1201 | YSLFELENGR KRMLASAGEL QKGNELALPS KYVNFLYLAS |
| | HYEKLKGSPE DNEQKQLFVE |
| 1261 | OHKHIIDEII EOISEFSKRV ILADANLDKV LSAYNKERDK |
| | PIREQAENII HLFTLTNLGA |
| 1321 | PAAFKYFDTT IDRKRYTSTK EVLDATLIHQ SITGLYETRI |
| | DLSQLGGD. |

[0867] In certain embodiments of the disclosure, the nuclease domain may comprise, consist essentially of or consist of a dCas9 or a dSaCas9 and a type IIS endonuclease. In certain embodiments of the disclosure, the nuclease domain may comprise, consist essentially of or consist of a dSaCas9 and a type 11S endonuclease, including, but not limited to, AciI, Mn1I, AlwI, BbvI, BccI, BceAI, BsmAI, BsmFI, BspCNI, BsrI, BtsCI, HgaI, HphI, HpyAV, Mbo1I, My1I, PleI, SfaNI, AcuI, BciVI, BMuAI, BmgBI, BmrI, BpmI, BpuEI, BsaI, BseRI, BsgI, BsmI, BspMI, BsrBI, BsrBI, BsrDI, BtgZI, BtsI, EarI, EciI, MmeI, NmeAIII, BbvCI, Bpu10I, BspQI, SapI, BaeI, BsaXI, CspCI, BfiI, MboII, Acc36I, FokI or Clo051. In certain embodiments of the disclosure, the nuclease domain may comprise, consist essentially of or consist of a dSaCas9 and Clo051. An exemplary Clo51 nuclease domain may comprise, consist essentially of or consist of, the amino acid sequence of:

(SEQ ID NO: 17010)
EGIKSNISLLKDELRGQISHISHEYLSLIDLAFDSKQNRLFEMKVLELLVN
EYGFKGRHLGGSRKPDGIVYSTTLEDNFGIIVDTKAYSEGYSLPISQADEM
ERYVRENSNRDEEVNPNKWWENFSEEVKKYYFVFISGSFKGKFEEQLRRLS
MTTGVNGSAVNVVNLLLGAEKIRSGEMTIEELERAMFNNSEFILKY.

[0868] An exemplary dCas9-Clo051 nuclease domain may comprise, consist essentially of or consist of, the amino acid sequence of (Clo051 sequence underlined, linker bold italics, dCas9 sequence in italics):

(SEQ ID NO: 17011)
MAPKKKRKVEGISKSNISLLKDELRGQISHISHEYLSLIDLAFDSKQNRLF
EMKVLELLVNEYGFKGRHLGGSRKPDGIVYSTTLEDNFGIIVDTKAYSEGY
SLPISQADEMERYVRENSNRDEEVNPNKWWENFSEEVKKYYFVFISGSFKG
KFEEQLRRLSMTTGVNGSAVNVVNLLLGAEKIRSGEMTIEELERAMFNNSE
FILKY DKKYSIGLAIGTNSVGWAVITDEYKVPSKKFKVLGNTDRHS
IKKNLIGALLFDSGETAEATRLKRTARRRYTRRKNRICYLQEIFSNEMAKV
DDSFFHRLEESFLVEEDKKHERHPIFGNIVDEVAYHEKYPTIYHLRKKLVD
STDKADLRLIYLALAHMIKFRGHFLIEGDLNPDNSDVDFLFIQLVQTYNQL
FEENPINASGVDAKAILSARLSKSRRLENLIAQLPGEKKNGLFGNLIALSL
GLTPNFKSNFDLAEDAKLQLSKDTYDDDLDNLLAQIGDQYADLFLAAKNLS
DAILLSDILRVNTEITKAPLSASMIKRYDEHHQDLTLLKALVRQQLPEKYK
EIFFDQSKNGYAGYIDGGASQEEFYKFIKPILEKMDGTEELLVKLNREDLL
RKQRTFDNGSIPHQIHLGELHAILRRQEDFYPFLKDNREKIEKILTFRIPY
YVGPLARGNSRFAWMTRKSEETITPWNFEEVVDKGASAQSFIERMTNFDKN
LPNEKVLPKHSLLYEYFTVYNELTKVKYVTEGMRKPAFLSGEQKKAIVDLL
FKTNRKVTVKQLKEDYFKKIECFDSVEISGVEDRFNASLGTYHDLLKIIKD
KDFLDNEENEDILEDIVLTLTLFEDREMIEERLKTYAHLFDDKVMKQLKRR
RYTGWGRLSRKLINGIRDKQSGKTILDFLKSDGFANRNFMQLIHDDSLTFK
EDIQKAQVSGQGDSLHEHIANLAGSPAIKKGILQTVKVVDELVKVMGRHKP
ENIVIEMARENQTTQKGQKNSRERMKRIEEGIKELGSQILKEHPVENTQLQ
NEKLYLYYLQNGRDMYVDQELDINRLSDYDVDAIVPQSFLKDDSIDNKVLT
RSDKNRGKSDNVFSEEVVKKMKNYWRQLLNAKLITQRKFDNLTKAERGGLS
ELDKAGFIKRQLVETRQITKHVAQILDSRMNTKYDENDKLIREVKVITLKS
KLVSDFRKDFQFYKVREINNYHHAHDAYLNAVVGTALIKKYPKLESEFVYG
DYKVYDVRKMIAKSEQEIGKATAKYFFYSNIMNFFKTEITLANGEIRKRPL
IETNGETGEIVWDKGRDFATVRKVLSMPQVNIVKKTEVQTGGFSKESILPK
RNSDKLIARKKDWDPKKYGGFDSPTVAYSVLVVAKVEKGKSKKLKSVKELL
GITIMERSSFEKNPIDFLEAKGYKEVKKDLIIKLPKYSLFELENGRKRMLA
SAGELQKGNELALPSKYVNFLYLASHYEKLKGSPEDNEQKQLFVEQHKHYL
DEIIEQISEFSKRVILADANLDKVLSAYNKHRDKPIREQAENIIHLFTLTN
LGAPAAFKYFDTTIDRKRYTSTKEVLDATLIHQSITGLYETRIDLSQLGGD
GSPKKKRKVSS.

[0869] In certain embodiments, the nuclease capable of introducing a break at a defined location in the genomic DNA of the primary human T cell may comprise, consist essentially of or consist of, a homodimer or a heterodimer. Nuclease domains of the genomic editing compositions or constructs of the disclosure may comprise, consist essentially of or consist of a nuclease domain isolated, derived or recombined from a transcription-activator-like effector nuclease (TALEN). TALENs are transcription factors with programmable DNA binding domains that provide a means to create designer proteins that bind to pre-determined DNA sequences or individual nucleic acids. Modular DNA binding domains have been identified in transcriptional activator-like (TAL) proteins, or, more specifically, transcriptional activator-like effector nucleases (TALENs), thereby allowing for the de novo creation of synthetic transcription factors that bind to DNA sequences of interest and, if desirable, also allowing a second domain present on the protein or polypeptide to perform an activity related to DNA. TAL proteins have been derived from the organisms Xanthomonas and Ralstonia.

[0870] In certain embodiments of the disclosure, the nuclease domain of the genomic editing composition or construct may comprise, consist essentially of or consist of a nuclease domain isolated, derived or recombined from a TALEN and a type IIS endonuclease. In certain embodiments of the disclosure, the type IIS endonuclease may comprise, consist essentially of or consist of AciI, Mn1I, AlwI, BbvI, BccI, BceAI, BsmAI, BsmFI, BspCNI, BsrI, BtsCI, HgaI, HphI, HpyAV, Mbo1I, My1I, PleI, SfaNI, AcuI, BciVI, BfuAI, BmgBI, BmrI, BpmI, BpuEI, BsaI, BseRI, BsgI, BsmI, BspMI, BsrBI, BsrBI, BsrDI, BtgZI, BtsI, EarI, EciI, MmeI, NmeAIII, BbvCI, Bpu10I, BspQI, SapI, BaeI, BsaXI, CspCI, BfiI, MboII, Acc36I, FokI or Clo051. In certain embodiments of the disclosure, the type IIS endonuclease may comprise, consist essentially of or consist of Clo051 (SEQ ID NO: 17010).

[0871] In certain embodiments of the disclosure, the nuclease domain of the genomic editing composition or construct may comprise, consist essentially of or consist of a nuclease domain isolated, derived or recombined from a zinc finger nuclease (ZFN) and a type I1S endonuclease. In certain embodiments of the disclosure, the type IIS endonuclease may comprise, consist essentially of or consist of AciI, Mn1I, AlwI, BbvI, BccI, BceAI, BsmAI, BsmFI, BspCNI, BsrI, BtsCI, HgaI, HphI, HpyAV, Mbo1I, My1I, PleI, SfaNI, AcuI, BciVI, BfuAI, BmgBI, BmrI, BpmI, BpuEI, BsaI, BseRI, BsgI, BsmI, BspMI, BsrBI, BsrBI, BsrDI, BtgZI, BtsI, EarI, EciI, MmeI, NmeAIII, BbvCI, Bpu10I, BspQI, SapI, BaeI, BsaXI, CspCI, BfiI, Mbo1I, Acc36I, FokI or Clo051. In certain embodiments of the disclosure, the type IIS endonuclease may comprise, consist essentially of or consist of Clo051 (SEQ ID NO: 17010).

[0872] In certain embodiments of the genomic editing compositions or constructs of the disclosure, the DNA binding domain and the nuclease domain may be covalently linked. For example, a fusion protein may comprise the DNA binding domain and the nuclease domain. In certain embodiments of the genomic editing compositions or constructs of the disclosure, the DNA binding domain and the nuclease domain may be operably linked through a non-covalent linkage.

### Non-Transposition Based Methods of Modification

[0873] In some embodiments of the methods of the disclosure, a modified HSC or modified HSC descendent cell of the disclosure may be produced by introducing a transgene into an HSC or an HSC descendent cell of the disclosure. The introducing step may comprise delivery of a nucleic acid sequence and/or a genomic editing construct via a non-transposition delivery system.

[0874] In some embodiments of the methods of the disclosure, introducing a nucleic acid sequence and/or a genomic editing construct into an HSC or HSC descendent cell ex vivo, in vivo, in vitro or in situ comprises one or more of topical delivery, adsorption, absorption, electroporation, spin-fection, co-culture, transfection, mechanical delivery, sonic delivery, vibrational delivery, magnetofection or by nanoparticle-mediated delivery. In some embodiments of the methods of the disclosure, introducing a nucleic acid sequence and/or a genomic editing construct into an HSC or HSC descendent cell ex vivo, in vivo, in vitro or in situ comprises liposomal transfection, calcium phosphate transfection, fugene transfection, and dendrimer-mediated transfection. In some embodiments of the methods of the disclosure, introducing a nucleic acid sequence and/or a genomic editing construct into an HSC or HSC descendent cell ex vivo, in vivo, in vitro or in situ by mechanical transfection comprises cell squeezing, cell bombardment, or gene gun techniques. In some embodiments of the methods of the disclosure, introducing a nucleic acid sequence and/or a genomic editing construct into an HSC or HSC descendent cell ex vivo, in vivo, in vitro or in situ by nanoparticle-mediated transfection comprises liposomal delivery, delivery by micelles, and delivery by polymerosomes.

[0875] In some embodiments of the methods of the disclosure, introducing a nucleic acid sequence and/or a genomic editing construct into an HSC or HSC descendent cell ex vivo, in vivo, in vitro or in situ comprises a non-viral vector. In some embodiments, the non-viral vector comprises a nucleic acid. In some embodiments, the non-viral vector comprises plasmid DNA, linear double-stranded DNA (dsDNA), linear single-stranded DNA (ssDNA), DoggyBone™ DNA, nanoplasmids, minicircle DNA, single-stranded oligodeoxynucleotides (ssODN), DDNA oligonucleotides, single-stranded mRNA (ssRNA), and double-stranded mRNA (dsRNA). In some embodiments, the non-viral vector comprises a transposon of the disclosure.

[0876] In some embodiments of the methods of the disclosure, introducing a nucleic acid sequence and/or a genomic editing construct into an HSC or HSC descendent cell ex vivo, in vivo, in vitro or in situ comprises a viral vector. In some embodiments, the viral vector is a non-integrating non-chromosomal vector. Exemplary non-integrating non-chromosomal vectors include, but are not limited to, adeno-associated virus (AAV), adenovirus, and herpes viruses. In some embodiments, the viral vector is an integrating chromosomal vector. Integrating chromosomal vectors include, but are not limited to, adeno-associated vectors (AAV). Lentiviruses, and gamma-retroviruses.

[0877] In some embodiments of the methods of the disclosure, introducing a nucleic acid sequence and/or a genomic editing construct into an HSC or HSC descendent cell ex vivo, in vivo, in vitro or in situ comprises a combination of vectors. Exemplary, non-limiting vector combinations include: viral and non-viral vectors, a plurality of non-viral vectors, or a plurality of viral vectors. Exemplary but non-limiting vectors combinations include: a combination of a DNA-derived and an RNA-derived vector, a combination of an RNA and a reverse transcriptase, a combination of a transposon and a transposase, a combination of a non-viral vector and an endonuclease, and a combination of a viral vector and an endonuclease.

[0878] In some embodiments of the methods of the disclosure, genome modification comprising introducing a nucleic acid sequence and/or a genomic editing construct into an HSC or HSC descendent cell ex vivo, in vivo, in vitro or in situ stably integrates a nucleic acid sequence, transiently integrates a nucleic acid sequence, produces site-specific integration a nucleic acid sequence, or produces a biased integration of a nucleic acid sequence. In some embodiments, the nucleic acid sequence is a transgene.

[0879] In some embodiments of the methods of the disclosure, genome modification comprising introducing a nucleic acid sequence and/or a genomic editing construct into an HSC or HSC descendent cell ex vivo, in vivo, in vitro or in situ stably integrates a nucleic acid sequence. In some embodiments, the stable chromosomal integration can be a random integration, a site-specific integration, or a biased integration. In some embodiments, the site-specific integration can be non-assisted or assisted. In some embodiments, the assisted site-specific integration is co-delivered with a site-directed nuclease. In some embodiments, the site-directed nuclease comprises a transgene with 5′ and 3′ nucleotide sequence extensions that contain a percentage homology to upstream and downstream regions of the site of genomic integration. In some embodiments, the transgene with homologous nucleotide extensions enable genomic integration by homologous recombination, microhomology-mediated end joining, or nonhomologous end-joining. In some embodiments the site-specific integration occurs at a safe harbor site. Genomic safe harbor sites are able to accommodate the integration of new genetic material in a manner that ensures that the newly inserted genetic elements function reliably (for example, are expressed at a therapeutically effective level of expression) and do not cause deleterious alterations to the host genome that cause a risk to the host organism. Potential genomic safe harbors include, but are not limited to, intronic sequences of the human albumin gene, the adeno-associated virus site 1 (AAVS1), a naturally occurring site of integration of AAV virus on chromosome 19, the site of the chemokine (C-C motif) receptor 5 (CCR5) gene and the site of the human ortholog of the mouse Rosa26 locus.

[0880] In some embodiments, the site-specific transgene integration occurs at a site that disrupts expression of a target gene. In some embodiments, disruption of target gene expression occurs by site-specific integration at introns, exons, promoters, genetic elements, enhancers, suppressors, start codons, stop codons, and response elements. In some embodiments, exemplary target genes targeted by site-specific integration include but are not limited to TRAC, TRAB, PDI, any immunosuppressive gene, and genes involved in allo-rejection.

[0881] In some embodiments, the site-specific transgene integration occurs at a site that results in enhanced expression of a target gene. In some embodiments, enhancement of target gene expression occurs by site-specific integration at introns, exons, promoters, genetic elements, enhancers, suppressors, start codons, stop codons, and response elements.

[0882] In some embodiments of the methods of the disclosure, enzymes may be used to create strand breaks in the host genome to facilitate delivery or integration of the transgene. In some embodiments, enzymes create single-strand breaks. In some embodiments, enzymes create double-strand breaks. In some embodiments, examples of break-inducing enzymes include but are not limited to: transposases, integrases, endonucleases, CRISPR-Cas9, transcription activator-like effector nucleases (TALEN), zinc finger nucleases (ZFN), Cas-CLOVER™, and CPF1. In some embodiments, break-inducing enzymes can be delivered to the cell encoded in DNA, encoded in mRNA, as a protein, as a nucleoprotein complex with a guide RNA (gRNA).

[0883] In some embodiments of the methods of the disclosure, the site-specific transgene integration is controlled by a vector-mediated integration site bias. In some embodiments vector-mediated integration site bias is controlled by the chosen lentiviral vector. In some embodiments vector-mediated integration site bias is controlled by the chosen gamma-retroviral vector.

[0884] In some embodiments of the methods of the disclosure, the site-specific transgene integration site is a non-stable chromosomal insertion. In some embodiments, the integrated transgene may become silenced, removed, excised, or further modified.

[0885] In some embodiments of the methods of the disclosure, the genome modification is a non-stable integration of a transgene. In some embodiments, the non-stable integration can be a transient non-chromosomal integration, a semi-stable non chromosomal integration, a semi-persistent non-chromosomal insertion, or a non-stable chromosomal insertion. In some embodiments, the transient non-chromosomal insertion can be epi-chromosomal or cytoplasmic.

[0886] In some embodiments, the transient non-chromosomal insertion of a transgene does not integrate into a chromosome and the modified genetic material is not replicated during cell division.

[0887] In some embodiments of the methods of the disclosure, the genome modification is a semi-stable or persistent non-chromosomal integration of a transgene. In some embodiments, a DNA vector encodes a Scaffold/matrix attachment region (S-MAR) module that binds to nuclear matrix proteins for episomal retention of a non-viral vector allowing for autonomous replication in the nucleus of dividing cells.

[0888] In some embodiments of the methods of the disclosure, the genome modification is a non-stable chromosomal integration of a transgene. In some embodiments, the integrated transgene may become silenced, removed, excised, or further modified.

[0889] In some embodiments of the methods of the disclosure, the modification to the genome by transgene insertion can occur via host cell-directed double-strand breakage repair (homology-directed repair) by homologous recombination (HR), microhomology-mediated end joining (MMEJ), nonhomologous end joining (NHEJ), transposase enzyme-mediated modification, integrase enzyme-mediated modification, endonuclease enzyme-mediated modification, or recombinant enzyme-mediated modification. In some embodiments, the modification to the genome by transgene insertion can occur via CRISPR-Cas9, TALEN, ZFNs, Cas-CLOVER, and cpf1.

### Nanoparticle Delivery

[0890] Poly(histidine) (i.e., poly(L-histidine)), is a pH-sensitive polymer due to the imidazole ring providing an electron lone pair on the unsaturated nitrogen. That is, poly(histidine) has amphoteric properties through protonation-deprotonation. The various embodiments enable intracellular delivery of gene editing tools by complexing with poly(histidine)-based micelles. In particular, the various embodiments provide triblock copolymers made of a hydrophilic block, a hydrophobic block, and a charged block. In some embodiments, the hydrophilic block may be poly(ethylene oxide) (PEO), and the charged block may be poly(L-histidine). An example tri-block copolymer that may be used in various embodiments is a PEO-b-PLA-b-PHIS, with variable numbers of repeating units in each block varying by design. The gene editing tools may be various molecules that are recognized as capable of modifying, repairing, adding and/or silencing genes in various cells. The correct and efficient repair of double-strand breaks (DSBs) in DNA is critical to maintaining genome stability in cells. Structural damage to DNA may occur randomly and unpredictably in the genome due to any of a number of intracellular factors (e.g., nucleases, reactive oxygen species, etc.) as well as external forces (e.g., ionizing radiation, ultraviolet (UV) radiation, etc.). In particular, correct and efficient repair of double-strand breaks (DSBs) in DNA is critical to maintaining genome stability. Accordingly, cells naturally possess a number of DNA repair mechanisms, which can be leveraged to alter DNA sequences through controlled DSBs at specific sites. Genetic modification tools may therefore be composed of programmable, sequence-specific DNA-binding modules associated with a nonspecific DNA nuclease, introducing DSBs into the genome. For example CRISPR, mostly found in bacteria, are loci containing short direct repeats, and are part of the acquired prokaryotic immune system, conferring resistance to exogenous sequences such as plasmids and phages. RNA-guided endonucleases are programmable genetic engineering tools that are adapted from the CRISPR/CRISPR-associated protein 9 (Cas9) system, which is a component of prokaryotic innate immunity.

[0891] Diblock copolymers that may be used as intermediates for making triblock copolymers of the embodiment micelles may have hydrophilic biocompatible poly(ethylene oxide) (PEO), which is chemically synonymous with PEG, coupled to various hydrophobic aliphatic poly(anhydrides), poly(nucleic acids), poly(esters), poly(ortho esters), poly(peptides), poly(phosphazenes) and poly(saccharides), including but not limited by poly(lactide) (PLA), poly(glycolide) (PLGA), poly(lactic-co-glycolic acid) (PLGA), poly(ε-caprolactone) (PCL), and poly (trimethylene carbonate) (PTMC). Polymeric micelles comprised of 100% PEGylated surfaces possess improved in vitro chemical stability, augmented in vivo bioavailablity, and prolonged blood circulatory half-lives. For example, aliphatic polyesters, constituting the polymeric micelle's membrane portions, are degraded by hydrolysis of their ester linkages in physiological conditions such as in the human body. Because of their biodegradable nature, aliphatic polyesters have received a great deal of attention for use as implantable biomaterials in drug delivery devices, bioresorbable sutures, adhesion barriers, and as scaffolds for injury repair via tissue engineering.

[0892] In various embodiments, molecules required for gene editing (i.e., gene editing tools) may be delivered to cells using one or more micelle formed from self-assembled triblock copolymers containing poly(histidine). The term “gene editing” as used herein refers to the insertion, deletion or replacement of nucleic acids in genomic DNA so as to add, disrupt or modify the function of the product that is encoded by a gene. Various gene editing systems require, at a minimum, the introduction of a cutting enzyme (e.g., a nuclease or recombinase) that cuts genomic DNA to disrupt or activate gene function.

[0893] Further, in gene editing systems that involve inserting new or existing nucleotides/nucleic acids, insertion tools (e.g. DNA template vectors, transposable elements (transposons or retrotransposons) must be delivered to the cell in addition to the cutting enzyme (e.g. a nuclease, recombinase, integrase or transposase). Examples of such insertion tools for a recombinase may include a DNA vector. Other gene editing systems require the delivery of an integrase along with an insertion vector, a transposase along with a transposon/retrotransposon, etc. In some embodiments, an example recombinase that may be used as a cutting enzyme is the CRE recombinase. In various embodiments, example integrases that may be used in insertion tools include viral based enzymes taken from any of a number of viruses including, but not limited to, AAV, gamma retrovirus, and lentivirus. Example transposons/retrotransposons that may be used in insertion tools include, but are not limited to, the piggyBac® transposon, Sleeping Beauty transposon, and the L1 retrotransposon.

[0894] In certain embodiments of the methods of the disclosure, the transgene is delivered in vivo. In certain embodiments of the methods of the disclosure, in vivo transgene delivery can occur by: topical delivery, adsorption, absorption, electroporation, spin-fection, co-culture, transfection, mechanical delivery, sonic delivery, vibrational delivery, magnetofection or by nanoparticle-mediated delivery. In certain embodiments of the methods of the disclosure, in vivo transgene delivery by transfection can occur by liposomal transfection, calcium phosphate transfection, fugene transfection, and dendrimer-mediated transfection. In certain embodiments of the methods of the disclosure, in vivo mechanical transgene delivery can occur by cell squeezing, bombardment, and gene gun. In certain embodiments of the methods of the disclosure, in vivo nanoparticle-mediated transgene delivery can occur by liposomal delivery, delivery by micelles, and delivery by polymerosomes. In various embodiments, nucleases that may be used as cutting enzymes include, but are not limited to. Cas9, transcription activator-like effector nucleases (TALENs) and zinc finger nucleases.

[0895] In various embodiments, the gene editing systems described herein, particularly proteins and/or nucleic acids, may be complexed with nanoparticles that are poly(histidine)-based micelles. In particular, at certain pHs, poly(histidine)-containing triblock copolymers may assemble into a micelle with positively charged poly(histidine) units on the surface, thereby enabling complexing with the negatively-charged gene editing molecule(s). Using these nanoparticles to bind and release proteins and/or nucleic acids in a pH-dependent manner may provide an efficient and selective mechanism to perform a desired gene modification. In particular, this micelle-based delivery system provides substantial flexibility with respect to the charged materials, as well as a large payload capacity, and targeted release of the nanoparticle payload. In one example, site-specific cleavage of the double stranded DNA may be enabled by delivery of a nuclease using the poly(histidine)-based micelles.

[0896] The various embodiments enable intracellular delivery of gene editing tools by complexing with poly(histidine)-based micelles. In particular, the various embodiments provide triblock copolymers made of a hydrophilic block, a hydrophobic block, and a charged block. In some embodiments, the hydrophilic block may be poly(ethylene oxide) (PEO), and the charged block may be poly(L-histidine). An example tri-block copolymer that may be used in various embodiments is a PEO-b-PLA-b-PHIS, with variable numbers of repeating units in each block varying by design. Without wishing to be bound by a particular theory, it is believed that believed that in the micelles that are formed by the various embodiment triblock copolymers, the hydrophobic blocks aggregate to form a core, leaving the hydrophilic blocks and poly(histidine) blocks on the ends to form one or more surrounding layer.

[0897] In certain embodiments of the methods of the disclosure, non-viral vectors are used for transgene delivery. In certain embodiments, the non-viral vector is a nucleic acid. In certain embodiments, the nucleic acid non-viral vector is plasmid DNA, linear double-stranded DNA (dsDNA), linear single-stranded DNA (ssDNA), DoggyBone™ DNA, nanoplasmids, minicircle DNA, single-stranded oligodeoxynucleotides (ssODN), DDNA oligonucleotides, single-stranded mRNA (ssRNA), and double-stranded mRNA (dsRNA). In certain embodiments, the non-viral vector is a transposon. In certain embodiments, the transposon is piggyBac®.

[0898] In certain embodiments of the methods of the disclosure, transgene delivery can occur via viral vector. In certain embodiments, the viral vector is a non-integrating non-chromosomal vectors. Non-integrating non-chromosomal vectors can include adeno-associated virus (AAV), adenovirus, and herpes viruses. In certain embodiments, the viral vector is an integrating chromosomal vectors. Integrating chromosomal vectors can include adeno-associated vectors (AAV), Lentiviruses, and gamma-retroviruses.

[0899] In certain embodiments of the methods of the disclosure, transgene delivery can occur by a combination of vectors. Exemplary but non-limiting vector combinations can include: viral plus non-viral vectors, more than one non-viral vector, or more than one viral vector. Exemplary but non-limiting vectors combinations can include: DNA-derived plus RNA-derived vectors, RNA plus reverse transcriptase, a transposon and a transposase, a non-viral vectors plus an endonuclease, and a viral vector plus an endonuclease.

[0900] In certain embodiments of the methods of the disclosure, the genome modification can be a stable integration of a transgene, a transient integration of a transgene, a site-specific integration of a transgene, or a biased integration of a transgene.

[0901] In certain embodiments of the methods of the disclosure, the genome modification can be a stable chromosomal integration of a transgene. In certain embodiments, the stable chromosomal integration can be a random integration, a site-specific integration, or a biased integration. In certain embodiments, the site-specific integration can be non-assisted or assisted. In certain embodiments, the assisted site-specific integration is co-delivered with a site-directed nuclease. In certain embodiments, the site-directed nuclease comprises a transgene with 5′ and 3′ nucleotide sequence extensions that contain homology to upstream and downstream regions of the site of genomic integration. In certain embodiments, the transgene with homologous nucleotide extensions enable genomic integration by homologous recombination, microhomology-mediated end joining, or nonhomologous end-joining. In certain embodiments the site-specific integration occurs at a safe harbor site. Genomic safe harbor sites are able to accommodate the integration of new genetic material in a manner that ensures that the newly inserted genetic elements function reliably (for example, are expressed at a therapeutically effective level of expression) and do not cause deleterious alterations to the host genome that cause a risk to the host organism. Potential genomic safe harbors include, but are not limited to, intronic sequences of the human albumin gene, the adeno-associated virus site 1 (AAVS1), a naturally occurring site of integration of AAV virus on chromosome 19, the site of the chemokine (C-C motif) receptor 5 (CCR5) gene and the site of the human ortholog of the mouse Rosa26 locus.

[0902] In certain embodiments, the site-specific transgene integration occurs at a site that disrupts expression of a target gene. In certain embodiments, disruption of target gene expression occurs by site-specific integration at introns, exons, promoters, genetic elements, enhancers, suppressors, start codons, stop codons, and response elements. In certain embodiments, exemplary target genes targeted by site-specific integration include but are not limited to TRAC, TRAB, PDI, any immunosuppressive gene, and genes involved in allo-rejection.

[0903] In certain embodiments, the site-specific transgene integration occurs at a site that results in enhanced expression of a target gene. In certain embodiments, enhancement of target gene expression occurs by site-specific integration at introns, exons, promoters, genetic elements, enhancers, suppressors, start codons, stop codons, and response elements.

[0904] In certain embodiments of the methods of the disclosure, enzymes may be used to create strand breaks in the host genome to facilitate delivery or integration of the transgene. In certain embodiments, enzymes create single-strand breaks. In certain embodiments, enzymes create double-strand breaks. In certain embodiments, examples of break-inducing enzymes include but are not limited to: transposases, integrases, endonucleases, CRISPR-Cas9, transcription activator-like effector nucleases (TALEN), zinc finger nucleases (ZFN), Cas-CLOVER™, and cpf1. In certain embodiments, break-inducing enzymes can be delivered to the cell encoded in DNA, encoded in mRNA, as a protein, as a nucleoprotein complex with a guide RNA (gRNA).

[0905] In certain embodiments of the methods of the disclosure, the site-specific transgene integration is controlled by a vector-mediated integration site bias. In certain embodiments vector-mediated integration site bias is controlled by the chosen lentiviral vector. In certain embodiments vector-mediated integration site bias is controlled by the chosen gamma-retroviral vector.

[0906] In certain embodiments of the methods of the disclosure, the site-specific transgene integration site is a non-stable chromosomal insertion. In certain embodiments, the integrated transgene may become silenced, removed, excised, or further modified. In certain embodiments of the methods of the disclosure, the genome modification is a non-stable integration of a transgene. In certain embodiments, the non-stable integration can be a transient non-chromosomal integration, a semi-stable non chromosomal integration, a semi-persistent non-chromosomal insertion, or a non-stable chromosomal insertion. In certain embodiments, the transient non-chromosomal insertion can be epi-chromosomal or cytoplasmic. In certain embodiments, the transient non-chromosomal insertion of a transgene does not integrate into a chromosome and the modified genetic material is not replicated during cell division.

[0907] In certain embodiments of the methods of the disclosure, the genome modification is a semi-stable or persistent non-chromosomal integration of a transgene. In certain embodiments, a DNA vector encodes a Scaffold/matrix attachment region (S-MAR) module that binds to nuclear matrix proteins for episomal retention of a non-viral vector allowing for autonomous replication in the nucleus of dividing cells.

[0908] In certain embodiments of the methods of the disclosure, the genome modification is a non-stable chromosomal integration of a transgene. In certain embodiments, the integrated transgene may become silenced, removed, excised, or further modified.

[0909] In certain embodiments of the methods of the disclosure, the modification to the genome by transgene insertion can occur via host cell-directed double-strand breakage repair (homology-directed repair) by homologous recombination (HR), microhomology-mediated end joining (MMEJ), nonhomologous end joining (NHEJ), transposase enzyme-mediated modification, integrase enzyme-mediated modification, endonuclease enzyme-mediated modification, or recombinant enzyme-mediated modification. In certain embodiments, the modification to the genome by transgene insertion can occur via CRISPR-Cas9, TALEN, ZFNs, Cas-CLOVER, and cpf1.

[0910] In certain embodiments of the methods of the disclosure, a cell with an in vivo or ex vivo genomic modification can be a germline cell or a somatic cell. In certain embodiments the modified cell can be a human, non-human, mammalian, rat, mouse, or dog cell. In certain embodiments, the modified cell can be differentiated, undifferentiated, or immortalized. In certain embodiments, the modified undifferentiated cell can be a stem cell. In certain embodiments, the modified cell can be differentiated, undifferentiated, or immortalized. In certain embodiments, the modified undifferentiated cell can be an induced pluripotent stem cell. In certain embodiments, the modified cell can be a T cell, a hematopoietic stem cell, a natural killer cell, a macrophage, a dendritic cell, a monocyte, a megakaryocyte, or an osteoclast. In certain embodiments, the modified cell can be modified while the cell is quiescent, in an activated state, resting, in interphase, in prophase, in metaphase, in anaphase, or in telophase. In certain embodiments, the modified cell can be fresh, cryopreserved, bulk, sorted into sub-populations, from whole blood, from leukapheresis, or from an immortalized cell line.

### Other Embodiments

[0911] While particular embodiments of the disclosure have been illustrated and described, various other changes and modifications can be made without departing from the spirit and scope of the disclosure. The scope of the appended claims includes all such changes and modifications that are within the scope of this disclosure.

The application's sequence listing, which the Patent Office published only in electronic form, follows.

SEQUENCE LISTING (17137 sequences)

SEQ ID NO: 1 - protein, 306 aa, Homo Sapiens
LTCQAHLETPDFQLFKNGVAQEPVHLDSPAIKHQFLLTGDTQGRYRCRSGLSTGWTQLSKLLELTGPKSLPAPWLSMAPVSWITPGLKTTAVCRGVLRGVTFLLRREGDHEFLEVPEAQEDVEATFPVHQPGNYSCSYRTDGEGALSEPSATVTIEELGPGPGSWPHGCLGLMVAKEFGQRMPKEWKAAPPPPVLMHHGESSQVLHPGNKVTLTCVAPLSGVDFQLRRGEKELLVPRSSTSPDRIFFHLNAVALGDGGHYTCRYRLHDNQNGWSGDSAPVELILSDETLPAPEFSPEPESGRALRL

SEQ ID NO: 2 - protein, 495 aa, Homo Sapiens
MSMLVVFLLLWGVTWGPVTEAAIFYETQPSLWAESESLLKPLANVTLTCQAHLETPDFQLFKNGVAQEPVHLDSPAIKHQFLLTGDTQGRYRCRSGLSTGWTQLSKLLELTGPKSLPAPWLSMAPVSWITPGLKTTAVCRGVLRGVTFLLRREGDHEFLEVPEAQEDVEATFPVHQPGNYSCSYRTDGEGALSEPSATVTIEELAAPPPPVLMHHGESSQVLHPGNKVTLTCVAPLSGVDFQLRRGEKELLVPRSSTSPDRIFFHLNAVALGDGGHYTCRYRLHDNQNGWSGDSAPVELILSDETLPAPEFSPEPESGRALRLRCLAPLEGARFALVREDRGGRRVHRFQSPAGTEALFELHNISVADSANYSCVYVDLKPPFGGSAPSERLELHVDGPPPRPQLRATWSGAVLAGRDAVLRCEGPIPDVTFELLREGETKAVKTVRTPGAAANLELIFVGPQHAGNYRCRYRSWVPHTFESELSDPVELLVAES

SEQ ID NO: 3 - protein, 90 aa, Homo Sapiens
MGKNKLLHPSLVLLLLVLLPTDASVSGKPQYMVLVPSLLHTETTEKGCVLLSYLNETVTVSASLESVRGNRSLFTDLEAENDVLHCVAFA

SEQ ID NO: 4 - protein, 168 aa, Homo Sapiens
MGKNKLLHPSLVLLLLVLLPTDASVSGKPQYMVLVPSLLHTETTEKGCVLLSYLNETVTVSASLESVRGNRSLFTDLEAENDVLHCVAFAVPKSSSNEEVMFLTVQVKGPTQEFKKRTTVMVKNEDSLVFVQTDKSIYKPGQTVKFRVVSMDENFHPLNELIPLVYIQ

SEQ ID NO: 5 - protein, 1474 aa, Homo Sapiens
MGKNKLLHPSLVLLLLVLLPTDASVSGKPQYMVLVPSLLHTETTEKGCVLLSYLNETVTVSASLESVRGNRSLFTDLEAENDVLHCVAFAVPKSSSNEEVMFLTVQVKGPTQEFKKRTTVMVKNEDSLVFVQTDKSIYKPGQTVKFRVVSMDENFHPLNELIPLVYIQDPKGNRIAQWQSFQLEGGLKQFSFPLSSEPFQGSYKVVVQKKSGGRTEHPFTVEEFVLPKFEVQVTVPKIITILEEEMNVSVCGLYTYGKPVPGHVTVSICRKYSDASDCHGEDSQAFCEKFSGQLNSHGCFYQQVKTKVFQLKRKEYEMKLHTEAQIQEEGTVVELTGRQSSEITRTITKLSFVKVDSHFRQGIPFFGQVRLVDGKGVPIPNKVIFIRGNEANYYSNATTDEHGLVQFSINTTNVMGTSLTVRVNYKDRSPCYGYQWVSEEHEEAHHTAYLVFSPSKSFVHLEPMSHELPCGHTQTVQAHYILNGGTLLGLKKLSFYYLIMAKGGIVRTGTHGLLVKQEDMKGHFSISIPVKSDIAPVARLLIYAVLPTGDVIGDSAKYDVENCLANKVDLSFSPSQSLPASHAHLRVTAAPQSVCALRAVDQSVLLMKPDAELSASSVYNLLPEKDLTGFPGPLNDQDNEDCINRHNVYINGITYTPVSSTNEKDMYSFLEDMGLKAFTNSKIRKPKMCPQLQQYEMHGPEGLRVGFYESDVMGRGHARLVHVEEPHTETVRKYFPETWIWDLVVVNSAGVAEVGVTVPDTITEWKAGAFCLSEDAGLGISSTASLRAFQPFFVELTMPYSVIRGEAFTLKATVLNYLPKCIRVSVQLEASPAFLAVPVEKEQAPHCICANGRQTVSWAVTPKSLGNVNFTVSAEALESQELCGTEVPSVPEHGRKDTVIKPLLVEPEGLEKETTFNSLLCPSGGEVSEELSLKLPPNVVEESARASVSVLGDILGSAMQNTQNLLQMPYGCGEQNMVLFAPNIYVLDYLNETQQLTPEIKSKAIGYLNTGYQRQLNYKHYDGSYSTFGERYGRNQGNTWLTAFVLKTFAQARAYIFIDEAHITQALIWLSQRQKDNGCFRSSGSLLNNAIKGGVEDEVTLSAYITIALLEIPLTVTHPVVRNALFCLESAWKTAQEGDHGSHVYTKALLAYAFALAGNQDKRKEVLKSLNEEAVKKDNSVHWERPQKPKAPVGHFYEPQAPSAEVEMTSYVLLAYLTAQPAPTSEDLTSATNIVKWITKQQNAQGGFSSTQDTVVALHALSKYGAATFTRTGKAAQVTIQSSGTFSSKFQVDNNNRLLLQQVSLPELPGEYSMKVTGEGCVYLQTSLKYNILPEKEEFPFALGVQTLPQTCDEPKAHTSFQISLSVSYTGSRSASNMAIVDVKMVSGFIPLKPTVKMLERSNHVSRTEVSSNHVLIYLDKVSNQTLSLFFTVLQDVPVRDLKPAIVKVYDYYETDEFAIAEYNAPCSKDLGNA

SEQ ID NO: 6 - protein, 73 aa, Homo Sapiens
NGGTLLGLKKLSFYYLIMAKGGIVRTGTHGLLVKQEDMKGHFSISIPVKSDIAPVARFTTCYQKRTSLASLGL

SEQ ID NO: 7 - protein, 183 aa, Homo Sapiens
MLGELIGKGSLVMEGQKHLNSKKKGLKASFSLSLTFTSRLAPDPSLVIYAIFPSGGVVADKIQFSVEMCFDNQVSLGFSPSQQLPGAEVELQLQAAPGSLCALRAVDESVLLLRPDRELSNRSVYGMFPFWYGHYPYQVAEYDQCPVSGPWDFPQPLIDPMPQGHSSQRSIIWRPSFSEGTDL

SEQ ID NO: 8 - protein, 963 aa, Homo Sapiens
MLIGKGSLVMEGQKHLNSKKKGLKASFSLSLTFTSRLAPDPSLVIYAIFPSGGVVADKIQFSVEMCFDNQVSLGFSPSQQLPGAEVELQLQAAPGSLCALRAVDESVLLLRPDRELSNRSVYGMFPFWYGHYPYQVAEYDQCPVSGPWDFPQPLIDPMPQGHSSQRSIIWRPSFSEGTDLFSFFRDVGLKILSNAKIKKPVDCSHRSPEYSTAMGAGGGHPEAFESSTPLHQAEDSQVRQYFPETWLWDLFPIGNSGKEAVHVTVPDAITEWKAMSFCTSQSRGFGLSPTVGLTAFKPFFVDLTLPYSVVRGESFRLTATIFNYLKDCIRVQTDLAKSHEYQLESWADSQTSSCLCADDAKTHHWNITAVKLGHINFTISTKILDSNEPCGGQKGFVPQKGRSDTLIKPVLVKPEGVLVEKTHSSLLCPKGKVASESVSLELPVDIVPDSTKAYVTVLGDIMGTALQNLDGLVQMPSGCGEQNMVLFAPIIYVLQYLEKAGLLTEEIRSRAVGFLEIGYQKELMYKHSNGSYSAFGERDGNGNTWLTAFVTKCFGQAQKFIFIDPKNIQDALKWMAGNQLPSGCYANVGNLLHTAMKGGVDDEVSLTAYVTAALLEMGKDVDDPMVSQGLRCLKNSATSTTNLYTQALLAYIFSLAGEMDIRNILLKQLDQQAIISGESIYWSQKPTPSSNASPWSEPAAVDVELTAYALLAQLTKPSLTQKEIAKATSIVAWLAKQHNAYGGFSSTQDTVVALQALAKYATTAYMPSEEINLVVKSTENFQRTFNIQSVNRLVFQQDTLPNVPGMYTLEASGQGCVYVQTVLRYNILPPTNMKTFSLSVEIGKARCEQPTSPRSLTLTIHTSYVGSRSSSNMAIVEVKMLSGFSPMEGTNQLLLQQPLVKKVEFGTDTLNIYLDELIKNTQTYTFTISQSVLVTNLKPATIKVYDYYLPDEQATIQYSDPCE

SEQ ID NO: 9 - protein, 81 aa, Homo Sapiens
MVRNNFYAVRLLPSTCVVLSQTSNCRRSHQDPLAASCICQASGCWLIGKGSLVMEGQKHLNSKKKGLKASFSLSLTFTSRL

SEQ ID NO: 10 - protein, 1454 aa, Homo Sapiens
MWAQLLLGMLALSPAIAEELPNYLVTLPARLNFPSVQKVCLDLSPGYSDVKFTVTLETKDKTQKLLEYSGLKKRHLHCISFLVPPPAGGTEEVATIRVSGVGNNISFEEKKKVLIQRQGNGTFVQTDKPLYTPGQQVYFRIVTMDSNFVPVNDKYSMVELQDPNSNRIAQWLEVVPEQGIVDLSFQLAPEAMLGTYTVAVAEGKTFGTFSVEEYVLPKFKVEVVEPKELSTVQESFLVKICCRYTYGKPMLGAVQVSVCQKANTYWYREVEREQLPDKCRNLSGQTDKTGCFSAPVDMATFDLIGYAYSHQINIVATVVEEGTGVEANATQNIYISPQMGSMTFEDTSNFYHPNFPFSGKIRVRGHDDSFLKNHLVFLVIYGTNGTFNQTLVTDNNGLAPFTLETSGWNGTDVSLEGKFQMEDLVYNPEQVPRYYQNAYLHLRPFYSTTRSFLGIHRLNGPLKCGQPQEVLVDYYIDPADASPDQEISFSYYLIGKGSLVMEGQKHLNSKKKGLKASFSLSLTFTSRLAPDPSLVIYAIFPSGGVVADKIQFSVEMCFDNQVSLGFSPSQQLPGAEVELQLQAAPGSLCALRAVDESVLLLRPDRELSNRSVYGMFPFWYGHYPYQVAEYDQCPVSGPWDFPQPLIDPMPQGHSSQRSIIWRPSFSEGTDLFSFFRDVGLKILSNAKIKKPVDCSHRSPEYSTAMGAGGGHPEAFESSTPLHQAEDSQVRQYFPETWLWDLFPIGNSGKEAVHVTVPDAITEWKAMSFCTSQSRGFGLSPTVGLTAFKPFFVDLTLPYSVVRGESFRLTATIFNYLKDCIRVQTDLAKSHEYQLESWADSQTSSCLCADDAKTHHWNITAVKLGHINFTISTKILDSNEPCGGQKGFVPQKGRSDTLIKPVLVKPEGVLVEKTHSSLLCPKGKVASESVSLELPVDIVPDSTKAYVTVLGDIMGTALQNLDGLVQMPSGCGEQNMVLFAPIIYVLQYLEKAGLLTEEIRSRAVGFLEIGYQKELMYKHSNGSYSAFGERDGNGNTWLTAFVTKCFGQAQKFIFIDPKNIQDALKWMAGNQLPSGCYANVGNLLHTAMKGGVDDEVSLTAYVTAALLEMGKDVDDPMVSQGLRCLKNSATSTTNLYTQALLAYIFSLAGEMDIRNILLKQLDQQAIISGESIYWSQKPTPSSNASPWSEPAAVDVELTAYALLAQLTKPSLTQKEIAKATSIVAWLAKQHNAYGGFSSTQDTVVALQALAKYATTAYMPSEEINLVVKSTENFQRTFNIQSVNRLVFQQDTLPNVPGMYTLEASGQGCVYVQTVLRYNILPPTNMKTFSLSVEIGKARCEQPTSPRSLTLTIHTSYVGSRSSSNMAIVEVKMLSGFSPMEGTNQLLLQQPLVKKVEFGTDTLNIYLDELIKNTQTYTFTISQSVLVTNLKPATIKVYDYYLPDEQATIQYSDPCE

SEQ ID NO: 11 - protein, 1004 aa, Homo Sapiens
SFLGIHRLNGPLKCGQPQEVLVDYYIDPADASPDQEISFSYYLIGKGSLVMEGQKHLNSKKKGLKASFSLSLTFTSRLAPDPSLVIYAIFPSGGVVADKIQFSVEMCFDNQVSLGFSPSQQLPGAEVELQLQAAPGSLCALRAVDESVLLLRPDRELSNRSVYGMFPFWYGHYPYQVAEYDQCPVSGPWDFPQPLIDPMPQGHSSQRSIIWRPSFSEGTDLFSFFRDVGLKILSNAKIKKPVDCSHRSPEYSTAMGAGGGHPEAFESSTPLHQAEDSQVRQYFPETWLWDLFPIGNSGKEAVHVTVPDAITEWKAMSFCTSQSRGFGLSPTVGLTAFKPFFVDLTLPYSVVRGESFRLTATIFNYLKDCIRVQTDLAKSHEYQLESWADSQTSSCLCADDAKTHHWNITAVKLGHINFTISTKILDSNEPCGGQKGFVPQKGRSDTLIKPVLVKPEGVLVEKTHSSLLCPKGKVASESVSLELPVDIVPDSTKAYVTVLGDIMGTALQNLDGLVQMPSGCGEQNMVLFAPIIYVLQYLEKAGLLTEEIRSRAVGFLEIGYQKELMYKHSNGSYSAFGERDGNGNTWLTAFVTKCFGQAQKFIFIDPKNIQDALKWMAGNQLPSGCYANVGNLLHTAMKGGVDDEVSLTAYVTAALLEMGKDVDDPMVSQGLRCLKNSATSTTNLYTQALLAYIFSLAGEMDIRNILLKQLDQQAIISGESIYWSQKPTPSSNASPWSEPAAVDVELTAYALLAQLTKPSLTQKEIAKATSIVAWLAKQHNAYGGFSSTQDTVVALQALAKYATTAYMPSEEINLVVKSTENFQRTFNIQSVNRLVFQQDTLPNVPGMYTLEASGQGCVYVQTVLRYNILPPTNMKTFSLSVEIGKARCEQPTSPRSLTLTIHTSYVGSRSSSNMAIVEVKMLSGFSPMEGTNQLLLQQPLVKKVEFGTDTLNIYLDELIKNTQTYTFTISQSVLVTNLKPATIKVYDYYLPDEQATIQYSDPCE

SEQ ID NO: 12 - protein, 182 aa, Homo Sapiens
  misc_feature (1)..(1): Xaa can be any naturally occurring amino acid
XRTFNIQSVNRLVFQQDTLPNVPGMYTLEASGQGCVYVQTVLRYNILPPTNMKTFSLSVEIGKARCEQPTSPRSLTLTIHTSYVGSRSSSNMAIVEVKMLSGFSPMEGTNQLLLQQPLVKKVEFGTDTLNIYLDELIKNTQTYTFTISQSVLVTNLKPATIKVYDYYLPDEQATIQYSDPCE

SEQ ID NO: 13 - protein, 340 aa, Homo Sapiens
MRKELQLSLSVTLLLVCGFLYQFTLKSSCLFCLPSFKSHQGLEALLSHRRGIVFLETSERMEPPHLVSCSVESAAKIYPEWPVVFFMKGLTDSTPMPSNSTYPAFSFLSAIDNVFLFPLDMKRLLEDTPLFSWYNQINASAERNWLHISSDASRLAIIWKYGGIYMDTDVISIRPIPEENFLAAQASRYSSNGIFGFLPHHPFLWECMENFVEHYNSAIWGNQGPELMTRMLRVWCKLEDFQEVSDLRCLNISFLHPQRFYPISYREWRRYYEVWDTEPSFNVSYALHLWNHMNQEGRAVIRGSNTLVENLYRKHCPRTYRDLIKGPEGSVTGELGPGNK

SEQ ID NO: 14 - protein, 401 aa, Homo Sapiens
MGLKALCLGLLCVLFVSHFYTPMPDNIEESWKIMALDAIAKTCTFTAMCFENMRIMRYEEFISMIFRLDYTQPLSDEYITVTDTTFVDIPVRLYLPKRKSETRRRAVIYFHGGGFCFGSSKQRAFDFLNRWTANTLDAVVVGVDYRLAPQHHFPAQFEDGLAAVKFFLLEKILTKYGVDPTRICIAGDSSGGNLATAVTQQVQNDAEIKHKIKMQVLLYPGLQITDSYLPSHRENEHGIVLTRDVAIKLVSLYFTKDEALPWAMRRNQHMPLESRHLFKFVNWSILLPEKYRKDYVYTEPILGGLSYSLPGLTDSRALPLLANDSQLQNLPLTYILTCQHDLLRDDGLMYVTRLRNVGVQVVHEHIEDGIHGALSFMTSPFYLRLGLRIRDMYVSWLDKNL

SEQ ID NO: 15 - protein, 53 aa, Homo Sapiens
MGLKALCLGLLCVLFVSHFYTPMPDNIEESWKIMALDAIAKTCTFTNRGLLTS

SEQ ID NO: 16 - protein, 252 aa, Homo Sapiens
MEPQSMKGQKRPFGGPWRLKVLGGPPWLRRTLPKLGRPKEAPVARMSTQSTHPLKPEAPRLPPGIPESPSCQRRHTLPASEFRCLTPEDAVSAFEIEREAFISVLGVCPLYLDEIRHFLTLCPELSLGWFEEGCLVAFIIGSLWDKERLMQESLTLHRSGGHIAHLHVLAVHRAFRQQGRGPILLWRYLHHLGSQPAVRRAALMCEDALVPFYERFSFHAVGPCAITVGSLTFMELHCSLRGHPFLRRNSGC

SEQ ID NO: 17 - protein, 152 aa, Homo Sapiens [sequence omitted]

SEQ ID NO: 18 - protein, 207 aa, Homo Sapiens
MSTQSTHPLKPEAPRLPPGIPESPSCQRRHTLPASEFRCLTPEDAVSAFEIEREAFISVLGVCPLYLDEIRHFLTLCPELSLGWFEEGCLVAFIIGSLWDKERLMQESLTLHRSGGHIAHLHVLAVHRAFRQQGRGPILLWRYLHHLGSQPAVRRAALMCEDALVPFYERFSFHAVGPCAITVGSLTFMELHCSLRGHPFLRRNSGC

SEQ ID NO: 19 - protein, 92 aa, Homo Sapiens
MSTQSTHPLKPEAPRLPPGIPESPSCQRRHTLPASEFRCLTPEDAVSAFEIEREDSGREAQRLPVTHLSLLPQPSSPSWASAPCTWMRSGTS

SEQ ID NO: 20 - protein, 257 aa, Homo Sapiens
MACLMAAFSVGTAMNASSYSAEMTEPKSVCVSVDEVVSSNMEATETDLLNGHLKKVDNNLTEAQRFSSLPRRAAVNIEFRDLSYSVPEGPWWRKKGYKTLLKGISGKFNSGELVAIMGPSGAGKSTLMNILAGYRETGMKGAVLINGLPRDLRCFRKVSCYIMQDDMLLPHLTVQEAMMVKEILTALGLLSCANTRTGSLSGGQRKRLAIALELVNNPPVMFFDEPTSGLDSASCFQVVSLMKGLAQGGRSIICTIH

SEQ ID NO: 21 - protein, 678 aa, Homo Sapiens
MACLMAAFSVGTAMNASSYSAEMTEPKSVCVSVDEVVSSNMEATETDLLNGHLKKVDNNLTEAQRFSSLPRRAAVNIEFRDLSYSVPEGPWWRKKGYKTLLKGISGKFNSGELVAIMGPSGAGKSTLMNILAGYRETGMKGAVLINGLPRDLRCFRKVSCYIMQDDMLLPHLTVQEAMMVSAHLKLQEKDEGRREMVKEILTALGLLSCANTRTGSLSGGQRKRLAIALELVNNPPVMFFDEPTSGLDSASCFQVVSLMKGLAQGGRSIICTIHQPSAKLFELFDQLYVLSQGQCVYRGKVCNLVPYLRDLGLNCPTYHNPADFVMEVASGEYGDQNSRLVRAVREGMCDSDHKRDLGGDAEVNPFLWHRPSEEVKQTKRLKGLRKDSSSMEGCHSFSASCLTQFCILFKRTFLSIMRDSVLTHLRITSHIGIGLLIGLLYLGIGNEAKKVLSNSGFLFFSMLFLMFAALMPTVLTFPLEMGVFLREHLNYWYSLKAYYLAKTMADVPFQIMFPVAYCSIVYWMTSQPSDAVRFVLFAALGTMTSLVAQSLGLLIGAASTSLQVATFVGPVTAIPVLLFSGFFVSFDTIPTYLQWMSYISYVRYGFEGVILSIYGLDREDLHCDIDETCHFQKSEAILRELDVENAKLYLDFIVLGIFFISLRLIAYFVLRYKIRAER

SEQ ID NO: 22 - protein, 666 aa, Homo Sapiens
MACLMAAFSVGTAMNASSYSAEMTEPKSVCVSVDEVVSSNMEATETDLLNGHLKKVDNNLTEAQRFSSLPRRAAVNIEFRDLSYSVPEGPWWRKKGYKTLLKGISGKFNSGELVAIMGPSGAGKSTLMNILAGYRETGMKGAVLINGLPRDLRCFRKVSCYIMQDDMLLPHLTVQEAMMVSAHLKLQEKDEGRREMVKEILTALGLLSCANTRTGSLSGGQRKRLAIALELVNNPPVMFFDEPTSGLDSASCFQVVSLMKGLAQGGRSIICTIHQPSAKLFELFDQLYVLSQGQCVYRGKVCNLVPYLRDLGLNCPTYHNPADFVMEVASGEYGDQNSRLVRAVREGMCDSDHKRDLGGDAEVNPFLWHRPSEEDSSSMEGCHSFSASCLTQFCILFKRTFLSIMRDSVLTHLRITSHIGIGLLIGLLYLGIGNEAKKVLSNSGFLFFSMLFLMFAALMPTVLTFPLEMGVFLREHLNYWYSLKAYYLAKTMADVPFQIMFPVAYCSIVYWMTSQPSDAVRFVLFAALGTMTSLVAQSLGLLIGAASTSLQVATFVGPVTAIPVLLFSGFFVSFDTIPTYLQWMSYISYVRYGFEGVILSIYGLDREDLHCDIDETCHFQKSEAILRELDVENAKLYLDFIVLGIFFISLRLIAYFVLRYKIRAER

SEQ ID NO: 23 - protein, 663 aa, Homo Sapiens
MIMRLPQPHGTNASSYSAEMTEPKSVCVSVDEVVSSNMEATETDLLNGHLKKVDNNLTEAQRFSSLPRRAAVNIEFRDLSYSVPEGPWWRKKGYKTLLKGISGKFNSGELVAIMGPSGAGKSTLMNILAGYRETGMKGAVLINGLPRDLRCFRKVSCYIMQDDMLLPHLTVQEAMMVSAHLKLQEKDEGRREMVKEILTALGLLSCANTRTGSLSGGQRKRLAIALELVNNPPVMFFDEPTSGLDSASCFQVVSLMKGLAQGGRSIICTIHQPSAKLFELFDQLYVLSQGQCVYRGKVCNLVPYLRDLGLNCPTYHNPADFVMEVASGEYGDQNSRLVRAVREGMCDSDHKRDLGGDAEVNPFLWHRPSEEDSSSMEGCHSFSASCLTQFCILFKRTFLSIMRDSVLTHLRITSHIGIGLLIGLLYLGIGNEAKKVLSNSGFLFFSMLFLMFAALMPTVLTFPLEMGVFLREHLNYWYSLKAYYLAKTMADVPFQIMFPVAYCSIVYWMTSQPSDAVRFVLFAALGTMTSLVAQSLGLLIGAASTSLQVATFVGPVTAIPVLLFSGFFVSFDTIPTYLQWMSYISYVRYGFEGVILSIYGLDREDLHCDIDETCHFQKSEAILRELDVENAKLYLDFIVLGIFFISLRLIAYFVLRYKIRAER

SEQ ID NO: 24 - protein, 824 aa, Homo Sapiens
MLAVQQTEHLPACPPARRWSSNFCPESTEGGPSLLGLRDMVRRGWSVCTAILLARLWCLVPTHTFLSEYPEAAEYPHPGWVYWLQMAVAPGHLRAWVMRNNVTTNIPSAFSGTLTHEEKAVLTVFTGTATAVHVQVAALASAKLESSVFVTDCVSCKIENVCDSALQGKRVPMSGLQGSSIVIMPPSNRPLASAASCTWSVQVQGGPHHLGVVAISGKVLSAAHGAGRAYGWGFPGDPMEEGYKTLLKGISGKFNSGELVAIMGPSGAGKSTLMNILAGYRETGMKGAVLINGLPRDLRCFRKVSCYIMQDDMLLPHLTVQEAMMVSAHLKLQEKDEGRREMVKEILTALGLLSCANTRTGSLSGGQRKRLAIALELVNNPPVMFFDEPTSGLDSASCFQVVSLMKGLAQGGRSIICTIHQPSAKLFELFDQLYVLSQGQCVYRGKVCNLVPYLRDLGLNCPTYHNPADFVMEVASGEYGDQNSRLVRAVREGMCDSDHKRDLGGDAEVNPFLWHRPSEEVKQTKRLKGLRKDSSSMEGCHSFSASCLTQFCILFKRTFLSIMRDSVLTHLRITSHIGIGLLIGLLYLGIGNEAKKVLSNSGFLFFSMLFLMFAALMPTVLTFPLEMGVFLREHLNYWYSLKAYYLAKTMADVPFQIMFPVAYCSIVYWMTSQPSDAVRFVLFAALGTMTSLVAQSLGLLIGAASTSLQVATFVGPVTAIPVLLFSGFFVSFDTIPTYLQWMSYISYVRYGFEGVILSIYGLDREDLHCDIDETCHFQKSEAILRELDVENAKLYLDFIVLGIFFISLRLIAYFVLRYKIRAER

SEQ ID NO: 25 - protein, 668 aa, Homo Sapiens
MLGTQGWTKQRKPCPQNASSYSAEMTEPKSVCVSVDEVVSSNMEATETDLLNGHLKKVDNNLTEAQRFSSLPRRAAVNIEFRDLSYSVPEGPWWRKKGYKTLLKGISGKFNSGELVAIMGPSGAGKSTLMNILAGYRETGMKGAVLINGLPRDLRCFRKVSCYIMQDDMLLPHLTVQEAMMVSAHLKLQEKDEGRREMVKEILTALGLLSCANTRTGSLSGGQRKRLAIALELVNNPPVMFFDEPTSGLDSASCFQVVSLMKGLAQGGRSIICTIHQPSAKLFELFDQLYVLSQGQCVYRGKVCNLVPYLRDLGLNCPTYHNPADFVMEVASGEYGDQNSRLVRAVREGMCDSDHKRDLGGDAEVNPFLWHRPSEEDSSSMEGCHSFSASCLTQFCILFKRTFLSIMRDSVLTHLRITSHIGIGLLIGLLYLGIGNEAKKVLSNSGFLFFSMLFLMFAALMPTVLTFPLEMGVFLREHLNYWYSLKAYYLAKTMADVPFQIMFPVAYCSIVYWMTSQPSDAVRFVLFAALGTMTSLVAQSLGLLIGAASTSLQVATFVGPVTAIPVLLFSGFFVSFDTIPTYLQWMSYISYVRYGFEGVILSIYGLDREDLHCDIDETCHFQKSEAILRELDVENAKLYLDFIVLGIFFISLRLIAYFVLRYKIRAER

SEQ ID NO: 26 - protein, 677 aa, Homo Sapiens
MRISLPRAPERDGGVSASSLLDTVTNASSYSAEMTEPKSVCVSVDEVVSSNMEATETDLLNGHLKKVDNNLTEAQRFSSLPRRAAVNIEFRDLSYSVPEGPWWRKKGYKTLLKGISGKFNSGELVAIMGPSGAGKSTLMNILAGYRETGMKGAVLINGLPRDLRCFRKVSCYIMQDDMLLPHLTVQEAMMVSAHLKLQEKDEGRREMVKEILTALGLLSCANTRTGSLSGGQRKRLAIALELVNNPPVMFFDEPTSGLDSASCFQVVSLMKGLAQGGRSIICTIHQPSAKLFELFDQLYVLSQGQCVYRGKVCNLVPYLRDLGLNCPTYHNPADFVMEVASGEYGDQNSRLVRAVREGMCDSDHKRDLGGDAEVNPFLWHRPSEEDSSSMEGCHSFSASCLTQFCILFKRTFLSIMRDSVLTHLRITSHIGIGLLIGLLYLGIGNEAKKVLSNSGFLFFSMLFLMFAALMPTVLTFPLEMGVFLREHLNYWYSLKAYYLAKTMADVPFQIMFPVAYCSIVYWMTSQPSDAVRFVLFAALGTMTSLVAQSLGLLIGAASTSLQVATFVGPVTAIPVLLFSGFFVSFDTIPTYLQWMSYISYVRYGFEGVILSIYGLDREDLHCDIDETCHFQKSEAILRELDVENAKLYLDFIVLGIFFISLRLIAYFVLRYKIRAER

SEQ ID NO: 27 - protein, 177 aa, Homo Sapiens
MAPGQTPSLCSWLLPLPSTWATTGHVCFSDILQTPDGGQLLLDWAKQPDSSQDPDPTTQPIVLLLPGITGSSQETYVLHLVNQALRDGYQAVVFNNRGCRGEELRTHRAFCASNTEDLETVVNHIKHRYPQAPLLAVGISFGGILVLNHLAQARQAAGLVAALTLSACWDSFETTRS

SEQ ID NO: 28 - protein, 102 aa, Homo Sapiens
MAPGQTPSLCSWLLPLPSTWATTGHVCFSDILQTPDGGQLLLDWAKQPDSSQDPDPTTQPIVLLLPGITGSSQETYVLHLVNQALRDGYQPTGLFVPAILKI

SEQ ID NO: 29 - protein, 405 aa, Homo Sapiens
MLSSFLSPQNGTWADTFSLLLALAVALYLGYYWACVLQRPRLVAGPQFLAFLEPHCSITTETFYPTLWCFEGRLQSIFQVLLQSQPLVLYQSDILQTPDGGQLLLDWAKQPDSSQDPDPTTQPIVLLLPGITGSSQETYVLHLVNQALRDGYQAVVFNNRGCRGEELRTHRAFCASNTEDLETVVNHIKHRYPQAPLLAVGISFGGILVLNHLAQARQAAGLVAALTLSACWDSFETTRSLETPLNSLLFNQPLTAGLCQLVERNRKVIEKVVDIDFVLQARTIRQFDERYTSVAFGYQDCVTYYKAASPRTKIDAIRIPVLYLSAADDPFSPVCALPIQAAQHSPYVALLITARGGHIGFLEGLLPWQHWYMSRLLHQYAKAIFQDPEGLPDLRALLPSEDRNS

SEQ ID NO: 30 - protein, 305 aa, Homo Sapiens
MLSSFLSPQNGTWADTFSLLLALAVALYLGYYWACVLQRPRLVAGPQFLAFLEPHCSITTETFYPTLWCFEGRLQSIFQVLLQSQPLVLYQSDILQTPDGGQLLLDWAKQPDSSQDPDPTTQPIVLLLPGITGSSQETYVLHLVNQALRDGYQAVVFNNRGCRGEELRTHRAFCASNTEDLETVVNHIKHRYPQAPLLAVGISFGGILVLNHLAQARQAAGLVAALTLSACWDSFETTRSLETPLNSLLFNQPLTAGLCQLVERLSYGKTCRPVQSASLMSATHLWPLDIKTVLPTTKQQALEPR

SEQ ID NO: 31 - protein, 305 aa, Homo Sapiens; identical to SEQ ID NO: 30

SEQ ID NO: 32 - protein, 205 aa, Homo Sapiens
MAVARLAAVAAWVPCRSWGWAAVPFGPHRGLSVLLARIPQRAPRWLPACRQKTSLSFLNRPDLPNLAYKKLKGKSPGIIFIPGYLSYMNGTKALAIEEFCKSLGHACIRFDYSGVGSSDGNSEESTLGKWRKDVLSIIDDLADGPQILVGSSLGGWLMLHAAIARPEKVVALIGVATAADTLVTKFNQLPVEDSGRKNYISLHSA

SEQ ID NO: 33 - protein, 306 aa, Homo Sapiens
MAVARLAAVAAWVPCRSWGWAAVPFGPHRGLSVLLARIPQRAPRWLPACRQKTSLSFLNRPDLPNLAYKKLKGKSPGIIFIPGYLSYMNGTKALAIEEFCKSLGHACIRFDYSGVGSSDGNSEESTLGKWRKDVLSIIDDLADGPQILVGSSLGGWLMLHAAIARPEKVVALIGVATAADTLVTKFNQLPVELKKEVEMKGVWSMPSKYSEEGVYNVQYSFIKEAEHHCLLHSPIPVNCPIRLLHGMKDDIVPWHTSMQVADRVLSTDVDVILRKHSDHRMREKADIQLLVYTIDDLIDKLSTIVN

SEQ ID NO: 34 - protein, 52 aa, Homo Sapiens
MAVARLAAVAAWVPCRSWGWAAVPFGPHRGLSVLLARIPQRAPRWLPDSCWI

SEQ ID NO: 35 - protein, 75 aa, Homo Sapiens
MAVARLAAVAAWVPCRSWGWAAVPFGPHRGLSVLLARIPQRAPRWLPGLITQELEVQMVTQRKAHWGNGEKMFFL

SEQ ID NO: 36 - protein, 229 aa, Homo Sapiens [sequence omitted]

SEQ ID NO: 37 - protein, 225 aa, Homo Sapiens [sequence omitted]

SEQ ID NO: 38 - protein, 153 aa, Homo Sapiens [sequence omitted]

SEQ ID NO: 39 - protein, 124 aa, Homo Sapiens
MVGALCGCWFRLGGARPLIPLGPTVVQTSMSRSQVALLGLSLLLMLLLYVGLPGPPEQTSCLWGDPNVTVLAGLTPGNSPIFYREVLPLNQAHRLQPLSCMESWTTSWLESHCGSSATCPTTLW

SEQ ID NO: 40 - protein, 271 aa, Homo Sapiens
MVGALCGCWFRLGGARPLIPLGPTVVQTSMSRSQVALLGLSLLLMLLLYVGLPGPPEQTSCLWGDPNVTVLAGLTPGNSPIFYREVLPLNQAHRVEVVLLHGKAFNSHTWEQLGTLQLLSQRGYRAVALDLPGFGNSAPSKEASTEAGRAALLERALRDLEVQNAVLVSPSLSGHYALPFLMRGHHQLHGFVPIAPTSTQNYTQEQFWAVKTPTLILYGELDHILARESLRQLRHLPNHSVVKLRNAGHACYLHKPQDFHLVLLAFLDHLP

SEQ ID NO: 41 - protein, 468 aa, Homo Sapiens
MPPWGAALALILAVLALLGLLGPRLRGPWGRAVGERTLPGAQDRDDGEEADGGGPADQFSDGREPLPGGCSLVCKPSALAQCLLRALRRSEALEAGPRSWFSGPHLQTLCHFVLPVAPGPELAREYLQLADDGLVALDWVVGPCVRGRRITSAGGLPAVLLVIPNAWGRLTRNVLGLCLLALERGYYPVIFHRRGHHGCPLVSPRLQPFGDPSDLKEAVTYIRFRHPAAPLFAVSEGSGSALLLSYLGECGSSSYVTGAACISPVLRCREWFEAGLPWPYERGFLLHQKIALSRYATALEDTVDTSRLFRSRSLREFEEALFCHTKSFPISWDTYWDRNDPLRDVDEAAVPVLCICSADDPVCGPPDHTLTTELFHSNPYFFLLLSRHGGHCGFLRQEPLPAWSHEVILESFRALTEFFRTEERIKGLSRHRASFLGGRRRGGALQRREVSSSSNLEEIFNWKRSYTR

SEQ ID NO: 42 - protein, 191 aa, Homo Sapiens
CIVVLWYGWLHFYAEPKYLIVVRPAPPPSQKKSCSGKTRSRKPLQLVVGTLTPSSVFLSWGFLINPHHDWTLPSHCPNDRFYTIRYREKDKEKKWIFQICPATETIVENLKPNTVYEFGVKDNVEGGIWSKIFNHKTVVGSKKVNGKIQSTYDQDHTVPAYVPRKLIPITIIKQVIQNVTHKDSAKSPEKA

SEQ ID NO: 43 - protein, 60 aa, Homo Sapiens
MRGGKCNMLSSLGCLLLCGSITLALGNAQKLPKANKRTELVIQHGWMSLIKMMLNERSQV

SEQ ID NO: 44 - protein, 161 aa, Homo Sapiens
MRGGKCNMLSSLGCLLLCGSITLALGNAQKLPKDAEPKYLIVVRPAPPPSQKKSCSGKTRSRKPLQLVVGTLTPSSVFLSWGFLINPHHDWTLPSHCPNDRFYTIRYREKDKEKKWIFQICPATETIVENLKPNTVYEFGVKDNVEGGIWSKIFNHKTVVG

SEQ ID NO: 45 - protein, 1075 aa, Homo Sapiens
MRGGKCNMLSSLGCLLLCGSITLALGNAQKLPKGKRPNLKVHINTTSDSILLKFLRPSPNVKLEGLLLGYGSNVSPNQYFPLPAEGKFTEAIVDAEPKYLIVVRPAPPPSQKKSCSGKTRSRKPLQLVVGTLTPSSVFLSWGFLINPHHDWTLPSHCPNDRFYTIRYREKDKEKKWIFQICPATETIVENLKPNTVYEFGVKDNVEGGIWSKIFNHKTVVGSKKVNGKIQSTYDQDHTVPAYVPRKLIPITIIKQVIQNVTHKDSAKSPEKAPLGGVILVHLIIPGLNETTVKLPASLMFEISDALKTQLAKNETLALPAESKTPEVEKISARPTTVTPETVPRSTKPTTSSALDVSETTLASSEKPWIVPTAKISEDSKVLQPQTATYDVFSSPTTSDEPEISDSYTATSDRILDSIPPKTSRTLEQPRATLAPSETPFVPQKLEIFTSPEMQPTTPAPQQTTSIPSTPKRRPRPKPPRTKPERTTSAGTITPKISKSPEPTWTTPAPGKTQFISLKPKIPLSPEVTHTKPAPKQTPRAPPKPKTSPRPRIPQTQPVPKVPQRVTAKPKTSPSPEVSYTTPAPKDVLLPHKPYPEVSQSEPAPLETRGIPFIPMISPSPSQEELQTTLEETDQSTQEPFTTKIPRTTELAKTTQAPHRFYTTVRPRTSDKPHIRPGVKQAPRPSGADRNVSVDSTHPTKKPGTRRPPLPPRPTHPRRKPLPPNNVTGKPGSAGIISSGPITTPPLRSTPRPTGTPLERIETDIKQPTVPASGEELENITDFSSSPTRETDPLGKPRFKGPHVRYIQKPDNSPCSITDSVKRFPKEEATEGNATSPPQNPPTNLTVVTVEGCPSFVILDWEKPLNDTVTEYEVISRENGSFSGKNKSIQMTNQTFSTVENLKPNTSYEFQVKPKNPLGEGPVSNTVAFSTESADPRVSEPVSAGRDAIWTERPFNSDSYSECKGKQYVKRTWYKKFVGVQLCNSLRYKIYLSDSLTGKFYNIGDQRGHGEDHCQFVDSFLDGRTGQQLTSDQLPIKEGYFRAVRQEPVQFGEIGGHTQINYVQWYECGTTIPGKW

SEQ ID NO: 46 - protein, 1777 aa, Homo Sapiens
MRGGKCNMLSSLGCLLLCGSITLALGNAQKLPKGKRPNLKVHINTTSDSILLKFLRPSPNVKLEGLLLGYGSNVSPNQYFPLPAEGKFTEAIVDAEPKYLIVVRPAPPPSQKKSCSGKTRSRKPLQLVVGTLTPSSVFLSWGFLINPHHDWTLPSHCPNDRFYTIRYREKDKEKKWIFQICPATETIVENLKPNTVYEFGVKDNVEGGIWSKIFNHKTVVGSKKVNGKIQSTYDQDHTVPAYVPRKLIPITIIKQVIQNVTHKDSAKSPEKAPLGGVILVHLIIPGLNETTVKLPASLMFEISDALKTQLAKNETLALPAESKTPEVEKISARPTTVTPETVPRSTKPTTSSALDVSETTLVLSKRTPETLQTILIPQFELPLSTLAPKSLPEFPEAKTPFPFEKPRGTLASSEKPWIVPTAKISEDSKVLQPQTATYDVFSSPTTSDEPEISDSYTATSDRILDSIPPKTSRTLEQPRATLAPSETPFVPQKLEIFTSPEMQPTTPAPQQTTSIPSTPKRRPRPKPPRTKPERTTSAGTITPKISKSPEPTWTTPAPGKTQFISLKPKIPLSPEVTHTKPAPEPQTLLPSQSTIGPETPGTKPSTTLAPRKTKRPGRRPRPRPRPKTTPSPEVPKSKPALEPATIQPEPLVPTTASKPSERPKTTHRPDAPQIQPGSKPPKQLLPKPQTTAEPDMPPTKSVSEPVPFETEAPSMTIVPTTDIEPVTVRTEATVTTLAPKTSQRTRTRRPRPKHKTTPRPETLQTKLDFGPITPGTSSAPTTTTKRTRRPHPKPKTTPHPEVPQTKLVPATILEPVLRTEASGTTAAPKVPQRTHRPHPKPKTTLSPEELQTELVPATIFEPVSPIKEAPGTTFVPVTDLEPVTFRTEIPATTLATKTSKRTRPPRPRPKTTPSPQAPETKPVPATVLEPVTLRPEASTTLASKTSQRTRRPRLRTKTTPRPEAPESKPVPTAELKPVTLRTETWVTTQAPKTSQRTRRPRPKTKTTPSPEVPQTKLVPSTDLEPGTLRTEAPKTMVVTTVLEPDTFRTKFPETTLAPKTQRTRRPRPRPKTTSSPEVPQNKSVSVTGFEPVVHSTDAPGTTFALTELQTLILKPVTSPSLEMTESQPVSDVLESVTLSTESPKETIAPAKTDYVYPTAKAPLWPEEPKTEVVESITYVSEPPETTLETSPLPSQSITLPSPDEPQTEPAPKQTPRAPPKPKTSPRPRIPQTQPVPKVPQRVTAKPKTSPSPEVSYTTPAPKDVLLPHKPYPEVSQSEPAPLETRGIPFIPMISPSPSQEELQTTLEETDQSTQEPFTTKIPRTTELAKTTQAPHRFYTTVRPRTSDKPHIRPVLNRTTTRPTRPKPSGMPSGNGVGTGVKQAPRPSGADRNVSVDSTHPTKKPGTRRPPLPPRPTHPRRKPLPPNNVTGKPGSAGIISSGPITTPPLRSTPRPTGTPLERIETDIKQPTVPASGEELENITDFSSSPTRETDPLGKPRFKGPHVRYIQKPDNSPCSITDSVKRFPKEEATEGNATSPPQNPPTNLTVVTVEGCPSFVILDWEKPLNDTVTEYEVISRENGSFSGKNKSIQMTNQTFSTVENLKPNTSYEFQVKPKNPLGEGPVSNTVAFSTESADPRVSEPVSAGRDAIWTERPFNSDSYSECKGKQYVKRTWYKKFVGVQLCNSLRYKIYLSDSLTGKFYNIGDQRGHGEDHCQFVDSFLDGRTGQQLTSDQLPIKEGYFRAVRQEPVQFGEIGGHTQINYVQWYECGTTIPGKW

SEQ ID NO: 47 - protein, 1005 aa, Homo Sapiens
MRGGKCNMLSSLGCLLLCGSITLALGNAQKLPKGKRPNLKVHINTTSDSILLKFLRPSPNVKLEGLLLGYGSNVSPNQYFPLPAEGKFTEAIVDAEPKYLIVVRPAPPPSQKKSCSGKTRSRKPLQLVVGTLTPSSVFLSWGFLINPHHDWTLPSHCPNDRFYTIRYREKDKEKKWIFQICPATETIVENLKPNTVYEFGVKDNVEGGIWSKIFNHKTVVGSKKVNGKIQSTYDQDHTVPAYVPRKLIPITIIKQVIQNVTHKDSAKSPEKAPLGGVILVHLIIPGLNETTVKLPASLMFEISDALKTQLAKNETLALPAESKTPEVEKISARPTTVTPETVPRSTKPTTSSALDVSETTLVLSKRTPETLQTILIPQFELPLSTLAPKSLPEFPEAKTPFPFEKPRGTLASSEKPWIVPTAKISEDSKVLQPQTATYDVFSSPTTSDEPEISDSYTATSDRILDSIPPKTSRTLEQPRATLAPSETPFVPQKLEIFTSPEMQPTTPAPQQTTSIPSTPKRRPRPKPPRTKPERTTSAGTITPKISKSPEPTWTTPAPGKTQFISLKPKIPLSPEVTHTKPAPEPQTLLPSQSTIGPETPGTKPSTTLAPRKTKRPGRRPRPRPRPKTTPSPEVPKSKPALEPATIQPEPLVPTTASKPSERPKTTHRPDAPQIQPGSKPPKQLLPKPQTTAEPDMPPTKSVSEPVPFETEAPSMTIVPTTDIEPVTVRTEATVTTLAPKTSQRTRTRRPRPKHKTTPRPETLQTKLDFGPITPGTSSAPTTTTKRTRRPHPKPKTTPHPEVPQTKLATKTSKRTRPPRPRPKTTPSPQAPETKPVPATVLEPVTLRPEASTTLASKTSQRTRRPRLRTKTTPRPEAPESKPVPTAELKPVTLRTETWVTTQAPKTSQRTRRPRPKTKTTPSPEVPQTKLVPSTDLEPGTLRTEAPKTMVVTTVLEPDTFRTKFPETTLAPKTQRTRRPRPRPKTTSSPEVPQNKSGKCMNPWLK

SEQ ID NO: 48 - protein, 188 aa, Homo Sapiens [sequence omitted]

SEQ ID NO: 49 - protein, 233 aa, Homo Sapiens
QRVTAKPKTSPSPEVSYTTPAPKDVLLPHKPYPEVSQSEPAPLETRGIPFIPMISPSPSQEELQTTLAPHRFYTTVRPRTSDKPHIRPGVKQAPRPSGADRNVSVDSTHPTKKPGTRRPPLPPRPTHPRRKPLPPNNVTGKPGSAGIISSGPITTPPLRSTPRPTGTPLERIETDIKQPTVPASGEELENITDFSSSPTRETDPLGKPRFKGPHVRYIQKPDNSPCSITDSVK

SEQ ID NO: 50 - protein, 158 aa, Homo Sapiens
VSDVLESVTLSTESPKETIAPAKTDYVYPTAKAPLWPEEPKTEVVESITYVSEPPETTLETSPLPSQSITLPSPDEPQTEPAPKQTPRAPPKPKTSPRPRIPQTQPVPKVPQRVTAKPKTSPSPEVSYTTPAPLETRGIPFIPMISPSPSQEELQTTL

SEQ ID NO: 51 - protein, 84 aa, Homo Sapiens
  misc_feature (1)..(1): Xaa can be any naturally occurring amino acid
XFEKPRGTLASSEKPWIVPTAKISEDSKVLQPQTATSDRILDSIPPKTSRTLEQPRATLAPSETPFVPQKLEIFTSPEMQPTTP

SEQ ID NO: 52 - protein, 187 aa, Homo Sapiens
  misc_feature (1)..(1): Xaa can be any naturally occurring amino acid
XFISLKPKIPLSPEVTHTKPAPKTSQRTRTRRPRPKHKTTPRPETLQTKLDFGPITPGTSSAPTTTTKRTRRPHPKPKTTPHPEVPQTKLAPKQTPRAPPKPKTSPRPRIPQTQPVPKVPQRVTAKPKTSPSPEVSYTTPAPKDVLLPHKPYPEVSQSEPAPLETRGIPFIPMISPSPSQEELQTTL

SEQ ID NO: 53 - protein, 1131 aa, Homo Sapiens
  misc_feature (1)..(1): Xaa can be any naturally occurring amino acid
XISLKPKIPLSPEVTHTKPAPEPQTLLPSQSTIGPETPGTKPSTTLALEPATIQPEPLVPTTASKPSERPKTTHRPDAPQIQPGSKPPKQLLPKPQTTAEPDMPPTKSVSEPVPFETEAPSMTIVPTTDIEPVTVRTEATVTTLAPKTSQRTRTRRPRPKHKTTPRPETLQTKLDFGPITPGTSSAPTTTTKRTRRPHPKPKTTPHPEVPQTKLVPATILEPVLRTEASGTTAVPATIFEPVSPIKEAPGTTFVPVTDLEPVTFRTEIPATTLATKTSKRTRPPRPRPKTTPSPQAPETKPVPATVLEPVTLRPEASTTLASKTSQRTRRPRLRTKTTPRPEAPESKPVPTAELKPVTLRTETWVTTQAPKTSQRTRRPRPKTKTTPSPEVPQTKLVPSTDLEPGTLRTEAPKTMVVTTVLEPDTFRTKFPETTLAPKTQRTRRPRPRPKTTSSPEVPQNKSVSVTGFEPVVHSTDAPGTTFALTELQTLILKPVTSPSLEMTESQPVSDVLESVTLSTESPKETIAPAKTDYVYPTAKAPLWPEEPKTEVVESITYVSEPPETTLETSPLPSQSITLPSPDEPQTEPAPKQTPRAPPKPKTSPRPRIPQTQPVPKVPQRVTAKPKTSPSPEVSYTTPAPKDVLLPHKPYPEVSQSEPAPLETRGIPFIPMISPSPSQEELQTTLEETDQSTQEPFTTKIPRTTELAKTTQAPHRFYTTVRPRTSDKPHIRPGVKQAPRPSGADRNVSVDSTHPTKKPGTRRPPLPPRPTHPRRKPLPPNNVTGKPGSAGIISSGPITTPPLRSTPRPTGTPLERIETDIKQPTVPASGEELENITDFSSSPTRETDPLGKPRFKGPHVRYIQKPDNSPCSITDSVKRFPKEEATEGNATSPPQNPPTNLTVVTVEGCPSFVILDWEKPLNDTVTEYEVISRENGSFSGKNKSIQMTNQTFSTVENLKPNTSYEFQVKPKNPLGEGPVSNTVAFSTESADPRVSEPVSAGRDAIWTERPFNSDSYSECKGKQYVKRTWYKKFVGVQLCNSLRYKIYLSDSLTGKFYNIGDQRGHGEDHCQFVDSFLDGRTGQQLTSDQLPIKEGYFRAVRQEPVQFGEIGGHTQINYVQWYECGTTIPGKW

SEQ ID NO: 54 - protein, 125 aa, Homo Sapiens
  misc_feature (1)..(1): Xaa can be any naturally occurring amino acid
XKNETLALPAESKTPEVEKISARPTTVTPETVPRSTKPTTSSALDVSETTLAPKSLPEFPEAKTPFPFEKPRGTLASSEKPWIVPTAKISEDSKVLQPQTALTELQTLILKPVTSPSLEMTESQP

SEQ ID NO: 55 - protein, 187 aa, Homo Sapiens
  misc_feature (1)..(1): Xaa can be any naturally occurring amino acid
XKTTPHPEVPQTKLAPKVPQRTHRPHPKPKTTLSPEELQTELVPATIFEPVSPIKEAPGTTFVPVTDLEPVTFRTEIPATTLATKTSKRTRPPRPRPKTTPSPQAPETKPAPKQTPRAPPKPKTSPRPRIPQTQPVPKVPQRVTAKPKTSPSPEVSYTTPAPLETRGIPFIPMISPSPSQEELQTTL

SEQ ID NO: 56 - protein, 187 aa, Homo Sapiens
  misc_feature (1)..(1): Xaa can be any naturally occurring amino acid
XNGKIQSTYDQDHTVPAYVPRKLIPITIIKQVIQNVTHKDSAKSPEKAPLGGVILVHLIIPGLNETTVKLPASLMFEISDALKTQLAKNETLALPAESKTPEVEKISARPTTVTPETVPRSTKPTTSSALDVSETTLVLSKRTPETLQTILIPQFELPLSTLASSEKPWIVPTAKISEDSKVLQPQT

SEQ ID NO: 57 - protein, 150 aa, Homo Sapiens
  misc_feature (1)..(1): Xaa can be any naturally occurring amino acid
XPETPGTKPSTTLAPRKTKRPGRRPRPRPRPKTTPSPEVPKSKPALEPATIQPEPLVPTTVPTTDIEPVTVRTEATVTTLAPKTSQRTRTRRPRPKHKTTPRPETLQTKLDFGPITPGTSSAPTTTTKRTRRPHPKPKTTPHPEVPQTKL

SEQ ID NO: 58 - protein, 308 aa, Homo Sapiens
  misc_feature (1)..(1): Xaa can be any naturally occurring amino acid
XPKPKTTPHPEVPQTKLATKTSKRTRPPRPRPKTTPSPQAPETKPVPATVLEPVTLRPEASTTLASKTSQRTRRPRLRTKTTPRPEAPESKPVPTAELKPVTLRTETWVTTQAPKQTPRAPPKPKTSPRPRIPQTQPVPKVPQRVTAKPKTSPSPEVSYTTPAPKDVLLPHKPYPEVSQSEPAPLETRGIPFIPMISPSPSQEELQTTLEETDQSTQEPFTTKIPRTTELAKTTQAPHRFYTTVRPRTSDKPHIRPVLNRTTTRPTRPKPSGMPSGNGVGTGVKQAPRPSGADRNVSVDSTHPTKKPG

SEQ ID NO: 59 - protein, 87 aa, Homo Sapiens
  misc_feature (1)..(1): Xaa can be any naturally occurring amino acid
XQTLLPSQSTIGPETPGTKPSTTLAPRKTKRPGRRPRPRPRPKTTPSPEVPKSKPALEPATIQPEPLVPTTVSEPVPFETEAPSMTI

SEQ ID NO: 60 - protein, 187 aa, Homo Sapiens
  misc_feature (1)..(1): Xaa can be any naturally occurring amino acid
XRTTSAGTITPKISKSPEPTWTTPAPGKTQFISLKPKIPLSPEVTHTKPVPTTDIEPVTVRTEATVTTLAPKTSQRTRTRRPRPKHKTTPRPETLQTKLDFGPITPGTSSAPTTTTKRTRRPHPKPKTTPHPEVPQTKLAPKVPQRTHRPHPKPKTTLSPEELQTELVPATIFEPVSPIKEAPGTTF

SEQ ID NO: 61 - protein, 189 aa, Homo Sapiens
  misc_feature (1)..(1): Xaa can be any naturally occurring amino acid
XTAKPKTSPSPEVSYTTPAPLETRGIPFIPMISPSPSQEELQTTLEETDQSTQEPFTTKIPRTTELAKTTQAPHRFYTTVRPRTSDKPHIRPVLNRTTTRPTRPKPSGMPSGNGVGTGVKQAPRPSGADRNVSVDSTHPTKKPGTRRPPLPPRPTHPRRKPLPPNNVTGKPGSAGIISSGPITTPPLRS

SEQ ID NO: 62 - protein, 303 aa, Homo Sapiens
  misc_feature (1)..(1): Xaa can be any naturally occurring amino acid
XTPEVEKISARPTTVTPETVPRSTKPTTSSALDVSETTLASSEKPWIVPTAKISEDSKVLQPQTATYDVFSSPTTSDEPEISDSYTATSDRILDSIPPKTSRTLEQPRATLAPSETPFVPQKLEIFTSPEMQPTTPAPQQTTSIPSTPKRRPRPKPPRTKPERTTSAGTITPKISKSPEPTWTTPAPGKTQFISLKPKIPLSPEVTHTKPAPEPQTLLPSQSTIGPETPGTKPSTTLAPRKTKRPGRRPRPRPRPKTTPSPEVPKSKPALEPATIQPEPLVPTTASKPSERPKTTHRPDAPQI

SEQ ID NO: 63 - protein, 151 aa, Homo Sapiens
  misc_feature (1)..(1): Xaa can be any naturally occurring amino acid
XVESITYVSEPPETTLETSPLPSQSITLPSPDEPQTEPAPKQTPRAPPKPKTSPRPRIPQTQPVPKVPQRVTAKPKTSPSPEVSYTTPAPKDVLLPHKPYPEVSQSEPVLQPVTFRFEPPKTTIAPLETRGIPFIPMISPSPSQEELQTTL

SEQ ID NO: 64 - protein, 198 aa, Homo Sapiens
LLHKNLQEHFSNQDLVFLLLTPSIITESCSTHRLEHSLYKPQKGLFHRVPLVVANLGMSEQLGYKTVSGSCMSTGFSRAVQTHSSKFFEEDGSLKEVHKINEMYASLQEELKLYSFSECHLHPGSRLKEQPLFGTCPHGIRQRARKLVDYRREPPQLAHELIFQFISVYFQRTNWHDKSCINEKLHVKKHFTTYKAYL

SEQ ID NO: 65 - protein, 360 aa, Homo Sapiens
MDDVEVVYTIDIQKYIPCYQLFSFYNSSGEVNEQALKKILSNVKKNVVGWYKFRRHSDQIMTFRERLLHKNLQEHFSNQDLVFLLLTPSIITESCSTHRLEHSLYKPQKGLFHRVPLVVANLGMSEQLGYKTVSGSCMSTGFSRAVQTHSSKFFEEDGSLKEVHKINEMYASLQEELKSICKKVEDSEQAVDKLVKDVNRLKREIEKRRGAQIQAAREKNIQKDPQENIFLCQALRTFFPNSEFLHSCVMSLKNRHVSKSSCNYNHHLDVVDNLTLMVEHTDIPEASPASTPQIIKHKALDLDDRWQFKRSRLLDTQDKRSKADTGSSNQDKASKMSSPETDEEIEKMKGFGEYSRSPTF

SEQ ID NO: 66 - protein, 74 aa, Homo Sapiens
MEGESTSAVLSGFVLGALAFQHLNTDSDTEGFLLGEVKGEAKNSITDSQMDDVEVVYTIDIQKYIPCYQLFRMW

SEQ ID NO: 67 - protein, 409 aa, Homo Sapiens
MEGESTSAVLSGFVLGALAFQHLNTDSDTEGFLLGEVKGEAKNSITDSQMDDVEVVYTIDIQKYIPCYQLFSFYNSSGEVNEQALKKILSNVKKNVVGWYKFRRHSDQIMTFRERLLHKNLQEHFSNQDLVFLLLTPSIITESCSTHRLEHSLYKPQKGLFHRVPLVVANLGMSEQLGYKTVSGSCMSTGFSRAVQTHSSKFFEEDGSLKEVHKINEMYASLQEELKSICKKVEDSEQAVDKLVKDVNRLKREIEKRRGAQIQAAREKNIQKDPQENIFLCQALRTFFPNSEFLHSCVMSLKNRHVSKSSCNYNHHLDVVDNLTLMVEHTDIPEASPASTPQIIKHKALDLDDRWQFKRSRLLDTQDKRSKADTGSSNQDKASKMSSPETDEEIEKMKGFGEYSRSPTF

SEQ ID NO: 68 - protein, 37 aa, Homo Sapiens
MEGESTSAVLSGFVLGALAFQHLNTDSDTVGRGGSRL

SEQ ID NO: 69 - protein, 189 aa, Homo Sapiens
MEGESTSAVLSGFVLGALAFQHLNTDSDTVSRGTGRGPASPGKSPARGLPPRCCSGPRPLPRRRRASSLRSRLCLLSPSAVPEEGFLLGEVKGEAKNSITDSQMDDVEVVYTIDIQKYIPCYQLFSFYNSSGEVNEQALKKILSNVKKNVVGWYKFRRHSDQIMTFRERLLHKNLQEHFSNQDLVFLLL

SEQ ID NO: 70 - protein, 220 aa, Homo Sapiens
MKTSSPKENCLFLCFTSMKNGQEGFLLGEVKGEAKNSITDSQMDDVEVVYTIDIQKYIPCYQLFSFYNSSGEVNEQALKKILSNVKKNVVGWYKFRRHSDQIMTFRERLLHKNLQEHFSNQDLVFLLLTPSIITESCSTHRLEHSLYKPQKGLFHRVPLVVANLGMSEQLGYKTVSGSCMSTGFSRAVQTHSSKFFEEDGSLKEVHKINEMYASLQEELK

SEQ ID NO: 71 - protein, 82 aa, Homo Sapiens
MMLKLFIQLMESHSVAQTGVKWHDLGSLQPLPLEVKRFSCLGLRSSWDYRHTQPCPANFFCIFSRDGVSPCWPGWSRTPDLK

SEQ ID NO: 72 - protein, 536 aa, Homo Sapiens
MGAWAFPAALFLLCLTSESLQGGLPLLPPGLGKVYGPHSGLGAGYDGGVKPQKPGFVVRHGLGTQPDTEGGMKPQNLGFRTFAGAAAQPGYGNGLGAAAFPVAGAQSGPAAQNGFGPGFGGGGKPQKPGPTTQNGYRPGYVGAVKPQKPGFQYRIGLGAQPGFRGDMKAQEPGLGNGNGLSAQPVLTAQNRFGFGAGLGGNVKPLKPGYGKRLRAGAFPGAGTQPEYGHGNGPGVQPGLGAGMKPQMPGLGAPNGYGPGRGRAGVPGGPERRPWVPHLLPFSSPGYLGVMKAQKPGPLAQNGYRAGAGEGMKPQKPGLRGTLKPQKSGHGHENGPWPGPCNARVAPMLLPRLPTPGVPSDKEGGWGLKSQPPSAVQNGKLPAPMPAIQWGLKPQKAGHQPPNGYGPGAEPGFNGGLEPQKIGLGYGNGVLGARVFPEAHPQPGFHGANGFRNRDGVEALVYPKAAALAPEGNGQAGVLWNSRWPTLQAWGAGLKPGYQAGDEYAEARSQPGGPDVKRGSNGQLGNGYGGRCPLGKC

SEQ ID NO: 73 - protein, 195 aa, Homo Sapiens
MPNFLGLHRARSFTVLCFWSTADVLNASGPRRQWHPLASCSSWSRPQSQGSTPGVLCKTGMGREPIPETQCHFANSMCSLHVSVPYFGNSPNISNFFRWSLALSPRQWCDLGSLQPPSPRFKGFSCLSLPSSWDYRRAPSPANFCILVEMGFHHVGQADLELLTSADLPTSASQSAGITGVSHHAWPQTLSLLLY

SEQ ID NO: 74 - protein, 130 aa, Homo Sapiens
MGGTWASKEPLRPRCRPINATLAVEKEGCPVCITVNTTICAGYCPTMTRVLQGVLPALPQVVCNYRDVRFESIRLPGCPRGVNPVVSYAVALSCQCALCRRSTTDCGGPKDHPLTCDDPRFQDSSSSKAP

SEQ ID NO: 75 - protein, 77 aa, Homo Sapiens
MSKGLLLLLLLSMGGTWASKEPLRPRCRPINATLAVEKEGCPVCITVNTTICAGYCPTMTRVLQGVLPALPQVVCNY

SEQ ID NO: 76 - protein, 165 aa, Homo Sapiens
MDAEGLALLLPPVTLAALVDSWLREDCPGLNYAALVSGAGPSQAALWAKSPGVLAGQPFFDAIFTQLNCQVSWFLPEGSKLVPVARVAEVRGPAHCLLLGERVALNTLARCSGIASAAAAAVEAARGAGWTGHVAGTRKTTPGFRLVEKYGLLVGGAASHRYDLG

SEQ ID NO: 77 - protein, 210 aa, Homo Sapiens [sequence omitted]

SEQ ID NO: 78 - protein, 83 aa, Homo Sapiens [sequence omitted]

SEQ ID NO: 79 - protein, 105 aa, Homo Sapiens
MKGWGWLALLLGALLGTAWARRSQDLHCGACRALVDELEWEIAQVDPKKTIQMGSFRINPDGSQSVVENASCLVLAARHASASSTNLKDILADLIPKEQARIKTF

SEQ ID NO: 80 - protein, 263 aa, Homo Sapiens
MKGWGWLALLLGALLGTAWARRSQDLHCGACRALVDELEWEIAQVDPKKTIQMGSFRINPDGSQSVVEVPYARSEAHLTELLEEICDRMKEYGEQIDPSTHRKNYVRVVGRNGESSELDLQGIRIDSDISGTLKFACESIVEEYEDELIEFFSREADNVKDKLCSKRTDGGTSKNRDRKGKMDVTNSAEKSRRSPAMALLTAAARLLGTKNASCLVLAARHASASSTNLKDILADLIPKEQARIKTFRQQHGKTVVGQITVDM

SEQ ID NO: 81 - protein, 171 aa, Homo Sapiens
MPETSHIVALTSKSEQELYIPSVVSNSPSTVQSIENTSKSHGEIFKKDVCAENNNNMAMLICLIIIAVLFLICTFLFLSTVVLANKVSSLRRSKQVGKRQPRSNGDFLASGLWPAESDTWKRTKQLTGPNLVMQSTGVLTATRERKDEEGTEKLTNKQIAKSPKCPVRTRI

SEQ ID NO: 82 - protein, 123 aa, Homo Sapiens
  misc_feature (1)..(1): Xaa can be any naturally occurring amino acid
XCAENNNNMAMLICLIIIAVLFLICTFLFLSTVVLANKVSSLRRSKQVGKRQPRSNGDFLASGLWPAESDTWKRTKQLTGPNLVMQSTGVLTATRERKDEEGTEKLTNKQIAKSPKCPVRTRI

SEQ ID NO: 83 - protein, 117 aa, Homo Sapiens
  misc_feature (1)..(1): Xaa can be any naturally occurring amino acid
XCAENNNNMAMLICLIIIAVLFLICTFLFLSTVVLANKVSSLRRSKQVGKRQPRSNGDFLASGLWPAESDTWKRTKQLTGPNLVMQSTGVLTATRERKDEEGTEKLTNKQIDNEEIF

SEQ ID NO: 84 - protein, 153 aa, Homo Sapiens
  misc_feature (1)..(1): Xaa can be any naturally occurring amino acid
XCAENNNNMAMLICLIIIAVLFLICTFLFLSTVVLANKVSSLRRSKQVGKRQPRSNGDFLASGLWPAESDTWKRTKQLTGPNLVMQSTGVLTATRERKDEEGTEKLTNKQIEEETVTQKCRVLPKVIQVNRTHHSLLMRRNLTKLFQFARGTF

SEQ ID NO: 85 - protein, 104 aa, Homo Sapiens
MGSTWGSPGWVRLALCLTGLVLSLYALHVKAARARDRDYRALCDVGTAISCSRVFSSRAAATELNSWSVVLGSLQREGLSPGAEEVGVAALQLPRAYNHYSQGS

SEQ ID NO: 86 - protein, 166 aa, Homo Sapiens
MGSTWGSPGWVRLALCLTGLVLSLYALHVKAARARDRDYRALCDVGTAISCSRVFSSRWGRGFGLVEHVLGQDSILNQSNSIFGCIFYTLQLLLGLQAAQRACGQRGPGPPKPQEGNTVPGEWPWQASVRRQGAHICSGSLVADTWVLTAAHCFEKAAATELNSWS

SEQ ID NO: 87 - protein, 121 aa, Homo Sapiens
  misc_feature (1)..(1): Xaa can be any naturally occurring amino acid
XDVGTAISCSRVFSSRWGRGFGLVEHVLGQDSILNQSNSIFGCIFYTLQLLLGCLRTRWASVLMLLSSLVSLAGSVYLAWILFFVLYDFCIVCITTYAINVSLMWLSFRKVQEPQGKAKRH

SEQ ID NO: 88 - protein, 199 aa, Homo Sapiens
MALLLRFVLLCRVADFIRGWSITTPEQMIEKAKGETAYLPCKFTLSPEDQGPLDIEWLISPADNQKVDQVIILYSGDKIYDDYYPDLKGRVHFKSNDLKSGDASINVTNFQLSDIGTDQCKVKRAPGVANRKIQLVVLGKMCRLQRAARPLPEATAVIIHPWDPYLLPTWKDIPRLSINKYQVKTLNALLRVRLSHLLR

SEQ ID NO: 89 - protein, 116 aa, Homo Sapiens
MEFGLNWVFLVAIIKGAQCEVQLVESGGGLVQPGGSLRLSCPDSGFTFSNHYMSWVRQAPGKGLEWISYISGDSGYTNYADSVKGRFTISRDNANNSPYLQMNSLRAEDTAVYYCV

SEQ ID NO: 90 - protein, 124 aa, Homo Sapiens
MLCPRAAFLVGSFHGVFPGPPASSHWEFWVPSTPVGAYFCPPQPQLTPPNTPKLVSEVEELYKSITALREKLLQAEQSLRNLKDIHMSLEKDVTAMTNSVFIDRQKCMAHRTCYPTILQLAGYQ

SEQ ID NO: 91 - protein, 117 aa, Homo Sapiens
MKHLWFFLLLVAAPRWVLSQVQLQESGPGLVKPSETLSLTCTVSGYSISSGYYWGWIRQPPGKGLEWIGSIYHSGSTYYNPSLKSRVTISVDTSKNQFSLKLSSVTAADTAVYYCAR

SEQ ID NO: 92 - protein, 67 aa, Homo Sapiens
MESPSAPPHRWCIPWQRLLLTASLLTFWNPPTTAKLTIESTPFNVAEGKEVLLLAHNLPQNRIGYSW

SEQ ID NO: 93 - protein, 152 aa, Homo Sapiens
MESPSAPPHRWCIPWQRLLLTASLLTFWNPPTTAKLTIESTPFNVAEGKEVLLLVHNLPQHLFGYSWYKGERVDGNRQIIGYVIGTQQATPGPAYSGREIIYPNASLLIQNIIQNDTGFYTLHVIKSDLVNEEATGQFRVYPELPKPSISSN

SEQ ID NO: 94 - protein, 155 aa, Homo Sapiens
MSPAKCKICFPDREVKPSMSGLHLVKRGREHKKLDLHRDFTVASPAEFVTRFGGDRVIEKVLIANNGIAAVKCMRSIRRWAYEMFRNERAIRFVVMVTPEDLKANAEYIKMADHYVPVPGGPNNNNYANVELIVDIAKRIPVQAVWAGWGHASEN

SEQ ID NO: 95 - protein, 143 aa, Homo Sapiens
MTDSKPITKSKSEANLIPSQEPFPASDNSGETPQRNGEGHTLPKTPSQAEPASHKGPKDAGRRRNSLPPSHQKPPRNPLSSSDAAPSPELQANGTGTQGLEATDTNGLSSSARPQGQQAGSPSKEDKKQANIKRQLMTNFILG

SEQ ID NO: 96 - protein, 858 aa, Homo Sapiens
MTVPISITNPDLLRHSTELFMDSGFSPLCQRMGAMVAFRRFEDFTRNFDEVISCFANVPKDTPLFSEARTSLYSEDDCKSLREEPIHILNVSIQCADHLEDEALVPILRTFVQSKKNILVDYGLRRITFLIAQEKEFPKFFTFRARDEFAEDRIYRHLEPALAFQLELNRMRNFDLTAVPCANHKMHLYLGAAKVKEGVEVTDHRFFIRAIIRHSDLITKEASFEYLQNEGERLLLEAMDELEVAFNNTSVRTDCNHIFLNFVPTVIMDPFKIEESVRYMVMRYGSRLWKLRVLQAEVKINIRQTTTGSAVPIRLFITNESGYYLDISLYKEVTDSRSGNIMFHSFGNKQGPQHGMLINTPYVTKDLLQAKRFQAQTLGTTYIYDFPEMFRQALFKLWGSPDKYPKDILTYTELVLDSQGQLVEMNRLPGGNEVGMVAFKMRFKTQEYPEGRDVIVIGNDITFRIGSFGPGEDLLYLRASEMARAEGIPKIYVAANSGARIGMAEEIKHMFHVAWVDPEDPHKGFKYLYLTPQDYTRISSLNSVHCKHIEEGGESRYMITDIIGKDDGLGVENLRGSGMIAGESSLAYEEIVTISLVTCRAIGIGAYLVRLGQRVIQVENSHIILTGASALNKVLGREVYTSNNQLGGVQIMHYNGVSHITVPDDFEGVYTILEWLSYMPKDNHSPVPIITPTDPIDREIEFLPSRAPYDPRWMLAGRPHPTLKGTWQSGFFDHGSFKEIMAPWAQTVVTGRARLGGIPVGVIAVETRTVEVAVPADPANLDSEAKIIQQAGQVWFPDSAYKTAQAVKDFNREKLPLMIFANWRGFSGGMKGCLGTWRDVSWWKIRAMLPMHIGEGSV

SEQ ID NO: 97 - protein, 2458 aa, Homo Sapiens
MVLLLCLSCLIFSCLTFSWLKIWGKMTDSKPITKSKSEANLIPSQEPFPASDNSGETPQRNGEGHTLPKTPSQAEPASHKGPKDAGRRRNSLPPSHQKPPRNPLSSSDAAPSPELQANGTGTQGLEATDTNGLSSSARPQGQQAGSPSKEDKKQANIKRQLMTNFILGSFDDYSSDEDSVAGSSRESTRKGSRASLGALSLEAYLTTGEAETRVPTMRPSMSGLHLVKRGREHKKLDLHRDFTVASPAEFVTRFGGDRVIEKVLIANNGIAAVKCMRSIRRWAYEMFRNERAIRFVVMVTPEDLKANAEYIKMADHYVPVPGGPNNNNYANVELIVDIAKRIPVQAVWAGWGHASENPKLPELLCKNGVAFLGPPSEAMWALGDKIASTVVAQTLQVPTLPWSGSGLTVEWTEDDLQQGKRISVPEDVYDKGCVKDVDEGLEAAERIGFPLMIKASEGGGGKGIRKAESAEDFPILFRQVQSEIPGSPIFLMKLAQHARHLEVQILADQYGNAVSLFGRDCSIQRRHQKIVEEAPATIAPLAIFEFMEQCAIRLAKTVGYVSAGTVEYLYSQDGSFHFLELNPRLQVEHPCTEMIADVNLPAAQLQIAMGVPLHRLKDIRLLYGESPWGVTPISFETPSNPPLARGHVIAARITSENPDEGFKPSSGTVQELNFRSSKNVWGYFSVAATGGLHEFADSQFGHCFSWGENREEAISNMVVALKELSIRGDFRTTVEYLINLLETESFQNNDIDTGWLDYLIAEKVQAEKPDIMLGVVCGALNVADAMFRTCMTDFLHSLERGQVLPADSLLNLVDVELIYGGVKYILKVARQSLTMFVLIMNGCHIEIDAHRLNDGGLLLSYNGNSYTTYMKEEVDSYRITIGNKTCVFEKENDPTVLRSPSAGKLTQYTVEDGGHVEAGSSYAEMEVMKMIMTLNVQERGRVKYIKRPGAVLEAGCVVARLELDDPSKVHPAEPFTGELPAQQTLPILGEKLHQVFHSVLENLTNVMSGFCLPEPVFSIKLKEWVQKLMMTLRHPSLPLLELQEIMTSVAGRIPAPVEKSVRRVMAQYASNITSVLCQFPSQQIATILDCHAATLQRKADREVFFINTQSIVQLVQRYRSGIRGYMKTVVLDLLRRYLRVEHHFQQAHYDKCVINLREQFKPDMSQVLDCIFSHAQVAKKNQLVIMLIDELCGPDPSLSDELISILNELTQLSKSEHCKVALRARQILIASHLPSYELRHNQVESIFLSAIDMYGHQFCPENLKKLILSETTIFDVLPTFFYHANKVVCMASLEVYVRRGYIAYELNSLQHRQLPDGTCVVEFQFMLPSSHPNRMTVPISITNPDLLRHSTELFMDSGFSPLCQRMGAMVAFRRFEDFTRNFDEVISCFANVPKDTPLFSEARTSLYSEDDCKSLREEPIHILNVSIQCADHLEDEALVPILRTFVQSKKNILVDYGLRRITFLIAQEKEFPKFFTFRARDEFAEDRIYRHLEPALAFQLELNRMRNFDLTAVPCANHKMHLYLGAAKVKEGVEVTDHRFFIRAIIRHSDLITKEASFEYLQNEGERLLLEAMDELEVAFNNTSVRTDCNHIFLNFVPTVIMDPFKIEESVRYMVMRYGSRLWKLRVLQAEVKINIRQTTTGSAVPIRLFITNESGYYLDISLYKEVTDSRSGNIMFHSFGNKQGPQHGMLINTPYVTKDLLQAKRFQAQTLGTTYIYDFPEMFRQALFKLWGSPDKYPKDILTYTELVLDSQGQLVEMNRLPGGNEVGMVAFKMRFKTQEYPEGRDVIVIGNDITFRIGSFGPGEDLLYLRASEMARAEGIPKIYVAANSGARIGMAEEIKHMFHVAWVDPEDPHKGFKYLYLTPQDYTRISSLNSVHCKHIEEGGESRYMITDIIGKDDGLGVENLRGSGMIAGESSLAYEEIVTISLVTCRAIGIGAYLVRLGQRVIQVENSHIILTGASALNKVLGREVYTSNNQLGGVQIMHYNGVSHITVPDDFEGVYTILEWLSYMPKDNHSPVPIITPTDPIDREIEFLPSRAPYDPRWMLAGRPHPTLKGTWQSGFFDHGSFKEIMAPWAQTVVTGRARLGGIPVGVIAVETRTVEVAVPADPANLDSEAKIIQQAGQVWFPDSAYKTAQAVKDFNREKLPLMIFANWRGFSGGMKDMYDQVLKFGAYIVDGLRQYKQPILIYIPPYAELRGGSWVVIDATINPLCIEMYADKESRGGVLEPEGTVEIKFRKKDLIKSMRRIDPAYKKLMEQLGEPDLSDKDRKDLEGRLKAREDLLLPIYHQVAVQFADFHDTPGRMLEKGVISDILEWKTARTFLYWRLRRLLLEDQVKQEILQASGELSHVHIQSMLRRWFVETEGAVKAYLWDNNQVVVQWLEQHWQAGDGPRSTIRENITYLKHDSVLKTIRGLVEENPEVAVDCVIYLSQHISPAERAQVVHLLSTMDSPAST

SEQ ID NO: 98 - protein, 2458 aa, Homo Sapiens; identical to SEQ ID NO: 97

SEQ ID NO: 99 - protein, 859 aa, Homo Sapiens
  misc_feature (1)..(1): Xaa can be any naturally occurring amino acid
XMTVPISITNPDLLRHSTELFMDSGFSPLCQRMGAMVAFRRFEDFTRNFDEVISCFANVPKDTPLFSEARTSLYSEDDCKSLREEPIHILNVSIQCADHLEDEALVPILRTFVQSKKNILVDYGLRRITFLIAQEKEFPKFFTFRARDEFAEDRIYRHLEPALAFQLELNRMRNFDLTAVPCANHKMHLYLGAAKVKEGVEVTDHRFFIRAIIRHSDLITKEASFEYLQNEGERLLLEAMDELEVAFNNTSVRTDCNHIFLNFVPTVIMDPFKIEESVRYMVMRYGSRLWKLRVLQAEVKINIRQTTTGSAVPIRLFITNESGYYLDISLYKEVTDSRSGNIMFHSFGNKQGPQHGMLINTPYVTKDLLQAKRFQAQTLGTTYIYDFPEMFRQALFKLWGSPDKYPKDILTYTELVLDSQGQLVEMNRLPGGNEVGMVAFKMRFKTQEYPEGRDVIVIGNDITFRIGSFGPGEDLLYLRASEMARAEGIPKIYVAANSGARIGMAEEIKHMFHVAWVDPEDPHKGFKYLYLTPQDYTRISSLNSVHCKHIEEGGESRYMITDIIGKDDGLGVENLRGSGMIAGESSLAYEEIVTISLVTCRAIGIGAYLVRLGQRVIQVENSHIILTGASALNKVLGREVYTSNNQLGGVQIMHYNGVSHITVPDDFEGVYTILEWLSYMPKDNHSPVPIITPTDPIDREIEFLPSRAPYDPRWMLAGRPHPTLKGTWQSGFFDHGSFKEIMAPWAQTVVTGRARLGGIPVGVIAVETRTVEVAVPADPANLDSEAKIIQQAGQVWFPDSAYKTAQAVKDFNREKLPLMIFANWRGFSGGMKGCLGTWRDVSWWKIRAMLPMHIGEGSV

SEQ ID NO: 100 - protein, 112 aa, Homo Sapiens
  misc_feature (1)..(1): Xaa can be any naturally occurring amino acid
XVEMNRLPGGNEVGMVAFKMRFKTQEYPEGRDVIVIGNDITFRIGSFGPGEDLLYLRASEMARAEGIPKIYVAANSGARIGMAEEIKHMFHVAWVDPEDPHKIHDHGYHREG

SEQ ID NO: 101 - protein, 2431 aa, Homo Sapiens
MTTLLWVFVTLRVITAAVTVETSDHDNSLSVSIPQPSPLRVLLGTSLTIPCYFIDPMHPVTTAPSTAPLAPRIKWSRVSKEKEVVLLVATEGRVRVNSAYQDKVSLPNYPAIPSDATLEVQSLRSNDSGVYRCEVMHGIEDSEATLEVVVKGIVFHYRAISTRYTLDFDRAQRACLQNSAIIATPEQLQAAYEDGFHQCDAGWLADQTVRYPIHTPREGCYGDKDEFPGVRTYGIRDTNETYDVYCFAEEMEGEVFYATSPEKFTFQEAANECRRLGARLATTGQLYLAWQAGMDMCSAGWLADRSVRYPISKARPNCGGNLLGVRTVYVHANQTGYPDPSSRYDAICYTGEDFVDIPENFFGVGGEEDITVQTVTWPDMELPLPRNITEGEARGSVILTVKPIFEVSPSPLEPEEPFTFAPEIGATAFAEVENETGEATRPWGFPTPGLGPATAFTSEDLVVQVTAVPGQPHLPGGVVFHYRPGPTRYSLTFEEAQQACLRTGAVIASPEQLQAAYEAGYEQCDAGWLRDQTVRYPIVSPRTPCVGDKDSSPGVRTYGVRPSTETYDVYCFVDRLEGEVFFATRLEQFTFQEALEFCESHNATLATTGQLYAAWSRGLDKCYAGWLADGSLRYPIVTPRPACGGDKPGVRTVYLYPNQTGLPDPLSRHHAFCFRGISAVPSPGEEEGGTPTSPSGVEEWIVTQVVPGVAAVPVEEETTAVPSGETTAILEFTTEPENQTEWEPAYTPVGTSPLPGILPTWPPTGAATEESTEGPSATEVPSASEEPSPSEVPFPSEEPSPSEEPFPSVRPFPSVELFPSEEPFPSKEPSPSEEPSASEEPYTPSPPVPSWTELPSSGEESGAPDVSGDFTGSGDVSGHLDFSGQLSGDRASGLPSGDLDSSGLTSTVGSGLPVESGLPSGDEERIEWPSTPTVGELPSGAEILEGSASGVGDLSGLPSGEVLETSASGVGDLSGLPSGEVLETTAPGVEDISGLPSGEVLETTAPGVEDISGLPSGEVLETTAPGVEDISGLPSGEVLETTAPGVEDISGLPSGEVLETTAPGVEDISGLPSGEVLETTAPGVEDISGLPSGEVLETAAPGVEDISGLPSGEVLETAAPGVEDISGLPSGEVLETAAPGVEDISGLPSGEVLETAAPGVEDISGLPSGEVLETAAPGVEDISGLPSGEVLETAAPGVEDISGLPSGEVLETAAPGVEDISGLPSGEVLETAAPGVEDISGLPSGEVLETAAPGVEDISGLPSGEVLETAAPGVEDISGLPSGEVLETAAPGVEDISGLPSGEVLETAAPGVEDISGLPSGEVLETAAPGVEDISGLPSGEVLETAAPGVEDISGLPSGEVLETAAPGVEDISGLPSGEVLETAAPGVEDISGLPSGEVLETTAPGVEEISGLPSGEVLETTAPGVDEISGLPSGEVLETTAPGVEEISGLPSGEVLETSTSAVGDLSGLPSGGEVLEISVSGVEDISGLPSGEVVETSASGIEDVSELPSGEGLETSASGVEDLSRLPSGEEVLEISASGFGDLSGLPSGGEGLETSASEVGTDLSGLPSGREGLETSASGAEDLSGLPSGKEDLVGSASGDLDLGKLPSGTLGSGQAPETSGLPSGFSGEYSGVDLGSGPPSGLPDFSGLPSGFPTVSLVDSTLVEVVTASTASELEGRGTIGISGAGEISGLPSSELDISGRASGLPSGTELSGQASGSPDVSGEIPGLFGVSGQPSGFPDTSGETSGVTELSGLSSGQPGISGEASGVLYGTSQPFGITDLSGETSGVPDLSGQPSGLPGFSGATSGVPDLVSGTTSGSGESSGITFVDTSLVEVAPTTFKEEEGLGSVELSGLPSGEADLSGKSGMVDVSGQFSGTVDSSGFTSQTPEFSGLPSGIAEVSGESSRAEIGSSLPSGAYYGSGTPSSFPTVSLVDRTLVESVTQAPTAQEAGEGPSGILELSGAHSGAPDMSGEHSGFLDLSGLQSGLIEPSGEPPGTPYFSGDFASTTNVSGESSVAMGTSGEASGLPEVTLITSEFVEGVTEPTISQELGQRPPVTHTPQLFESSGKVSTAGDISGATPVLPGSGVEVSSVPESSSETSAYPEAGFGASAAPEASREDSGSPDLSETTSAFHEANLERSSGLGVSGSTLTFQEGEASAAPEVSGESTTTSDVGTEAPGLPSATPTASGDRTEISGDLSGHTSQLGVVISTSIPESEWTQQTQRPAETHLEIESSSLLYSGEETHTVETATSPTDASIPASPEWKRESESTAADQEVCEEGWNKYQGHCYRHFPDRETWVDAERRCREQQSHLSSIVTPEEQEFVNNNAQDYQWIGLNDRTIEGDFRWSDGHPMQFENWRPNQPDNFFAAGEDCVVMIWHEKGEWNDVPCNYHLPFTCKKGTATTYKRRLQKRSSRHPRRSRPSTAH

SEQ ID NO: 102 - protein, 2530 aa, Homo Sapiens
MTTLLWVFVTLRVITAAVTVETSDHDNSLSVSIPQPSPLRVLLGTSLTIPCYFIDPMHPVTTAPSTAPLAPRIKWSRVSKEKEVVLLVATEGRVRVNSAYQDKVSLPNYPAIPSDATLEVQSLRSNDSGVYRCEVMHGIEDSEATLEVVVKGIVFHYRAISTRYTLDFDRAQRACLQNSAIIATPEQLQAAYEDGFHQCDAGWLADQTVRYPIHTPREGCYGDKDEFPGVRTYGIRDTNETYDVYCFAEEMEGEVFYATSPEKFTFQEAANECRRLGARLATTGQLYLAWQAGMDMCSAGWLADRSVRYPISKARPNCGGNLLGVRTVYVHANQTGYPDPSSRYDAICYTGEDFVDIPENFFGVGGEEDITVQTVTWPDMELPLPRNITEGEARGSVILTVKPIFEVSPSPLEPEEPFTFAPEIGATAFAEVENETGEATRPWGFPTPGLGPATAFTSEDLVVQVTAVPGQPHLPGGVVFHYRPGPTRYSLTFEEAQQACLRTGAVIASPEQLQAAYEAGYEQCDAGWLRDQTVRYPIVSPRTPCVGDKDSSPGVRTYGVRPSTETYDVYCFVDRLEGEVFFATRLEQFTFQEALEFCESHNATLATTGQLYAAWSRGLDKCYAGWLADGSLRYPIVTPRPACGGDKPGVRTVYLYPNQTGLPDPLSRHHAFCFRGISAVPSPGEEEGGTPTSPSGVEEWIVTQVVPGVAAVPVEEETTAVPSGETTAILEFTTEPENQTEWEPAYTPVGTSPLPGILPTWPPTGAATEESTEGPSATEVPSASEEPSPSEVPFPSEEPSPSEEPFPSVRPFPSVELFPSEEPFPSKEPSPSEEPSASEEPYTPSPPVPSWTELPSSGEESGAPDVSGDFTGSGDVSGHLDFSGQLSGDRASGLPSGDLDSSGLTSTVGSGLPVESGLPSGDEERIEWPSTPTVGELPSGAEILEGSASGVGDLSGLPSGEVLETSASGVGDLSGLPSGEVLETTAPGVEDISGLPSGEVLETTAPGVEDISGLPSGEVLETTAPGVEDISGLPSGEVLETTAPGVEDISGLPSGEVLETTAPGVEDISGLPSGEVLETTAPGVEDISGLPSGEVLETAAPGVEDISGLPSGEVLETAAPGVEDISGLPSGEVLETAAPGVEDISGLPSGEVLETAAPGVEDISGLPSGEVLETAAPGVEDISGLPSGEVLETAAPGVEDISGLPSGEVLETAAPGVEDISGLPSGEVLETAAPGVEDISGLPSGEVLETAAPGVEDISGLPSGEVLETAAPGVEDISGLPSGEVLETAAPGVEDISGLPSGEVLETAAPGVEDISGLPSGEVLETAAPGVEDISGLPSGEVLETAAPGVEDISGLPSGEVLETAAPGVEDISGLPSGEVLETAAPGVEDISGLPSGEVLETTAPGVEEISGLPSGEVLETTAPGVDEISGLPSGEVLETTAPGVEEISGLPSGEVLETSTSAVGDLSGLPSGGEVLEISVSGVEDISGLPSGEVVETSASGIEDVSELPSGEGLETSASGVEDLSRLPSGEEVLEISASGFGDLSGLPSGGEGLETSASEVGTDLSGLPSGREGLETSASGAEDLSGLPSGKEDLVGSASGDLDLGKLPSGTLGSGQAPETSGLPSGFSGEYSGVDLGSGPPSGLPDFSGLPSGFPTVSLVDSTLVEVVTASTASELEGRGTIGISGAGEISGLPSSELDISGRASGLPSGTELSGQASGSPDVSGEIPGLFGVSGQPSGFPDTSGETSGVTELSGLSSGQPGISGEASGVLYGTSQPFGITDLSGETSGVPDLSGQPSGLPGFSGATSGVPDLVSGTTSGSGESSGITFVDTSLVEVAPTTFKEEEGLGSVELSGLPSGEADLSGKSGMVDVSGQFSGTVDSSGFTSQTPEFSGLPSGIAEVSGESSRAEIGSSLPSGAYYGSGTPSSFPTVSLVDRTLVESVTQAPTAQEAGEGPSGILELSGAHSGAPDMSGEHSGFLDLSGLQSGLIEPSGEPPGTPYFSGDFASTTNVSGESSVAMGTSGEASGLPEVTLITSEFVEGVTEPTISQELGQRPPVTHTPQLFESSGKVSTAGDISGATPVLPGSGVEVSSVPESSSETSAYPEAGFGASAAPEASREDSGSPDLSETTSAFHEANLERSSGLGVSGSTLTFQEGEASAAPEVSGESTTTSDVGTEAPGLPSATPTASGDRTEISGDLSGHTSQLGVVISTSIPESEWTQQTQRPAETHLEIESSSLLYSGEETHTVETATSPTDASIPASPEWKRESESTAAAPARSCAEEPCGAGTCKETEGHVICLCPPGYTGEHCNIDQEVCEEGWNKYQGHCYRHFPDRETWVDAERRCREQQSHLSSIVTPEEQEFVNNNAQDYQWIGLNDRTIEGDFRWSDGHPMQFENWRPNQPDNFFAAGEDCVVMIWHEKGEWNDVPCNYHLPFTCKKGTVACGEPPVVEHARTFGQKKDRYEINSLVRYQCTEGFVQRHMPTIRCQPSGHWEEPQITCTDPTTYKRRLQKRSSRHPRRSRPSTAH

SEQ ID NO: 103 - protein, 2492 aa, Homo Sapiens
MTTLLWVFVTLRVITAAVTVETSDHDNSLSVSIPQPSPLRVLLGTSLTIPCYFIDPMHPVTTAPSTAPLAPRIKWSRVSKEKEVVLLVATEGRVRVNSAYQDKVSLPNYPAIPSDATLEVQSLRSNDSGVYRCEVMHGIEDSEATLEVVVKGIVFHYRAISTRYTLDFDRAQRACLQNSAIIATPEQLQAAYEDGFHQCDAGWLADQTVRYPIHTPREGCYGDKDEFPGVRTYGIRDTNETYDVYCFAEEMEGEVFYATSPEKFTFQEAANECRRLGARLATTGQLYLAWQAGMDMCSAGWLADRSVRYPISKARPNCGGNLLGVRTVYVHANQTGYPDPSSRYDAICYTGEDFVDIPENFFGVGGEEDITVQTVTWPDMELPLPRNITEGEARGSVILTVKPIFEVSPSPLEPEEPFTFAPEIGATAFAEVENETGEATRPWGFPTPGLGPATAFTSEDLVVQVTAVPGQPHLPGGVVFHYRPGPTRYSLTFEEAQQACLRTGAVIASPEQLQAAYEAGYEQCDAGWLRDQTVRYPIVSPRTPCVGDKDSSPGVRTYGVRPSTETYDVYCFVDRLEGEVFFATRLEQFTFQEALEFCESHNATLATTGQLYAAWSRGLDKCYAGWLADGSLRYPIVTPRPACGGDKPGVRTVYLYPNQTGLPDPLSRHHAFCFRGISAVPSPGEEEGGTPTSPSGVEEWIVTQVVPGVAAVPVEEETTAVPSGETTAILEFTTEPENQTEWEPAYTPVGTSPLPGILPTWPPTGAATEESTEGPSATEVPSASEEPSPSEVPFPSEEPSPSEEPFPSVRPFPSVELFPSEEPFPSKEPSPSEEPSASEEPYTPSPPVPSWTELPSSGEESGAPDVSGDFTGSGDVSGHLDFSGQLSGDRASGLPSGDLDSSGLTSTVGSGLPVESGLPSGDEERIEWPSTPTVGELPSGAEILEGSASGVGDLSGLPSGEVLETSASGVGDLSGLPSGEVLETTAPGVEDISGLPSGEVLETTAPGVEDISGLPSGEVLETTAPGVEDISGLPSGEVLETTAPGVEDISGLPSGEVLETTAPGVEDISGLPSGEVLETTAPGVEDISGLPSGEVLETAAPGVEDISGLPSGEVLETAAPGVEDISGLPSGEVLETAAPGVEDISGLPSGEVLETAAPGVEDISGLPSGEVLETAAPGVEDISGLPSGEVLETAAPGVEDISGLPSGEVLETAAPGVEDISGLPSGEVLETAAPGVEDISGLPSGEVLETAAPGVEDISGLPSGEVLETAAPGVEDISGLPSGEVLETAAPGVEDISGLPSGEVLETAAPGVEDISGLPSGEVLETAAPGVEDISGLPSGEVLETAAPGVEDISGLPSGEVLETAAPGVEDISGLPSGEVLETAAPGVEDISGLPSGEVLETTAPGVEEISGLPSGEVLETTAPGVDEISGLPSGEVLETTAPGVEEISGLPSGEVLETSTSAVGDLSGLPSGGEVLEISVSGVEDISGLPSGEVVETSASGIEDVSELPSGEGLETSASGVEDLSRLPSGEEVLEISASGFGDLSGLPSGGEGLETSASEVGTDLSGLPSGREGLETSASGAEDLSGLPSGKEDLVGSASGDLDLGKLPSGTLGSGQAPETSGLPSGFSGEYSGVDLGSGPPSGLPDFSGLPSGFPTVSLVDSTLVEVVTASTASELEGRGTIGISGAGEISGLPSSELDISGRASGLPSGTELSGQASGSPDVSGEIPGLFGVSGQPSGFPDTSGETSGVTELSGLSSGQPGISGEASGVLYGTSQPFGITDLSGETSGVPDLSGQPSGLPGFSGATSGVPDLVSGTTSGSGESSGITFVDTSLVEVAPTTFKEEEGLGSVELSGLPSGEADLSGKSGMVDVSGQFSGTVDSSGFTSQTPEFSGLPSGIAEVSGESSRAEIGSSLPSGAYYGSGTPSSFPTVSLVDRTLVESVTQAPTAQEAGEGPSGILELSGAHSGAPDMSGEHSGFLDLSGLQSGLIEPSGEPPGTPYFSGDFASTTNVSGESSVAMGTSGEASGLPEVTLITSEFVEGVTEPTISQELGQRPPVTHTPQLFESSGKVSTAGDISGATPVLPGSGVEVSSVPESSSETSAYPEAGFGASAAPEASREDSGSPDLSETTSAFHEANLERSSGLGVSGSTLTFQEGEASAAPEVSGESTTTSDVGTEAPGLPSATPTASGDRTEISGDLSGHTSQLGVVISTSIPESEWTQQTQRPAETHLEIESSSLLYSGEETHTVETATSPTDASIPASPEWKRESESTAADQEVCEEGWNKYQGHCYRHFPDRETWVDAERRCREQQSHLSSIVTPEEQEFVNNNAQDYQWIGLNDRTIEGDFRWSDGHPMQFENWRPNQPDNFFAAGEDCVVMIWHEKGEWNDVPCNYHLPFTCKKGTVACGEPPVVEHARTFGQKKDRYEINSLVRYQCTEGFVQRHMPTIRCQPSGHWEEPQITCTDPTTYKRRLQKRSSRHPRRSRPSTAH

SEQ ID NO: 104 - protein, 721 aa, Homo Sapiens
MTTLLWVFVTLRVITAAVTVETSDHDNSLSVSIPQPSPLRVLLGTSLTIPCYFIDPMHPVTTAPSTAPLAPRIKWSRVSKEKEVVLLVATEGRVRVNSAYQDKVSLPNYPAIPSDATLEVQSLRSNDSGVYRCEVMHGIEDSEATLEVVVKGIVFHYRAISTRYTLDFDRAQRACLQNSAIIATPEQLQAAYEDGFHQCDAGWLADQTVRYPIHTPREGCYGDKDEFPGVRTYGIRDTNETYDVYCFAEEMEGEVFYATSPEKFTFQEAANECRRLGARLATTGQLYLAWQAGMDMCSAGWLADRSVRYPISKARPNCGGNLLGVRTVYVHANQTGYPDPSSRYDAICYTGEDFVDIPENFFGVGGEEDITVQTVTWPDMELPLPRNITEGEARGSVILTVKPIFEVSPSPLEPEEPFTFAPEIGATAFAEVENETGEATRPWGFPTPGLGPATAFTSEDLVVQVTAVPGQPHLPGGVVFHYRPGPTRYSLTFEEAQQACLRTGAVIASPEQLQAAYEAGYEQCDAGWLRDQTVRYPIVSPRTPCVGDKDSSPGVRTYGVRPSTETYDVYCFVDRLEGEVFFATRLEQFTFQEALEFCESHNATLATTGQLYAAWSRGLDKCYAGWLADGSLRYPIVTPRPACGGDKPGVRTVYLYPNQTGLPDPLSRHHAFCFRGMQPHFGSNSPFCLERTPLGSPDPATTQYPIHQSKKMSVPLGQSQL

SEQ ID NO: 105 - protein, 2530 aa, Homo Sapiens; identical to SEQ ID NO: 102

SEQ ID NO: 106 - protein, 2568 aa, Homo Sapiens
MTTLLWVFVTLRVITAAVTVETSDHDNSLSVSIPQPSPLRVLLGTSLTIPCYFIDPMHPVTTAPSTAPLAPRIKWSRVSKEKEVVLLVATEGRVRVNSAYQDKVSLPNYPAIPSDATLEVQSLRSNDSGVYRCEVMHGIEDSEATLEVVVKGIVFHYRAISTRYTLDFDRAQRACLQNSAIIATPEQLQAAYEDGFHQCDAGWLADQTVRYPIHTPREGCYGDKDEFPGVRTYGIRDTNETYDVYCFAEEMEGEVFYATSPEKFTFQEAANECRRLGARLATTGQLYLAWQAGMDMCSAGWLADRSVRYPISKARPNCGGNLLGVRTVYVHANQTGYPDPSSRYDAICYTGEDFVDIPENFFGVGGEEDITVQTVTWPDMELPLPRNITEGEARGSVILTVKPIFEVSPSPLEPEEPFTFAPEIGATAFAEVENETGEATRPWGFPTPGLGPATAFTSEDLVVQVTAVPGQPHLPGGVVFHYRPGPTRYSLTFEEAQQACLRTGAVIASPEQLQAAYEAGYEQCDAGWLRDQTVRYPIVSPRTPCVGDKDSSPGVRTYGVRPSTETYDVYCFVDRLEGEVFFATRLEQFTFQEALEFCESHNATLATTGQLYAAWSRGLDKCYAGWLADGSLRYPIVTPRPACGGDKPGVRTVYLYPNQTGLPDPLSRHHAFCFRGISAVPSPGEEEGGTPTSPSGVEEWIVTQVVPGVAAVPVEEETTAVPSGETTAILEFTTEPENQTEWEPAYTPVGTSPLPGILPTWPPTGAATEESTEGPSATEVPSASEEPSPSEVPFPSEEPSPSEEPFPSVRPFPSVELFPSEEPFPSKEPSPSEEPSASEEPYTPSPPVPSWTELPSSGEESGAPDVSGDFTGSGDVSGHLDFSGQLSGDRASGLPSGDLDSSGLTSTVGSGLPVESGLPSGDEERIEWPSTPTVGELPSGAEILEGSASGVGDLSGLPSGEVLETSASGVGDLSGLPSGEVLETTAPGVEDISGLPSGEVLETTAPGVEDISGLPSGEVLETTAPGVEDISGLPSGEVLETTAPGVEDISGLPSGEVLETTAPGVEDISGLPSGEVLETTAPGVEDISGLPSGEVLETAAPGVEDISGLPSGEVLETAAPGVEDISGLPSGEVLETAAPGVEDISGLPSGEVLETAAPGVEDISGLPSGEVLETAAPGVEDISGLPSGEVLETAAPGVEDISGLPSGEVLETAAPGVEDISGLPSGEVLETAAPGVEDISGLPSGEVLETAAPGVEDISGLPSGEVLETAAPGVEDISGLPSGEVLETAAPGVEDISGLPSGEVLETAAPGVEDISGLPSGEVLETAAPGVEDISGLPSGEVLETAAPGVEDISGLPSGEVLETAAPGVEDISGLPSGEVLETAAPGVEDISGLPSGEVLETTAPGVEEISGLPSGEVLETTAPGVDEISGLPSGEVLETTAPGVEEISGLPSGEVLETSTSAVGDLSGLPSGGEVLEISVSGVEDISGLPSGEVVETSASGIEDVSELPSGEGLETSASGVEDLSRLPSGEEVLEISASGFGDLSGLPSGGEGLETSASEVGTDLSGLPSGREGLETSASGAEDLSGLPSGKEDLVGSASGDLDLGKLPSGTLGSGQAPETSGLPSGFSGEYSGVDLGSGPPSGLPDFSGLPSGFPTVSLVDSTLVEVVTASTASELEGRGTIGISGAGEISGLPSSELDISGRASGLPSGTELSGQASGSPDVSGEIPGLFGVSGQPSGFPDTSGETSGVTELSGLSSGQPGISGEASGVLYGTSQPFGITDLSGETSGVPDLSGQPSGLPGFSGATSGVPDLVSGTTSGSGESSGITFVDTSLVEVAPTTFKEEEGLGSVELSGLPSGEADLSGKSGMVDVSGQFSGTVDSSGFTSQTPEFSGLPSGIAEVSGESSRAEIGSSLPSGAYYGSGTPSSFPTVSLVDRTLVESVTQAPTAQEAGEGPSGILELSGAHSGAPDMSGEHSGFLDLSGLQSGLIEPSGEPPGTPYFSGDFASTTNVSGESSVAMGTSGEASGLPEVTLITSEFVEGVTEPTISQELGQRPPVTHTPQLFESSGKVSTAGDISGATPVLPGSGVEVSSVPESSSETSAYPEAGFGASAAPEASREDSGSPDLSETTSAFHEANLERSSGLGVSGSTLTFQEGEASAAPEVSGESTTTSDVGTEAPGLPSATPTASGDRTEISGDLSGHTSQLGVVISTSIPESEWTQQTQRPAETHLEIESSSLLYSGEETHTVETATSPTDASIPASPEWKRESESTAAAPARSCAEEPCGAGTCKETEGHVICLCPPGYTGEHCNIDIDECLSSPCLNGATCVDAIDSFTCLCLPSYEGDLCEIDQEVCEEGWNKYQGHCYRHFPDRETWVDAERRCREQQSHLSSIVTPEEQEFVNNNAQDYQWIGLNDRTIEGDFRWSDGHPMQFENWRPNQPDNFFAAGEDCVVMIWHEKGEWNDVPCNYHLPFTCKKGTVACGEPPVVEHARTFGQKKDRYEINSLVRYQCTEGFVQRHMPTIRCQPSGHWEEPQITCTDPTTYKRRLQKRSSRHPRRSRPSTAH

SEQ ID NO: 107 - protein, 2473 aa, Homo Sapiens
MTTLLWVFVTLRVITAAVTVETSDHDNSLSVSIPQPSPLRVLLGTSLTIPCYFIDPMHPVTTAPSTAPLAPRIKWSRVSKEKEVVLLVATEGRVRVNSAYQDKVSLPNYPAIPSDATLEVQSLRSNDSGVYRCEVMHGIEDSEATLEVVVKGIVFHYRAISTRYTLDFDRAQRACLQNSAIIATPEQLQAAYEDGFHQCDAGWLADQTVRYPIHTPREGCYGDKDEFPGVRTYGIRDTNETYDVYCFAEEMEGEVFYATSPEKFTFQEAANECRRLGARLATTGQLYLAWQAGMDMCSAGWLADRSVRYPISKARPNCGGNLLGVRTVYVHANQTGYPDPSSRYDAICYTGEDFVDIPENFFGVGGEEDITVQTVTWPDMELPLPRNITEGEARGSVILTVKPIFEVSPSPLEPEEPFTFAPEIGATAFAEVENETGEATRPWGFPTPGLGPATAFTSEDLVVQVTAVPGQPHLPGGVVFHYRPGPTRYSLTFEEAQQACLRTGAVIASPEQLQAAYEAGYEQCDAGWLRDQTVRYPIVSPRTPCVGDKDSSPGVRTYGVRPSTETYDVYCFVDRLEGEVFFATRLEQFTFQEALEFCESHNATLATTGQLYAAWSRGLDKCYAGWLADGSLRYPIVTPRPACGGDKPGVRTVYLYPNQTGLPDPLSRHHAFCFRGISAVPSPGEEEGGTPTSPSGVEEWIVTQVVPGVAAVPVEEETTAVPSGETTAILEFTTEPENQTEWEPAYTPVGTSPLPGILPTWPPTGAATEESTEGPSATEVPSASEEPSPSEVPFPSEEPSPSEEPFPSVRPFPSVELFPSEEPFPSKEPSPSEEPSASEEPYTPSPPVPSWTELPSSGEESGAPDVSGDFTGSGDVSGHLDFSGQLSGDRASGLPSGDLDSSGLTSTVGSGLPVESGLPSGDEERIEWPSTPTVGELPSGAEILEGSASGVGDLSGLPSGEVLETSASGVGDLSGLPSGEVLETTAPGVEDISGLPSGEVLETTAPGVEDISGLPSGEVLETTAPGVEDISGLPSGEVLETTAPGVEDISGLPSGEVLETTAPGVEDISGLPSGEVLETAAPGVEDISGLPSGEVLETAAPGVEDISGLPSGEVLETAAPGVEDISGLPSGEVLETAAPGVEDISGLPSGEVLETAAPGVEDISGLPSGEVLETAAPGVEDISGLPSGEVLETAAPGVEDISGLPSGEVLETAAPGVEDISGLPSGEVLETAAPGVEDISGLPSGEVLETAAPGVEDISGLPSGEVLETAAPGVEDISGLPSGEVLETAAPGVEDISGLPSGEVLETAAPGVEDISGLPSGEVLETAAPGVEDISGLPSGEVLETAAPGVEDISGLPSGEVLETAAPGVEDISGLPSGEVLETTAPGVEEISGLPSGEVLETTAPGVDEISGLPSGEVLETTAPGVEEISGLPSGEVLETSTSAVGDLSGLPSGGEVLEISVSGVEDISGLPSGEVVETSASGIEDVSELPSGEGLETSASGVEDLSRLPSGEEVLEISASGFGDLSGLPSGGEGLETSASEVGTDLSGLPSGREGLETSASGAEDLSGLPSGKEDLVGSASGDLDLGKLPSGTLGSGQAPETSGLPSGFSGEYSGVDLGSGPPSGLPDFSGLPSGFPTVSLVDSTLVEVVTASTASELEGRGTIGISGAGEISGLPSSELDISGRASGLPSGTELSGQASGSPDVSGEIPGLFGVSGQPSGFPDTSGETSGVTELSGLSSGQPGISGEASGVLYGTSQPFGITDLSGETSGVPDLSGQPSGLPGFSGATSGVPDLVSGTTSGSGESSGITFVDTSLVEVAPTTFKEEEGLGSVELSGLPSGEADLSGKSGMVDVSGQFSGTVDSSGFTSQTPEFSGLPSGIAEVSGESSRAEIGSSLPSGAYYGSGTPSSFPTVSLVDRTLVESVTQAPTAQEAGEGPSGILELSGAHSGAPDMSGEHSGFLDLSGLQSGLIEPSGEPPGTPYFSGDFASTTNVSGESSVAMGTSGEASGLPEVTLITSEFVEGVTEPTISQELGQRPPVTHTPQLFESSGKVSTAGDISGATPVLPGSGVEVSSVPESSSETSAYPEAGFGASAAPEASREDSGSPDLSETTSAFHEANLERSSGLGVSGSTLTFQEGEASAAPEVSGESTTTSDVGTEAPGLPSATPTASGDRTEISGDLSGHTSQLGVVISTSIPESEWTQQTQRPAETHLEIESSSLLYSGEETHTVETATSPTDASIPASPEWKRESESTAADQEVCEEGWNKYQGHCYRHFPDRETWVDAERRCREQQSHLSSIVTPEEQEFVNNNAQDYQWIGLNDRTIEGDFRWSDGHPMQFENWRPNQPDNFFAAGEDCVVMIWHEKGEWNDVPCNYHLPFTCKKGTVACGEPPVVEHARTFGQKKDRYEINSLVRYQCTEGFVQRHMPTIRCQPSGHWEEPQITCTDPTTYKRRLQKRSSRHPRRSRPSTAH

SEQ ID NO: 108 - protein, 156 aa, Homo Sapiens
  misc_feature (1)..(1): Xaa can be any naturally occurring amino acid
XWNDVPCNYHLPFTCKKGTVACGEPPVVEHARTFGQKKDRYEINSLVRYQCTEGFVQRHMPTIRCQPSGHWEEPQITCTDREHHPGHLAEHRPPPTNADYRSGAHGTLGGAAPAQPTEKSFQDAPRTLSPGACQADVHPTQTVSSSCRFLSYKESH

SEQ ID NO: 109 - protein, 282 aa, Homo Sapiens
LDMETTYSVATVCHPNGSCLQLEPDLTNVMATSRKYEDLLWAWEGWRDKAGRAILQFYPKYVELINQAARLNGYVDAGDSWRSMYETPSLEQDLERLFQELQPLYLNLHAYVRRALHRHYGAQHINLEGPIPAHLLGNMWAQTWSNIYDLVVPFPSAPSMDTTEAMLKQGWTPRRMFKEADDFFTSLGLLPVPPEFWNKSMLEKPTDGREVVCHASAWDFYNEHDINFLMKMALDKIAFIPFSYLVDQWRWRVFDGSITKENYNQEWWSLRLKYQGLCPPVP

SEQ ID NO: 110 - protein, 314 aa, Homo Sapiens
MDEGGCSQAAPAFAEGAGLGSGAPALSGSCLLTSGRCRCHRHRTALSIHPPLARPLFWSQFLLHHSHEADSLQKEEARLPQTKEEAALLSQEFAEAWGQKAKELYEPIWQNFTDPQLRRIIGAVRTLGSANLPLAKRQQYNALLSNMSRIYSTAKVCLPNKTATCWSLDPDLTNILASSRSYAMLLFAWEGWHNAAGIPLKPLYEDFTALSNEAYKQDGFTDTGAYWRSWYNSPTFEDDLEHLYQQLEPLYLNLHAFVRRALHRRYGDRYINLRGPIPAHLLGDMWAQSWENIYDMVVPFPDKPNLDVTSTMLQ

SEQ ID NO: 111 - protein, 168 aa, Homo Sapiens
MGAASGRRGPGLLLPLPLLLLLPPQPALALDPGLQPGNFSADEAGAQLFAQSYNSSAEQVLFQSVAASWAHDTNITAENARRQEEAALLSQEFAEAWGQKAKELYEPIWQNFTDPQLRRIIGAVRTLGSANLPLAKRQQISPTSWLPREATPCSCLPGRAGTTLRASR

SEQ ID NO: 112 - protein, 1306 aa, Homo Sapiens
MGAASGRRGPGLLLPLPLLLLLPPQPALALDPGLQPGNFSADEAGAQLFAQSYNSSAEQVLFQSVAASWAHDTNITAENARRQEEAALLSQEFAEAWGQKAKELYEPIWQNFTDPQLRRIIGAVRTLGSANLPLAKRQQYNALLSNMSRIYSTAKVCLPNKTATCWSLDPDLTNILASSRSYAMLLFAWEGWHNAAGIPLKPLYEDFTALSNEAYKQDGFTDTGAYWRSWYNSPTFEDDLEHLYQQLEPLYLNLHAFVRRALHRRYGDRYINLRGPIPAHLLGDMWAQSWENIYDMVVPFPDKPNLDVTSTMLQQGWNATHMFRVAEEFFTSLELSPMPPEFWEGSMLEKPADGREVVCHASAWDFYNRKDFRIKQCTRVTMDQLSTVHHEMGHIQYYLQYKDLPVSLRRGANPGFHEAIGDVLALSVSTPEHLHKIGLLDRVTNDTESDINYLLKMALEKIAFLPFGYLVDQWRWGVFSGRTPPSRYNFDWWYLRTKYQGICPPVTRNETHFDAGAKFHVPNVTPYIRYFVSFVLQFQFHEALCKEAGYEGPLHQCDIYRSTKAGAKLRKVLQAGSSRPWQEVLKDMVGLDALDAQPLLKYFQPVTQWLQEQNQQNGEVLGWPEYQWHPPLPDNYPEGIDLVTDEAEASKFVEEYDRTSQVVWNEYAEANWNYNTNITTETSKILLQKNMQIANHTLKYGTQARKFDVNQLQNTTIKRIIKKVQDLERAALPAQELEEYNKILLDMETTYSVATVCHPNGSCLQLEPDLTNVMATSRKYEDLLWAWEGWRDKAGRAILQFYPKYVELINQAARLNGYVDAGDSWRSMYETPSLEQDLERLFQELQPLYLNLHAYVRRALHRHYGAQHINLEGPIPAHLLGNMWAQTWSNIYDLVVPFPSAPSMDTTEAMLKQGWTPRRMFKEADDFFTSLGLLPVPPEFWNKSMLEKPTDGREVVCHASAWDFYNGKDFRIKQCTTVNLEDLVVAHHEMGHIQYFMQYKDLPVALREGANPGFHEAIGDVLALSVSTPKHLHSLNLLSSEGGSDEHDINFLMKMALDKIAFIPFSYLVDQWRWRVFDGSITKENYNQEWWSLRLKYQGLCPPVPRTQGDFDPGAKFHIPSSVPYIRYFVSFIIQFQFHEALCQAAGHTGPLHKCDIYQSKEAGQRLATAMKLGFSRPWPEAMQLITGQPNMSASAMLSYFKPLLDWLRTENELHGEKLGWPQYNWTPNSARSEGPLPDSGRVSFLGLDLDAQQARVGQWLLLFLGIALLVATLGLSQRLFSIRHRSLHRHSHGPQFGSEVELRHS

SEQ ID NO: 113 - protein, 1242 aa, Homo Sapiens
MGAASGRRGPGLLLPLPLLLLLPPQPALALDPGLQPGNFSADEAGAQLFAQSYNSSAEQVLFQSVAASWAHDTNITAENARRQEEAALLSQEFAEAWGQKAKELYEPIWQNFTDPQLRRIIGAVRTLGSANLPLAKRQQYNALLSNMSRIYSTAKVCLPNKTATCWSLDPDLTNILASSRSYAMLLFAWEGWHNAAGIPLKPLYEDFTALSNEAYKQDGFTDTGAYWRSWYNSPTFEDDLEHLYQQLEPLYLNLHAFVRRALHRRYGDRYINLRGPIPAHLLGDMWAQSWENIYDMVVPFPDKPNLDVTSTMLQQGWNATHMFRVAEEFFTSLELSPMPPEFWEGSMLEKPADGREVVCHASAWDFYNRKDFRIKQCTRVTMDQLSTVHHEMGHIQYYLQYKDLPVSLRRGANPGFHEAIGDVLALSVSTPEHLHKIGLLDRVTNDTESDINYLLKMALEKIAFLPFGYLVDQWRWGVFSGRTPPSRYNFDWWYLRTKYQGICPPVTRNETHFDAGAKFHVPNVTPYIRYFVSFVLQFQFHEALCKEAGYEGPLHQCDIYRSTKAGAKLRKVLQAGSSRPWQEVLKDMVGLDALDAQPLLKYFQPVTQWLQEQNQQNGEVLGWPEYQWHPPLPDNYPEGIDLVTDEAEASKFVEEYDRTSQVVWNEYAEANWNYNTNITTETSKILLQKNMQIANHTLKYGTQARKFDVNQLQNTTIKRIIKKVQDLERAALPAQELEEYNKILLDMETTYSVATVCHPNGSCLQLEPDLTNVMATSRKYEDLLWAWEGWRDKAGRAILQFYPKYVELINQAARLNGYVDAGDSWRSMYETPSLEQDLERLFQELQPLYLNLHAYVRRALHRHYGAQHINLEGPIPAHLLGNMWAQTWSNIYDLVVPFPSAPSMDTTEAMLKQGWTPRRMFKEADDFFTSLGLLPVPPEFWNKSMLEKPTDGREVVCHASAWDFYNGKDFRIKQCTTVNLEDLVVAHHEMGHIQYFMQYKDLPVALREGANPGFHEAIGDVLALSVSTPKHLHSLNLLSSEGGSDEHDINFLMKMALDKIAFIPFSYLVDQWRWRVFDGSITKENYNQEWWSLRLKYQGLCPPVPRTQGDFDPGAKFHIPSSVPYIRYFVSFIIQFQFHEALCQAAGHTGPLHKCDIYQSKEAGQRLATAMKLGFSRPWPEAMQLITGQPNMSASAMLSYFKPLLDWLRTENELHGEKLGWPQYNWTPNSGTATHPTSSLGS

SEQ ID NO: 114 - protein, 36 aa, Homo Sapiens
MGQGWATAGLPSLLFLLLCYGHPLLVPSQEASQQTW

SEQ ID NO: 115 - protein, 36 aa, Homo Sapiens; identical to SEQ ID NO: 114

SEQ ID NO: 116 - protein, 145 aa, Homo Sapiens
MGQGWATAGLPSLLFLLLCYGHPLLVPSQEASQQVTVTHGTSSQATTSSQTTTHQATAHQTSAQSPNLVTDEAEASKFVEEYDRTSQVVWNEYAEANWNYNTNITTETSKILGLYDTWGSSLLCPCLDMCCLTAGIQGGCRRTCK

SEQ ID NO: 117 - protein, 208 aa, Homo Sapiens
MGQGWATAGLPSLLFLLLCYGHPLLVPSQEASQQVTVTHGTSSQATTSSQTTTHQATAHQTSAQSPNLVTDEAEASKFVEEYDRTSQVVWNEYAEANWNYNTNITTETSKILLQKNMQIANHTLKYGTQARKFDVNQLQNTTIKRIIKKVQDLERAALPAQELEEYNKILLDMETTYSVATVCHPNGSCLQLEPALKFSELPLQAEVS

SEQ ID NO: 118 - protein, 732 aa, Homo Sapiens
MGQGWATAGLPSLLFLLLCYGHPLLVPSQEASQQVTVTHGTSSQATTSSQTTTHQATAHQTSAQSPNLVTDEAEASKFVEEYDRTSQVVWNEYAEANWNYNTNITTETSKILLQKNMQIANHTLKYGTQARKFDVNQLQNTTIKRIIKKVQDLERAALPAQELEEYNKILLDMETTYSVATVCHPNGSCLQLEPDLTNVMATSRKYEDLLWAWEGWRDKAGRAILQFYPKYVELINQAARLNGYVDAGDSWRSMYETPSLEQDLERLFQELQPLYLNLHAYVRRALHRHYGAQHINLEGPIPAHLLGNMWAQTWSNIYDLVVPFPSAPSMDTTEAMLKQGWTPRRMFKEADDFFTSLGLLPVPPEFWNKSMLEKPTDGREVVCHASAWDFYNGKDFRIKQCTTVNLEDLVVAHHEMGHIQYFMQYKDLPVALREGANPGFHEAIGDVLALSVSTPKHLHSLNLLSSEGGSDEHDINFLMKMALDKIAFIPFSYLVDQWRWRVFDGSITKENYNQEWWSLRLKYQGLCPPVPRTQGDFDPGAKFHIPSSVPYIRYFVSFIIQFQFHEALCQAAGHTGPLHKCDIYQSKEAGQRLATAMKLGFSRPWPEAMQLITGQPNMSASAMLSYFKPLLDWLRTENELHGEKLGWPQYNWTPNSARSEGPLPDSGRVSFLGLDLDAQQARVGQWLLLFLGIALLVATLGLSQRLFSIRHRSLHRHSHGPQFGSEVELRHS

SEQ ID NO: 119 - protein, 691 aa, Homo Sapiens
MGQGWATAGLPSLLFLLLCYGHPLLVPSQEASQQVTVTHGTSSQATTSSQTTTHQATAHQTSAQSPNLVTDEAEASKFVEEYDRTSQVVWNEYAEANWNYNTNITTETSKILLQKNMQIANHTLKYGTQARKFDVNQLQNTTIKRIIKKVQDLERAALPAQELEEYNKILLDMETTYSVATVCHPNGSCLQLEPDLTNVMATSRKYEDLLWAWEGWRDKAGRAILQFYPKYVELINQAARLNGYVDAGDSWRSMYETPSLEQDLERLFQELQPLYLNLHAYVRRALHRHYGAQHINLEGPIPAHLLGNMWAQTWSNIYDLVVPFPSAPSMDTTEAMLKQGWTPRRMFKEADDFFTSLGLLPVPPEFWNKSMLEKPTDGREVVCHASAWDFYNGKDFRIKQCTTVNLEDLVVAHHEMGHIQYFMQYKDLPVALREGANPGFHEAIGDVLALSVSTPKHLHSLNLLSSEGGSDEHDINFLMKMALDKIAFIPFSYLVDQWRWRVFDGSITKENYNQEWWSLRLKYQGLCPPVPRTQGDFDPGAKFHIPSSVPYIRTAMKLGFSRPWPEAMQLITGQPNMSASAMLSYFKPLLDWLRTENELHGEKLGWPQYNWTPNSARSEGPLPDSGRVSFLGLDLDAQQARVGQWLLLFLGIALLVATLGLSQRLFSIRHRSLHRHSHGPQFGSEVELRHS

SEQ ID NO: 120 - protein, 119 aa, Homo Sapiens
  misc_feature (1)..(1): Xaa can be any naturally occurring amino acid
XQAGSSRPWQEVLKDMVGLDALDAQPLLKYFQPVTQWLQEQNQQNGEVLGWPEYQWHPPLPDNYPEGIGDSHPWDKQPGNNQQPDNHPPGDGPPDISPEPKWDHAGEGQGARGGRGGAG

SEQ ID NO: 121 - protein, 138 aa, Homo Sapiens
  misc_feature (1)..(1): Xaa can be any naturally occurring amino acid
XRTQGDFDPGAKFHIPSSVPYIRYFVSFIIQFQFHEALCQAAGHTGPLHKCDIYQSKEAGQRLATAMKLGFSRPWPEAMQLITGQPNMSASAMLSYFKPLLDWLRTENELHGEKLGWPQYNWTPNSGTATHPTSSLGS

SEQ ID NO: 122 - protein, 94 aa, Homo Sapiens
MLGLVMSCPDRTLVTKVRSHPSGNQHRPTRGGSRSFHCRRGVRPRPAALRVLPRCPAFSDAACPAAMRPPQCLLHTPSLASPLLLLLLWLLGGG

SEQ ID NO: 123 - protein, 55 aa, Homo Sapiens
MRPPQCLLHTPSLASPLLLLLLWLLGGGVGAEGREDAELLVTVLRAPRCGTPTVS

SEQ ID NO: 124 - protein, 159 aa, Homo Sapiens
MRPPQCLLHTPSLASPLLLLLLWLLGGGVGAEGREDAELLVTVRGGRLRGIRLKTPGGPVSAFLGIPFAEPPMGPRRFLPPEPKQPWSGVVDATTFQSVCYQYVDTLYPGFEGTEMWNPNRELSEDCLYLNVWTPYPRPTSPTPVLVWIYGGGFYSGAS

SEQ ID NO: 125 - protein, 614 aa, Homo Sapiens
MRPPQCLLHTPSLASPLLLLLLWLLGGGVGAEGREDAELLVTVRGGRLRGIRLKTPGGPVSAFLGIPFAEPPMGPRRFLPPEPKQPWSGVVDATTFQSVCYQYVDTLYPGFEGTEMWNPNRELSEDCLYLNVWTPYPRPTSPTPVLVWIYGGGFYSGASSLDVYDGRFLVQAERTVLVSMNYRVGAFGFLALPGSREAPGNVGLLDQRLALQWVQENVAAFGGDPTSVTLFGESAGAASVGMHLLSPPSRGLFHRAVLQSGAPNGPWATVGMGEARRRATQLAHLVGCPPGGTGGNDTELVACLRTRPAQVLVNHEWHVLPQESVFRFSFVPVVDGDFLSDTPEALINAGDFHGLQVLVGVVKDEGSYFLVYGAPGFSKDNESLISRAEFLAGVRVGVPQVSDLAAEAVVLHYTDWLHPEDPARLREALSDVVGDHNVVCPVAQLAGRLAAQGARVYAYVFEHRASTLSWPLWMGVPHGYEIEFIFGIPLDPSRNYTAEEKIFAQRLMRYWANFARTGDPNEPRDPKAPQWPPYTAGAQQYVSLDLRPLEVRRGLRAQACAFWNRFLPKLLSATDTLDEAERQWKAEFHRWSSYMVHWKNQFDHYSKQDRCSDL

SEQ ID NO: 126 - protein, 617 aa, Homo Sapiens
MRPPQCLLHTPSLASPLLLLLLWLLGGGVGAEGREDAELLVTVRGGRLRGIRLKTPGGPVSAFLGIPFAEPPMGPRRFLPPEPKQPWSGVVDATTFQSVCYQYVDTLYPGFEGTEMWNPNRELSEDCLYLNVWTPYPRPTSPTPVLVWIYGGGFYSGASSLDVYDGRFLVQAERTVLVSMNYRVGAFGFLALPGSREAPGNVGLLDQRLALQWVQENVAAFGGDPTSVTLFGESAGAASVGMHLLSPPSRGLFHRAVLQSGAPNGPWATVGMGEARRRATQLAHLVGCPPGGTGGNDTELVACLRTRPAQVLVNHEWHVLPQESVFRFSFVPVVDGDFLSDTPEALINAGDFHGLQVLVGVVKDEGSYFLVYGAPGFSKDNESLISRAEFLAGVRVGVPQVSDLAAEAVVLHYTDWLHPEDPARLREALSDVVGDHNVVCPVAQLAGRLAAQGARVYAYVFEHRASTLSWPLWMGVPHGYEIEFIFGIPLDPSRNYTAEEKIFAQRLMRYWANFARTGDPNEPRDPKAPQWPPYTAGAQQYVSLDLRPLEVRRGLRAQACAFWNRFLPKLLSATASEAPSTCPGFTHGEAAPRPGLPLPLLLLHQLLLLFLSHLRRL

SEQ ID NO: 127 - protein, 614 aa, Homo Sapiens; identical to SEQ ID NO: 125

SEQ ID NO: 128 - protein, 614 aa, Homo Sapiens; identical to SEQ ID NO: 125

SEQ ID NO: 129 - protein, 617 aa, Homo Sapiens; identical to SEQ ID NO: 126

SEQ ID NO: 130 - protein, 435 aa, Homo Sapiens [sequence omitted]

SEQ ID NO: 131 - protein, 398 aa, Homo Sapiens [sequence omitted]

SEQ ID NO: 132 - protein, 526 aa, Homo Sapiens
MRPPQCLLHTPSLASPLLLLLLWLLGGGVGAEGREDAELLVTVRGGRLRGIRLKTPGGPVSAFLGIPFAEPPMGPRRFLPPEPKQPWSGVVDATTFQSVCYQYVDTLYPGFEGTEMWNPNRELSEDCLYLNVWTPYPRPTSPTPVLVWIYGGGFYSGASSLDVYDGRFLVQAERTVLVSMNYRVGAFGFLALPGSREAPGNVGLLDQRLALQWVQENVAAFGGDPTSVTLFGESAGAASVGMHLLSPPSRGLFHRAVLQSGAPNGPWATVGMGEARRRATQLAHLVGCPPGGTGGNDTELVACLRTRPAQVLVNHEWHVLPQESVFRFSFVPVVDGDFLSDTPEALINAGDFHGLQLAGRLAAQGARVYAYVFEHRASTLSWPLWMGVPHGYEIEFIFGIPLDPSRNYTAEEKIFAQRLMRYWANFARTGDPNEPRDPKAPQWPPYTAGAQQYVSLDLRPLEVRRGLRAQACAFWNRFLPKLLSATDTLDEAERQWKAEFHRWSSYMVHWKNQFDHYSKQDRCSDL

SEQ ID NO: 133 - protein, 359 aa, Homo Sapiens
MRPPQCLLHTPSLASPLLLLLLWLLGGGVGAEGREDAELLVTVRGGRLRGIRLKTPGGPVSAFLGIPFAEPPMGPRRFLPPEPKQPWSGVVDATTFQSVCYQYVDTLYPGFEGTEMWNPNRELSEDCLYLNVWTPYPRPTSPTPVLVWIYGGGFYSGASSLDVYDGRFLVQAERTVLVSMNYRVGAFGFLALPGSREAPGNVGLLDQRLALQWVQENVAAFGGDPTSVTLFGESAGAASVGMHLLSPPSRGLFHRAVLQSGAPNGPWATVGMGEARRRATQLAHLVGCPPGGTGGNDTELVACLRTRPAQVLVNHEWHVLPQESVFRFSFVPVVDGDFLSDTPEALINAGDFHGLQGSQ

SEQ ID NO: 134 - protein, 403 aa, Homo Sapiens
MRPPQCLLHTPSLASPLLLLLLWLLGGGVGAEGREDAELLVTVRGGRLRGIRLKTPGGPVSAFLGIPFAEPPMGPRRFLPPEPKQPWSGVVDATTFQSVCYQYVDTLYPGFEGTEMWNPNRELSEDCLYLNVWTPYPRPTSPTPVLVWIYGGGFYSGASSLDVYDGRFLVQAERTVLVSMNYRVGAFGFLALPGSREAPGNVGLLDQRLALQWVQENVAAFGGDPTSVTLFGESAGAASVGMHLLSPPSRGLFHRAVLQSGAPNGPWATVGMGEARRRATQLAHLVGCPPGGTGGNDTELVACLRTRPAQVLVNHEWHVLPQESVFRFSFVPVVDGDFLSDTPEALINAGDFHGLQVLVGVVKDEGSYFLVYGAPGFSKDNESLISRAEFLAGVRVGVPQGSQ

SEQ ID NO: 135 - protein, 391 aa, Homo Sapiens
MAGKRSGWSRAALLQLLLGVNLVVMPPTRARSLRFVTLEGMLQHWELGQALRQRYHGFLNTSYHRQEVYVRSTDFDRTLMSAEANLAGLFPPNGMQRFNPNISWQPIPVHTVPITEDRLLKFPLGPCPRYEQLQNETRQTPEYQNESSRNAQFLDMVANETGLTDLTLETVWNVYDTLFCEQTHGLRLPPWASPQTMQRLSRLKDFSFRFLFGIYQQAEKARLQGGVLLAQIRKNLTLMATTSQLPKLLVYSAHDTTLVALQMALDVYNGEQAPYASCHIFELYQEDSGNFSVEMYFRNESDKAPWPLSLPGCPHRCPLQDFLRLTEPVVPKDWQQECQLASGPADTEVIVALAVCGSILFLLIVLLLTVLFRMQAQPPGYRHVADGEDHA

SEQ ID NO: 136 - protein, 151 aa, Homo Sapiens
MAGKRSGWSRAALLQLLLGVNLVVMPPTRARSLRFVTLLYRHGDRSPVKTYPKDPYQEEEWPQGFGQLTKEGMLQHWELGQALRQRYHGFLNTSYHRQEVYVRSTDFDRTLMSAEANLAGLFPPNGMQRFNPNISWQPIPVHTVPITEDRD

SEQ ID NO: 137 - protein, 423 aa, Homo Sapiens
MAGKRSGWSRAALLQLLLGVNLVVMPPTRARSLRFVTLLYRHGDRSPVKTYPKDPYQEEEWPQGFGQLTKEGMLQHWELGQALRQRYHGFLNTSYHRQEVYVRSTDFDRTLMSAEANLAGLFPPNGMQRFNPNISWQPIPVHTVPITEDRLLKFPLGPCPRYEQLQNETRQTPEYQNESSRNAQFLDMVANETGLTDLTLETVWNVYDTLFCEQTHGLRLPPWASPQTMQRLSRLKDFSFRFLFGIYQQAEKARLQGGVLLAQIRKNLTLMATTSQLPKLLVYSAHDTTLVALQMALDVYNGEQAPYASCHIFELYQEDSGNFSVEMYFRNESDKAPWPLSLPGCPHRCPLQDFLRLTEPVVPKDWQQECQLASGPADTEVIVALAVCGSILFLLIVLLLTVLFRMQAQPPGYRHVADGEDHA

SEQ ID NO: 138 - protein, 162 aa, Homo Sapiens
MAGKRSGWSRAALLQLLLGVNLVVMPPTRARSLRFVTLLYRHGDRSPVKTYPKDPYQEEEWPQGFGQLTKEGMLQHWELGQALRQRYHGFLNTSYHRQEVYVRSTDFDRTLMSAEANLAGLFPPNGMQRFNPNISWQPIPVHTVPITEDRQAQVTRTVEHSA

SEQ ID NO: 139 - protein, 305 aa, Homo Sapiens
MAGKRSGWSRAALLQLLLGVNLVVMPPTRARSLRFVTLLYRHGDRSPVKTYPKDPYQEEEWPQGFGQLTKEGMLQHWELGQALRQRYHGFLNTSYHRQEVYVRSTDFDRTLMSAEANLAGLFPPNGMQRFNPNISWQPIPVHTVPITEDRQFLDMVANETGLTDLTLETVWNVYDTLFCEQTHGLRLPPWASPQTMQRLSRLKDFSFRFLFGIYQQAEKARLQGGVLLAQIRKNLTLMATTSQLPKLLVYSAHDTTLVALQMALDVYNGEQAPYASCHIFELYQEDSGNFSVEMYFRNESDKAPW

SEQ ID NO: 140 - protein, 360 aa, Homo Sapiens
MAGKRSGWSRAALLQLLLGVNLVVMPPTRARSLRFVTLLYRHGDRSPVKTYPKDPYQEEEWPQGFGQLTKEGMLQHWELGQALRQRYHGFLNTSYHRQEVYVRSTDFDRTLMSAEANLAGLFPPNGMQRFNPNISWQPIPVHTVPITEDRQTHGLRLPPWASPQTMQRLSRLKDFSFRFLFGIYQQAEKARLQGGVLLAQIRKNLTLMATTSQLPKLLVYSAHDTTLVALQMALDVYNGEQAPYASCHIFELYQEDSGNFSVEMYFRNESDKAPWPLSLPGCPHRCPLQDFLRLTEPVVPKDWQQECQLASGPADTEVIVALAVCGSILFLLIVLLLTVLFRMQAQPPGYRHVADGEDHA

SEQ ID NO: 141 - protein, 160 aa, Homo Sapiens
MAGKRSGWSRAALLQLLLGVNLVVMPPTRARSLRFVTLLYRHGDRSPVKTYPKDPYQEEEWPQGFGQLTKEGMLQHWELGQALRQRYHGFLNTSYHRQEVYVRSTDFDRTLMSAEANLAGLFPPNGMQRFNPNISWQPIPVHTVPITEDRSRTETLIHFS

SEQ ID NO: 142 - protein, 395 aa, Homo Sapiens
MGVRMTEYVGLYRHGDRSPVKTYPKDPYQEEEWPQGFGQLTKEGMLQHWELGQALRQRYHGFLNTSYHRQEVYVRSTDFDRTLMSAEANLAGLFPPNGMQRFNPNISWQPIPVHTVPITEDRLLKFPLGPCPRYEQLQNETRQTPEYQNESSRNAQFLDMVANETGLTDLTLETVWNVYDTLFCEQTHGLRLPPWASPQTMQRLSRLKDFSFRFLFGIYQQAEKARLQGGVLLAQIRKNLTLMATTSQLPKLLVYSAHDTTLVALQMALDVYNGEQAPYASCHIFELYQEDSGNFSVEMYFRNESDKAPWPLSLPGCPHRCPLQDFLRLTEPVVPKDWQQECQLASGPADTEVIVALAVCGSILFLLIVLLLTVLFRMQAQPPGYRHVADGEDHA

SEQ ID NO: 143 - protein, 6 aa, Homo Sapiens
MDMWTA

SEQ ID NO: 144 - protein, 52 aa, Homo Sapiens
MDMWTALLILQALLLPSLADGATPALRFVAVGDWGGVPNAPFHTAREMANAK

SEQ ID NO: 145 - protein, 74 aa, Homo Sapiens
MDMWTALLILQALLLPSLADGATPALRFVAVGDWGGVPNAPFHTAREMANAKEIARTVQILGADFILSLGDNFY

SEQ ID NO: 146 - protein, 124 aa, Homo Sapiens
MDMWTALLILQALLLPSLADGATPALRFVAVGDWGGVPNAPFHTAREMANAKEIARTVQILGADFILSLGDNFYFTGVQDINDKRFQETFEDVFSDRSLRKVPWYVLAGNHDHLGNVSAQIAYS

SEQ ID NO: 147 - protein, 325 aa, Homo Sapiens
MDMWTALLILQALLLPSLADGATPALRFVAVGDWGGVPNAPFHTAREMANAKEIARTVQILGADFILSLGDNFYFTGVQDINDKRFQETFEDVFSDRSLRKVPWYVLAGNHDHLGNVSAQIAYSKISKRWNFPSPFYRLHFKIPQTNVSVAIFMLDTVTLCGNSDDFLSQQPERPRDVKLARTQLSWLKKQLAAAREDYVLVAGHYPVWSIAEHGPTHCLVKQLRPLLATYGVTAYLCGHDHNLQYLQDENGVGYVLSGAGNFMDPSKRHQRKVPNGYLRFHYGTEDSLGGFAYVEISSKEMTVTYIEASGKSLFKTRLPRRARP

SEQ ID NO: 148 - protein, 325 aa, Homo Sapiens; identical to SEQ ID NO: 147

SEQ ID NO: 149 - protein, 325 aa, Homo Sapiens; identical to SEQ ID NO: 147

SEQ ID NO: 150 - protein, 325 aa, Homo Sapiens; identical to SEQ ID NO: 147

SEQ ID NO: 151 - protein, 59 aa, Homo Sapiens
MDMWTALLILQALLLPSLGISWTPQSGTSARSPTAICASTMGLKTHWVALPMWRSAPKR

SEQ ID NO: 152 - protein, 228 aa, Homo Sapiens
MITGVFSMRLWTPVGVLTSLAYCLHQRRVALAELQEADGQCPVDRSLLKLKMVQVVFRHGARSPLKPLPLEEQGGMFAGQLTKVGMQQMFALGERLRKNYVEDIPFLSPTFNPQEVFIRSTNIFRNLESTRCLLAGLFQCQKEGPIIIHTDEADSEVLYPNYQSCWSLRQRTRGRRQTASLQPGISEDLKKVKDRMGIDSSDKVDFFILLDNVAAEQEKMGSCRFHGS

SEQ ID NO: 153 - protein, 428 aa, Homo Sapiens
MITGVFSMRLWTPVGVLTSLAYCLHQRRVALAELQEADGQCPVDRSLLKLKMVQVVFRHGARSPLKPLPLEEQVEWNPQLLEVPPQTQFDYTVTNLAGGPKPYSPYDSQYHETTLKGGMFAGQLTKVGMQQMFALGERLRKNYVEDIPFLSPTFNPQEVFIRSTNIFRNLESTRCLLAGLFQCQKEGPIIIHTDEADSEVLYPNYQSCWSLRQRTRGRRQTASLQPGISEDLKKVKDRMGIDSSDKVDFFILLDNVAAEQAHNLPSCPMLKRFARMIEQRAVDTSLYILPKEDRESLQMAVGPFLHILESNLLKAMDSATAPDKIRKLYLYAAHDVTFIPLLMTLGIFDHKWPPFAVDLTMELYQHLESKEWFVQLYYHGKEQVPRGCPDGLCPLDMFLNAMSVYTLSPEKYHALCSQTQVMEVGNEE

SEQ ID NO: 154 - protein, 271 aa, Homo Sapiens
MITGVFSMRLWTPVGVLTSLAYCLHQRRVALAELQEADGQCPVDRSLLKLKMVQVVFRHGARSPLKPLPLEEQVEWNPQLLEVPPQTQFDYTVTNLAGGPKPYSPYDSQYHETTLKGGMFAGQLTKVGMQQMFALGERLRKNYVEDIPFLSPTFNPQEVFIRSTNIFRNLESTRCLLAGLFQCQKEGPIIIHTDEADSEVLYPNYQSCWSLRQRTRGRRQTASLQPGISEDLKKVKDRMGIDSSDKVDFFILLDNVAAEQEKMGSCRFHGS

SEQ ID NO: 155 - protein, 77 aa, Homo Sapiens
MITGVFSMRLWTPVGVLTSLAYCLHQRRVALAELQEADGQCPVDRSLLKLKMVQVVFRHGARSPLKPLPLEEQYSFH

SEQ ID NO: 156 - protein, 143 aa, Homo Sapiens
MVQVVFRHGARSPLKPLPLEEQVEWNPQLLEVPPQTQFDYTVTNLAGGPKPYSPYDSQYHETTLKGGMFAGQLTKVGMQQMFALGERLRKNYVEDIPFLSPTFNPQEVFIRSTNIFRNLESTRCLLAGLFQCQKEGPIIIHTD

SEQ ID NO: 157 - protein, 166 aa, Homo Sapiens
  misc_feature (1)..(1): Xaa can be any naturally occurring amino acid
XDSQYHETTLKGGMFAGQLTKVGMQQMFALGERLRKNYVEDIPFLSPTFNPQEVFIRSTNIFRNLESTRCLLAGLFQCQKEGPIIIHTDEADSEVLYPNYQSCWSLRQRTRGRRQTASLQPGISEDLKKVKDRMGIDSSDKVDFFILLDNVAAEQEKMGSCRFHGS

SEQ ID NO: 158 - protein, 157 aa, Homo Sapiens
  misc_feature (1)..(1): Xaa can be any naturally occurring amino acid
XRCLLAGLFQCQKEGPIIIHTDEADSEVLYPNYQSCWSLRQRTRGRRQTASLQPGISEDLKKVKDRMGIDSSDKVDFFILLDNVAAEQAHNLPSCPMLKRFARMIEQRAVDTSLYILPKEDRESLQMAVGPFLHILESNLLKAMDSATAPDKIRTCR

SEQ ID NO: 159 - protein, 334 aa, Homo Sapiens
MHPLPGYWSCYCLLLLFSLGVQGSLGAPSAAPEQVHLSYPGEPGSMTVTWTTWVPTRSEVQFGLQPSGPLPLRAQGTFVPFVDGGILRRKLYIHRVTLRKLLPGVQYVYRCGSAQGWSRRFRFRALKNGAHWSPRLAVFGDLGADNPKAVPRLRRDTQQGMYDAVLHVATSLTTRLASACRGIMRACGTAGIWVPPTSSPSPPRSISFSIMAATWYRGSFAGWRATSRKPIRTGQPGRGSSLWGTGPCTAPTQIWTTAHDMKARSAKASKASCTGWRIFSTNMEWICSCGLMSTRMNDCGQFTTTRYLTAAERCPTPTREGLSTSSQDLLMGRS

SEQ ID NO: 160 - protein, 367 aa, Homo Sapiens
MHPLPGYWSCYCLLLLFSLGVQGSLGAPSAAPEQVHLSYPGEPGSMTVTWTTWVPTRSEVQFGLQPSGPLPLRAQGTFVPFVDGGILRRKLYIHRVTLRKLLPGVQYVYRCGSAQGWSRRFRFRALKNGAHWSPRLAVFGDLGADNPKAVPRLRRDTQQGMYDAVLHVATSLTTRLASACRGIMRACGTGNVGVLGDWPSPLKDGRCRGALVPDPCPLTPPAGIWVPPTSSPSPPRSISFSIMAATWYRGSFAGWRATSRKPIRTGQPGRGSSLWGTGPCTAPTQIWTTAHDMKARSAKASKASCTGWRIFSTNMEWICSCGLMSTRMNDCGQFTTTRYLTAAERCPTPTREGLSTSSQDLLAVRSG

SEQ ID NO: 161 - protein, 438 aa, Homo Sapiens
MHPLPGYWSCYCLLLLFSLGVQGSLGAPSAAPEQVHLSYPGEPGSMTVTWTTWVPTRSEVQFGLQPSGPLPLRAQGTFVPFVDGGILRRKLYIHRVTLRKLLPGVQYVYRCGSAQGWSRRFRFRALKNGAHWSPRLAVFGDLGADNPKAVPRLRRDTQQGMYDAVLHVGDFAYNLDQDNARVGDRFMRLIEPVAASLPYMTCPGNHEERYNFSNYKARFSMPGDNEGLWYSWDLGPAHIISFSTEVYFFLHYGRHLVQRQFRWLESDLQKANKNRAARPWIITMGHRPMYCSNADLDDCTRHESKVRKGLQGKLYGLEDLFYKYGVDLQLWAHEHSYERLWPIYNYQVFNGSREMPYTNPRGPVHIITGSAGCEERLTPFAVFPRPWSAVRVKEYGYTRLHILNGTHIHIQQVSDDQDGKIVDDVWVVRPLFGRRMYL

SEQ ID NO: 162 - protein, 227 aa, Homo Sapiens
  misc_feature (1)..(1): Xaa can be any naturally occurring amino acid
XGADNPKAVPRLRRDTQQGMYDAVLHVGDFAYNLDQDNARVGDRFMRLIEPVAASLPYMTCPGNHEERYNFSNYKARFSMPGDNEGLWYSWDLGPAHIISFSTEVYFFLHYGRHLVQRQFRWLESDLQKANKNRAARPWIITMGHRPMYCSNADLDDCTRHESKVRKGLQGKLYGLEDLFYKYGVDLQLWAHEHSYERLWPIYNYQDGKIVDDVWVVRPLFGRRMYL

SEQ ID NO: 163 - protein, 353 aa, Homo Sapiens
MRAAPLLLARAASLSLGFLFLLFFWLDRSVLAKELKFVTLVFRHGDRSPIDTFPTDPIKESSWPQGFGQLTQLGMEQHYELGEYIRKRYRKFLNESYKHEQVYIRSTDVDRTLMSAMTNLAALFPPEGVSIWNPILLWQPIPVHTVPLSEDQDFIATLGKLSGLHGQDLFGIWSKVYDPLYCESVHNFTLPSWATEDTMTKLRELSELSLLSLYGIHKQKEKSRLQGGVLVNEILNHMKRATQIPSYKKLIMYSAHDTTVSGLQMALDVYNGLLPPYASCHLTELYFEKGEYFVEMYYRNETQHEPYPLMLPGCSPSCPLERFAELVGPVIPQDWSTECMTTNSHQGTEDSTD

SEQ ID NO: 164 - protein, 418 aa, Homo Sapiens
MRAAPLLLARAASLSLGFLFLLFFWLDRSVLAKELKFVTLVFRHGDRSPIDTFPTDPIKESSWPQGFGQLTQLGMEQHYELGEYIRKRYRKFLNESYKHEQVYIRSTDVDRTLMSAMTNLAALFPPEGVSIWNPILLWQPIPVHTVPLSEDQLLYLPFRNCPRFQELESETLKSEEFQKRLHPYKDFIATLGKLSGLHGQDLFGIWSKVYDPLYCESVHNFTLPSWATEDTMTKLRELSELSLLSLYGIHKQKEKSRLQGGVLVNEILNHMKRATQIPSYKKLIMYSAHDTTVSGLQMALDVYNGLLPPYASCHLTELYFEKGEYFVEMYYRNETQHEPYPLMLPGCSPSCPLERFAELVGPVIPQDWSTECMTTNSHQVLKVIFAVAFCLISAVLMVLLFIHIRRGLCWQRESYGNI

SEQ ID NO: 165 - protein, 386 aa, Homo Sapiens
MRAAPLLLARAASLSLGFLFLLFFWLDRSVLAKELKFVTLVFRHGDRSPIDTFPTDPIKESSWPQGFGQLTQLGMEQHYELGEYIRKRYRKFLNESYKHEQVYIRSTDVDRTLMSAMTNLAALFPPEGVSIWNPILLWQPIPVHTVPLSEDQLLYLPFRNCPRFQELESETLKSEEFQKRLHPYKDFIATLGKLSGLHGQDLFGIWSKVYDPLYCESVHNFTLPSWATEDTMTKLRELSELSLLSLYGIHKQKEKSRLQGGVLVNEILNHMKRATQIPSYKKLIMYSAHDTTVSGLQMALDVYNGLLPPYASCHLTELYFEKGEYFVEMYYRNETQHEPYPLMLPGCSPSCPLERFAELVGPVIPQDWSTECMTTNSHQGTEDSTD

SEQ ID NO: 166 - protein, 165 aa, Homo Sapiens
MRAAPLLLARAASLSLGFLFLLFFWLDRSVLAKELKFVTLVFRHGDRSPIDTFPTDPIKESSWPQGFGQLTQVYIRSTDVDRTLMSAMTNLAALFPPEGVSIWNPILLWQPIPVHTVPLSEDQLLYLPFRNCPRFQELESETLKSEEFQKRLHPYKDFIATLGKL

SEQ ID NO: 167 - protein, 99 aa, Homo Sapiens
  misc_feature (1)..(1): Xaa can be any naturally occurring amino acid
XELYFEKGEYFVEMYYRNETQHEPYPLMLPGCSPSCPLERFAELVGPVIPQDWSTECMTTNSHQGPAETAHSARRNHDIALPCGRSTCLENTVLYYHYG

SEQ ID NO: 168 - protein, 421 aa, Homo Sapiens
MVEMLPTAILLVLAVSVVAKDNATCDGPCGLRFRQNPQGGVRIVGGKAAQHGAWPWMVSLQIFTYNSHRYHTCGGSLLNSRWVLTAAHCFVGKNNVHDWRLVFGAKEITYGNNKPVKAPLQERYVEKIIIHEKYNSATEGNDIALVEITPPISCGRFIGPGCLPHFKAGLPRGSQSCWVAGWGYIEEKAPRPSSILMEARVDLIDLDLCNSTQWYNGRVQPTNVCAGYPVGKIDTCQGDSGGPLMCKDSKESAYVVVGITSWGVGCARAKRPGIYTATWPYLNWIASKIGSNALRMIQSATPPPPTTRPPPIRPPFSHPISAHLPWYFQPPPRPLPPRPPAAQPRPPPSPPPPPPPPASPLPPPPPPPPPTPSSTTKLPQGLSFAKRLQQLIEVLKGKTYSDGKNHYDMETTELPELTSTS

SEQ ID NO: 169 - protein, 212 aa, Homo Sapiens
MVEMLPTAILLVLAVSVVAKDNATCDGPCGLRFRQNPQGGVRIVGGKAAQHGAWPWMVSLQIFTYNSHRYHTCGGSLLNSRWVLTAAHCFVGKNNVHDWRLVFGAKEITYGNNKPVKAPLQERYVEKIIIHEKYNSATEGNDIALVEITPPISCGRFIGPGCLPHFKAGLPRGSQSCWVAGWGYIEEKGFLECPAGTSPFKTGVAVALELCP

SEQ ID NO: 170 - protein, 100 aa, Homo Sapiens
MRKPAAGFLPSLLKVLLLPLAPAAAQDSTQASTPGSPLSPTEYERFFALLTPTWKAETTCRLRATHGCRNPTLVQLDQYENHGLVPDESPVFPASLYSLT

SEQ ID NO: 171 - protein, 510 aa, Homo Sapiens
MRKPAAGFLPSLLKVLLLPLAPAAAQDSTQASTPGSPLSPTEYERFFALLTPTWKAETTCRLRATHGCRNPTLVQLDQYENHGLVPDGAVCSNLPYASWFESFCQFTHYRCSNHVYYAKRVLCSQPVSILSPNTLKEIEASAEVSPTTMTSPISPHFTAPEHKQEQGVEHRQEPTQEHKQEEGQKQEEQEEEQEEEGKQEEGQGTKEGREAVSQLQTDSEPKFHSESLSSNPSSFAPRVREVESTPMIMENIQELIRSAQEIDEMNEIYDENSYWRNQNPGSLLQLPHTEALLVLCYSIVENTCIITPTAKAWKYMEEEILGFGKSVCDSLGRRHMSTCALCDFCSLKLEQCHSEASLQRQQCDTSHKTPFVSPLLASQSLSIGNQVGSPESGRFYGLDLYGGLHMDFWCARLATKGCEDVRVSGWLQTEFLSFQDGDFPTKICDTDYIQYPNYCSFKSQQCLMRNRNRKVSRMRCLQNETYSALSPGKSEDVVLRWSQEFSTLTLGQFG

SEQ ID NO: 172 - protein, 174 aa, Homo Sapiens [sequence omitted]

SEQ ID NO: 173 - protein, 543 aa, Homo Sapiens
MRKPAAGFLPSLLKVLLLPLAPAAAQDSTQASTPGSPLSPTEYERFFALLTPTWKAETTCRLRATHGCRNPTLVQLDQYENHGLVPDGAVCSNLPYASWFESFCQFTHYRCSNHVYYAKRVLCSQPVSILSPNTLKEIEASAEVSPTTMTSPISPHFTVTERQTFQPWPERLSNNVEELLQSSLSLGGQEQAPEHKQEQGVEHRQEPTQEHKQEEGQKQEEQEEEQEEEGKQEEGQGTKEGREAVSQLQTDSEPKFHSESLSSNPSSFAPRVREVESTPMIMENIQELIRSAQEIDEMNEIYDENSYWRNQNPGSLLQLPHTEALLVLCYSIVENTCIITPTAKAWKYMEEEILGFGKSVCDSLGRRHMSTCALCDFCSLKLEQCHSEASLQRQQCDTSHKTPFVSPLLASQSLSIGNQVGSPESGRFYGLDLYGGLHMDFWCARLATKGCEDVRVSGWLQTEFLSFQDGDFPTKICDTDYIQYPNYCSFKSQQCLMRNRNRKVSRMRCLQNETYSALSPGKSEDVVLRWSQEFSTLTLGQFG

SEQ ID NO: 174 - protein, 319 aa, Homo Sapiens
MRKPAAGFLPSLLKVLLLPLAPAAAQDSTQASTPGSPLSPTEYERFFALLTPTWKAETTCRLRATHGCRNPTLVQLDQYENHGLVPDGAVCSNLPYASWFESFCQFTHYRCSNHVYYAKRVLCSQPVSILSPNTLKEIEASAEVSPTTMTSPISPHFTVTERQTFQPWPERLSNNVEELLQSSLSLGGQEQAPEHKQEQGVEHRQEPTQEHKQEEGQKQEEQEEEQEEEGKQEEGQGTKEGREAVSQLQTDSEPKFHSESLSSNPSSFAPRVREVESTPMIMENIQELIRSAQEIDEMNEIYDENSYWRNQNPGRYRKF

SEQ ID NO: 175 - protein, 265 aa, Homo Sapiens
MNRFLLLMSLYLLGSARGTSSQPNELSGSIDHQTSVQQLPGEFFSLENPSDAEALYETSSGLNTLSEHGSSEHGSSKHTVAEHTSGEHAESEHASGEPAATEHAEGEHTVGEQPSGEQPSGEHLSGEQPLSELESGEQPSDEQPSGEHGSGEQPSGEQASGEQPSGEHASGEQASGAPISSTSTGTILNCYTCAYMNDQGKCLRGEGTCITQNSQQCMLKKIFEGGKLQFMVQGCENMCPSMNLFSHGTRMQIICCRNQSFCNKI

SEQ ID NO: 176 - protein, 246 aa, Homo Sapiens
MNRFLLLMSLYLLGSARGTSSQPNELSGSIDHQTSVQQLPGEFFSLENPSDAEALYETSSGLNTLSEHGSSEHGSSKHTVAEHTSGEHAESEHASGEPAATEHAEGEHTVGEQPSGEQPSGEHLSGEQPLSELESGEQPSDEQPSGEHGSGEQPSGEQASGEQPSGTILNCYTCAYMNDQGKCLRGEGTCITQNSQQCMLKKIFEGGKLQFMVQGCENMCPSMNLFSHGTRMQIICCRNQSFCNKI

SEQ ID NO: 177 - protein, 210 aa, Homo Sapiens
MNRFLLLMSLYLLGSARGTSSQPNELSGSIDHQTSVQQLPGEPAATEHAEGEHTVGEQPSGEQPSGEHLSGEQPLSELESGEQPSDEQPSGEHGSGEQPSGEQASGEQPSGEHASGEQASGAPISSTSTGTILNCYTCAYMNDQGKCLRGEGTCITQNSQQCMLKKIFEGGKLQFMVQGCENMCPSMNLFSHGTRMQIICCRNQSFCNKI

SEQ ID NO: 178 - protein, 195 aa, Homo Sapiens
MNRFLLLMSLYLLGSARGTSSQPNELSGSIDHQTSVQQLPGEQPSGEQPSGEHLSGEQPLSELESGEQPSDEQPSGEHGSGEQPSGEQASGEQPSGEHASGEQASGAPISSTSTGTILNCYTCAYMNDQGKCLRGEGTCITQNSQQCMLKKIFEGGKLQFMVQGCENMCPSMNLFSHGTRMQIICCRNQSFCNKI

SEQ ID NO: 179 - protein, 45 aa, Homo Sapiens
MAVYVGMLRLGRLCAGSSGVLGARAALSRSWQEARLQGVRFLRCL

SEQ ID NO: 180 - protein, 54 aa, Homo Sapiens
MAVYVGMLRLGRLCAGSSGVLGARAALSRSWQEARLQGVRFLRPSGEKLAHQGV

SEQ ID NO: 181 - protein, 640 aa, Homo Sapiens
MAVYVGMLRLGRLCAGSSGVLGARAALSRSWQEARLQGVRFLSARGGMEAGRQRISVPSSFTASAAAHSREVDRMVSTPIGGLSYVQGCTKKHLNSKTVGQCLETTAQRVPEREALVVLHEDVRLTFAQLKEEVDKAASGLLSIGLCKGDRLGMWGPNSYAWVLMQLATAQAGIILVSVNPAYQAMELEYVLKKVGCKALVFPKQFKTQQYYNVLKQICPEVENAQPGALKSQRLPDLTTVISVDAPLPGTLLLDEVVAAGSTRQHLDQLQYNQQFLSCHDPINIQFTSGTTGSPKGATLSHYNIVNNSNILGERLKLHEKTPEQLRMILPNPLYHCLGSVAGTMMCLMYGATLILASPIFNGKKALEAISRERGTFLYGTPTMFVDILNQPDFSSYDISTMCGGVIAGSPAPPELIRAIINKINMKDLVVAYGTTENSPVTFAHFPEDTVEQKAESVGRIMPHTEARIMNMEAGTLAKLNTPGELCIRGYCVMLGYWGEPQKTEEAVDQDKWYWTGDVATMNEQGFCKIVGRSKDMIIRGGENIYPAELEDFFHTHPKVQEVQVVGVKDDRMGEEICACIRLKDGEETTVEEIKAFCKGKISHFKIPKYIVFVTNYPLTISGKIQKFKLREQMERHLNL

SEQ ID NO: 182 - protein, 615 aa, Homo Sapiens
MAVYVGMLRLGRLCAGSSGVLGARAALSRSWQEARLQGVRFLSSREVDRMVSTPIGGLSYVQGCTKKHLNSKTVGQCLETTAQRVPEREALVVLHEDVRLTFAQLKEEVDKAASGLLSIGLCKGDRLGMWGPNSYAWVLMQLATAQAGIILVSVNPAYQAMELEYVLKKVGCKALVFPKQFKTQQYYNVLKQICPEVENAQPGALKSQRLPDLTTVISVDAPLPGTLLLDEVVAAGSTRQHLDQLQYNQQFLSCHDPINIQFTSGTTGSPKGATLSHYNIVNNSNILGERLKLHEKTPEQLRMILPNPLYHCLGSVAGTMMCLMYGATLILASPIFNGKKALEAISRERGTFLYGTPTMFVDILNQPDFSSYDISTMCGGVIAGSPAPPELIRAIINKINMKDLVVAYGTTENSPVTFAHFPEDTVEQKAESVGRIMPHTEARIMNMEAGTLAKLNTPGELCIRGYCVMLGYWGEPQKTEEAVDQDKWYWTGDVATMNEQGFCKIVGRSKDMIIRGGENIYPAELEDFFHTHPKVQEVQVVGVKDDRMGEEICACIRLKDGEETTVEEIKAFCKGKISHFKIPKYIVFVTNYPLTISGKIQKFKLREQMERHLNL

SEQ ID NO: 183 - protein, 602 aa, Homo Sapiens
MAVYVGMLRLGRLCAGSSGVLGARAALSRSWQEARLQGVRFLSSREVDRMVSTPIGGLSYVQGCTKKHLNSKTVGQCLETTAQRVPEREALVVLHEDVRLTFAQLKEEVDKAASGLLSIGLCKGDRLGMWGPNSYAWVLMQLATAQAMELEYVLKKVGCKALVFPKQFKTQQYYNVLKQICPEVENAQPGALKSQRLPDLTTVISVDAPLPGTLLLDEVVAAGSTRQHLDQLQYNQQFLSCHDPINIQFTSGTTGSPKGATLSHYNIVNNSNILGERLKLHEKTPEQLRMILPNPLYHCLGSVAGTMMCLMYGATLILASPIFNGKKALEAISRERGTFLYGTPTMFVDILNQPDFSSYDISTMCGGVIAGSPAPPELIRAIINKINMKDLVVAYGTTENSPVTFAHFPEDTVEQKAESVGRIMPHTEARIMNMEAGTLAKLNTPGELCIRGYCVMLGYWGEPQKTEEAVDQDKWYWTGDVATMNEQGFCKIVGRSKDMIIRGGENIYPAELEDFFHTHPKVQEVQVVGVKDDRMGEEICACIRLKDGEETTVEEIKAFCKGKISHFKIPKYIVFVTNYPLTISGKIQKFKLREQMERHLNL

SEQ ID NO: 184 - protein, 183 aa, Homo Sapiens
MAVYVGMLRLGRLCAGSSGVLGARAALSRSWQEARLQGVRFLSSREVDRMVSTPIGGLSYVQGCTKKHLNSKTVGQCLETTAQRVPEREALVVLHEDVRLTFAQLKEEVDKAASGLLSIGLCKGVCEPSLPGYGTGVCPQEGGLQGPCVPQAIQDPAILQRPEADLSRSGECPARGLEESEAP

SEQ ID NO: 185 - protein, 572 aa, Homo Sapiens
MAVYVGMLRLGRLCAGSSGVLGARAALSRSWQEARLQGVRFLSSREVDRMVSTPIGGLSYVQGCTKKHLNSKTVGQCLETTAQRVPEREALVVLHEDVRLTFAQLKEEVSVNPAYQAMELEYVLKKVGCKALVFPKQFKTQQYYNVLKQICPEVENAQPGALKSQRLPDLTTVISVDAPLPGTLLLDEVVAAGSTRQHLDQLQYNQQFLSCHDPINIQFTSGTTGSPKGATLSHYNIVNNSNILGERLKLHEKTPEQLRMILPNPLYHCLGSVAGTMMCLMYGATLILASPIFNGKKALEAISRERGTFLYGTPTMFVDILNQPDFSSYDISTMCGGVIAGSPAPPELIRAIINKINMKDLVVAYGTTENSPVTFAHFPEDTVEQKAESVGRIMPHTEARIMNMEAGTLAKLNTPGELCIRGYCVMLGYWGEPQKTEEAVDQDKWYWTGDVATMNEQGFCKIVGRSKDMIIRGGENIYPAELEDFFHTHPKVQEVQVVGVKDDRMGEEICACIRLKDGEETTVEEIKAFCKGKISHFKIPKYIVFVTNYPLTISGKIQKFKLREQMERHLNL

SEQ ID NO: 186 - protein, 85 aa, Homo Sapiens
TVPPSSWPLPSSMARRHWRPSAERGVIAGSPAPPELIRAIINKINMKDLVKSQEEIAAWEDGQQSTDVLLERPGRLLMEPQRTVP

SEQ ID NO: 187 - protein, 104 aa, Homo Sapiens
  misc_feature (1)..(1): Xaa can be any naturally occurring amino acid
XGKKALEAISRERGTFLYGTPTMFVDILNQPDFSSYDISTMCGGVIAGSPAPPELIRAIINKINMKDLVKSQEEIAAWEDGQQSTDVLLERPGRLLMEPQRTVP

SEQ ID NO: 188 - protein, 245 aa, Homo Sapiens
MASTALLALCSTGAFSGLAVEAGAGVCHATPIYAGHSWHQATFRLNVAGSTLSRYLRDLLVAANPDLLQQALPRKAITHLKKRSCYVSLDFEGDLRDPARHHPASFSVGNGCCVCLSSERFRCPEPIFQPGLLGQAEQGLPALAFRALQKMPKTLRTRLADTVVLAGGSTLFPGFAERLDKELEAQCRRHGYAALRPHLVAKHGRGMAVWTGGSMVASLHSFQRRWITRAMYQECGSRLLYDVFN

SEQ ID NO: 189 - protein, 21 aa, Homo Sapiens
MVDGVMILPVLIMIALPSPSM

SEQ ID NO: 190 - protein, 71 aa, Homo Sapiens
MVDGVMILPVLIMIALPSPSMEDEKPKVNPKLYMCVCEGLSCGNEDHCEGQQCFSSLSINDGFHVYQKGCF

SEQ ID NO: 191 - protein, 73 aa, Homo Sapiens
MVDGVMILPVLIMIALPSPSMEDEKPKVNPKLYMCVCEGLSCGNEDHCEGQQCFSSLSINDGFHVYQKGCFQV

SEQ ID NO: 192 - protein, 87 aa, Homo Sapiens
MVDGVMILPVLIMIALPSPSMEDEKPKVNPKLYMCVCEGLSCGNEDHCEGQQCFSSLSINDGFHVYQKGCFQVYEQGKMTCKTPPSP

SEQ ID NO: 193 - protein, 87 aa, Homo Sapiens; identical to SEQ ID NO: 192

SEQ ID NO: 194 - protein, 509 aa, Homo Sapiens
MVDGVMILPVLIMIALPSPSMEDEKPKVNPKLYMCVCEGLSCGNEDHCEGQQCFSSLSINDGFHVYQKGCFQVYEQGKMTCKTPPSPGQAVECCQGDWCNRNITAQLPTKGKSFPGTQNFHLEVGLIILSVVFAVCLLACLLGVALRKFKRRNQERLNPRDVEYGTIEGLITTNVGDSTLADLLDHSCTSGSGSGLPFLVQRTVARQITLLECVGKGRYGEVWRGSWQGENVAVKIFSSRDEKSWFRETELYNTVMLRHENILGFIASDMTSRHSSTQLWLITHYHEMGSLYDYLQLTTLDTVSCLRIVLSIASGLAHLHIEIFGTQGKPAIAHRDLKSKNILVKKNGQCCIADLGLAVMHSQSTNQLDVGNNPRVGTKRYMAPEVLDETIQVDCFDSYKRVDIWAFGLVLWEVARRMVSNGIVEDYKPPFYDVVPNDPSFEDMRKVVCVDQQRPNIPNRWFSDPTLTSLAKLMKECWYQNPSARLTALRIKKTLTKIDNSLDKLKTDC

SEQ ID NO: 195 - protein, 509 aa, Homo Sapiens; identical to SEQ ID NO: 194

SEQ ID NO: 196 - protein, 509 aa, Homo Sapiens; identical to SEQ ID NO: 194

SEQ ID NO: 197 - protein, 509 aa, Homo Sapiens; identical to SEQ ID NO: 194

SEQ ID NO: 198 - protein, 443 aa, Homo Sapiens
MLTNGKEQVIKSCVSLPELNAQVFCHSSNNVTKTECCFTDFCNNITLHLPTASPNAPKLGPMELAIIITVPVCLLSIAAMLTVWACQGRQCSYRKKKRPNVEEPLSECNLVNAGKTLKDLIYDVTASGSGSGLPLLVQRTIARTIVLQEIVGKGRFGEVWHGRWCGEDVAVKIFSSRDERSWFREAEIYQTVMLRHENILGFIAADNKDNGTWTQLWLVSEYHEQGSLYDYLNRNIVTVAGMIKLALSIASGLAHLHMEIVGTQGKPAIAHRDIKSKNILVKKCETCAIADLGLAVKHDSILNTIDIPQNPKVGTKRYMAPEMLDDTMNVNIFESFKRADIYSVGLVYWEIARRCSVGGIVEEYQLPYYDMVPSDPSIEEMRKVVCDQKFRPSIPNQWQSCEALRVMGRIMRECWYANGAARLTALRIKKTISQLCVKEDCKA

SEQ ID NO: 199 - protein, 493 aa, Homo Sapiens
MTRALCSALRQALLLLAAAAELSPGLKCVCLLCDSSNFTCQTEGACWASVMLTNGKEQVIKSCVSLPELNAQVFCHSSNNVTKTECCFTDFCNNITLHLPTASPNAPKLGPMELAIIITVPVCLLSIAAMLTVWACQGRQCSYRKKKRPNVEEPLSECNLVNAGKTLKDLIYDVTASGSGSGLPLLVQRTIARTIVLQEIVGKGRFGEVWHGRWCGEDVAVKIFSSRDERSWFREAEIYQTVMLRHENILGFIAADNKDNGTWTQLWLVSEYHEQGSLYDYLNRNIVTVAGMIKLALSIASGLAHLHMEIVGTQGKPAIAHRDIKSKNILVKKCETCAIADLGLAVKHDSILNTIDIPQNPKVGTKRYMAPEMLDDTMNVNIFESFKRADIYSVGLVYWEIARRCSVGGIVEEYQLPYYDMVPSDPSIEEMRKVVCDQKFRPSIPNQWQSCEALRVMGRIMRECWYANGAARLTALRIKKTISQLCVKEDCKA

SEQ ID NO: 200 - protein, 336 aa, Homo Sapiens
MTRALCSALRQALLLLAAAAELSPGLKCVCLLCDSSNFTCQTEGACWASVMLTNGKEQVIKSCVSLPELNAQVFCHSSNNVTKTECCFTDFCNNITLHLPTDNGTWTQLWLVSEYHEQGSLYDYLNRNIVTVAGMIKLALSIASGLAHLHMEIVGTQGKPAIAHRDIKSKNILVKKCETCAIADLGLAVKHDSILNTIDIPQNPKVGTKRYMAPEMLDDTMNVNIFESFKRADIYSVGLVYWEIARRCSVGGIVEEYQLPYYDMVPSDPSIEEMRKVVCDQKFRPSIPNQWQSCEALRVMGRIMRECWYANGAARLTALRIKKTISQLCVKEDCKA

SEQ ID NO: 201 - protein, 413 aa, Homo Sapiens
MTRALCSALRQALLLLAAAAELSPGLKCVCLLCDSSNFTCQTEGACWASVMLTNGKEQVIKSCVSLPELNAQVFCHSSNNVTKTECCFTDFCNNITLHLPTGLPLLVQRTIARTIVLQEIVGKGRFGEVWHGRWCGEDVAVKIFSSRDERSWFREAEIYQTVMLRHENILGFIAADNKDNGTWTQLWLVSEYHEQGSLYDYLNRNIVTVAGMIKLALSIASGLAHLHMEIVGTQGKPAIAHRDIKSKNILVKKCETCAIADLGLAVKHDSILNTIDIPQNPKVGTKRYMAPEMLDDTMNVNIFESFKRADIYSVGLVYWEIARRCSVGGIVEEYQLPYYDMVPSDPSIEEMRKVVCDQKFRPSIPNQWQSCEALRVMGRIMRECWYANGAARLTALRIKKTISQLCVKEDCKA

SEQ ID NO: 202 - protein, 517 aa, Homo Sapiens
MALTPPLLLLSAGTMTLGSPRKGLLMLLMALVTQGDPVKPSRGPLVTCTCESPHCKGPTCRGAWCTVVLVREEGRHPQEHRGCGNLHRELCRGRPTEFVNHYCCDSHLCNHNVSLVLEATQPPSEQPGTDGQLALILGPVLALLALVALGVLGLWHVRRRQEKQRGLHSELGESSLILKASEQGDSMLGDLLDSDCTTGSGSGLPFLVQRTVARQVALVECVGKGRYGEVWRGLWHGESVAVKIFSSRDEQSWFRETEIYNTVLLRHDNILGFIASDMTSRNSSTQLWLITHYHEHGSLYDFLQRQTLEPHLALRLAVSAACGLAHLHVEIFGTQGKPAIAHRDFKSRNVLVKSNLQCCIADLGLAVMHSQGSDYLDIGNNPRVGTKRYMAPEVLDEQIRTDCFESYKWTDIWAFGLVLWEIARRTIVNGIVEDYRPPFYDVVPNDPSFEDMKKVVCVDQQTPTIPNRLAADPVLSGLAQMMRECWYPNPSARLTALRIKKTLQKISNSPEKPKVIQ

SEQ ID NO: 203 - protein, 159 aa, Homo Sapiens
MALTPPLLLLSAGTMTLGSPRKGLLMLLMALVTQGDPVKPSRGPLVTCTCESPHCKGPTCRGAWCTVVLVREEGRHPQEHRGCGNLHRELCRGRPTEFVNHYCCDSHLCNHNVSLVLEGKGRYGEVWRGLWHGESVAVKIFSSRDEQSWFRETEIYNTV

SEQ ID NO: 204 - protein, 329 aa, Homo Sapiens
MALTPPLLLLSAGTMTLGSPRKGLLMLLMALVTQGKGRYGEVWRGLWHGESVAVKIFSSRDEQSWFRETEIYNTVLLRHDNILGFIASDMTSRNSSTQLWLITHYHEHGSLYDFLQRQTLEPHLALRLAVSAACGLAHLHVEIFGTQGKPAIAHRDFKSRNVLVKSNLQCCIADLGLAVMHSQGSDYLDIGNNPRVGTKRYMAPEVLDEQIRTDCFESYKWTDIWAFGLVLWEIARRTIVNGIVEDYRPPFYDVVPNDPSFEDMKKVVCVDQQTPTIPNRLAADPVLSGLAQMMRECWYPNPSARLTALRIKKTLQKISNSPEKPKVIQ

SEQ ID NO: 205 - protein, 89 aa, Homo Sapiens
MTLGSPRKGLLMLLMALVTQGDPVKPSRGPLVTCTCESPHCKGPTCRGAWCTVVLVREEGRHPQEHRGCGNLHRELCRGRPTEFVNHYC

SEQ ID NO: 206 - protein, 503 aa, Homo Sapiens
MTLGSPRKGLLMLLMALVTQGDPVKPSRGPLVTCTCESPHCKGPTCRGAWCTVVLVREEGRHPQEHRGCGNLHRELCRGRPTEFVNHYCCDSHLCNHNVSLVLEATQPPSEQPGTDGQLALILGPVLALLALVALGVLGLWHVRRRQEKQRGLHSELGESSLILKASEQGDSMLGDLLDSDCTTGSGSGLPFLVQRTVARQVALVECVGKGRYGEVWRGLWHGESVAVKIFSSRDEQSWFRETEIYNTVLLRHDNILGFIASDMTSRNSSTQLWLITHYHEHGSLYDFLQRQTLEPHLALRLAVSAACGLAHLHVEIFGTQGKPAIAHRDFKSRNVLVKSNLQCCIADLGLAVMHSQGSDYLDIGNNPRVGTKRYMAPEVLDEQIRTDCFESYKWTDIWAFGLVLWEIARRTIVNGIVEDYRPPFYDVVPNDPSFEDMKKVVCVDQQTPTIPNRLAADPVLSGLAQMMRECWYPNPSARLTALRIKKTLQKISNSPEKPKVIQ

SEQ ID NO: 207 - protein, 163 aa, Homo Sapiens
  misc_feature (1)..(1): Xaa can be any naturally occurring amino acid
XSRNVLVKSNLQCCIADLGLAVMHSQGSDYLDIGNNPRVGTKRYMAPEVLDEQIRTDCFESYKWTDIWAFGLVLWEIARRTIVNGIVEDYRPPFYDVVPNDPSFEDMKKVVCVDQQTPTIPNRLAADPVRPLLGLGWRGVVAHGWDFWAQELVSEASASSHRY

SEQ ID NO: 208 - protein, 99 aa, Homo Sapiens
MAEGNTLISVDYEIFGKVQGVFFRKHTQAEGKKLGLVGWVQNTDRGTVQGQLQGPISKVRHMQEWLETRGSPKSHIDKANFNNEKVILKLDYSDFQIVK

SEQ ID NO: 209 - protein, 99 aa, Homo Sapiens; identical to SEQ ID NO: 208

SEQ ID NO: 210 - protein, 55 aa, Homo Sapiens
MAEGNTLISVDYEIFGKVQGVFFRKHTQEMTVENRIAETHSKSCVPVSFATSYAG

SEQ ID NO: 211 - protein, 62 aa, Homo Sapiens
MAEGNTLISVDYEIFGKVQGVFFRKHTQEMTVENRIAETHSKSCVPVSFATSYAGINEFKRI

SEQ ID NO: 212 - protein, 37 aa, Homo Sapiens
MAEGNTLISVDYEIFGKVQGVFFRKHTQVCGLQALGW

SEQ ID NO: 213 - protein, 129 aa, Homo Sapiens
MPASARLAGAGLLLAFLRALGCAGRAPGLSMAEGNTLISVDYEIFGKVQGVFFRKHTQAEGKKLGLVGWVQNTDRGTVQGQLQGPISKVRHMQEWLETRGSPKSHIDKANFNNEKVILKLDYSDFQIVK

SEQ ID NO: 214 - protein, 97 aa, Homo Sapiens
MCPLPLAAAAVAAPRAPLRLLNRGLAAAMSTAQSLKSVDYEVFGRVQGVCFRMYTEDEARKIGVVGWVKNTSKGTVTGQVQGPEDKVNSMLECSGLI

SEQ ID NO: 215 - protein, 98 aa, Homo Sapiens
MCPLPLAAAAVAAPRAPLRLLNRGLAAAMSTAQSLKSVDYEVFGRVQGVCFRMYTEDEARKIGVVGWVKNTSKGTVTGQVQGPEDKVNSMNSSAPEAG

SEQ ID NO: 216 - protein, 40 aa, Homo Sapiens
MLLTQSLFGGLFPRTRETMRREAVPDDNELPRNKHLNWKS

SEQ ID NO: 217 - protein, 116 aa, Homo Sapiens
MLLTQSLFGGLFPRTRETMRRYKVSLFYLGCSRTPNVKLSSCLGLPCCWDYSYKFIQLSEFGFGQVIIVSEEPWKENISCSSTTFIKSTICLNPDSEFRPCFNAWLSLIRENAVGL

SEQ ID NO: 218 - protein, 172 aa, Homo Sapiens
MLLTQSLFGGLFPRTRETMRRYKVSLFYLGCSRTPNVKLSSCLGLPCCWDYSYKFIQLSEFGFGQVIIVSEEPWKENISCSSTTFIKSTICLSVCFRMYTEDEARKIGVVGWVKNTSKGTVTGQVQGPEDKVNSMKSWLSKVGSPSSRIDRTNFSNEKTISKLEYSNFSIRY

SEQ ID NO: 219 - protein, 99 aa, Homo Sapiens
MSTAQSLKSVDYEVFGRVQGVCFRMYTEDEARKIGVVGWVKNTSKGTVTGQVQGPEDKVNSMKSWLSKVGSPSSRIDRTNFSNEKTISKLEYSNFSIRY

SEQ ID NO: 220 - protein, 83 aa, Homo Sapiens
MTALVLQIEYTEDEARKIGVVGWVKNTSKGTVTGQVQGPEDKVNSMKSWLSKVGSPSSRIDRTNFSNEKTISKLEYSNFSIRY

SEQ ID NO: 221 - protein, 66 aa, Homo Sapiens
  misc_feature (1)..(1): Xaa can be any naturally occurring amino acid
XAQSLKSVDYEVFGRVQGVCFRMYTEDEARKIGVVGWVKNTSKGTVTGQVQGPEDKVNSILAFPFY

SEQ ID NO: 222 - protein, 270 aa, Homo Sapiens
MDSLEWNWALVYELSGEHHDEEWSVKTYQEVAQKFVETHPEFIGIKIIYSDHRSKDVAVIAESIRMAMGLRIKFPTVVAGFDLVGHEDTGHSLHDYKEALMIPAKDGVKLPYFFHAGETDWQGTSIDRNILDALMLNTTRIGHGFALSKHPAVRTYSWKKDIPIEVCPISNQVLKLVSDLRNHPVATLMATGHPMVISSDDPAMFGAKGLSYDFYEVFMGIGGMKADLRTLKQLAMNSIKYSTLLESEKNTFMEIWKKRWDKFIADVATK

SEQ ID NO: 223 - protein, 391 aa, Homo Sapiens
MDWLVRNVTYRPHCHICFTPRGIMQFRFAHPTPRPSEKCSKWILLEDYRKRVQNVTEFDDSLLRNFTLVTQHPEVIYTNQNVVWSKFETIFFTISGLIHYAPVFRDYVFRSMQEFYEDNVLYMEIRARLLPVYELSGEHHDEEWSVKTYQEVAQKFVETHPEFIGIKIIYSDHRSKDVAVIAESIRMAMGLRIKFPTVVAGFDLVGHEDTGHSLHDYKEALMIPAKDGVKLPYFFHAGETDWQGTSIDRNILDALMLNTTRIGHGFALSKHPAVRTYSWKKDIPIEVCPISNQVLKLVSDLRNHPVATLMATGHPMVISSDDPAMFGAKGLSYDFYEVFMGIGGMKADLRTLKQLAMNSIKYSTLLESEKNTFMEIWKKRWDKFIADVATK

SEQ ID NO: 224 - protein, 135 aa, Homo Sapiens
MLVDGPSERPALCFLLLAVAMSFFGSALSIDETRAHLLLKEKMMRLGGRLVLNTKEELANERLMTLKIAEMKEAMRTLIFPPSMHFFQAKHLIERSQVFNILRMMPKGAALHLHDIGIVTMDWLVRNVTYRPHCH

SEQ ID NO: 225 - protein, 152 aa, Homo Sapiens
MLVDGPSERPALCFLLLAVAMSFFGSALSIDETRAHLLLKEKMMRLGGRLVLNTKEELANERLMTLKIAEMKEAMRTLIFPPSMHFFQAKHLIERSQVFNILRMMPKGAALHLHDIGIVTMDWLVRNVTYRPHCHICFTPRGIMQFRFAHPT

SEQ ID NO: 226 - protein, 511 aa, Homo Sapiens
MLVDGPSERPALCFLLLAVAMSFFGSALSIDETRAHLLLKEKMMRLGGRLVLNTKEELANERLMTLKIAEMKEAMRTLIFPPSMHFFQAKHLIERSQVFNILRMMPKGAALHLHDIGIVTMDWLVRNVTYRPHCHICFTPRGIMQFRFAHPTPRPSEKCSKWILLEDYRKRVQNVTEFDDSLLRNFTLVTQHPEVIYTNQNVVWSKFETIFFTISGLIHYAPVFRDYVFRSMQEFYEDNVLYMEIRARLLPVYELSGEHHDEEWSVKTYQEVAQKFVETHPEFIGIKIIYSDHRSKDVAVIAESIRMAMGLRIKFPTVVAGFDLVGHEDTGHSLHDYKEALMIPAKDGVKLPYFFHAGETDWQGTSIDRNILDALMLNTTRIGHGFALSKHPAVRTYSWKKDIPIEVCPISNQVLKLVSDLRNHPVATLMATGHPMVISSDDPAMFGAKGLSYDFYEVFMGIGGMKADLRTLKQLAMNSIKYSTLLESEKNTFMEIWKKRWDKFIADVATK

SEQ ID NO: 227 - protein, 511 aa, Homo Sapiens; identical to SEQ ID NO: 226

SEQ ID NO: 228 - protein, 511 aa, Homo Sapiens; identical to SEQ ID NO: 226

SEQ ID NO: 229 - protein, 469 aa, Homo Sapiens
MMRLGGRLVLNTKEELANERLMTLKIAEMKEAMRTLIFPPSMHFFQAKHLIERSQVFNILRMMPKGAALHLHDIGIVTMDWLVRNVTYRPHCHICFTPRGIMQFRFAHPTPRPSEKCSKWILLEDYRKRVQNVTEFDDSLLRNFTLVTQHPEVIYTNQNVVWSKFETIFFTISGLIHYAPVFRDYVFRSMQEFYEDNVLYMEIRARLLPVYELSGEHHDEEWSVKTYQEVAQKFVETHPEFIGIKIIYSDHRSKDVAVIAESIRMAMGLRIKFPTVVAGFDLVGHEDTGHSLHDYKEALMIPAKDGVKLPYFFHAGETDWQGTSIDRNILDALMLNTTRIGHGFALSKHPAVRTYSWKKDIPIEVCPISNQVLKLVSDLRNHPVATLMATGHPMVISSDDPAMFGAKGLSYDFYEVFMGIGGMKADLRTLKQLAMNSIKYSTLLESEKNTFMEIWKKRWDKFIADVATK

SEQ ID NO: 230 - protein, 59 aa, Homo Sapiens
MVLLRVLILLLSWAAGMGAPARWRIPKSSPPPRPAAQTRGKLCCLQLGSCIVLYPARRS

SEQ ID NO: 231 - protein, 148 aa, Homo Sapiens
MVLLRVLILLLSWAAGMGDRDFDDGVLGLAWVGAPSGSSGGICEKSKLYSDGKKKSLNTGIITVQNYGSHVPPKVSHITFAHEVGHNFGSPHDSGTECTPGESKNLGQKENGNYIMYARATSGDKLNNNKFSLCSIRNISQVLEKKRN

SEQ ID NO: 232 - protein, 71 aa, Homo Sapiens
MVLLRVLILLLSWAAGMGDRDFDDGVLGLAWVGAPSGSSGGICEKSKLYSDVPTMGKLHSKEKPIKSSSPN

SEQ ID NO: 233 - protein, 115 aa, Homo Sapiens
MVLLRVLILLLSWAAGMGGQYGNPLNKYIRHYEGLSYNVDSLHQKHQRAKRAVSHEDQFLRLDFHAHGRDGVLPCCPGWSQTPGLKRSTCLSLPQCWDYRCEPSPMISVFDYPHK

SEQ ID NO: 234 - protein, 125 aa, Homo Sapiens
MVLLRVLILLLSWAAGMGGQYGNPLNKYIRHYEGLSYNVDSLHQKHQRAKRAVSHEDQFLRLDFHAHGRHFNLRMKRDTSLFSDEFKVETSNKVLDYDTSHIYTGHIYDYPHKYGPQGGCADHSV

SEQ ID NO: 235 - protein, 748 aa, Homo Sapiens
MVLLRVLILLLSWAAGMGGQYGNPLNKYIRHYEGLSYNVDSLHQKHQRAKRAVSHEDQFLRLDFHAHGRHFNLRMKRDTSLFSDEFKVETSNKVLDYDTSHIYTGHIYGEEGSFSHGSVIDGRFEGFIQTRGGTFYVEPAERYIKDRTLPFHSVIYHEDDINYPHKYGPQGGCADHSVFERMRKYQMTGVEEVTQIPQEEHAANGPELLRKKRTTSAEKNTCQLYIQTDHLFFKYYGTREAVIAQISSHVKAIDTIYQTTDFSGIRNISFMVKRIRINTTADEKDPTNPFRFPNIGVEKFLELNSEQNHDDYCLAYVFTDRDFDDGVLGLAWVGAPSGSSGGICEKSKLYSDGKKKSLNTGIITVQNYGSHVPPKVSHITFAHEVGHNFGSPHDSGTECTPGESKNLGQKENGNYIMYARATSGDKLNNNKFSLCSIRNISQVLEKKRNNCFVESGQPICGNGMVEQGEECDCGYSDQCKDECCFDANQPEGRKCKLKPGKQCSPSQGPCCTAQCAFKSKSEKCRDDSDCAREGICNGFTALCPASDPKPNFTDCNRHTQVCINGQCAGSICEKYGLEECTCASSDGKDDKELCHVCCMKKMDPSTCASTGSVQWSRHFSGRTITLQPGSPCNDFRGYCDVFMRCRLVDADGPLARLKKAIFSPELYENIAEWIVAHWWAVLLMGIALIMLMAGFIKICSVHTPSSNPKLPPPKPLPGTLKRRRPPQPIQQPQRQRPRESYQMGHMRR

SEQ ID NO: 236 - protein, 38 aa, Homo Sapiens
MVLLRVLILLLSWAAGMGVPTMGKLHSKEKPIKSSSPN

SEQ ID NO: 237 - protein, 58 aa, Homo Sapiens
  misc_feature (1)..(1): Xaa can be any naturally occurring amino acid
XEEGSFSHGSVIDGRFEGFIQTRGGTFYVEPAERYIKDRTLPFHSVIYHEDDISEGLN

SEQ ID NO: 238 - protein, 278 aa, Homo Sapiens
MAARPLPVSPARALLLALAGALLAPCEARGVSLWNQGRADEVVSASVGSGDLWIPVKSFDSKNHPEVLNIRLQRESKELIINLERNEGLIASSFTETHYLQDGTDVSLARNYTGHCYYHGHVRGYSDSAVSLSTCSGLRGLIVFENESYVLEPMKSATNRYKLFPAKKLKSVRGSCGSHHNTPNLAAKNVFPPPSQTWARRHKRETLKATKYVELVIVADNREFQRQGKDLEKVKQRLIEIANHVDKFYRPLNIRIVLVGVEVWNDMDKCSVSQDPFT

SEQ ID NO: 239 - protein, 909 aa, Homo Sapiens
MAARPLPVSPARALLLALAGALLAPCEARGVSLWNQGRADEVVSASVGSGDLWIPVKSFDSKNHPEVLNIRLQRESKELIINLERNEGLIASSFTETHYLQDGTDVSLARNYTVILGHCYYHGHVRGYSDSAVSLSTCSGLRGLIVFENESYVLEPMKSATNRYKLFPAKKLKSVRGSCGSHHNTPNLAAKNVFPPPSQTWARRHKRETLKATKYVELVIVADNREFQRQGKDLEKVKQRLIEIANHVDKFYRPLNIRIVLVGVEVWNDMDKCSVSQDPFTSLHEFLDWRKMKLLPRKSHDNAQLVSGVYFQGTTIGMAPIMSMCTADQSGGIVMDHSDNPLGAAVTLAHELGHNFGMNHDTLDRGCSCQMAVEKGGCIMNASTGYPFPMVFSSCSRKDLETSLEKGMGVCLFNLPEVRESFGGQKCGNRFVEEGEECDCGEPEECMNRCCNATTCTLKPDAVCAHGLCCEDCQLKPAGTACRDSSNSCDLPEFCTGASPHCPANVYLHDGHSCQDVDGYCYNGICQTHEQQCVTLWGPGAKPAPGICFERVNSAGDPYGNCGKVSKSSFAKCEMRDAKCGKIQCQGGASRPVIGTNAVSIETNIPLQQGGRILCRGTHVYLGDDMPDPGLVLAGTKCADGKICLNRQCQNISVFGVHECAMQCHGRGVCNNRKNCHCEAHWAPPFCDKFGFGGSTDSGPIRQADNQGLTIGILVTILCLLAAGFVVYLKRKTLIRLLFTNKKTTIEKLRCVRPSRPPRGFQPCQAHLGHLGKGLMRKPPDSYPPKDNPRRLLQCQNVDISRPLNGLNVPQPQSTQRVLPPLHRAPRAPSVPARPLPAKPALRQAQGTCKPNPPQKPLPADPLARTTRLTHALARTPGQWETGLRLAPLRPAPQYPHQVPRSTHTAYIK

SEQ ID NO: 240 - protein, 738 aa, Homo Sapiens
MAARPLPVSPARALLLALAGALLAPCEARGVSLWNQGRADEVVSASVGSGDLWIPVKSFDSKNHPEVLNIRLQRESKELIINLERNEGLIASSFTETHYLQDGTDVSLARNYTVILGHCYYHGHVRGYSDSAVSLSTCSGLRGLIVFENESYVLEPMKSATNRYKLFPAKKLKSVRGSCGSHHNTPNLAAKNVFPPPSQTWARRHKRETLKATKYVELVIVADNREFQRQGKDLEKVKQRLIEIANHVDKFYRPLNIRIVLVGVEVWNDMDKCSVSQDPFTSLHEFLDWRKMKLLPRKSHDNAQLVSGVYFQGTTIGMAPIMSMCTADQSGGIVMDHSDNPLGAAVTLAHELGHNFGMNHDTLDRGCSCQMAVEKGGCIMNASTGYPFPMVFSSCSRKDLETSLEKGMGVCLFNLPEVRESFGGQKCGNRFVEEGEECDCGEPEECMNRCCNATTCTLKPDAVCAHGLCCEDCQLKPAGTACRDSSNSCDLPEFCTGASPHCPANVYLHDGHSCQDVDGYCYNGICQTHEQQCVTLWGPGAKPAPGICFERVNSAGDPYGNCGKVSKSSFAKCEMRDAKCGKIQCQGGASRPVIGTNAVSIETNIPLQQGGRILCRGTHVYLGDDMPDPGLVLAGTKCADGKICLNRQCQNISVFGVHECAMQCHGRGVCNNRKNCHCEAHWAPPFCDKFGFGGSTDSGPIRQAEARQEAAESNRERGQGQEPVGSQEHASTASLTLI

SEQ ID NO: 241 - protein, 520 aa, Homo Sapiens
MRLALLWALGLLGAGSPLPSWPLPNIGGTEEQQAESEKAPREPLEPQVLQDDLPISLKKVLQTSLPEPLRIKLELDGDSHILELLQNRELVPGLNFSNCSRRALEKALLDGMGSCLFERLPSLPPMAAFCGNMFVEPGEQCDCGFLDDCVDPCCDSLTCQLRPGAQCASDGPCCQNCQLRPSGWQCRPTRGDCDLPEFCPGDSSQCPPDVSLGDGEPCAGGQAVCMHGRCASYAQQCQSLWGPGAQPAAPLCLQTANTRGNAFGSCGRNPSGSYVSCTPRDAICGQLQCQTGRTQPLLGSIRDLLWETIDVNGTELNCSWVHLDLGSDVAQPLLTLPGTACGPGLVCIDHRCQRVDLLGAQECRSKCHGHGVCDSNRHCYCEEGWAPPDCTTQLKATSSLTTGLLLSLLVLLVLVMLGASYWYRARLHQRLCQLKGPTCQYRAAQSGPSERPGPPQRALLARGTKSQGPAKPPPPRKPLPADPQGRCPSGDLPGPGAGIPPLVVPSRPAPPPPTVSSLYL

SEQ ID NO: 242 - protein, 814 aa, Homo Sapiens
MRLALLWALGLLGAGSPLPSWPLPNIGGTEEQQAESEKAPREPLEPQVLQDDLPISLKKVLQTSLPEPLRIKLELDGDSHILELLQNRELVPGRPTLVWYQPDGTRVVSEGHTLENCCYQGRVRGYAGSWVSICTCSGLRGLVVLTPERSYTLEQGPGDLQGPPIISRIQDLHLPGHTCALSWRESVHTQKPPEHPLGQRHIRRRRDVVTETKTVELVIVADHSEAQKYRDFQHLLNRTLEVALLLDTFFRPLNVRVALVGLEAWTQRDLVEISPNPAVTLENFLHWRRAHLLPRLPHDSAQLVTGTSFSGPTVGMAIQNSICSPDFSGGVNMDHSTSILGVASSIAHELGHSLGLDHDLPGNSCPCPGPAPAKTCIMEASTDFLPGLNFSNCSRRALEKALLDGMGSCLFERLPSLPPMAAFCGNMFVEPGEQCDCGFLDDCVDPCCDSLTCQLRPGAQCASDGPCCQNCQLRPSGWQCRPTRGDCDLPEFCPGDSSQCPPDVSLGDGEPCAGGQAVCMHGRCASYAQQCQSLWGPGAQPAAPLCLQTANTRGNAFGSCGRNPSGSYVSCTPRDAICGQLQCQTGRTQPLLGSIRDLLWETIDVNGTELNCSWVHLDLGSDVAQPLLTLPGTACGPGLVCIDHRCQRVDLLGAQECRSKCHGHGVCDSNRHCYCEEGWAPPDCTTQLKATSSLTTGLLLSLLVLLVLVMLGASYWYRARLHQRLCQLKGPTCQYRAAQSGPSERPGPPQRALLARGTKSQGPAKPPPPRKPLPADPQGRCPSGDLPGPGAGIPPLVVPSRPAPPPPTVSSLYL

SEQ ID NO: 243 - protein, 796 aa, Homo Sapiens
MRLALLWALGLLGAGSPLPSWPLPNIGGTEEQQAESEKAPREPLEPQVLQDDLPISLKKVLQTSLPEPLRIKLELDGDSHILELLQNRELVPGRPTLVWYQPDGTRVVSEGHTLENCCYQGRVRGYAGSWVSICTCSGLRGLVVLTPERSYTLEQGPGDLQGPPIISRIQDLHLPGHTCALSWRESVHTQKPPEHPLGQRHIRRRRDVVTETKTVELVIVADHSEAQKYRDFQHLLNRTLEVALLLDTFFRPLNVRVALVGLEAWTQRDLVEISPNPAVTLENFLHWRRAHLLPRLPHDSAQLVTGTSFSGPTVGMAIQNSICSPDFSGGVNMDHSTSILGVASSIAHELGHSLGLDHDLPGNSCPCPGPAPAKTCIMEASTDFLPGLNFSNCSRRALEKALLDGMGSCLFERLPSLPPMAAFCGNMFVEPGEQCDCGFLDDCVDPCCDSLTCQLRPGAQCASDGPCCQNCQLRPSGWQCRPTRGDCDLPEFCPGDSSQCPPDVSLGDGEPCAGGQAVCMHGRCASYAQQCQSLWGPGAQPAAPLCLQTANTRGNAFGSCGRNPSGSYVSCTPRDAICGQLQCQTGRTQPLLGSIRDLLWETIDVNGTELNCSWVHLDLGSDVAQPLLTLPGTACGPGLVCIDHRCQRVDLLGAQECRSKCHGHGVCDSNRHCYCEEGWAPPDCTTQLKATSSLTTGLLLSLLVLLVLVMLGASYWYRARLHQRLCQLKGPTCQYRLVLSASRPPLPGRCRLTLCPRDSSLRGQPSPHPQGSHCLPTPRAGAHRVTCPAQGLESRP

SEQ ID NO: 244 - protein, 772 aa, Homo Sapiens
MRLALLWALGLLGAGSPLPSWPLPNIGGTEEQQAESEKAPREPLEPQVLQDDLPISLKKVLQTSLPEPLRIKLELDGDSHILELLQNRELVPGRPTLVWYQPDGTRVVSEGHTLENCCYQGRVRGYAGSWVSICTCSGLRGLVVLTPERSYTLEQGPGDLQGPPIISRIQDLHLPGHTCALSWRESVHTQKPPEHPLGQRHIRRRRDVVTETKTVELVIVADHSEAQKYRDFQHLLNRTLEVALLLDTFFRPLNVRVALVGLEAWTQRDLVEISPNPAVTLENFLHWRRAHLLPRLPHDSAQLVTGTSFSGPTVGMAIQNSICSPDFSGGVNMDHSTSILGVASSIAHELGHSLGLDHDLPGNSCPCPGPAPAKTCIMEASTDFLPGLNFSNCSRRALEKALLDGMGSCLFERLPSLPPMAAFCGNMFVEPGEQCDCGFLDDCVDPCCDSLTCQLRPGAQCASDGPCCQNCQLRPSGWQCRPTRGDCDLPEFCPGDSSQCPPDVSLGDGEPCAGGQAVCMHGRCASYAQQCQSLWGPGAQPAAPLCLQTANTRGNAFGSCGRNPSGSYVSCTPRDAICGQLQCQTGRTQPLLGSIRDLLWETIDVNGTELNCSWVHLDLGSDVAQPLLTLPGTACGPGLVCIDHRCQRVDLLGAQECRSKCHGHGVCDSNRHCYCEEGWAPPDCTTQLKATSSLTTGLLLSLLVLLVLVMLGASYWYRARLHQRLCQLKGPTCQYSLRGQPSPHPQGSHCLPTPRAGAHRVTCPAQGLESRP

SEQ ID NO: 245 - protein, 839 aa, Homo Sapiens
MRLALLWALGLLGAGSPLPSWPLPNIGGTEEQQAESEKAPREPLEPQVLQDDLPISLKKVLQTSLPEPLRIKLELDGDSHILELLQNRELVPGRPTLVWYQPDGTRVVSEGHTLENCCYQGRVRGYAGSWVSICTCSGLRGLVVLTPERSYTLEQGPGDLQGPPIISRIQDLHLPGHTCALSWRESVHTQKPPEHPLGQRHIRRRRDVVTETKTVELVIVADHSEAQKYRDFQHLLNRTLEVALLLDTFFRPLNVRVALVGLEAWTQRDLVEISPNPAVTLENFLHWRRAHLLPRLPHDSAQLVTGTSFSGPTVGMAIQNSICSPDFSGGVNMDHSTSILGVASSIAHELGHSLGLDHDLPGNSCPCPGPAPAKTCIMEASTDFLPGLNFSNCSRRALEKALLDGMGSCLFERLPSLPPMAAFCGNMFVEPGEQCDCGFLDDCVDPCCDSLTCQLRPGAQCASDGPCCQNCQLRPSGWQCRPTRGDCDLPEFCPGDSSQCPPDVSLGDGEPCAGGQAVCMHGRCASYAQQCQSLWGPGAQPAAPLCLQTANTRGNAFGSCGRNPSGSYVSCTPRDAICGQLQCQTGRTQPLLGSIRDLLWETIDVNGTELNCSWVHLDLGSDVAQPLLTLPGTACGPGLVCIDHRCQRVDLLGAQECRSKCHGHGVCDSNRHCYCEEGWAPPDCTTQLKATSSLTTGLLLSLLVLLVLVMLGASYWYRARLHQRLCQLKGPTCQYRAAQSGPSERPGPPQRALLARGTKQASALSFPAPPSRPLPPDPVSKRLQSQGPAKPPPPRKPLPADPQGRCPSGDLPGPGAGIPPLVVPSRPAPPPPTVSSLYL

SEQ ID NO: 246 - protein, 838 aa, Homo Sapiens
MRLALLWALGLLGAGSPLPSWPLPNIGGTEEQQAESEKAPREPLEPQVLQDDLPISLKKVLQTSLPEPLRIKLELDGDSHILELLQNRELVPGRPTLVWYQPDGTRVVSEGHTLENCCYQGRVRGYAGSWVSICTCSGLRGLVVLTPERSYTLEQGPGDLQGPPIISRIQDLHLPGHTCALSWRESVHTQKPPEHPLGQRHIRRRRDVVTETKTVELVIVADHSEAQKYRDFQHLLNRTLEVALLLDTFFRPLNVRVALVGLEAWTQRDLVEISPNPAVTLENFLHWRRAHLLPRLPHDSAQLVTGTSFSGPTVGMAIQNSICSPDFSGGVNMDHSTSILGVASSIAHELGHSLGLDHDLPGNSCPCPGPAPAKTCIMEASTDFLPGLNFSNCSRRALEKALLDGMGSCLFERLPSLPPMAAFCGNMFVEPGEQCDCGFLDDCVDPCCDSLTCQLRPGAQCASDGPCCQNCQLRPSGWQCRPTRGDCDLPEFCPGDSSQCPPDVSLGDGEPCAGGQAVCMHGRCASYAQQCQSLWGPGAQPAAPLCLQTANTRGNAFGSCGRNPSGSYVSCTPRDAICGQLQCQTGRTQPLLGSIRDLLWETIDVNGTELNCSWVHLDLGSDVAQPLLTLPGTACGPGLVCIDHRCQRVDLLGAQECRSKCHGHGVCDSNRHCYCEEGWAPPDCTTQLKATSSLTTGLLLSLLVLLVLVMLGASYWYRARLHQRLCQLKGPTCQYRAAQSGPSERPGPPQRALLARGTKAELADRPNPPTRPLPADPVVRSPKSQGPAKPPPPRKPLPADPQGRCPSGDLPGPGAGIPPLVVPSRPAPPPPTVSSLYL

SEQ ID NO: 247 - protein, 863 aa, Homo Sapiens
MRLALLWALGLLGAGSPLPSWPLPNIGGTEEQQAESEKAPREPLEPQVLQDDLPISLKKVLQTSLPEPLRIKLELDGDSHILELLQNRELVPGRPTLVWYQPDGTRVVSEGHTLENCCYQGRVRGYAGSWVSICTCSGLRGLVVLTPERSYTLEQGPGDLQGPPIISRIQDLHLPGHTCALSWRESVHTQKPPEHPLGQRHIRRRRDVVTETKTVELVIVADHSEAQKYRDFQHLLNRTLEVALLLDTFFRPLNVRVALVGLEAWTQRDLVEISPNPAVTLENFLHWRRAHLLPRLPHDSAQLVTGTSFSGPTVGMAIQNSICSPDFSGGVNMDHSTSILGVASSIAHELGHSLGLDHDLPGNSCPCPGPAPAKTCIMEASTDFLPGLNFSNCSRRALEKALLDGMGSCLFERLPSLPPMAAFCGNMFVEPGEQCDCGFLDDCVDPCCDSLTCQLRPGAQCASDGPCCQNCQLRPSGWQCRPTRGDCDLPEFCPGDSSQCPPDVSLGDGEPCAGGQAVCMHGRCASYAQQCQSLWGPGAQPAAPLCLQTANTRGNAFGSCGRNPSGSYVSCTPRDAICGQLQCQTGRTQPLLGSIRDLLWETIDVNGTELNCSWVHLDLGSDVAQPLLTLPGTACGPGLVCIDHRCQRVDLLGAQECRSKCHGHGVCDSNRHCYCEEGWAPPDCTTQLKATSSLTTGLLLSLLVLLVLVMLGASYWYRARLHQRLCQLKGPTCQYRAAQSGPSERPGPPQRALLARGTKQASALSFPAPPSRPLPPDPVSKRLQAELADRPNPPTRPLPADPVVRSPKSQGPAKPPPPRKPLPADPQGRCPSGDLPGPGAGIPPLVVPSRPAPPPPTVSSLYL

SEQ ID NO: 248 - protein, 862 aa, Homo Sapiens
MRLALLWALGLLGAGSPLPSWPLPNIGGTEEQQAESEKAPREPLEPQVLQDDLPISLKKVLQTSLPEPLRIKLELDGDSHILELLQNRELVPGRPTLVWYQPDGTRVVSEGHTLENCCYQGRVRGYAGSWVSICTCSGLRGLVVLTPERSYTLEQGPGDLQGPPIISRIQDLHLPGHTCALSWRESVHTQKPPEHPLGQRHIRRRRDVVTETKTVELVIVADHSEAQKYRDFQHLLNRTLEVALLLDTFFRPLNVRVALVGLEAWTQRDLVEISPNPAVTLENFLHWRRAHLLPRLPHDSAQLVTGTSFSGPTVGMAIQNSICSPDFSGGVNMDHSTSILGVASSIAHELGHSLGLDHDLPGNSCPCPGPAPAKTCIMEASTDFLPGLNFSNCSRRALEKALLDGMGSCLFERLPSLPPMAAFCGNMFVEPGEQCDCGFLDDCVDPCCDSLTCQLRPGAQCASDGPCCQNCQLRPSGWQCRPTRGDCDLPEFCPGDSSQCPPDVSLGDGEPCAGGQAVCMHGRCASYAQQCQSLWGPGAQPAAPLCLQTANTRGNAFGSCGRNPSGSYVSCTPRDAICGQLQCQTGRTQPLLGSIRDLLWETIDVNGTELNCSWVHLDLGSDVAQPLLTLPGTACGPGLVCIDHRCQRVDLLGAQECRSKCHGHGVCDSNRHCYCEEGWAPPDCTTQLKATSSLTTGLLLSLLVLLVLVMLGASYWYRARLHQRLCQLKGPTCQYRAAQSGPSERPGPPQRALLARGTKASALSFPAPPSRPLPPDPVSKRLQAELADRPNPPTRPLPADPVVRSPKSQGPAKPPPPRKPLPADPQGRCPSGDLPGPGAGIPPLVVPSRPAPPPPTVSSLYL

SEQ ID NO: 249 - protein, 797 aa, Homo Sapiens
MRLALLWALGLLGAGSPLPSWPLPNIGGTEEQQAESEKAPREPLEPQVLQDDLPISLKKVLQTSLPEPLRIKLELDGDSHILELLQNRELVPGRPTLVWYQPDGTRVVSEGHTLENCCYQGRVRGYAGSWVSICTCSGLRGLVVLTPERSYTLEQGPGDLQGPPIISRIQDLHLPGHTCALSWRESVHTQKPPEHPLGQRHIRRRRDVVTETKTVELVIVADHSEAQKYRDFQHLLNRTLEVALLLDTFFRPLNVRVALVGLEAWTQRDLVEISPNPAVTLENFLHWRRAHLLPRLPHDSAQLVTGTSFSGPTVGMAIQNSICSPDFSGGVNMDHSTSILGVASSIAHELGHSLGLDHDLPGNSCPCPGPAPAKTCIMEASTDFLPGLNFSNCSRRALEKALLDGMGSCLFERLPSLPPMAAFCGNMFVEPGEQCDCGFLDDCVDPCCDSLTCQLRPGAQCASDGPCCQNCQLRPSGWQCRPTRGDCDLPEFCPGDSSQCPPDVSLGDGEPCAGGQAVCMHGRCASYAQQCQSLWGPGAQPAAPLCLQTANTRGNAFGSCGRNPSGSYVSCTPRDAICGQLQCQTGRTQPLLGSIRDLLWETIDVNGTELNCSWVHLDLGSDVAQPLLTLPGTACGPGLVCIDHRCQRVDLLGAQECRSKCHGHGVCDSNRHCYCEEGWAPPDCTTQLKATSSLTTGLLLSLLVLLVLVMLGASYWYRARLHQRLCQLKGPTCQYRAAQSGPSERPGPPQRALLARGTKAELADRPNPPTRPLPADPVVRSPKVTVGGEKGTASPPT

SEQ ID NO: 250 - protein, 822 aa, Homo Sapiens
MRLALLWALGLLGAGSPLPSWPLPNIGGTEEQQAESEKAPREPLEPQVLQDDLPISLKKVLQTSLPEPLRIKLELDGDSHILELLQNRELVPGRPTLVWYQPDGTRVVSEGHTLENCCYQGRVRGYAGSWVSICTCSGLRGLVVLTPERSYTLEQGPGDLQGPPIISRIQDLHLPGHTCALSWRESVHTQKPPEHPLGQRHIRRRRDVVTETKTVELVIVADHSEAQKYRDFQHLLNRTLEVALLLDTFFRPLNVRVALVGLEAWTQRDLVEISPNPAVTLENFLHWRRAHLLPRLPHDSAQLVTGTSFSGPTVGMAIQNSICSPDFSGGVNMDHSTSILGVASSIAHELGHSLGLDHDLPGNSCPCPGPAPAKTCIMEASTDFLPGLNFSNCSRRALEKALLDGMGSCLFERLPSLPPMAAFCGNMFVEPGEQCDCGFLDDCVDPCCDSLTCQLRPGAQCASDGPCCQNCQLRPSGWQCRPTRGDCDLPEFCPGDSSQCPPDVSLGDGEPCAGGQAVCMHGRCASYAQQCQSLWGPGAQPAAPLCLQTANTRGNAFGSCGRNPSGSYVSCTPRDAICGQLQCQTGRTQPLLGSIRDLLWETIDVNGTELNCSWVHLDLGSDVAQPLLTLPGTACGPGLVCIDHRCQRVDLLGAQECRSKCHGHGVCDSNRHCYCEEGWAPPDCTTQLKATSSLTTGLLLSLLVLLVLVMLGASYWYRARLHQRLCQLKGPTCQYRAAQSGPSERPGPPQRALLARGTKQASALSFPAPPSRPLPPDPVSKRLQAELADRPNPPTRPLPADPVVRSPKVTVGGEKGTASPPT

SEQ ID NO: 251 - protein, 824 aa, Homo Sapiens
MRLALLWALGLLGAGSPLPSWPLPNIVLSWGVLGPAGGTEEQQAESEKAPREPLEPQVLQDDLPISLKKVLQTSLPEPLRIKLELDGDSHILELLQNRELVPGRPTLVWYQPDGTRVVSEGHTLENCCYQGRVRGYAGSWVSICTCSGLRGLVVLTPERSYTLEQGPGDLQGPPIISRIQDLHLPGHTCALSWRESVHTQKPPEHPLGQRHIRRRRDVVTETKTVELVIVADHSEAQKYRDFQHLLNRTLEVALLLDTFFRPLNVRVALVGLEAWTQRDLVEISPNPAVTLENFLHWRRAHLLPRLPHDSAQLVTGTSFSGPTVGMAIQNSICSPDFSGGVNMDHSTSILGVASSIAHELGHSLGLDHDLPGNSCPCPGPAPAKTCIMEASTDFLPGLNFSNCSRRALEKALLDGMGSCLFERLPSLPPMAAFCGNMFVEPGEQCDCGFLDDCVDPCCDSLTCQLRPGAQCASDGPCCQNCQLRPSGWQCRPTRGDCDLPEFCPGDSSQCPPDVSLGDGEPCAGGQAVCMHGRCASYAQQCQSLWGPGAQPAAPLCLQTANTRGNAFGSCGRNPSGSYVSCTPRDAICGQLQCQTGRTQPLLGSIRDLLWETIDVNGTELNCSWVHLDLGSDVAQPLLTLPGTACGPGLVCIDHRCQRVDLLGAQECRSKCHGHGVCDSNRHCYCEEGWAPPDCTTQLKATSSLTTGLLLSLLVLLVLVMLGASYWYRARLHQRLCQLKGPTCQYRAAQSGPSERPGPPQRALLARGTKSQGPAKPPPPRKPLPADPQGRCPSGDLPGPGAGIPPLVVPSRPAPPPPTVSSLYL

SEQ ID NO: 252 - protein, 633 aa, Homo Sapiens
MRLALLWALGLLGAGSPLPSWPLPNIVSACNVEAPQVALRSSRQSQRRPRGSPWSPRSFRTISQLASKRCFRELVPGRPTLVWYQPDGTRVVSEGHTLENCCYQGRVRGYAGSWVSICTCSGLRGLVVLTPERSYTLEQGPGDLQGPPIISRIQDLHLPGHTCALSWRESVHTQKPPEHPLGQRHIRRRRDVVTETKTVELVIVADHSEAQKYRDFQHLLNRTLEVALLLDTFFRPLNVRVALVGLEAWTQRDLVEISPNPAVTLENFLHWRRAHLLPRLPHDSAQLVTGTSFSGPTVGMAIQNSICSPDFSGGVNMDHSTSILGVASSIAHELGHSLGLDHDLPGNSCPCPGPAPAKTCIMEASTDFLPGLNFSNCSRRALEKALLDGMGSCLFERLPSLPPMAAFCGNMFVEPGEQCDCGFLDDCVDPCCDSLTCQLRPGAQCASDGPCCQNCQLRPSGWQCRPTRGDCDLPEFCPGDSSQCPPDVSLGDGEPCAGGQAVCMHGRCASYAQQCQSLWGPGAQPAAPLCLQTANTRGNAFGSCGRNPSGSYVSCTPRDAICGQLQCQTGRTQPLLGSIRDLLWETIDVNGTELNCSWVHLDLGSDVAQPLLTLPGTACGPGLVSSLGGQDQV

SEQ ID NO: 253 - protein, 824 aa, Homo Sapiens
MRQSLLFLTSVVPFVLAPRPPDDPGFGPHQRLEKLDSLLSDYDILSLSNIQQHSVRKRDLQTSTHVETLLTFSALKRHFKLYLTSSTERFSQNFKVVVVDGKNESEYTVKWQDFFTGHVVGEPDSRVLAHIRDDDVIIRINTDGAEYNIEPLWRFVNDTKDKRMLVYKSEDIKNVSRLQSPKVCGYLKVDNEELLPKGLVDREPPEELVHRVKRRADPDPMKNTCKLLVVADHRFYRYMGRGEESTTTNYLIELIDRVDDIYRNTSWDNAGFKGYGIQIEQIRILKSPQEVKPGEKHYNMAKSYPNEEKDAWDVKMLLEQFSFDIAEEASKVCLAHLFTYQDFDMGTLGLAYVGSPRANSHGGVCPKAYYSPVGKKNIYLNSGLTSTKNYGKTILTKEADLVTTHELGHNFGAEHDPDGLAECAPNEDQGGKYVMYPIAVSGDHENNKMFSNCSKQSIYKTIESKAQECFQERSNKVCGNSRVDEGEECDPGIMYLNNDTCCNSDCTLKEGVQCSDRNSPCCKNCQFETAQKKCQEAINATCKGVSYCTGNSSECPPPGNAEDDTVCLDLGKCKDGKCIPFCEREQQLESCACNETDNSCKVCCRDLSGRCVPYVDAEQKNLFLRKGKPCTVGFCDMNGKCEKRVQDVIERFWDFIDQLSINTFGKFLADNIVGSVLVFSLIFWIPFSILVHCVDKKLDKQYESLSLFHPSNVEMLSSMDSASVRIIKPFPAPQTPGRLQPAPVIPSAPAAPKLDHQRMDTIQEDPSTDSHMDEDGFEKDPFPNSSTAAKSFEDLTDHPVTRSEKAASFKLQRQNRVDSKETEC

SEQ ID NO: 254 - protein, 285 aa, Homo Sapiens
MRQSLLFLTSVVPFVLAPRPPDDPGFGPHQRLEKLDSLLSDYDILSLSNIQQHSVRKRDLQTSTHVETLLTFSALKRHFKLYLTSSTERFSQNFKVVVVDGKNESEYTVKWQDFFTGHVVGEPDSRVLAHIRDDDVIIRINTDGAEYNIEPLWRFVNDTKDKRMLVYKSEDIKNVSRLQSPKVCGYLKVDNEELLPKGLVDREPPEELVHRVKRRADPDPMKNTCKLLVVADHRFYRYMGRGEESTTTNYLIELIDRVDDIYRNTSWDNAGFKGYGIQIEQLLFE

SEQ ID NO: 255 - protein, 258 aa, Homo Sapiens
MRQSLLFLTSVVPFVLAPRPPDDPGFGPHQRLEKLDSLLSDYDILSLSNIQQHSVRKRDLQTSTHVETLLTFSALKRHFKLYLTSSTERFSQNFKVVVVDGKNESEYTVKWQDFFTGHVVGEPDSRVLAHIRDDDVIIRINTDGAEYNIEPLWRFVNDTKDKRMLVYKSEDIKNVSRLQSPKVCGYLKVDNEELLPKGLVDREPPEELVHRVKRRADPDPMKNTCKLLVVADHRFYRYMGRGEESTTTNYLIHTDRAN

SEQ ID NO: 256 - protein, 115 aa, Homo Sapiens
MFLLLALLTELGRLQAHEGSEGIFLHVTVPRKIKSNDSEVSERKMIYIITIDGQPYTLHLGKQSFLPQNFLVYTYNETGSLHSVSPYFMMHCHYQGYAAEFPNSFVTLSICSGLR

SEQ ID NO: 257 - protein, 715 aa, Homo Sapiens
MFLLLALLTELGRLQAHEGSEGIFLHVTVPRKIKSNDSEVSERKMIYIITIDGQPYTLHLGKQSFLPQNFLVYTYNETGSLHSVSPYFMMHCHYQGYAAEFPNSFVTLSICSGLRGFLQFENISYGIEPVESSARFEHIIYQMKNNDPNVSILAVNYSHIWQKDQPYKVPLNSQIKNLSKLLPQYLEIYIIVEKALMFTQFKLTVILSSLELWSNENQISTSGDADDILQRFLAWKRDYLILRPHDIAYLLVYRKHPKYVGATFPGTVCNKSYDAGIAMYPDAIGLEGFSVIIAQLLGLNVGLTYDDITQCFCLRATCIMNHEAVSASGRKIFSNCSMHDYRYFVSKFETKCLQKLSNLQPLHQNQPVCGNGILESNEECDCGNKNECQFKKCCDYNTCKLKGSVKCGSGPCCTSKCELSIAGTPCRKSIDPECDFTEYCNGTSSNCVPDTYALNGRLCKLGTAYCYNGQCQTTDNQCAKIFGKGAQGAPFACFKEVNSLHERSENCGFKNSQPLPCERKDVLCGKLACVQPHKNANKSDAQSTVYSYIQDHVCVSIATGSSMRSDGTDNAYVADGTMCGPEMYCVNKTCRKVHLMGYNCNATTKCKGKGICNNFGNCQCFPGHRPPDCKFQFGSPGGSIDDGNFQKSGDFYTEKGYNTHWNNWFILSFCIFLPFFIVFTTVIFKRNEISKSCNRENAEYNRNSSVVSESDDVGH

SEQ ID NO: 258 - protein, 739 aa, Homo Sapiens
MFLLLALLTELGRLQAHEGSEGIFLHVTVPRKIKSNDSEVSERKMIYIITIDGQPYTLHLGKQSFLPQNFLVYTYNETGSLHSVSPYFMMHCHYQGYAAEFPNSFVTLSICSGLRGFLQFENISYGIEPVESSARFEHIIYQMKNNDPNVSILAVNYSHIWQKDQPYKVPLNSQIKNLSKLLPQYLEIYIIVEKALYDYMGSEMMAVTQKIVQVIGLVNTMFTQFKLTVILSSLELWSNENQISTSGDADDILQRFLAWKRDYLILRPHDIAYLLVYRKHPKYVGATFPGTVCNKSYDAGIAMYPDAIGLEGFSVIIAQLLGLNVGLTYDDITQCFCLRATCIMNHEAVSASGRKIFSNCSMHDYRYFVSKFETKCLQKLSNLQPLHQNQPVCGNGILESNEECDCGNKNECQFKKCCDYNTCKLKGSVKCGSGPCCTSKCELSIAGTPCRKSIDPECDFTEYCNGTSSNCVPDTYALNGRLCKLGTAYCYNGQCQTTDNQCAKIFGKGAQGAPFACFKEVNSLHERSENCGFKNSQPLPCERKDVLCGKLACVQPHKNANKSDAQSTVYSYIQDHVCVSIATGSSMRSDGTDNAYVADGTMCGPEMYCVNKTCRKVHLMGYNCNATTKCKGKGICNNFGNCQCFPGHRPPDCKFQFGSPGGSIDDGNFQKSGDFYTEKGYNTHWNNWFILSFCIFLPFFIVFTTVIFKRNEISKSCNRENAEYNRNSSVVSESDDVGH

SEQ ID NO: 259 - protein, 182 aa, Homo Sapiens
MFLLLALLTELGRLQAHEGSEGIFLHVTVPRKIKSNDSEVSERKMIYIITIDGQPYTLHLGKQSFLPQNFLVYTYNETGSLHSVSPYFMMHCHYQGYAAEFPNSFVTLSICSGLRGFLQFENISYGIEPVESSARFEHIIYQMKNNDPNVSILAVNYSHIWQKDQPYKVPLNSQVTVIILML

SEQ ID NO: 260 - protein, 62 aa, Homo Sapiens
MFLLLALLTELGRLQAHEGSEGIFLHVTVPRKIKSNDSEVSERKVFGEQVVFGYMNDLHHYN

SEQ ID NO: 261 - protein, 330 aa, Homo Sapiens
EEDVDLGYVEDGTPCGPQMMCLEHRCLPVASFNFSTCLSSKEGTICSGNGVCSNELKCVCNRHWIGSDCNTYFPHNDDAKTGITLSGNGVAGTNIIIGIIAGTILVLALILGITAWGYKNYREQRQLPQGDYVKKPGDGDSFYSDIPPGVSTNSASSSKKRSNGLSHSWSERIPDTKHISDICENGRPRSNSWQGNLGGNKKKIRGKRFRPRSNSTEREPQAPEPGHSLAQTVPSQGISPGGSDSPQTGSLDHRYLNPWFKRDYNVAKWVEDVNKNTEGPYFRTLSPAKSPSSSTGSIASSRKYPYPMPPLPDEDKKVNRQSARLWETSI

SEQ ID NO: 262 - protein, 804 aa, Homo Sapiens
MELEKRKENRFVERQSIVPLRLIYRSGGEDESRHDALDTRVRGDLGGPQLTHVDQASFQVDAFGTSFILDVVLNHDLLSSEYIERHIEHGGKTVEVKGGEHCYYQGHIRGNPDSFVALSTCHGLHGMFYDGNHTYLIEPEENDTTQEDFHFHSVYKSRLFEFSLDDLPSEFQQVNITPSKFILKPRPKRSKRQLRRYPRNVEEETKYIELMIVNDHLMFKKHRLSVVHTNTYAKSVVNMADLIYKDQLKTRIVLVAMETWATDNKFAISENPLITLREFMKYRRDFIKEKSDAVHLFSGSQFESSRSGAAYIGGICSLLKGGGVNEFGKTDLMAVTLAQSLAHNIGIISDKRKLASGECKCEDTWSGCIMGDTGYYLPKKFTQCNIEEYHDFLNSGGGACLFNKPSKLLDPPECGNGFIETGEECDCGTPAECVLEGAECCKKCTLTQDSQCSDGLCCKKCKFQPMGTVCREAVNDCDIRETCSGNSSQCAPNIHKMDGYSCDGVQGICFGGRCKTRDRQCKYIWGQKVTASDKYCYEKLNIEGTEKGNCGKDKDTWIQCNKRDVLCGYLLCTNIGNIPRLGELDGEITSTLVVQQGRTLNCSGGHVKLEEDVDLGYVEDGTPCGPQMMCLEHRCLPVASFNFSTCLSSKEGTICSGNGVCSNELKCVCNRHWIGSDCNTYFPHNDDAKTGITLSGNGVAGTNIIIGIIAGTILVLALILGITAWGYKNYREQRQLPQGDYVKKPGDGDSFYSDIPPGVSTNSASSSKKRSNGLSHSWSERIPDTKHISDICENGRPRSNSWQG

SEQ ID NO: 263 - protein, 196 aa, Homo Sapiens
MQAAVAVSVPFLLLCVLGTCPPARCGQAGDASLMELEKRKENRFVERQSIVPLRLIYRSGGEDESRHDALDTRVRGDLGGPQIQMFLKSESQKTIYQIQLTHVDQASFQVDAFGTSFILDVVLNHDLLSSEYIERHIEHGGKTVEVKGGEHCYYQGHIRGNPDSFVALSTCHGLHGMFYDGNHTYLIEPEENDTTQ

SEQ ID NO: 264 - protein, 906 aa, Homo Sapiens
MQAAVAVSVPFLLLCVLGTCPPARCGQAGDASLMELEKRKENRFVERQSIVPLRLIYRSGGEDESRHDALDTRVRGDLGGPQLTHVDQASFQVDAFGTSFILDVVLNHDLLSSEYIERHIEHGGKTVEVKGGEHCYYQGHIRGNPDSFVALSTCHGLHGMFYDGNHTYLIEPEENDTTQEDFHFHSVYKSRLFEFSLDDLPSEFQQVNITPSKFILKPRPKRSKRQLRRYPRNVEEETKYIELMIVNDHLMFKKHRLSVVHTNTYAKSVVNMADLIYKDQLKTRIVLVAMETWATDNKFAISENPLITLREFMKYRRDFIKEKSDAVHLFSGSQFESSRSGAAYIGGICSLLKGGGVNEFGKTDLMAVTLAQSLAHNIGIISDKRKLASGECKCEDTWSGCIMGDTGYYLPKKFTQCNIEEYHDFLNSGGGACLFNKPSKLLDPPECGNGFIETGEECDCGTPAECVLEGAECCKKCTLTQDSQCSDGLCCKKCKFQPMGTVCREAVNDCDIRETCSGNSSQCAPNIHKMDGYSCDGVQGICFGGRCKTRDRQCKYIWGQKVTASDKYCYEKLNIEGTEKGNCGKDKDTWIQCNKRDVLCGYLLCTNIGNIPRLGELDGEITSTLVVQQGRTLNCSGGHVKLEEDVDLGYVEDGTPCGPQMMCLEHRCLPVASFNFSTCLSSKEGTICSGNGVCSNELKCVCNRHWIGSDCNTYFPHNDDAKTGITLSGNGVAGTNIIIGIIAGTILVLALILGITAWGYKNYREQRQLPQGDYVKKPGDGDSFYSDIPPGVSTNSASSSKKRSNGLSHSWSERIPDTKHISDICENGRPRSNSWQGNLGGNKKKIRGKRFRPRSNSTETLSPAKSPSSSTGSIASSRKYPYPMPPLPDEDKKVNRQSARLWETSI

SEQ ID NO: 265 - protein, 859 aa, Homo Sapiens
MQAAVAVSVPFLLLCVLGTCPPARCGQAGDASLMELEKRKENRFVERQSIVPLRLIYRSGGEDESRHDALDTRVRGDLGGPQLTHVDQASFQVDAFGTSFILDVVLNHDLLSSEYIERHIEHGGKTVEVKGGEHCYYQGHIRGNPDSFVALSTCHGLHGMFYDGNHTYLIEPEENDTTQEDFHFHSVYKSRLFEFSLDDLPSEFQQVNITPSKFILKPRPKRSKRQLRRYPRNVEEETKYIELMIVNDHLMFKKHRLSVVHTNTYAKSVVNMADLIYKDQLKTRIVLVAMETWATDNKFAISENPLITLREFMKYRRDFIKEKSDAVHLFSGSQFESSRSGAAYIGGICSLLKGGGVNEFGKTDLMAVTLAQSLAHNIGIISDKRKLASGECKCEDTWSGCIMGDTGYYLPKKFTQCNIEEYHDFLNSGGGACLFNKPSKLLDPPECGNGFIETGEECDCGTPAECVLEGAECCKKCTLTQDSQCSDGLCCKKCKFQPMGTVCREAVNDCDIRETCSGNSSQCAPNIHKMDGYSCDGVQGICFGGRCKTRDRQCKYIWGQKVTASDKYCYEKLNIEGTEKGNCGKDKDTWIQCNKRDVLCGYLLCTNIGNIPRLGELDGEITSTLVVQQGRTLNCSGGHVKLEEDVDLGYVEDGTPCGPQMMCLEHRCLPVASFNFSTCLSSKEGTICSGNGVCSNELKCVCNRHWIGSDCNTYFPHNDDAKTGITLSGNGVAGTNIIIGIIAGTILVLALILGITAWGYKNYREQRQLPQGDYVKKPGDGDSFYSDIPPGVSTNSASSSKKRSNGLSHSWSERIPDTKHISDICENGRPRSNSWQGNLGGNKKKIRGKRFRPRSNSTE

SEQ ID NO: 266 - protein, 899 aa, Homo Sapiens
MQAAVAVSVPFLLLCVLGTCPPARCGQAGDASLMELEKRKENRFVERQSIVPLRLIYRSGGEDESRHDALDTRVRGDLGGPQLTHVDQASFQVDAFGTSFILDVVLNHDLLSSEYIERHIEHGGKTVEVKGGEHCYYQGHIRGNPDSFVALSTCHGLHGMFYDGNHTYLIEPEENDTTQEDFHFHSVYKSRLFEFSLDDLPSEFQQVNITPSKFILKPRPKRSKRQLRRYPRNVEEETKYIELMIVNDHLMFKKHRLSVVHTNTYAKSVVNMADLIYKDQLKTRIVLVAMETWATDNKFAISENPLITLREFMKYRRDFIKEKSDAVHLFSGSQFESSRSGAAYIGGICSLLKGGGVNEFGKTDLMAVTLAQSLAHNIGIISDKRKLASGECKCEDTWSGCIMGDTGYYLPKKFTQCNIEEYHDFLNSGGGACLFNKPSKLLDPPECGNGFIETGEECDCGTPAECVLEGAECCKKCTLTQDSQCSDGLCCKKCKFQPMGTVCREAVNDCDIRETCSGNSSQCAPNIHKMDGYSCDGVQGICFGGRCKTRDRQCKYIWGQKVTASDKYCYEKLNIEGTEKGNCGKDKDTWIQCNKRDVLCGYLLCTNIGNIPRLGELDGEITSTLVVQQGRTLNCSGGHVKLEEDVDLGYVEDGTPCGPQMMCLEHRCLPVASFNFSTCLSSKEGTICSGNGVCSNELKCVCNRHWIGSDCNTYFPHNDDAKTGITLSGNGVAGTNIIIGIIAGTILVLALILGITAWGYKNYREQRSNGLSHSWSERIPDTKHISDICENGRPRSNSWQGNLGGNKKKIRGKRFRPRSNSTEYLNPWFKRDYNVAKWVEDVNKNTEGPYFRTLSPAKSPSSSTGSIASSRKYPYPMPPLPDEDKKVNRQSARLWETSI

SEQ ID NO: 267 - protein, 870 aa, Homo Sapiens
MQAAVAVSVPFLLLCVLGTCPPARCGQAGDASLMELEKRKENRFVERQSIVPLRLIYRSGGEDESRHDALDTRVRGDLGGPQLTHVDQASFQVDAFGTSFILDVVLNHDLLSSEYIERHIEHGGKTVEVKGGEHCYYQGHIRGNPDSFVALSTCHGLHGMFYDGNHTYLIEPEENDTTQEDFHFHSVYKSRLFEFSLDDLPSEFQQVNITPSKFILKPRPKRSKRQLRRYPRNVEEETKYIELMIVNDHLMFKKHRLSVVHTNTYAKSVVNMADLIYKDQLKTRIVLVAMETWATDNKFAISENPLITLREFMKYRRDFIKEKSDAVHLFSGSQFESSRSGAAYIGGICSLLKGGGVNEFGKTDLMAVTLAQSLAHNIGIISDKRKLASGECKCEDTWSGCIMGDTGYYLPKKFTQCNIEEYHDFLNSGGGACLFNKPSKLLDPPECGNGFIETGEECDCGTPAECVLEGAECCKKCTLTQDSQCSDGLCCKKCKFQPMGTVCREAVNDCDIRETCSGNSSQCAPNIHKMDGYSCDGVQGICFGGRCKTRDRQCKYIWGQKVTASDKYCYEKLNIEGTEKGNCGKDKDTWIQCNKRDVLCGYLLCTNIGNIPRLGELDGEITSTLVVQQGRTLNCSGGHVKLEEDVDLGYVEDGTPCGPQMMCLEHRCLPVASFNFSTCLSSKEGTICSGNGVCSNELKCVCNRHWIGSDCNTYFPHNDDAKTGITLSGNGVAGTNIIIGIIAGTILVLALILGITAWGYKNYREQRSNGLSHSWSERIPDTKHISDICENGRPRSNSWQGNLGGNKKKIRGKRFRPRSNSTETLSPAKSPSSSTGSIASSRKYPYPMPPLPDEDKKVNRQSARLWETSI

SEQ ID NO: 268 - protein, 342 aa, Homo Sapiens
MQAAVAVSVPFLLLCVLGTCPPARCGQAGDASLMELEKRKENRFVERQSIVPLRLIYRSGGEDESRHDALDTRVRGDLGGPQLTHVDQASFQVDAFGTSFILDVVLNHDLLSSEYIERHIEHGGKTVEVKGGEHCYYQGHIRGNPDSFVALSTCHGLHGMFYDGNHTYLIEPEENDTTQEDFHFHSVYKSRLFEFSLDDLPSEFQQVNITPSKFILKPRPKRSKRQLRRYPRNVEEETKYIELMIVNDHLMFKKHRLSVVHTNTYAKSVVNMADLIYKDQLKTRIVLVAMETWATDNKFAISENPLITLREFMKYRRDFIKEKSDAVHLFSYVTSVMMYYFF

SEQ ID NO: 269 - protein, 264 aa, Homo Sapiens
  misc_feature (1)..(1): Xaa can be any naturally occurring amino acid
XCNRHWIGSDCNTYFPHNDDAKTGITLSGNGVAGTNIIIGIIAGTILVLALILGITAWGYKNYREQRQLPQGDYVKKPGDGDSFYSDIPPGVSTNSASSSKKRSAFLSHFQISTCSITHYSISQNISLFCSRSNGLSHSWSERIPDTKHISDICENGRPRSNSWQGNLGGNKKKIRGKRFRPRSNSTEYLNPWFKRDYNVAKWVEDVNKNTEGPYFRTLSPAKSPSSSTGSIASSRKYPYPMPPLPDEDKKVNRQSARLWETSI

SEQ ID NO: 270 - protein, 217 aa, Homo Sapiens
MLQGLLPVSLLLSVAVSAIKELPGVKKYEVVYPIRLHPLHKREAKEPEQQEQFETELKYKMTINGKIAVLYLKKNKNLLAPGYTETYYNSTGKEITTSPQIMDDCYYQGHILNEKVSDASISTCRGLRGYFSQGDQRYFIEPLSPIHRDGQEHALFKYNPDEKNYDSTCGMDGVLWAHDLQQNIALPATKLVKLKDRKVQEHEKYIEYYLVLDNGEF

SEQ ID NO: 271 - protein, 775 aa, Homo Sapiens
MLQGLLPVSLLLSVAVSAIKELPGVKKYEVVYPIRLHPLHKREAKEPEQQEQFETELKYKMTINGKIAVLYLKKNKNLLAPGYTETYYNSTGKEITTSPQIMDDCYYQGHILNEKVSDASISTCRGLRGYFSQGDQRYFIEPLSPIHRDGQEHALFKYNPDEKNYDSTCGMDGVLWAHDLQQNIALPATKLVKLKDRKVQEHEKYIEYYLVLDNGEFKRYNENQDEIRKRVFEMANYVNMLYKKLNTHVALVGMEIWTDKDKIKITPNASFTLENFSKWRGSVLSRRKRHDIAQLITATELAGTTVGLAFMSTMCSPYSVGVVQDHSDNLLRVAGTMAHEMGHNFGMFHDDYSCKCPSTICVMDKALSFYIPTDFSSCSRLSYDKFFEDKLSNCLFNAPLPTDIISTPICGNQLVEMGEDCDCGTSEECTNICCDAKTCKIKATFQCALGECCEKCQFKKAGMVCRPAKDECDLPEMCNGKSGNCPDDRFQVNGFPCHHGKGHCLMGTCPTLQEQCTELWGPGTEVADKSCYNRNEGGSKYGYCRRVDDTLIPCKANDTMCGKLFCQGGSDNLPWKGRIVTFLTCKTFDPEDTSQEIGMVANGTKCGDNKVCINAECVDIEKAYKSTNCSSKCKGHAVCDHELQCQCEEGWIPPDCDDSSVVFHFSIVVGVLFPMAVIFVVVAMVIRHQSSREKQKKDQRPLSTTGTRPHKQKRKPQMVKAVQPQEMSQMKPHVYDLPVEGNEPPASFHKDTNALPPTVFKDNPVSTPKDSNPKA

SEQ ID NO: 272 - protein, 540 aa, Homo Sapiens
MLQGLLPVSLLLSVAVSAIKELPGVKKYEVVYPIRLHPLHKREAKEPEQQEQFETELKYKMTINGKIAVLYLKKNKNLLAPGYTETYYNSTGKEITTSPQIMDDCYYQGHILNEKVSDASISTCRGLRGYFSQGDQRYFIEPLSPIHRDGQEHALFKYNPDEKNYDSTCGMDGVLWAHDLQQNIALPATKLVKLKDRKVQEHEKYIEYYLVLDNGEFKRYNENQDEIRKRVFEMANYVNMLYKKLNTHVALVGMEIWTDKDKIKITPNASFTLENFSKWRGSVLSRRKRHDIAQLITATELAGTTVGLAFMSTMCSPYSVGVVQDHSDNLLRVAGTMAHEMGHNFGMFHDDYSCKCPSTICVMDKALSFYIPTDFSSCSRLSYDKFFEDKLSNCLFNAPLPTDIISTPICGNQLVEMGEDCDCGTSEECTNICCDAKTCKIKATFQCALGECCEKCQFKKAGMVCRPAKDECDLPEMCNGKSGNCPDDRFQVNGFPCHHGKGHCLMGTCPTLQEQCTELWGPGRRTNPFPCACAKENHFR

SEQ ID NO: 273 - protein, 58 aa, Homo Sapiens
MLQGLLPVSLLLSVAVSAIKELPGVKKYEVVYPIRLHPLHKREAKEPEQQFLSSMKIS

SEQ ID NO: 274 - protein, 387 aa, Homo Sapiens
  misc_feature (1)..(1): Xaa can be any naturally occurring amino acid
XFYIPTDFSSCSRLSYDKFFEDKLSNCLFNAPLPTDIISTPICGNQLVEMGEDCDCGTSEECTNICCDAKTCKIKATFQCALGECCEKCQFKKAGMVCRPAKDECDLPEMCNGKSGNCPDDRFQVNGFPCHHGKGHCLMGTCPTLQEQCTELWGPGTEVADKSCYNRNEGGSKYGYCRRVDDTLIPCKANDTMCGKLFCQGGSDNLPWKGRIVTFLTCKTFDPEDTSQEIGMVANGTKCGDNKVCINAECVDIEKAYKSTNCSSKCKGHAVCDHELQCQCEEGWIPPDCDDSSVVFHFSIVVGVLFPMAVIFVVVAMVIRHQSSREKQKKDQRPLSTTGTRPHKQKRKPQMVKAVQPQEMSQMKPHVYDLPVEGNEPPASFDSNPKA

SEQ ID NO: 275 - protein, 174 aa, Homo Sapiens
  misc_feature (1)..(1): Xaa can be any naturally occurring amino acid
XKGRIVTFLTCKTFDPEDTSQEIGMVANGTKCGDNKVCINAECVDIEKAYKSTNCSSKCKGHAVCDHELQCQCEEGWIPPDCDDSSVVFHFSIVVGVLFPMAVIFVVVAMVIRHQSSREKQKKDQRPLSTTGTRPHKQKRKPQMVKAVQPQEVNYIVWAVITMAPLCVSLTLLS

SEQ ID NO: 276 - protein, 14 aa, Homo Sapiens
MKMLLLLHCLGVFL

SEQ ID NO: 277 - protein, 44 aa, Homo Sapiens
MKMLLLLHCLGVFLSCSGHIQDEHPQYHSPPDVVIPVRITGTTR

SEQ ID NO: 278 - protein, 90 aa, Homo Sapiens
MKMLLLLHCLGVFLSCSGHIQDEHPQYHSPPDVVIPVRITGTTRGMTPPGWLSYILPFGGQKHIIHIKVKKLLFSKHLPVFTYTDQGAIL

SEQ ID NO: 279 - protein, 820 aa, Homo Sapiens
MKMLLLLHCLGVFLSCSGHIQDEHPQYHSPPDVVIPVRITGTTRGMTPPGWLSYILPFGGQKHIIHIKVKKLLFSKHLPVFTYTDQGAILEDQPFVQNNCYYHGYVEGDPESLVSLSTCFGGFQGILQINDFAYEIKPLAFSTTFEHLVYKMDSEEKQFSTMRSGFMQNEITCRMEFEEIDNSTQKQSSYVGWWIHFRIVEIVVVIDNYLYIRYERNDSKLLEDLYVIVNIVDSILDVIGVKVLLFGLEIWTNKNLIVVDDVRKSVHLYCKWKSENITPRMQHDTSHLFTTLGLRGLSGIGAFRGMCTPHRSCAIVTFMNKTLGTFSIAVAHHLGHNLGMNHDEDTCRCSQPRCIMHEGNPPITKFSNCSYGDFWEYTVERTKCLLETVHTKDIFNVKRCGNGVVEEGEECDCGPLKHCAKDPCCLSNCTLTDGSTCAFGLCCKDCKFLPSGKVCRKEVNECDLPEWCNGTSHKCPDDFYVEDGIPCKERGYCYEKSCHDRNEQCRRIFGAGANTASETCYKELNTLGDRVGHCGIKNATYIKCNISDVQCGRIQCENVTEIPNMSDHTTVHWARFNDIMCWSTDYHLGMKGPDIGEVKDGTECGIDHICIHRHCVHITILNSNCSPAFCNKRGICNNKHHCHCNYLWDPPNCLIKGYGGSVDSGPPPKRKKKKKFCYLCILLLIVLFILLCCLYRLCKKSKPIKKQQDVQTPSAKEEEKIQRRPHELPPQSQPWVMPSQSQPPVTPSQSHPQVMPSQSQPPVTPSQSQPRVMPSQSQPPVMPSQSHPQLTPSQSQPPVTPSQRQPQLMPSQSQPPVTPS

SEQ ID NO: 280 - protein, 820 aa, Homo Sapiens; identical to SEQ ID NO: 279

SEQ ID NO: 281 - protein, 820 aa, Homo Sapiens; identical to SEQ ID NO: 279

SEQ ID NO: 282 - protein, 820 aa, Homo Sapiens; identical to SEQ ID NO: 279

SEQ ID NO: 283 - protein, 820 aa, Homo Sapiens; identical to SEQ ID NO: 279

SEQ ID NO: 284 - protein, 820 aa, Homo Sapiens; identical to SEQ ID NO: 279

SEQ ID NO: 285 - protein, 787 aa, Homo Sapiens
MFRLWLLLAGLCGLLASRPGFQNSLLQIVIPEKIQTNTNDSSEIEYEQISYIIPIDEKLYTVHLKQRYFLADNFMIYLYNQGSMNTYSSDIQTQCYYQGNIEGYPDSMVTLSTCSGLRGILQFENVSYGIEPLESAVEFQHVLYKLKNEDNDIAIFIDRSLKEQPMDDNIFISEKSEPAVPDLFPLYLEMHIVVDKTLYDYWGSDSMIVTNKVIEIVGLANSMFTQFKVTIVLSSLELWSDENKISTVGEADELLQKFLEWKQSYLNLRPHDIAYLLIYMDYPRYLGAVFPGTMCITRYSAGVALYPKEITLEAFAVIVTQMLALSLGISYDDPKKCQCSESTCIMNPEVVQSNGVKTFSSCSLRSFQNFISNVGVKCLQNKPQMQKKSPKPVCGNGRLEGNEICDCGTEAQCGPASCCDFRTCVLKDGAKCYKGLCCKDCQILQSGVECRPKAHPECDIAENCNGTSPECGPDITLINGLSCKNNKFICYDGDCHDLDARCESVFGKGSRNAPFACYEEIQSQSDRFGNCGRDRNNKYVFCGWRNLICGRLVCTYPTRKPFHQENGDVIYAFVRDSVCITVDYKLPRTVPDPLAVKNGSQCDIGRVCVNRECVESRIIKASAHVCSQQCSGHGVCDSRNKCHCSPGYKPPNCQIRSKGFSIFPEEDMGSIMERASGKTENTWLLGFLIALPILIVTTAIVLARKQLKKWFAKEEEFPSSESKSEGSTQTYASQSSSEGSTQTYASQTRSESSSQADTSKSKSEDSAEAYTSRSKSQDSTQTQSSSN

SEQ ID NO: 286 - protein, 629 aa, Homo Sapiens
MFRLWLLLAGLCGLLASRPGFQNSLLQIVIPEKIQTNTNDSSEIEYEQISYIIPIDEKLYTVHLKQRYFLADNFMIYLYNQGSMNTYSSDIQTQCYYQGNIEGYPDSMVTLSTCSGLRGILQFENVSYGIEPLESAVEFQHVLYKLKNEDNDIAIFIDRSLKEQPMDDNIFISEKSEPAVPDLFPLYLEMHIVVDKTLYDYWGSDSMIVTNKVIEIVGLANSMFTQFKVTIVLSSLELWSDENKISTVGEADELLQKFLEWKQSYLNLRPHDIAYLLIYMDYPRYLGAVFPGTMCITRYSAGVALQCGPASCCDFRTCVLKDGAKCYKGLCCKDCQILQSGVECRPKAHPECDIAENCNGTSPECGPDITLINGLSCKNNKFICYDGDCHDLDARCESVFGKGSRNAPFACYEEIQSQSDRFGNCGRDRNNKYVFCGWRNLICGRLVCTYPTRKPFHQENGDVIYAFVRDSVCITVDYKLPRTVPDPLAVKNGSQCDIGRVCVNRECVESRIIKASAHVCSQQCSGHGVCDSRNKCHCSPGYKPPNCQIRSKGFSIFPEEDMGSIMERASGKTENTWLLGFLIALPILIVTTAIVLARKQLKKWFAKEEEFPSSESKSQDSTQTQSSSN

SEQ ID NO: 287 - protein, 184 aa, Homo Sapiens
MFRLWLLLAGLCGLLASRPGFQNSLLQIVIPEKIQTNTNDSSEIEYEQISYIIPIDEKLYTVHLKQRYFLADNFMIYLYNQGSMNTYSSDIQTQCYYQGNIEGYPDSMVTLSTCSGLRGILQFENVSYGIEPLESAVEFQHVLYKLKNEDNDIAIFIDRSLKEQPMDDNIFISEKYDYWGSDSM

SEQ ID NO: 288 - protein, 155 aa, Homo Sapiens
MFRLWLLLAGLCGLLASRPGFQNSLLQIVIPEKIQTNTNDSSEIEYEQISYIIPIDEKLYTVHLKQRYFLADNFMIYLYNQGSMNTYSSDIQTQCYYQGNIEGYPDSMVTLSTCSGLRSLKEQPMDDNIFISEKSEPAVPDLFPLYLEMHIVVDK

SEQ ID NO: 289 - protein, 53 aa, Homo Sapiens
MIYLYNQGSMNTYSSDIQTQCYYQGNIEGYPDSMVTLSTCSGLRGILQFENVS

SEQ ID NO: 290 - protein, 688 aa, Homo Sapiens
MNVRGAAPGVRASPRPWQFPTSQRLPAGSPEAAPCSASGCCWPGSAASWRQDPEQISYIIPIDEKLYTVHLKQRYFLADNFMIYLYNQGSMNTYSSDIQTQCYYQGNIEGYPDSMVTLSTCSGLRGILQFENVSYGIEPLESAVEFQHVLYKLKNEDNDIAIFIDRSLKEQPMDDNIFISEKSEPAVPDLFPLYLEMHIVVDKTLYDYWGSDSMIVTNKVIEIVGLANSMFTQFKVTIVLSSLELWSDENKISTVGEADELLQKFLEWKQSYLNLRPHDIAYLLIYMDYPRYLGAVFPGTMCITRYSAGVALQCGPASCCDFRTCVLKDGAKCYKGLCCKDCQILQSGVECRPKAHPECDIAENCNGTSPECGPDITLINGLSCKNNKFICYDGDCHDLDARCESVFGKGSRNAPFACYEEIQSQSDRFGNCGRDRNNKYVFCGWRNLICGRLVCTYPTRKPFHQENGDVIYAFVRDSVCITVDYKLPRTVPDPLAVKNGSQCDIGRVCVNRECVESRIIKASAHVCSQQCSGHGVCDSRNKCHCSPGYKPPNCQIRSKGFSIFPEEDMGSIMERASGKTENTWLLGFLIALPILIVTTAIVLARKQLKKWFAKEEEFPSSESKSEGSTQTYASQSSSEGSTQTYASQTRSESSSQADTSKSKSEDSAEAYTSRSKSQDSTQTQSSSN

SEQ ID NO: 291 - protein, 173 aa, Homo Sapiens [sequence omitted]

SEQ ID NO: 292 - protein, 787 aa, Homo Sapiens
MGWRPRRARGTPLLLLLLLLLLWPVPGAGVLQGHIPGQPVTPHWVLDGQPWRTVSLEEPVSKPDMGLVALEAEGQELLLELEKNHRLLAPGYIETHYGPDGQPVVLAPNHTDHCHYQGRVRGFPDSWVVLCTCSGMSGLITLSRNASYYLRPWPPRGSKDFSTHEIFRMEQLLTWKGTCGHRDPGNKAGMTSLPGGPQSRGRREARRTRKYLELYIVADHTLFLTRHRNLNHTKQRLLEVANYVDQLLRTLDIQVALTGLEVWTERDRSRVTQDANATLWAFLQWRRGLWAQRPHDSAQLLTGRAFQGATVGLAPVEGMCRAESSGGVSTDHSELPIGAAATMAHEIGHSLGLSHDPDGCCVEAAAESGGCVMAAATGHPFPRVFSACSRRQLRAFFRKGGGACLSNAPDPGLPVPPALCGNGFVEAGEECDCGPGQECRDLCCFAHNCSLRPGAQCAHGDCCVRCLLKPAGALCRQAMGDCDLPEFCTGTSSHCPPDVYLLDGSPCARGSGYCWDGACPTLEQQCQQLWGPGSHPAPEACFQVVNSAGDAHGNCGQDSEGHFLPCAGRDALCGKLQCQGGKPSLLAPHMVPVDSTVHLDGQEVTCRGALALPSAQLDLLGLGLVEPGTQCGPRMVCNSNHNCHCAPGWAPPFCDKPGFGGSMDSGPVQAENHDTFLLAMLLSVLLPLLPGAGLAWCCYRLPGAHLQRCSWGCRRDPACSGPKDGPHRDHPLGGVHPMELGPTATGQPWPLDPENSHEPSSHPEKPLPAVSPDPQADQVQMPRSCLW

SEQ ID NO: 293 - protein, 813 aa, Homo Sapiens
MGWRPRRARGTPLLLLLLLLLLWPVPGAGVLQGHIPGQPVTPHWVLDGQPWRTVSLEEPVSKPDMGLVALEAEGQELLLELEKNHRLLAPGYIETHYGPDGQPVVLAPNHTDHCHYQGRVRGFPDSWVVLCTCSGMSGLITLSRNASYYLRPWPPRGSKDFSTHEIFRMEQLLTWKGTCGHRDPGNKAGMTSLPGGPQSRGRREARRTRKYLELYIVADHTLFLTRHRNLNHTKQRLLEVANYVDQLLRTLDIQVALTGLEVWTERDRSRVTQDANATLWAFLQWRRGLWAQRPHDSAQLLTGRAFQGATVGLAPVEGMCRAESSGGVSTDHSELPIGAAATMAHEIGHSLGLSHDPDGCCVEAAAESGGCVMAAATGHPFPRVFSACSRRQLRAFFRKGGGACLSNAPDPGLPVPPALCGNGFVEAGEECDCGPGQECRDLCCFAHNCSLRPGAQCAHGDCCVRCLLKPAGALCRQAMGDCDLPEFCTGTSSHCPPDVYLLDGSPCARGSGYCWDGACPTLEQQCQQLWGPGSHPAPEACFQVVNSAGDAHGNCGQDSEGHFLPCAGRDALCGKLQCQGGKPSLLAPHMVPVDSTVHLDGQEVTCRGALALPSAQLDLLGLGLVEPGTQCGPRMVCQSRRCRKNAFQELQRCLTACHSHGVCNSNHNCHCAPGWAPPFCDKPGFGGSMDSGPVQAENHDTFLLAMLLSVLLPLLPGAGLAWCCYRLPGAHLQRCSWGCRRDPACSGPKDGPHRDHPLGGVHPMELGPTATGQPWPLDPENSHEPSSHPEKPLPAVSPDPQADQVQMPRSCLW

SEQ ID NO: 294 - protein, 812 aa, Homo Sapiens
MGWRPRRARGTPLLLLLLLLLLWPVPGAGVLQGHIPGQPVTPHWVLDGQPWRTVSLEEPVSKPDMGLVALEAEGQELLLELEKNHRLLAPGYIETHYGPDGQPVVLAPNHTDHCHYQGRVRGFPDSWVVLCTCSGMSGLITLSRNASYYLRPWPPRGSKDFSTHEIFRMEQLLTWKGTCGHRDPGNKAGMTSLPGGPQSRGRREARRTRKYLELYIVADHTLFLTRHRNLNHTKQRLLEVANYVDQLLRTLDIQVALTGLEVWTERDRSRVTQDANATLWAFLQWRRGLWAQRPHDSAQLLTGRAFQGATVGLAPVEGMCRAESSGGVSTDHSELPIGAAATMAHEIGHSLGLSHDPDGCCVEAAAESGGCVMAAATGHPFPRVFSACSRRQLRAFFRKGGGACLSNAPDPGLPVPPALCGNGFVEAGEECDCGPGQECRDLCCFAHNCSLRPGAQCAHGDCCVRCLLKPAGALCRQAMGDCDLPEFCTGTSSHCPPDVYLLDGSPCARGSGYCWDGACPTLEQQCQQLWGPGSHPAPEACFQVVNSAGDAHGNCGQDSEGHFLPCAGRDALCGKLQCQGGKPSLLAPHMVPVDSTVHLDGQEVTCRGALALPSAQLDLLGLGLVEPGTQCGPRMVCQSRRCRKNAFQELQRCLTACHSHGVCNSNHNCHCAPGWAPPFCDKPGFGGSMDSGPVQAENHDTFLLAMLLSVLLPLLPGAGLAWCCYRLPGAHLQRCSWGCRRDPACSGPKDGPHRDHPLGGVHPMELGPTATGQPWPLDPENSHEPSSHPEKPLPAVSPDPQDQVQMPRSCLW

SEQ ID NO: 295 - protein, 692 aa, Homo Sapiens
MGWRPRRARGTPLLLLLLLLLLWPVPGAGVLQGHIPGQPVTPHWVLDGQPWRTVSLEEPVSKPDMGLVALEAEGQELLLELEKNHRLLAPGYIETHYGPDGQPVVLAPNHTDHCHYQGRVRGFPDSWVVLCTCSGMSGLITLSRNASYYLRPWPPRGSKDFSTHEIFRMEQLLTWKGTCGHRDPGNKAGMTSLPGGPQSRGRREARRTRKYLELYIVADHTLFLTRHRNLNHTKQRLLEVANYVDQLLRTLDIQVALTGLEVWTERDRSRRQLRAFFRKGGGACLSNAPDPGLPVPPALCGNGFVEAGEECDCGPGQECRDLCCFAHNCSLRPGAQCAHGDCCVRCLLKPAGALCRQAMGDCDLPEFCTGTSSHCPPDVYLLDGSPCARGSGYCWDGACPTLEQQCQQLWGPGSHPAPEACFQVVNSAGDAHGNCGQDSEGHFLPCAGRDALCGKLQCQGGKPSLLAPHMVPVDSTVHLDGQEVTCRGALALPSAQLDLLGLGLVEPGTQCGPRMVCQSRRCRKNAFQELQRCLTACHSHGVCNSNHNCHCAPGWAPPFCDKPGFGGSMDSGPVQAENHDTFLLAMLLSVLLPLLPGAGLAWCCYRLPGAHLQRCSWGCRRDPACSGPKDGPHRDHPLGGVHPMELGPTATGQPWPLDPENSHEPSSHPEKPLPAVSPDPQDQVQMPRSCLW

SEQ ID NO: 296 - protein, 138 aa, Homo Sapiens
MGWRPRRARGTPLLLLLLLLLLWPVPGAGVLQGHIPGQPVTPHWVLDGQPWRTVSLEEPVSKPDMGLVALEAEGQELLLELEKNHRLLAPGYIETHYGPDGQPVVLAPNHTVRCFHGLWDAPPEVPPHHSYPYSSLHS

SEQ ID NO: 297 - protein, 754 aa, Homo Sapiens
MLPGCIFLMILLIPQVKEKFILGVEGQQLVRPKKLPLIQKRDTGHTHDDDILKTYEEELLYEIKLNRKTLVLHLLRSREFLGSNYSETFYSMKGEAFTRHPQIMDHCFYQGSIVHEYDSAASISTCNGLRGFFRINDQRYLIEPVKYSDEGEHLVFKYNLRVPYGANYSCTELNFTRKTVPGDNESEEDSKIKGIHDEKYVELFIVADDTVYRRNGHPHNKLRNRIWGMVNFVNMIYKTLNIHVTLVGIEIWTHEDKIELYSNIETTLLRFSFWQEKILKTRKDFDHVVLLSGKWLYSHVQGISYPGGMCLPYYSTSIIKDLLPDTNIIANRMAHQLGHNLGMQHDEFPCTCPSGKCVMDSDGSIPALKFSKCSQNQYHQYLKDYKPTCMLNIPFPYNFHDFQFCGNKKLDEGEECDCGPAQECTNPCCDAHTCVLKPGFTCAEGECCESCQIKKAGSICRPAKDECDFPEMCTGHSPACPKDQFRVNGFPCKNSEGYCFMGKCPTREDQCSELFDDEAIESHDICYKMNTKGNKFGYCKNKENRFLPCEEKDVRCGKIYCTGGELSSLLGEDKTYHLKDPQKNATVKCKTIFLYHDSTDIGLVASGTKCGEGMVCNNGECLNMEKVYISTNCPSQCNENPVDGHGLQCHCEEGQAPVACEETLHVTNITILVVVLVLVIVGIGVLILLVRYRKCIKLKQVQSPPTETLGVENKGYFGDEQQIRTEPILPEIHFLNKPASKDSRGIADPNQSAK

SEQ ID NO: 298 - protein, 776 aa, Homo Sapiens
MLPGCIFLMILLIPQVKEKFILGVEGQQLVRPKKLPLIQKRDTGHTHDDDILKTYEEELLYEIKLNRKTLVLHLLRSREFLGSNYSETFYSMKGEAFTRHPQIMDHCFYQGSIVHEYDSAASISTCNGLRGFFRINDQRYLIEPVKYSDEGEHLVFKYNLRVPYGANYSCTELNFTRKTVPGDNESEEDSKIKGIHDEKYVELFIVADDTVYRRNGHPHNKLRNRIWGMVNFVNMIYKTLNIHVTLVGIEIWTHEDKIELYSNIETTLLRFSFWQEKILKTRKDFDHVVLLSGKWLYSHVQGISYPGGMCLPYYSTSIIKDLLPDTNIIANRMAHQLGHNLGMQHDEFPCTCPSGKCVMDSDGSIPALKFSKCSQNQYHQYLKDYKPTCMLNIPFPYNFHDFQFCGNKKLDEGEECDCGPAQECTNPCCDAHTCVLKPGFTCAEGECCESCQIKKAGSICRPAKDECDFPEMCTGHSPACPKDQFRVNGFPCKNSEGYCFMGKCPTREDQCSELFDDEAIESHDICYKMNTKGNKFGYCKNKENRFLPCEEKDVRCGKIYCTGGELSSLLGEDKTYHLKDPQKNATVKCKTIFLYHDSTDIGLVASGTKCGEGMVCNNGECLNMEKVYISTNCPSQCNENPVDGHGLQCHCEEGQAPVACEETLHVTNITILVVVLVLVIVGIGVLILLVRYRKCIKLKQVQSPPTETLGVENKGYFGDEQQIRTEPILPEIHFLNQRTPESLESLPTSFSSPHYITLKPASKDSRGIADPNQSAK

SEQ ID NO: 299 - protein, 210 aa, Homo Sapiens
MLPGCIFLMILLIPQVKEKFILGVEGQQLVRPKKLPLIQKRDTGHTHDDDILKTYEEELLYEIKLNRKTLVLHLLRSREFLGSNYSETFYSMKGEAFTRHPQIMDHCFYQGSIVHEYDSAASISTCNGLRGFFRINDQRYLIEPVKYSDEGEHLVFKYNLRVPYGANYSCTELNFTRKTVPGDNESEEDSKIKVSTLLLSLPQMKHLLFS

SEQ ID NO: 300 - protein, 516 aa, Homo Sapiens
MVNFVNMIYKTLNIHVTLVGIEIWTHEDKIELYSNIETTLLRFSFWQEKILKTRKDFDHVVLLSGKWLYSHVQGISYPGGMCLPYYSTSIIKDLLPDTNIIANRMAHQLGHNLGMQHDEFPCTCPSGKCVMDSDGSIPALKFSKCSQNQYHQYLKDYKPTCMLNIPFPYNFHDFQFCGNKKLDEGEECDCGPAQECTNPCCDAHTCVLKPGFTCAEGECCESCQIKKAGSICRPAKDECDFPEMCTGHSPACPKDQFRVNGFPCKNSEGYCFMGKCPTREDQCSELFDDEAIESHDICYKMNTKGNKFGYCKNKENRFLPCEEKDVRCGKIYCTGGELSSLLGEDKTYHLKDPQKNATVKCKTIFLYHDSTDIGLVASGTKCGEGMVCNNGECLNMEKVYISTNCPSQCNENPVDGHGLQCHCEEGQAPVACEETLHVTNITILVVVLVLVIVGIGVLILLVRYRKCIKLKQVQSPPTETLGVENKGYFGDEQQIRTEPILPEIHFLNHLLYGRHQ

SEQ ID NO: 301 - protein, 245 aa, Homo Sapiens
MRGLGLWLLGAMMLPAIAPSRPWALMEQYEVVLPWRLPGPRVRRALPSHLGGQFRPQPCPYLSIRGTYYRPARCPGLIQPVAQLRLSQSSAGRAPACTWGLEMQWSSRRLCRHHQGLHPERVSYVLGATGHNFTLHLRKNRDLLGSGYTETYTAANGSEVTEQPRGQDHCFYQGHVEGYPDSAASLSTCAGLRGFFQVGSDLHLIEPLDEGGEGGRHAVYQAEHLLQTAGTCGVSDDSLGSLLGP

SEQ ID NO: 302 - protein, 742 aa, Homo Sapiens
MRGLGLWLLGAMMLPAIAPSRPWALMEQYEVVLPWRLPGPRVRRALPSHLGLHPERVSYVLGATGHNFTLHLRKNRDLLGSGYTETYTAANGSEVTEQPRGQDHCFYQGHVEGYPDSAASLSTCAGLRGFFQVGSDLHLIEPLDEGGEGGRHAVYQAEHLLQTAGTCGVSDDSLGSLLGPRTAAVFRPRPGDSLPSRETRYVELYVVVDNAEFQMLGSEAAVRHRVLEVVNHVDKLYQKLNFRVVLVGLEIWNSQDRFHVSPDPSVTLENLLTWQARQRTRRHLHDNVQLITGVDFTGTTVGFARVSAMCSHSSGAVNQDHSKNPVGVACTMAHEMGHNLGMDHDENVQGCRCQERFEAGRCIMAGSIGSSFPRMFSDCSQAYLESFLERPQSVCLANAPDLSHLVGGPVCGNLFVERGEQCDCGPPEDCRNRCCNSTTCQLAEGAQCAHGTCCQECKVKPAGELCRPKKDMCDLEEFCDGRHPECPEDAFQENGTPCSGGYCYNGACPTLAQQCQAFWGPGGQAAEESCFSYDILPGCKASRYRADMCGVLQCKGGQQPLGRAICIVDVCHALTTEDGTAYEPVPEGTRCGPEKVCWKGRCQDLHVYRSSNCSAQCHNHGVCNHKQECHCHAGWAPPHCAKLLTEVHAGCQPRAGQGRGSSPIQGPPRAGPHHPPGPARPTPGLLGGSEEAAPCSSGHCVQPTLPSSCLHPAGTKAGHQANVRTPSAPSQTRGWCGQPWSS

SEQ ID NO: 303 - protein, 824 aa, Homo Sapiens
MRGLGLWLLGAMMLPAIAPSRPWALMEQYEVVLPWRLPGPRVRRALPSHLGLHPERVSYVLGATGHNFTLHLRKNRDLLGSGYTETYTAANGSEVTEQPRGQDHCFYQGHVEGYPDSAASLSTCAGLRGFFQVGSDLHLIEPLDEGGEGGRHAVYQAEHLLQTAGTCGVSDDSLGSLLGPRTAAVFRPRPGDSLPSRETRYVELYVVVDNAEFQMLGSEAAVRHRVLEVVNHVDKLYQKLNFRVVLVGLEIWNSQDRFHVSPDPSVTLENLLTWQARQRTRRHLHDNVQLITGVDFTGTTVGFARVSAMCSHSSGAVNQDHSKNPVGVACTMAHEMGHNLGMDHDENVQGCRCQERFEAGRCIMAGSIGSSFPRMFSDCSQAYLESFLERPQSVCLANAPDLSHLVGGPVCGNLFVERGEQCDCGPPEDCRNRCCNSTTCQLAEGAQCAHGTCCQECKVKPAGELCRPKKDMCDLEEFCDGRHPECPEDAFQENGTPCSGGYCYNGACPTLAQQCQAFWGPGGQAAEESCFSYDILPGCKASRYRADMCGVLQCKGGQQPLGRAICIVDVCHALTTEDGTAYEPVPEGTRCGPEKVCWKGRCQDLHVYRSSNCSAQCHNHGVCNHKQECHCHAGWAPPHCAKLLTEVHAASGSLPVFVVVVLVLLAVVLVTLAGIIVYRKARSRILSRNVAPKTTMGRSNPLFHQAASRVPAKGGAPAPSRGPQELVPTTHPGQPARHPASSVALKRPPPAPPVTVSSPPFPVPVYTRQAPKQVIKPTFAPPVPPVKPGAGAANPGPAEGAVGPKVALKPPIQRKQGAGAPTAP

SEQ ID NO: 304 - protein, 109 aa, Homo Sapiens
MRGLGLWLLGAMMLPGPAPREGELRPWGHRAQLHPPPAEEQGPAGLRLHRDLYGCQWLRGDGAASRAGPLLLPGPRRGVPGLSRQPQHLCRPQGFLPGGVRPAPDRAPG

SEQ ID NO: 305 - protein, 733 aa, Homo Sapiens
MRGLGLWLLGAMMLPGPAPREGELRPWGHRAQLHPPPAEEQGPAGLRLHRDLYGCQWLRGDGAASRAGPLLLPGPRRGVPGLSRQPQHLCRPQVGSDLHLIEPLDEGGEGGRHAVYQAEHLLQTAGTCGVSDDSLGSLLGPRTAAVFRPRPGDSLPSRETRYVELYVVVDNAEFQMLGSEAAVRHRVLEVVNHVDKLYQKLNFRVVLVGLEIWNSQDRFHVSPDPSVTLENLLTWQARQRTRRHLHDNVQLITGVDFTGTTVGFARVSAMCSHSSGAVNQDHSKNPVGVACTMAHEMGHNLGMDHDENVQGCRCQERFEAGRCIMAGSIGSSFPRMFSDCSQAYLESFLERPQSVCLANAPDLSHLVGGPVCGNLFVERGEQCDCGPPEDCRNRCCNSTTCQLAEGAQCAHGTCCQECKVKPAGELCRPKKDMCDLEEFCDGRHPECPEDAFQENGTPCSGGYCYNGACPTLAQQCQAFWGPGGQAAEESCFSYDILPGCKASRYRADMCGVLQCKGGQQPLGRAICIVDVCHALTTEDGTAYEPVPEGTRCGPEKVCNHKQECHCHAGWAPPHCAKLLTEVHAASGSLPVFVVVVLVLLAVVLVTLAGIIVYRKARSRILSRNVAPKTTMGRSNPLFHQAASRVPAKGGAPAPSRGPQELVPTTHPGQPARHPASSVALKRPPPAPPVTVSSPPFPVPVYTRQAPKQGAVGPKVALKPPIQRKQGAGAPTAP

SEQ ID NO: 306 - protein, 655 aa, Homo Sapiens
MGSGARFPSGTLRVRWLLLLGLVGPVLGAARPGFQQTSHLSSYEIITPWRLTRERREAPRPYSKQVSYVIQAEGKEHIIHLERNKDLLPEDFVVYTYNKEGTLITDHPNIQNHCHYRGYVEGVHNSSIALSDCFGLRGLLHLENASYGIEPLQNSSHFEHIIYRMDDVYKEPLKCGVSNKDIEKETAKDEEEEPPSMTQLLRRRRAVLPQTRYVELFIVVDKERYDMMGRNQTAVREEMILLANYLDSMYIMLNIRIVLVGLEIWTNGNLINIVGGAGDVLGNFVQWREKFLITRRRHDSAQLVLKKGFGGTAGMAFVGTVCSRSHAGGINVFGQITVETFASIVAHELGHNLGMNHDDGRDCSCGAKSCIMNSGASGSRNFSSCSAEDFEKLTLNKGGNCLLNIPKPDEAYSAPSCGNKLVDAGEECDCGTPKECELDPCCEGSTCKLKSFAECAYGDCCKDCRFLPGGTLCRGKTSECDVPEYCNGSSQFCQPDVFIQNGYPCQNNKAYCYNGMCQYYDAQCQVIFGSKAKAAPKDCFIEVNSKGDRFGNCGFSGNEYKKCATGNALCGKLQCENVQEIPVFGIVPAIIQTPSRGTKCWGVDFQLGSDVPDPGMVNEGTKCGAGKICRNFQCVDASVLNYDCDVQKKCHGHGK

SEQ ID NO: 307 - protein, 628 aa, Homo Sapiens
MGSGARFPSGTLRVRWLLLLGLVGPVLGAARPGFQQTSHLSSYEIITPWRLTRERREAPRPYSKQVSYVIQAEGKEHIIHLERNKDLLPEDFVVYTYNKEGTLITDHPNIQNHCHYRGYVEGVHNSSIALSDCFGLRGLLHLENASYGIEPLQNSSHFEHIIYRMDDVYKEPLKCGVSNKDIEKETAKDEEEEPPSMTQLLRRRRAVLPQTRYVELFIVVDKERYDMMGRNQTAVREEMILLANYLDSMYIMLNIRIVLVGLEIWTNGNLINIVGGAGDVLGNFVQWREKFLITRRRHDSAQLVLKKGFGGTAGMAFVGTVCSRSHAGGINVFGQITVETFASIVAHELGHNLGMNHDDGRDCSCGAKSCIMNSGASGSRNFSSCSAEDFEKLTLNKGGNCLLNIPKPDEAYSAPSCGNKLVDAGEECDCGTPKECELDPCCEGSTCKLKSFAECAYGDCCKDCRFLPGGTLCRGKTSECDVPEYCNGSSQFCQPDVFIQNGYPCQNNKAYCYNGMCQYYDAQCQVIFGSKAKAAPKDCFIEVNSKGDRFGNCGFSGNEYKKCATGNALCGKLQCENVQEIPVFGIVPAIIQTPSRGTKCWGVDFQLGSDVPDPGMVNEGTKCGAGKK

SEQ ID NO: 308 - protein, 819 aa, Homo Sapiens
MGSGARFPSGTLRVRWLLLLGLVGPVLGAARPGFQQTSHLSSYEIITPWRLTRERREAPRPYSKQVSYVIQAEGKEHIIHLERNKDLLPEDFVVYTYNKEGTLITDHPNIQNHCHYRGYVEGVHNSSIALSDCFGLRGLLHLENASYGIEPLQNSSHFEHIIYRMDDVYKEPLKCGVSNKDIEKETAKDEEEEPPSMTQLLRRRRAVLPQTRYVELFIVVDKERYDMMGRNQTAVREEMILLANYLDSMYIMLNIRIVLVGLEIWTNGNLINIVGGAGDVLGNFVQWREKFLITRRRHDSAQLVLKKGFGGTAGMAFVGTVCSRSHAGGINVFGQITVETFASIVAHELGHNLGMNHDDGRDCSCGAKSCIMNSGASGSRNFSSCSAEDFEKLTLNKGGNCLLNIPKPDEAYSAPSCGNKLVDAGEECDCGTPKECELDPCCEGSTCKLKSFAECAYGDCCKDCRFLPGGTLCRGKTSECDVPEYCNGSSQFCQPDVFIQNGYPCQNNKAYCYNGMCQYYDAQCQVIFGSKAKAAPKDCFIEVNSKGDRFGNCGFSGNEYKKCATGNALCGKLQCENVQEIPVFGIVPAIIQTPSRGTKCWGVDFQLGSDVPDPGMVNEGTKCGAGKICRNFQCVDASVLNYDCDVQKKCHGHGVCNSNKNCHCENGWAPPNCETKGYGGSVDSGPTYNEMNTALRDGLLVFFFLIVPLIVCAIFIFIKRDQLWRSYFRKKRSQTYESDGKNQANPSRQPGSVPRHVSPVTPPREVPIYANRFAVPTYAAKQPQQFPSRPPPPQPKVSSQGNLIPARPAPAPPLYSSLT

SEQ ID NO: 309 - protein, 712 aa, Homo Sapiens
MGSGARFPSGTLRVRWLLLLGLVGPVLGAARPGFQQTSHLSSYEIITPWRLTRERREAPRPYSKQVSYVIQAEGKEHIIHLERNKDLLPEDFVVYTYNKEGTLITDHPNIQNHCHYRGYVEGVHNSSIALSDCFGLRGLLHLENASYGIEPLQNSSHFEHIIYRMDDVYKEPLKCGVSNKDIEKETAKDEEEEPPSMTQLLRRRRAVLPQTRYVELFIVVDKERYDMMGRNQTAVREEMILLANYLDSMYIMLNIRIVLVGLEIWTNGNLINIVGGAGDVLGNFVQWREKFLITRRRHDSAQLVLKKGFGGTAGMAFVGTVCSRSHAGGINVFGQITVETFASIVAHELGHNLGMNHDDGRDCSCGAKSCIMNSGASGSRNFSSCSAEDFEKLTLNKGGNCLLNIPKPDEAYSAPSCGNKLVDAGEECDCGTPKECELDPCCEGSTCKLKSFAECAYGDCCKDCRFLPGGTLCRGKTSECDVPEYCNGSSQFCQPDVFIQNGYPCQNNKAYCYNGMCQYYDAQCQVIFGSKAKAAPKDCFIEVNSKGDRFGNCGFSGNEYKKCATGNALCGKLQCENVQEIPVFGIVPAIIQTPSRGTKCWGVDFQLGSDVPDPGMVNEGTKCGAGKICRNFQCVDASVLNYDCDVQKKCHGHGVCNSNKNCHCENGWAPPNCETKGYGGSVDSGPTYNGQMAKIKQTLLDSRGVFLDMFLQ

SEQ ID NO: 310 - protein, 147 aa, Homo Sapiens
MGSGARFPSGTLRVRWLLLLGLVGPVLGAARPGFQQTSHLSSYEIITPWRLTRERREAPRPYSKQVSYVIQAEGKEHIIHLERNKDLLPEDFVVYTYNKEGTLITDHPNIQRCGPLCIREQSTPGDRAGQNTQNNWQMSNLAFCVYY

SEQ ID NO: 311 - protein, 128 aa, Homo Sapiens
MGSGARFPSGTLRVRWLLLLGLVGPVLGAARPGFQQTSHLSSYEIITPWRLTRERREAPRPYSKQVSYVIQAEGKEHIIHLERNKDLLPEDFVVYTYNKEGTLITDHPNIQVMYFSLDPIANFKTIII

SEQ ID NO: 312 - protein, 391 aa, Homo Sapiens
MILNGEEIILSLQKTKHLLGPDYTETLYSPRGEEITTKPENMEHCYYKGNILNEKNSVASISTCDGLRGYFTHHHQRYQIKPLKSTDEKEHAVFTSNQEEQDPANHTCGVKSTDGKQGPIRISRSLKSPEKEDFLRAQKYIDLYLVLDNAFYKNYNENLTLIRSFVFDVMNLLNVIYNTIDVQVALVGMEIWSDGDKIKVVPSASTTFDNFLRWHSSNLGKKIHDHAQLLSGISFNNRRVGLAASNSLCSPSSVAVIEAKKKNNVALVGVMSHELGHVLGMPDVPFNTKCPSGSCVMNQYLSSKFPKDFSTSCRAHFERYLLSQKPKCLLQAPIPTNIMTTPVCGNHLLEVGEDCDCGSPKECTNLCCEALTCKLKPGTDCGGDAPNHTTE

SEQ ID NO: 313 - protein, 470 aa, Homo Sapiens
MLRGISQLPAVATMSWVLLPVLWLIVQTQAIAIKQTPELTLHEIVCPKKLHILHKREIKNNQTEKHGKEERYEPEVQYQMILNGEEIILSLQKTKHLLGPDYTETLYSPRGEEITTKPENMEHCYYKGNILNEKNSVASISTCDGLRGYFTHHHQRYQIKPLKSTDEKEHAVFTSNQEEQDPANHTCGVKSTDGKQGPIRISRSLKSPEKEDFLRAQKYIDLYLVLDNAFYKNYNENLTLIRSFVFDVMNLLNVIYNTIDVQVALVGMEIWSDGDKIKVVPSASTTFDNFLRWHSSNLGKKIHDHAQLLSGISFNNRRVGLAASNSLCSPSSVAVIEAKKKNNVALVGVMSHELGHVLGMPDVPFNTKCPSGSCVMNQYLSSKFPKDFSTSCRAHFERYLLSQKPKCLLQAPIPTNIMTTPVCGNHLLEVGEDCDCGSPKECTNLCCEALTCKLKPGTDCGGDAPNHTTE

SEQ ID NO: 314 - protein, 41 aa, Homo Sapiens
MLRGISQLPAVATMSWVLLPVLWLIVQTQASNCAWPKVSIQ

SEQ ID NO: 315 - protein, 171 aa, Homo Sapiens
MLVADQSMAEFHGSGLKHYLLTLFSVAARLYKHPSIRNSVSLVVVKILVIHDEQKGPEVTSNAALTLRNFCNWQKQHNPPSDRDAEHYDTAILFTRQDLCGSQTCDTLGMADVGTVCDPSRSCSVIEDDGLQAAFTTAHELGHVFNMPHDDAKQCASLNGVNQDSHMMASM

SEQ ID NO: 316 - protein, 967 aa, Homo Sapiens
MQRAVPEGFGRRKLGSDMGNAERAPGSRSFGPVPTLLLLAAALLAVSDALGRPSEEDEELVVPELERAPGHGTTRLRLHAFDQQLDLELRPDSSFLAPGFTLQNVGRKSGSETPLPETDLAHCFYSGTVNGDPSSAAALSLCEGVRGAFYLLGEAYFIQPLPAASERLATAAPGEKPPAPLQFHLLRRNRQGDVGGTCGVVDDEPRPTGKAETEDEDEGTEGEDEGAQWSPQDPALQGVGQPTGTGSIRKKRFVSSHRYVETMLVADQSMAEFHGSGLKHYLLTLFSVAARLYKHPSIRNSVSLVVVKILVIHDEQKGPEVTSNAALTLRNFCNWQKQHNPPSDRDAEHYDTAILFTRQDLCGSQTCDTLGMADVGTVCDPSRSCSVIEDDGLQAAFTTAHELGHVFNMPHDDAKQCASLNGVNQDSHMMASMLSNLDHSQPWSPCSAYMITSFLDNGHGECLMDKPQNPIQLPGDLPGTSYDANRQCQFTFGEDSKHCPDAASTCSTLWCTGTSGGVLVCQTKHFPWADGTSCGEGKWCINGKCVNKTDRKHFDTPFHGSWGMWGPWGDCSRTCGGGVQYTMRECDNPVPKNGGKYCEGKRVRYRSCNLEDCPDNNGKTFREEQCEAHNEFSKASFGSGPAVEWIPKYAGVSPKDRCKLICQAKGIGYFFVLQPKVVDGTPCSPDSTSVCVQGQCVKAGCDRIIDSKKKFDKCGVCGGNGSTCKKISGSVTSAKPGYHDIITIPTGATNIEVKQRNQRGSRNNGSFLAIKAADGTYILNGDYTLSTLEQDIMYKGVVLRYSGSSAALERIRSFSPLKEPLTIQVLTVGNALRPKIKYTYFVKKKKESFNAIPTFSAWVIEEWGECSKSCELGWQRRLVECRDINGQPASECAKEVKPASTRPCADHPCPQWQLGEWSSCSKTCGKGYKKRSLKCLSHDGGVLSHESCDPLKKPKHFIDFCTMAECS

SEQ ID NO: 317 - protein, 128 aa, Homo Sapiens
MVTWEGTGSIRKKRFVSSHRYVETMLVADQSMAEFHGSGLKHYLLTLFSVAARLYKHPSIRNSVSLVVVKILVIHDEQKGPEVTSNAALTLRNFCNWQKQHNPPSDRDAEHYDTAILFTRQDLCGSQT

SEQ ID NO: 318 - protein, 200 aa, Homo Sapiens
  misc_feature (1)..(1): Xaa can be any naturally occurring amino acid
XCRSFLLRPSLCAVLILQFFLFHHFGTGSIRKKRFVSSHRYVETMLVADQSMAEFHGSGLKHYLLTLFSVAARLYKHPSIRNSVSLVVVKILVIHDEQKGPEVTSNAALTLRNFCNWQKQHNPPSDRDAEHYDTAILFTRQDLCGSQTCDTLGMADVGTVCDPSRSCSVIEDDGLQAAFTTAHELGHVFNMPHDDAKQCA

SEQ ID NO: 319 - protein, 1103 aa, Homo Sapiens
MAPACQILRWALALGLGLMFEVTHAFRSQDEFLSSLESYEIAFPTRVDHNGALLAFSPPPPRRQRRGTGATAESRLFYKVASPSTHFLLNLTRSSRLLAGHVSVEYWTREGLAWQRAARPHCLYAGHLQGQASSSHVAISTCGGLHGLIVADEEEYLIEPLHGGPKGSRSPEESGPHVVYKRSSLRHPHLDTACGVRDEKPWKGRPWWLRTLKPPPARPLGNETERGQPGLKRSVSRERYVETLVVADKMMVAYHGRRDVEQYVLAIMNIVAKLFQDSSLGSTVNILVTRLILLTEDQPTLEITHHAGKSLDSFCKWQKSIVNHSGHGNAIPENGVANHDTAVLITRYDICIYKNKPCGTLGLAPVGGMCERERSCSVNEDIGLATAFTIAHEIGHTFGMNHDGVGNSCGARGQDPAKLMAAHITMKTNPFVWSSCSRDYITSFLDSGLGLCLNNRPPRQDFVYPTVAPGQAYDADEQCRFQHGVKSRQCKYGEVCSELWCLSKSNRCITNSIPAAEGTLCQTHTIDKGWCYKRVCVPFGSRPEGVDGAWGPWTPWGDCSRTCGGGVSSSSRHCDSPRPTIGGKYCLGERRRHRSCNTDDCPPGSQDFREVQCSEFDSIPFRGKFYKWKTYRGGGVKACSLTCLAEGFNFYTERAAAVVDGTPCRPDTVDICVSGECKHVGCDRVLGSDLREDKCRVCGGDGSACETIEGVFSPASPGAGYEDVVWIPKGSVHIFIQDLNLSLSHLALKGDQESLLLEGLPGTPQPHRLPLAGTTFQLRQGPDQVQSLEALGPINASLIVMVLARTELPALRYRFNAPIARDSLPPYSWHYAPWTKCSAQCAGGSQVQAVECRNQLDSSAVAPHYCSAHSKLPKRQRACNTEPCPPDWVVGNWSLCSRSCDAGVRSRSVVCQRRVSAAEEKALDDSACPQPRPPVLEACHGPTCPPEWAALDWSECTPSCGPGLRHRVVLCKSADHRATLPPAHCSPAAKPPATMRCNLRRCPPARWVAGEWGECSAQCGVGQRQRSVRCTSHTGQASHECTEALRPPTTQQCEAKCDSPTPGDGPEECKDVNKVAYCPLVLKFQFCSRAYFRQMCCKTCHGH

SEQ ID NO: 320 - protein, 289 aa, Homo Sapiens
MAPACQILRWALALGLGLMFEVTHAFRSQDEFLSSLESYEIAFPTRVDHNGALLAFSPPPPRRQRRGTGATAESRLFYKVASPSTHFLLNLTRSSRLLAGHVSVEYWTREGLAWQRAARPHCLYAGHLQGQASSSHVAISTCGGLHGLIVADEEEYLIEPLHGGPKGSRSPEESGPHVVYKRSSLRHPHLDTACGVRDEKPWKGRPWWLRTLKPPPARPLGNETERGQPGLKRSVSRERYVETLVVADKMMVAYHGRRDVEQYVLAIMNIVRLPNFSRTRVWEAPLTSS

SEQ ID NO: 321 - protein, 289 aa, Homo Sapiens; identical to SEQ ID NO: 320

SEQ ID NO: 322 - protein, 1103 aa, Homo Sapiens; identical to SEQ ID NO: 319

SEQ ID NO: 323 - protein, 590 aa, Homo Sapiens
MGPTSVLRAGLTPSCLPPPSGATNGSVSPLGRAQRVWTEPGGRGLHGATAAGPVAAACPLLAVTATAPGQPSGASTVWVREGGTAPATRMTVPLAPRTSEKCSVLNLTASLSVGNSTSGKRTGEACSLTCLAEGFNFYTERAAAVVDGTPCRPDTVDICVSGECKHVGCDRVLGSDLREDKCRVCGGDGSACETIEGVFSPASPGAGYEDVVWIPKGSVHIFIQDLNLSLSHLALKGDQESLLLEGLPGTPQPHRLPLAGTTFQLRQGPDQVQSLEALGPINASLIVMVLARTELPALRYRFNAPIARDSLPPYSWHYAPWTKCSAQCAGGSQVQAVECRNQLDSSAVAPHYCSAHSKLPKRQRACNTEPCPPDWVVGNWSLCSRSCDAGVRSRSVVCQRRVSAAEEKALDDSACPQPRPPVLEACHGPTCPPEWAALDWSECTPSCGPGLRHRVVLCKSADHRATLPPAHCSPAAKPPATMRCNLRRCPPARWVAGEWGECSAQCGVGQRQRSVRCTSHTGQASHECTEALRPPTTQQCEAKCDSPTPGDGPEECKDVNKVAYCPLVLKFQFCSRAYFRQMCCKTCHGH

SEQ ID NO: 324 - protein, 126 aa, Homo Sapiens
MGPTSVLRAGLTPSCLPPPSGATNGSVSPLGRAQRVWTEPGGRGLHGATAAGPVAAACPLLAVTATAPGQPSGASTVWVREGGTAPATRMTVPLAPRTSEKCSVLNLTASLSVGNSTSGKRTGEGA

SEQ ID NO: 325 - protein, 1509 aa, Homo Sapiens
MPCAQRSWLANLSVVAQLLNFGALCYGRQPQPGPVRFPDRRQEHFIKGLPEYHVVGPVRVDASGHFLSYGLHYPITSSRRKRDLDGSEDWVYYRISHEEKDLFFNLTVNQGFLSNSYIMEKRYGNLSHVKMMASSAPLCHLSGTVLQQGTRVGTAALSACHGLTGFFQLPHGDFFIEPVKKHPLVEGGYHPHIVYRRQKVPETKEPTCGLKDSVNISQKQELWREKWERHNLPSRSLSRRSISKERWVETLVVADTKMIEYHGSENVESYILTIMNMVTGLFHNPSIGNAIHIVVVRLILLEEEEQGLKIVHHAEKTLSSFCKWQKSINPKSDLNPVHHDVAVLLTRKDICAGFNRPCETLGLSHLSGMCQPHRSCNINEDSGLPLAFTIAHELGHSFGIQHDGKENDCEPVGRHPYIMSRQLQYDPTPLTWSKCSEEYITRFLDRGWGFCLDDIPKKKGLKSKVIAPGVIYDVHHQCQLQYGPNATFCQEVENVCQTLWCSVKGFCRSKLDAAADGTQCGEKKWCMAGKCITVGKKPESIPGGWGRWSPWSHCSRTCGAGVQSAERLCNNPEPKFGGKYCTGERKRYRLCNVHPCRSEAPTFRQMQCSEFDTVPYKNELYHWFPIFNPGYVDIGLIPKGARDIRVMEIEGAGNFLAIRSEDPEKYYLNGGFIIQWNGNYKLAGTVFQYDRKGDLEKLMATGPTNESVWIQLLFQVTNPGIKYEYTIQKDGLDNDVEQQMYFWQYGHWTECSVTCGTGIRRQTAHCIKKGRGMVKATFCDPETQPNGRQKKCHEKACPPRWWAGEWEACSATCGPHGEKKRTVLCIQTMVSDEQALPPTDCQHLLKPKTLLSCNRDILCPSDWTVGNWSECSVSCGGGVRIRSVTCAKNHDEPCDVTRKPNSRALCGLQQCPSSRRVLKPNKGTISNGKNPPTLKPVPPPTSRPRMLTTPTGPESMSTSTPAISSPSPTTASKEGDLGGKQWQDSSTQPELSSRYLISTGSTSQPILTSQSLSIQPSEENVSSSDTGPTSEGGLVATTTSGSGLSSSRNPITWPVTPFYNTLTKGPEMEIHSGSGEEREQPEDKDESNPVIWTKIRVPGNDAPVESTEMPLAPPLTPDLSRESWWPPFSTVMEGLLPSQRPTTSETGTPRVEGMVTEKPANTLLPLGGDHQPEPSGKTANRNHLKLPNNMNQTKSSEPVLTEEDATSLITEGFLLNASNYKQLTNGHGSAHWIVGNWSECSTTCGLGAYWRRVECSTQMDSDCAAIQRPDPAKRCHLRPCAGWKVGNWSKCSRNCSGGFKIREIQCVDSRDHRNLRPFHCQFLAGIPPPLSMSCNPEPCEAWQVEPWSQCSRSCGGGVQERGVFCPGGLCDWTKRPTSTMSCNEHLCCHWATGNWDLCSTSCGGGFQKRTVQCVPSEGNKTEDQDQCLCDHKPRPPEFKKCNQQACKKSADLLCTKDKLSASFCQTLKAMKKCSVPTVRAECCFSCPQTHITHTQRQRRQRLLQKSKEL

SEQ ID NO: 326 - protein, 1594 aa, Homo Sapiens
MPCAQRSWLANLSVVAQLLNFGALCYGRQPQPGPVRFPDRRQEHFIKGLPEYHVVGPVRVDASGHFLSYGLHYPITSSRRKRDLDGSEDWVYYRISHEEKDLFFNLTVNQGFLSNSYIMEKRYGNLSHVKMMASSAPLCHLSGTVLQQGTRVGTAALSACHGLTGFFQLPHGDFFIEPVKKHPLVEGGYHPHIVYRRQKVPETKEPTCGLKDSVNISQKQELWREKWERHNLPSRSLSRRSISKERWVETLVVADTKMIEYHGSENVESYILTIMNMVTGLFHNPSIGNAIHIVVVRLILLEEEEQGLKIVHHAEKTLSSFCKWQKSINPKSDLNPVHHDVAVLLTRKDICAGFNRPCETLGLSHLSGMCQPHRSCNINEDSGLPLAFTIAHELGHSFGIQHDGKENDCEPVGRHPYIMSRQLQYDPTPLTWSKCSEEYITRFLDRGWGFCLDDIPKKKGLKSKVIAPGVIYDVHHQCQLQYGPNATFCQEVENVCQTLWCSVKGFCRSKLDAAADGTQCGEKKWCMAGKCITVGKKPESIPGGWGRWSPWSHCSRTCGAGVQSAERLCNNPEPKFGGKYCTGERKRYRLCNVHPCRSEAPTFRQMQCSEFDTVPYKNELYHWFPIFNPAHPCELYCRPIDGQFSEKMLDAVIDGTPCFEGGNSRNVCINGICKMVGCDYEIDSNATEDRCGVCLGDGSSCQTVRKMFKQKEGSGYVDIGLIPKGARDIRVMEIEGAGNFLAIRSEDPEKYYLNGGFIIQWNGNYKLAGTVFQYDRKGDLEKLMATGPTNESVWIQLLFQVTNPGIKYEYTIQKDGLDNDVEQQMYFWQYGHWTECSVTCGTGIRRQTAHCIKKGRGMVKATFCDPETQPNGRQKKCHEKACPPRWWAGEWEACSATCGPHGEKKRTVLCIQTMVSDEQALPPTDCQHLLKPKTLLSCNRDILCPSDWTVGNWSECSVSCGGGVRIRSVTCAKNHDEPCDVTRKPNSRALCGLQQCPSSRRVLKPNKGTISNGKNPPTLKPVPPPTSRPRMLTTPTGPESMSTSTPAISSPSPTTASKEGDLGGKQWQDSSTQPELSSRYLISTGSTSQPILTSQSLSIQPSEENVSSSDTGPTSEGGLVATTTSGSGLSSSRNPITWPVTPFYNTLTKGPEMEIHSGSGEEREQPEDKDESNPVIWTKIRVPGNDAPVESTEMPLAPPLTPDLSRESWWPPFSTVMEGLLPSQRPTTSETGTPRVEGMVTEKPANTLLPLGGDHQPEPSGKTANRNHLKLPNNMNQTKSSEPVLTEEDATSLITEGFLLNASNYKQLTNGHGSAHWIVGNWSECSTTCGLGAYWRRVECSTQMDSDCAAIQRPDPAKRCHLRPCAGWKVGNWSKCSRNCSGGFKIREIQCVDSRDHRNLRPFHCQFLAGIPPPLSMSCNPEPCEAWQVEPWSQCSRSCGGGVQERGVFCPGGLCDWTKRPTSTMSCNEHLCCHWATGNWDLCSTSCGGGFQKRTVQCVPSEGNKTEDQDQCLCDHKPRPPEFKKCNQQACKKSADLLCTKDKLSASFCQTLKAMKKCSVPTVRAECCFSCPQTHITHTQRQRRQRLLQKSKEL

SEQ ID NO: 327 - protein, 232 aa, Homo Sapiens
MPCAQRSWLANLSVVAQLLNFGALCYGRQPQPGPVRFPDRRQEHFIKGLPEYHVVGPVRVDASGHFLSYGLHYPITSSRRKRDLDGSEDWVYYRISHEEKDLFFNLTVNQGFLSNSYIMEKRYGNLSHVKMMASSAPLCHLSGTVLQQGTRVGTAALSACHGLTGFFQLPHGDFFIEPVKKHPLVEGGYHPHIVYRRQKVPETKEPTCGLKGIVTHMSSWVEESVLFFWLFY

SEQ ID NO: 328 - protein, 444 aa, Homo Sapiens
MASDGAAPRAGLAWSPCSRRQLLSLLSAGRARCVWDPPRPQPGSAGHPPDAQPGLYYSANEQCRVAFGPKAVACTFAREHLDMCQALSCHTDPLDQSSCSRLLVPLLDGTECGVEKWCSKGRCRSLVELTPIAAVHGRWSSWGPRSPCSRSCGGGVVTRRRQCNNPRPAFGGRACVGADLQAEMCNTQACEKTQLEFMSQQCARTDGQPLRSSPGGASFYHWGAAVPHSQGDALCRHMCRAIGESFIMKRGDSFLDGTRCMPSGPREDGTLSLCVSGSCRTFGCDGRMDSQQVWDRCQVCGGDNSTCSPRKGSFTAGRAREYVTFLTVTPNLTSVYIANHRPLFTHLAVRIGGRYVVAGKMSISPNTTYPSLLEDGRVEYRVALTEDRLPRLEEIRIWGPLQEDADIQVGGVRAQLMHISWWSRPGLGERDLCARGRWPGGSSD

SEQ ID NO: 329 - protein, 276 aa, Homo Sapiens
MHQRHPRARCPPLCVAGILACGFLLGCWGPSHFQQSCLQALEPQAVSSYLSPGAPLKGRPPSPGFQRQRQRQRRAAGGILHLELLVAVGPDVFQAHQEDTERYVLTNLNIGAELLRDPSLGAQFRVHLVKMVILTEPEGAPNITANLTSSLLSVCGWSQTINPEDDTDPGHADLVLYITRFDLELPDGNRQVRGVTQLGGACSPTWSCLITEDTGFDLGVTIAHEIGHRICARPSPATQTRWTKAAAAASSFLSWMGQNVAWRSGAPRVAAAPWWS

SEQ ID NO: 330 - protein, 1371 aa, Homo Sapiens
MHQRHPRARCPPLCVAGILACGFLLGCWGPSHFQQSCLQALEPQAVSSYLSPGAPLKGRPPSPGFQRQRQRQRRAAGGILHLELLVAVGPDVFQAHQEDTERYVLTNLNIGAELLRDPSLGAQFRVHLVKMVILTEPEGAPNITANLTSSLLSVCGWSQTINPEDDTDPGHADLVLYITRFDLELPDGNRQVRGVTQLGGACSPTWSCLITEDTGFDLGVTIAHEIGHSFGLEHDGAPGSGCGPSGHVMASDGAAPRAGLAWSPCSRRQLLSLLSAGRARCVWDPPRPQPGSAGHPPDAQPGLYYSANEQCRVAFGPKAVACTFAREHLDMCQALSCHTDPLDQSSCSRLLVPLLDGTECGVEKWCSKGRCRSLVELTPIAAVHGRWSSWGPRSPCSRSCGGGVVTRRRQCNNPRPAFGGRACVGADLQAEMCNTQACEKTQLEFMSQQCARTDGQPLRSSPGGASFYHWGAAVPHSQGDALCRHMCRAIGESFIMKRGDSFLDGTRCMPSGPREDGTLSLCVSGSCRTFGCDGRMDSQQVWDRCQVCGGDNSTCSPRKGSFTAGRAREYVTFLTVTPNLTSVYIANHRPLFTHLAVRIGGRYVVAGKMSISPNTTYPSLLEDGRVEYRVALTEDRLPRLEEIRIWGPLQEDADIQVYRRYGEEYGNLTRPDITFTYFQPKPRQAWVWAAVRGPCSVSCGAGLRWVNYSCLDQARKELVETVQCQGSQQPPAWPEACVLEPCPPYWAVGDFGPCSASCGGGLRERPVRCVEAQGSLLKTLPPARCRAGAQQPAVALETCNPQPCPARWEVSEPSSCTSAGGAGLALENETCVPGADGLEAPVTEGPGSVDEKLPAPEPCVGMSCPPGWGHLDATSAGEKAPSPWGSIRTGAQAAHVWTPAAGSCSVSCGRGLMELRFLCMDSALRVPVQEELCGLASKPGSRREVCQAVPCPARWQYKLAACSVSCGRGVVRRILYCARAHGEDDGEEILLDTQCQGLPRPEPQEACSLEPCPPRWKVMSLGPCSASCGLGTARRSVACVQLDQGQDVEVDEAACAALVRPEASVPCLIADCTYRWHVGTWMECSVSCGDGIQRRRDTCLGPQAQAPVPADFCQHLPKPVTVRGCWAGPCVGQGACGRQHLEPTGTIDMRGPGQADCAVAIGRPLGEVVTLRVLESSLNCSAGDMLLLWGRLTWRKMCRKLLDMTFSSKTNTLVVRQRCGRPGGGVLLRYGSQLAPETFYRECDMQLFGPWGEIVSPSLSPATSNAGGCRLFINVAPHARIAIHALATNMGAGTEGANASYILIRDTHSLRTTAFHGQQVLYWESESSQAEMEFSEGFLKAQASLRGQYWTLQSWVPEMQDPQSWKGKEGT

SEQ ID NO: 331 - protein, 1340 aa, Homo Sapiens
MHQRHPRARCPPLCVAGILACGFLLGCWGPSHFQQSCLQALEPQAVSSYLSPGAPLKGRPPSPGFQRQRQRQRRAAGGILHLELLVAVGPDVFQAHQEDTERYVLTNLNIGAELLRDPSLGAQFRVHLVKMVILTEPEGAPNITANLTSSLLSVCGWSQTINPEDDTDPGHADLVLYITRFDLELPDGNRQVRGVTQLGGACSPTWSCLITEDTGFDLGVTIAHEIGHSFGLEHDGAPGSGCGPSGHVMASDGAAPRAGLAWSPCSRRQLLSLLSANEQCRVAFGPKAVACTFAREHLDMCQALSCHTDPLDQSSCSRLLVPLLDGTECGVEKWCSKGRCRSLVELTPIAAVHGRWSSWGPRSPCSRSCGGGVVTRRRQCNNPRPAFGGRACVGADLQAEMCNTQACEKTQLEFMSQQCARTDGQPLRSSPGGASFYHWGAAVPHSQGDALCRHMCRAIGESFIMKRGDSFLDGTRCMPSGPREDGTLSLCVSGSCRTFGCDGRMDSQQVWDRCQVCGGDNSTCSPRKGSFTAGRAREYVTFLTVTPNLTSVYIANHRPLFTHLAVRIGGRYVVAGKMSISPNTTYPSLLEDGRVEYRVALTEDRLPRLEEIRIWGPLQEDADIQVYRRYGEEYGNLTRPDITFTYFQPKPRQAWVWAAVRGPCSVSCGAGLRWVNYSCLDQARKELVETVQCQGSQQPPAWPEACVLEPCPPYWAVGDFGPCSASCGGGLRERPVRCVEAQGSLLKTLPPARCRAGAQQPAVALETCNPQPCPARWEVSEPSSCTSAGGAGLALENETCVPGADGLEAPVTEGPGSVDEKLPAPEPCVGMSCPPGWGHLDATSAGEKAPSPWGSIRTGAQAAHVWTPAAGSCSVSCGRGLMELRFLCMDSALRVPVQEELCGLASKPGSRREVCQAVPCPARWQYKLAACSVSCGRGVVRRILYCARAHGEDDGEEILLDTQCQGLPRPEPQEACSLEPCPPRWKVMSLGPCSASCGLGTARRSVACVQLDQGQDVEVDEAACAALVRPEASVPCLIADCTYRWHVGTWMECSVSCGDGIQRRRDTCLGPQAQAPVPADFCQHLPKPVTVRGCWAGPCVGQGACGRQHLEPTGTIDMRGPGQADCAVAIGRPLGEVVTLRVLESSLNCSAGDMLLLWGRLTWRKMCRKLLDMTFSSKTNTLVVRQRCGRPGGGVLLRYGSQLAPETFYRECDMQLFGPWGEIVSPSLSPATSNAGGCRLFINVAPHARIAIHALATNMGAGTEGANASYILIRDTHSLRTTAFHGQQVLYWESESSQAEMEFSEGFLKAQASLRGQYWTLQSWVPEMQDPQSWKGKEGT

SEQ ID NO: 332 - protein, 1427 aa, Homo Sapiens
MHQRHPRARCPPLCVAGILACGFLLGCWGPSHFQQSCLQALEPQAVSSYLSPGAPLKGRPPSPGFQRQRQRQRRAAGGILHLELLVAVGPDVFQAHQEDTERYVLTNLNIGAELLRDPSLGAQFRVHLVKMVILTEPEGAPNITANLTSSLLSVCGWSQTINPEDDTDPGHADLVLYITRFDLELPDGNRQVRGVTQLGGACSPTWSCLITEDTGFDLGVTIAHEIGHSFGLEHDGAPGSGCGPSGHVMASDGAAPRAGLAWSPCSRRQLLSLLSAGRARCVWDPPRPQPGSAGHPPDAQPGLYYSANEQCRVAFGPKAVACTFAREHLDMCQALSCHTDPLDQSSCSRLLVPLLDGTECGVEKWCSKGRCRSLVELTPIAAVHGRWSSWGPRSPCSRSCGGGVVTRRRQCNNPRPAFGGRACVGADLQAEMCNTQACEKTQLEFMSQQCARTDGQPLRSSPGGASFYHWGAAVPHSQGDALCRHMCRAIGESFIMKRGDSFLDGTRCMPSGPREDGTLSLCVSGSCRTFGCDGRMDSQQVWDRCQVCGGDNSTCSPRKGSFTAGRAREYVTFLTVTPNLTSVYIANHRPLFTHLAVRIGGRYVVAGKMSISPNTTYPSLLEDGRVEYRVALTEDRLPRLEEIRIWGPLQEDADIQVYRRYGEEYGNLTRPDITFTYFQPKPRQAWVWAAVRGPCSVSCGAGLRWVNYSCLDQARKELVETVQCQGSQQPPAWPEACVLEPCPPYWAVGDFGPCSASCGGGLRERPVRCVEAQGSLLKTLPPARCRAGAQQPAVALETCNPQPCPARWEVSEPSSCTSAGGAGLALENETCVPGADGLEAPVTEGPGSVDEKLPAPEPCVGMSCPPGWGHLDATSAGEKAPSPWGSIRTGAQAAHVWTPAAGSCSVSCGRGLMELRFLCMDSALRVPVQEELCGLASKPGSRREVCQAVPCPARWQYKLAACSVSCGRGVVRRILYCARAHGEDDGEEILLDTQCQGLPRPEPQEACSLEPCPPRWKVMSLGPCSASCGLGTARRSVACVQLDQGQDVEVDEAACAALVRPEASVPCLIADCTYRWHVGTWMECSVSCGDGIQRRRDTCLGPQAQAPVPADFCQHLPKPVTVRGCWAGPCVGQGTPSLVPHEEAAAPGRTTATPAGASLEWSQARGLLFSPAPQPRRLLPGPQENSVQSSACGRQHLEPTGTIDMRGPGQADCAVAIGRPLGEVVTLRVLESSLNCSAGDMLLLWGRLTWRKMCRKLLDMTFSSKTNTLVVRQRCGRPGGGVLLRYGSQLAPETFYRECDMQLFGPWGEIVSPSLSPATSNAGGCRLFINVAPHARIAIHALATNMGAGTEGANASYILIRDTHSLRTTAFHGQQVLYWESESSQAEMEFSEGFLKAQASLRGQYWTLQSWVPEMQDPQSWKGKEGT

SEQ ID NO: 333 - protein, 344 aa, Homo Sapiens
MHQRHPRARCPPLCVAGILACGFLLGCWGPSHFQQSCLQALEPQAVSSYLSPGAPLKGRPPSPGFQRQRQRQRRAAGGILHLELLVAVGPDVFQAHQEDTERYVLTNLNIGAELLRDPSLGAQFRVHLVKMVILTEPEGAPNITANLTSSLLSVCGWSQTINPEDDTDPGHADLVLYITRFDLELPDGNRQVRGVTQLGGACSPTWSCLITEDTGFDLGVTIAHEIGHSFGLEHDGAPGSGCGPSGHVMASDGAAPRAGLAWSPCSRRQLLSLLRPVPPSPLPLLATHLCAGRSLSLGPSQEPAPGGGRGPRTPVPTHKRPRFQTLPSSCPLLRPASSRCTPRD

SEQ ID NO: 334 - protein, 344 aa, Homo Sapiens; identical to SEQ ID NO: 333

SEQ ID NO: 335 - protein, 223 aa, Homo Sapiens
MRGPGQADCAVAIGRPLGEVVTLRVLESSLNCSAGDMLLLWGRLTWRKMCRKLLDMTFSSKTNTLVVRQRCGRPGGGVLLRYGSQLAPETFYRECDMQLFGPWGEIVSPSLSPATSNAGGCRLFINVAPHARIAIHALATNMGAGTEGANASYILIRDTHSLRTTAFHGQQVLYWESESSQAEMEFSEGFLKAQASLRGQYWTLQSWVPEMQDPQSWKGKEGT

SEQ ID NO: 336 - protein, 1226 aa, Homo Sapiens
MAPLRALLSYLLPLHCALCAAAGSRTPELHLSGKLSDYGVTVPCSTDFRGRFLSHVVSGPAAASAGSMVVDTPPTLPRHSSHLRVARSPLHPGGTLWPGRVGRHSLYFNVTVFGKELHLRLRPNRRLVVPGSSVEWQEDFRELFRQPLRQECVYTGGVTGMPGAAVAISNCDGLAGLIRTDSTDFFIEPLERGQQEKEASGRTHVVYRREAVQQEWAEPDGDLHNEAFGLGDLPNLLGLVGDQLGDTERKRRHAKPGSYSIEVLLVVDDSVVRFHGKEHVQNYVLTLMNIVDEIYHDESLGVHINIALVRLIMVGYRQSLSLIERGNPSRSLEQVCRWAHSQQRQDPSHAEHHDHVVFLTRQDFGPSGMQGYAPVTGMCHPLRSCALNHEDGFSSAFVIAHETGHVLGMEHDGQGNGCADETSLGSVMAPLVQAAFHRFHWSRCSKLELSRYLPSYDCLLDDPFDPAWPQPPELPGINYSMDEQCRFDFGSGYQTCLAFRTFEPCKQLWCSHPDNPYFCKTKKGPPLDGTECAPGKWCFKGHCIWKSPEQTYGQDGGWSSWTKFGSCSRSCGGGVRSRSRSCNNPSPAYGGRLCLGPMFEYQVCNSEECPGTYEDFRAQQCAKRNSYYVHQNAKHSWVPYEPDDDAQKCELICQSADTGDVVFMNQVVHDGTRCSYRDPYSVCARGECVPVGCDKEVGSMKADDKCGVCGGDNSHCRTVKGTLGKASKQAGALKLVQIPAGARHIQIEALEKSPHRIVVKNQVTGSFILNPKGKEATSRTFTAMGLEWEDAVEDAKESLKTSGPLPEAIAILALPPTEGGPRSSLAYKYVIHEDLLPLIGSNNVLLEEMDTYEWALKSWAPCSKACGGGIQFTKYGCRRRRDHHMVQRHLCDHKKRPKPIRRRCNQHPCSQPVWVTEEWGACSRSCGKLGVQTRGIQCLLPLSNGTHKVMPAKACAGDRPEARRPCLRVPCPAQWRLGAWSQCSATCGEGIQQRQVVCRTNANSLGHCEGDRPDTVQVCSLPACGGNHQNSTVRADVWELGTPEGQWVPQSEPLHPINKISSTEPCTGDRSVFCQMEVLDRYCSIPGYHRLCCVSCIKKASGPNPGPDPGPTSLPPFSTPGSPLPGPQDPADAAEPPGKPTGSEDHQHGRATQLPGALDTSSPGTQHPFAPETPIPGASWSISPTTPGGLPWGWTQTPTPVPEDKGQPGEDLRHPGTSLPAASPVT

SEQ ID NO: 337 - protein, 1223 aa, Homo Sapiens
MAPLRALLSYLLPLHCALCAAAGSRTPELHLSGKLSDYGVTVPCSTDFRGRFLSHVVSGPAAASAGSMVVDTPPTLPRHSSHLRVARSPLHPGGTLWPGRVGRHSLYFNVTVFGKELHLRLRPNRRLVVPGSSVEWQEDFRELFRQPLRQECVYTGGVTGMPGAAVAISNCDGLAGLIRTDSTDFFIEPLERGQQEKEASGRTHVVYRREAVQQEWAEPDGDLHNEAFGLGDLPNLLGLVGDQLGDTERKRRHAKPGSYSIEVLLVVDDSVVRFHGKEHVQNYVLTLMNIVDEIYHDESLGVHINIALVRLIMVGYRQSLSLIERGNPSRSLEQVCRWAHSQQRQDPSHAEHHDHVVFLTRQDFGPSGYAPVTGMCHPLRSCALNHEDGFSSAFVIAHETGHVLGMEHDGQGNGCADETSLGSVMAPLVQAAFHRFHWSRCSKLELSRYLPSYDCLLDDPFDPAWPQPPELPGINYSMDEQCRFDFGSGYQTCLAFRTFEPCKQLWCSHPDNPYFCKTKKGPPLDGTECAPGKWCFKGHCIWKSPEQTYGQDGGWSSWTKFGSCSRSCGGGVRSRSRSCNNPSPAYGGRLCLGPMFEYQVCNSEECPGTYEDFRAQQCAKRNSYYVHQNAKHSWVPYEPDDDAQKCELICQSADTGDVVFMNQVVHDGTRCSYRDPYSVCARGECVPVGCDKEVGSMKADDKCGVCGGDNSHCRTVKGTLGKASKQAGALKLVQIPAGARHIQIEALEKSPHRIVVKNQVTGSFILNPKGKEATSRTFTAMGLEWEDAVEDAKESLKTSGPLPEAIAILALPPTEGGPRSSLAYKYVIHEDLLPLIGSNNVLLEEMDTYEWALKSWAPCSKACGGGIQFTKYGCRRRRDHHMVQRHLCDHKKRPKPIRRRCNQHPCSQPVWVTEEWGACSRSCGKLGVQTRGIQCLLPLSNGTHKVMPAKACAGDRPEARRPCLRVPCPAQWRLGAWSQCSATCGEGIQQRQVVCRTNANSLGHCEGDRPDTVQVCSLPACGGNHQNSTVRADVWELGTPEGQWVPQSEPLHPINKISSTEPCTGDRSVFCQMEVLDRYCSIPGYHRLCCVSCIKKASGPNPGPDPGPTSLPPFSTPGSPLPGPQDPADAAEPPGKPTGSEDHQHGRATQLPGALDTSSPGTQHPFAPETPIPGASWSISPTTPGGLPWGWTQTPTPVPEDKGQPGEDLRHPGTSLPAASPVT

SEQ ID NO: 338 - protein, 950 aa, Homo Sapiens
MLLLGILTLAFAGRTAGGSEPEREVVVPIRLDPDINGRRYYWRGPEDSGDQGLIFQITAFQEDFYLHLTPDAQFLAPAFSTEHLGVPLQGLTGGSSDLRRCFYSGDVNAEPDSFAAVSLCGGLRGAFGYRGAEYVISPLPNASAPAAQRNSQGAHLLQRRGVPGGPSGDPTSRCGVASGWNPAILRALDPYKPRRAGFGESRSRRRSGRAKRFVSIPRYVETLVVADESMVKFHGADLEHYLLTLLATAARLYRHPSILNPINIVVVKVLLLRDRDSGPKVTGNAALTLRNFCAWQKKLNKVSDKHPEYWDTAILFTRQDLCGATTCDTLGMADVGTMCDPKRSCSVIEDDGLPSAFTTAHELGHVFNMPHDNVKVCEEVFGKLRANHMMSPTLIQIDRANPWSACSAAIITDFLDSGHGDCLLDQPSKPISLPEDLPGASYTLSQQCELAFGVGSKPCPYMQYCTKLWCTGKAKGQMVCQTRHFPWADGTSCGEGKLCLKGACVERHNLNKHRVDGSWAKWDPYGPCSRTCGGGVQLARRQCTNPTPANGGKYCEGVRVKYRSCNLEPCPSSASGKSFREEQCEAFNGYNHSTNRLTLAVAWVPKYSGVSPRDKCKLICRANGTGYFYVLAPKVVDGTLCSPDSTSVCVQGKCIKAGCDGNLGSKKRFDKCGVCGGDNKSCKKVTGLFTKPMHGYNFVVAIPAGASSIDIRQRGYKGLIGDDNYLALKNSQGKYLLNGHFVVSAVERDLVVKGSLLRYSGTGTAVESLQASRPILEPLTVEVLSVGKMTPPRVRYSFYLPKEPREDKSSHPKDPRGPSVLHNSVLSLSNQVEQPDDRPPARWVAGSWGPCSASCGSGLQKRAVDCRGSAGQRTVPACDAAHRPVETQACGEPCPTWELSAWSPCSKSCGRGFQRRSLKCVGHGGRLLARDQCNLHRKPQELDFCVLRPC

SEQ ID NO: 339 - protein, 1224 aa, Homo Sapiens
MKPRARGWRGLAALWMLLAQVAEQAPACAMGPAAAAPGSPSVPRPPPPAERPGWMEKGEYDLVSAYEVDHRGDYVSHEIMHHQRRRRAVPVSEVESLHLRLKGSRHDFHMDLRTSSSLVAPGFIVQTLGKTGTKSVQTLPPEDFCFYQGSLRSHRNSSVALSTCQGLSGMIRTEEADYFLRPLPSHLSWKLGRAAQGSSPSHVLYKRSTEPHAPGASEVLVTSRTWELAHQPLHSSDLRLGLPQKQHFCGRRKKYMPQPPKEDLFILPDEYKSCLRHKRSLLRSHRNEELNVETLVVVDKKMMQNHGHENITTYVLTILNMVSALFKDGTIGGNINIAIVGLILLEDEQPGLVISHHADHTLSSFCQWQSGLMGKDGTRHDHAILLTGLDICSWKNEPCDTLGFAPISGMCSKYRSCTINEDTGLGLAFTIAHESGHNFGMIHDGEGNMCKKSEGNIMSPTLAGRNGVFSWSPCSRQYLHKFLSTAQAICLADQPKPVKEYKYPEKLPGELYDANTQCKWQFGEKAKLCMLDFKKDICKALWCHRIGRKCETKFMPAAEGTICGHDMWCRGGQCVKYGDEGPKPTHGHWSDWSSWSPCSRTCGGGVSHRSRLCTNPKPSHGGKFCEGSTRTLKLCNSQKCPRDSVDFRAAQCAEHNSRRFRGRHYKWKPYTQVEDQDLCKLYCIAEGFDFFFSLSNKVKDGTPCSEDSRNVCIDGICERVGCDNVLGSDAVEDVCGVCNGNNSACTIHRGLYTKHHHTNQYYHMVTIPSGARSIRIYEMNVSTSYISVRNALRRYYLNGHWTVDWPGRYKFSGTTFDYRRSYNEPENLIATGPTNETLIVELLFQGRNPGVAWEYSMPRLGTEKQPPAQPSYTWAIVRSECSVSCGGGQMTVREGCYRDLKFQVNMSFCNPKTRPVTGLVPCKVSACPPSWSVGNWSACSRTCGGGAQSRPVQCTRRVHYDSEPVPASLCPQPAPSSRQACNSQSCPPAWSAGPWAECSHTCGKGWRKRAVACKSTNPSARAQLLPDAVCTSEPKPRMHEACLLQRCHKPKKLQWLVSAWSQCSVTCERGTQKRFLKCAEKYVSGKYRELASKKCSHLPKPSLELERACAPLPCPRHPPFAAAGPSRGSWFASPWSQCTASCGGGVQTRSVQCLAGGRPASGCLLHQKPSASLACNTHFCPIAEKKDAFCKDYFHWCYLVPQHGMCSHKFYGKQCCKTCSKSNL

SEQ ID NO: 340 - protein, 570 aa, Homo Sapiens
MKPRARGWRGLAALWMLLAQVAEQAPACAMGPAAAAPGSPSVPRPPPPAERPGWMEKGEYDLVSAYEVDHRGDYVSHEIMHHQRRRRAVPVSEVESLHLRLKGSRHDFHMDLRTSSSLVAPGFIVQTLGKTGTKSVQTLPPEDFCFYQGSLRSHRNSSVALSTCQGLSGMIRTEEADYFLRPLPSHLSWKLGRAAQGSSPSHVLYKRSTEPHAPGASEVLVTSRTWELAHQPLHSSDLRLGLPQKQHFCGRRKKYMPQPPKEDLFILPDEYKSCLRHKRSLLRSHRNEELNVETLVVVDKKMMQNHGHENITTYVLTILNMVSALFKDGTIGGNINIAIVGLILLEDEQPGLVISHHADHTLSSFCQWQSGLMGKDGTRHDHAILLTGLDICSWKNEPCDTLGFAPISGMCSKYRSCTINEDTGLGLAFTIAHESGHNFGMIHDGEGNMCKKSEGNIMSPTLAGRNGVFSWSPCSRQYLHKFLSTAQAICLADQPKPVKEYKYPEKLPGELYDANTQCKWQFGEKAKLCMLDFKKDICKALWCHRIGRKCETKFMPAAEGTICGHDMVRS

SEQ ID NO: 341 - protein, 1095 aa, Homo Sapiens
MCDGALLPPLVLPVLLLLVWGLDPGTAVGDAAADVEVVLPWRVRPDDVHLPPLPAAPGPRRRRRPRTPPAAPRARPGERALLLHLPAFGRDLYLQLRRDLRFLSRGFEVEEAGAARRRGRPAELCFYSGRVLGHPGSLVSLSACGAAGGLVGLIQLGQEQVLIQPLNNSQGPFSGREHLIRRKWSLTPSPSAEAQRPEQLCKVLTEKKKPTWGRPSRDWRERRNAIRLTSEHTVETLVVADADMVQYHGAEAAQRFILTVMNMVYNMFQHQSLGIKINIQVTKLVLLRQRPAKLSIGHHGERSLESFCHWQNEEYGGARYLGNNQVPGGKDDPPLVDAAVFVTRTDFCVHKDEPCDTVGIAYLGGVCSAKRKCVLAEDNGLNLAFTIAHELGHNLGMNHDDDHSSCAGRSHIMSGEWVKGRNPSDLSWSSCSRDDLENFLKSKVSTCLLVTDPRSQHTVRLPHKLPGMHYSANEQCQILFGMNATFCRNMEHLMCAGLWCLVEGDTSCKTKLDPPLDGTECGADKWCRAGECVSKTPIPEHVDGDWSPWGAWSMCSRTCGTGARFRQRKCDNPPPGPGGTHCPGASVEHAVCENLPCPKGLPSFRDQQCQAHDRLSPKKKGLLTAVVVDDKPCELYCSPLGKESPLLVADRVLDGTPCGPYETDLCVHGKCQKIGCDGIIGSAAKEDRCGVCSGDGKTCHLVKGDFSHARGTALKDSGKGSINSDWKIELPGEFQIAGTTVRYVRRGLWEKISAKGPTKLPLHLMVLLFHDQDYGIHYEYTVPVNRTAENQSEPEKPQDSLFIWTHSGWEGCSVQCGGGERRTIVSCTRIVNKTTTLVNDSDCPQASRPEPQVRRCNLHPCQSRWVAGPWSPCSATCEKGFQHREVTCVYQLQNGTHVATRPLYCPGPRPAAVQSCEGQDCLSIWEASEWSQCSASCGKGVWKRTVACTNSQGKCDASTRPRAEEACEDYSGCYEWKTGDWSTCSSTCGKGLQSRVVQCMHKVTGRHGSECPALSKPAPYRQCYQEVCNDRINANTITSPRLAALTYKCTRDQWTVYCRVIREKNLCQDMRWYQRCCQTCRDFYANKMRQPPPNS

SEQ ID NO: 342 - protein, 68 aa, Homo Sapiens
MCDGALLPPLVLPVLLLLVWGLDPGTGWPHSAWAGAGANPAPQQLPGPIQWTRTSDQAQMVLDPQPFC

SEQ ID NO: 343 - protein, 214 aa, Homo Sapiens
  misc_feature (1)..(1): Xaa can be any naturally occurring amino acid
XELYCSPLGKESPLLVADRVLDGTPCGPYETDLCVHGKCQKIGCDGIIGSAAKEDRCGVCSGDGKTCHLVKGDFSHARGTGYIEAAVIPAGARRIRVVEDKPAHSFLALKDSGKGSINSDWKIELPGEFQIAGTTVRYVRRGLWEKISAKGPTKLPLHLMVLLFHDQDYGIHYEYTVPVNRTAENQSEPEKPQDSLFIWTHSGWEGCSVQCGGG

SEQ ID NO: 344 - protein, 120 aa, Homo Sapiens
  misc_feature (1)..(1): Xaa can be any naturally occurring amino acid
XGRPAELCFYSGRVLGHPGSLVSLSACGAAGGLVGLIQLGQEQVLIQPLNNSQGPFSGREHLIRRKWSLTPSPSAEAQRPEQLCKVLTVPQCLGLTWEDLKSGGWSDLEVPHSCVWPGGG

SEQ ID NO: 345 - protein, 1221 aa, Homo Sapiens
MECALLLACAFPAAGSGPPRGLAGLGRVAKALQLCCLCCASVAAALASDSSSGASGLNDDYVFVTPVEVDSAGSYISHDILHNGRKKRSAQNARSSLHYRFSAFGQELHLELKPSAILSSHFIVQVLGKDGASETQKPEVQQCFYQGFIRNDSSSSVAVSTCAGLSGLIRTRKNEFLISPLPQLLAQEHNYSSPAGHHPHVLYKRTAEEKIQRYRGYPGSGRNYPGYSPSHIPHASQSRETEYHHRRLQKQHFCGRRKKYAPKPPTEDTYLRFDEYGSSGRPRRSAGKSQKGLNVETLVVADKKMVEKHGKGNVTTYILTVMNMVSGLFKDGTIGSDINVVVVSLILLEQEPGGLLINHHADQSLNSFCQWQSALIGKNGKRHDHAILLTGFDICSWKNEPCDTLGFAPISGMCSKYRSCTINEDTGLGLAFTIAHESGHNFGMIHDGEGNPCRKAEGNIMSPTLTGNNGVFSWSSCSRQYLKKFLSTPQAGCLVDEPKQAGQYKYPDKLPGQIYDADTQCKWQFGAKAKLCSLGFVKDICKSLWCHRVGHRCETKFMPAAEGTVCGLSMWCRQGQCVKFGELGPRPIHGQWSAWSKWSECSRTCGGGVKFQERHCNNPKPQYGGLFCPGSSRIYQLCNINPCNENSLDFRAQQCAEYNSKPFRGWFYQWKPYTKVEEEDRCKLYCKAENFEFFFAMSGKVKDGTPCSPNKNDVCIDGVCELVGCDHELGSKAVSDACGVCKGDNSTCKFYKGLYLNQHKANEYYPVVLIPAGARSIEIQELQVSSSYLAVRSLSQKYYLTGGWSIDWPGEFPFAGTTFEYQRSFNRPERLYAPGPTNETLVFEILMQGKNPGIAWKYALPKVMNGTPPATKRPAYTWSIVQSECSVSCGGGYINVKAICLRDQNTQVNSSFCSAKTKPVTEPKICNAFSCPAYWMPGEWSTCSKACAGGQQSRKIQCVQKKPFQKEEAVLHSLCPVSTPTQVQACNSHACPPQWSLGPWSQCSKTCGRGVRKRELLCKGSAAETLPESQCTSLPRPELQEGCVLGRCPKNSRLQWVASSWSECSATCGLGVRKREMKCSEKGFQGKLITFPERRCRNIKKPNLDLEETCNRRACPAHPVYNMVAGWYSLPWQQCTVTCGGGVQTRSVHCVQQGRPSSSCLLHQKPPVLRACNTNFCPAPEKREDPSCVDFFNWCHLVPQHGVCNHKFYGKQCCKSCTRKI

SEQ ID NO: 346 - protein, 274 aa, Homo Sapiens
MECALLLACAFPAAGSGPPRGLAGLGRVAKALQLCCLCCASVAAALASDSSSGASGLNDDYVFVTPVEVDSAGSYISHDILHNGRKKRSAQNARSSLHYRFSAFGQELHLELKPSAILSSHFIVQVLGKDGASETQKPEVQQCFYQGFIRNDSSSSVAVSTCAGLSGLIRTRKNEFLISPLPQLLAQEHNYSSPAGHHPHVLYKRTAEEKIQRYRGYPGSGRNYPGYSPSHIPHASQSRETEYHHRRLQKQHFCGRRKKCICSQASHRGHLSKV

SEQ ID NO: 347 - protein, 62 aa, Homo Sapiens
  misc_feature (1)..(1): Xaa can be any naturally occurring amino acid
XQGRPSSSCLLHQKPPVLRACNTNFCPAPEKRDSAGSQLPCCDGPQAVHEEGLRFPDNHWAM

SEQ ID NO: 348 - protein, 186 aa, Homo Sapiens
  misc_feature (1)..(1): Xaa can be any naturally occurring amino acid
XVDSAGSYISHDILHNGRKKRSAQNARSSLHYRFSAFGQELHLELKPSAILSSHFIVQVLGKDGASETQKPEVQQCFYQGFIRNDSSSSVAVSTCAGLLLAQEHNYSSPAGHHPHVLYKRTAEEKIQRYRGYPGSGRNYPGYSPSHIPHASQSRETEYHHRRLQKQHFCGRRKKCICSQASHRGHL

SEQ ID NO: 349 - protein, 37 aa, Homo Sapiens
MGKNREMRLTHICCCCLLYQLGFLSNGIVSDGIYTAQ

SEQ ID NO: 350 - protein, 1213 aa, Homo Sapiens
MGKNREMRLTHICCCCLLYQLGFLSNGIVSELQFAPDREEWEVVFPALWRREPVDPAGGSGGSADPGWVRGVGGGGSARAQAAGSSREVRSVAPVPLEEPVEGRSESRLRPPPPSEGEEDEELESQELPRGSSGAAALSPGAPASWQPPPPPQPPPSPPPAQHAEPDGDEVLLRIPAFSRDLYLLLRRDGRFLAPRFAVEQRPNPGPGPTGAASAPQPPAPPDAGCFYTGAVLRHPGSLASFSTCGGGLMGFIQLNEDFIFIEPLNDTMAITGHPHRVYRQKRSMEEKVTEKSALHSHYCGIISDKGRPRSRKIAESGRGKRYSYKLPQEYNIETVVVADPAMVSYHGADAARRFILTILNMVFNLFQHKSLSVQVNLRVIKLILLHETPPELYIGHHGEKMLESFCKWQHEEFGKKNDIHLEMSTNWGEDMTSVDAAILITRKDFCVHKDEPCDTVGIAYLSGMCSEKRKCIIAEDNGLNLAFTIAHEMGHNMGINHDNDHPSCADGLHIMSGEWIKGQNLGDVSWSRCSKEDLERFLRSKASNCLLQTNPQSVNSVMVPSKLPGMTYTADEQCQILFGPLASFCQEMQHVICTGLWCKVEGEKECRTKLDPPMDGTDCDLGKWCKAGECTSRTSAPEHLAGEWSLWSPCSRTCSAGISSRERKCPGLDSEARDCNGPRKQYRICENPPCPAGLPGFRDWQCQAYSVRTSSPKHILQWQAVLDEEKPCALFCSPVGKEQPILLSEKVMDGTSCGYQGLDICANGRCQKVGCDGLLGSLAREDHCGVCNGNGKSCKIIKGDFNHTRGAGYVEVLVIPAGARRIKVVEEKPAHSYLALRDAGKQSINSDWKIEHSGAFNLAGTTVHYVRRGLWEKISAKGPTTAPLHLLVLLFQDQNYGLHYEYTIPSDPLPENQSSKAPEPLFMWTHTSWEDCDATCGGGERKTTVSCTKIMSKNISIVDNEKCKYLTKPEPQIRKCNEQPCQTRWMMTEWTPCSRTCGKGMQSRQVACTQQLSNGTLIRARERDCIGPKPASAQRCEGQDCMTVWEAGVWSECSVKCGKGIRHRTVRCTNPRKKCVLSTRPREAEDCEDYSKCYVWRMGDWSKCSITCGKGMQSRVIQCMHKITGRHGNECFSSEKPAAYRPCHLQPCNEKINVNTITSPRLAALTFKCLGDQWPVYCRVIREKNLCQDMRWYQRCCETCRDFYAQKLQQKS

SEQ ID NO: 351 - protein, 1207 aa, Homo Sapiens
MRLTHICCCCLLYQLGFLSNGIVSELQFAPDREEWEVVFPALWRREPVDPAGGSGGSADPGWVRGVGGGGSARAQAAGSSREVRSVAPVPLEEPVEGRSESRLRPPPPSEGEEDEELESQELPRGSSGAAALSPGAPASWQPPPPPQPPPSPPPAQHAEPDGDEVLLRIPAFSRDLYLLLRRDGRFLAPRFAVEQRPNPGPGPTGAASAPQPPAPPDAGCFYTGAVLRHPGSLASFSTCGGGLMGFIQLNEDFIFIEPLNDTMAITGHPHRVYRQKRSMEEKVTEKSALHSHYCGIISDKGRPRSRKIAESGRGKRYSYKLPQEYNIETVVVADPAMVSYHGADAARRFILTILNMVFNLFQHKSLSVQVNLRVIKLILLHETPPELYIGHHGEKMLESFCKWQHEEFGKKNDIHLEMSTNWGEDMTSVDAAILITRKDFCVHKDEPCDTVGIAYLSGMCSEKRKCIIAEDNGLNLAFTIAHEMGHNMGINHDNDHPSCADGLHIMSGEWIKGQNLGDVSWSRCSKEDLERFLRSKASNCLLQTNPQSVNSVMVPSKLPGMTYTADEQCQILFGPLASFCQEMQHVICTGLWCKVEGEKECRTKLDPPMDGTDCDLGKWCKAGECTSRTSAPEHLAGEWSLWSPCSRTCSAGISSRERKCPGLDSEARDCNGPRKQYRICENPPCPAGLPGFRDWQCQAYSVRTSSPKHILQWQAVLDEEKPCALFCSPVGKEQPILLSEKVMDGTSCGYQGLDICANGRCQKVGCDGLLGSLAREDHCGVCNGNGKSCKIIKGDFNHTRGAGYVEVLVIPAGARRIKVVEEKPAHSYLALRDAGKQSINSDWKIEHSGAFNLAGTTVHYVRRGLWEKISAKGPTTAPLHLLVLLFQDQNYGLHYEYTIPSDPLPENQSSKAPEPLFMWTHTSWEDCDATCGGGERKTTVSCTKIMSKNISIVDNEKCKYLTKPEPQIRKCNEQPCQTRWMMTEWTPCSRTCGKGMQSRQVACTQQLSNGTLIRARERDCIGPKPASAQRCEGQDCMTVWEAGVWSECSVKCGKGIRHRTVRCTNPRKKCVLSTRPREAEDCEDYSKCYVWRMGDWSKCSITCGKGMQSRVIQCMHKITGRHGNECFSSEKPAAYRPCHLQPCNEKINVNTITSPRLAALTFKCLGDQWPVYCRVIREKNLCQDMRWYQRCCETCRDFYAQKLQQKS

SEQ ID NO: 352 - protein, 145 aa, Homo Sapiens
  misc_feature (1)..(1): Xaa can be any naturally occurring amino acid
XDAGCFYTGAVLRHPGSLASFSTCGGGLMGFIQLNEDFIFIEPLNDTMAITGHPHRVYRQKRSMEEKVTEKSALHSHYCGIISDKGRPRSRKIAESGRGKRYSYKLPQEYNIETVVVADPAMVSYHGADAARRFILTILNMVGKL

SEQ ID NO: 353 - protein, 1211 aa, Homo Sapiens
MDPPAGAARRLLCPALLLLLLLLPPPLLPPPPPPANARLAAAADPPGGPLGHGAERILAVPVRTDAQGRLVSHVVSAATSRAGVRARRAAPVRTPSFPGGNEEEPGSHLFYNVTVFGRDLHLRLRPNARLVAPGATMEWQGEKGTTRVEPLLGSCLYVGDVAGLAEASSVALSNCDGLAGLIRMEEEEFFIEPLEKGLAAQEAEQGRVHVVYRRPPTSPPLGGPQALDTGASLDSLDSLSRALGVLEEHANSSRRRARRHAADDDYNIEVLLGVDDSVVQFHGKEHVQKYLLTLMNIVNEIYHDESLGAHINVVLVRIILLSYGKSMSLIEIGNPSQSLENVCRWAYLQQKPDTGHDEYHDHAIFLTRQDFGPSGMQGYAPVTGMCHPVRSCTLNHEDGFSSAFVVAHETGHVLGMEHDGQGNRCGDEVRLGSIMAPLVQAAFHRFHWSRCSQQELSRYLHSYDCLLDDPFAHDWPALPQLPGLHYSMNEQCRFDFGLGYMMCTAFRTFDPCKQLWCSHPDNPYFCKTKKGPPLDGTMCAPGKHCFKGHCIWLTPDILKRDGSWGAWSPFGSCSRTCGTGVKFRTRQCDNPHPANGGRTCSGLAYDFQLCSRQDCPDSLADFREEQCRQWDLYFEHGDAQHHWLPHEHRDAKERCHLYCESRETGEVVSMKRMVHDGTRCSYKDAFSLCVRGDCRKVGCDGVIGSSKQEDKCGVCGGDNSHCKVVKGTFTRSPKKHGYIKMFEIPAGARHLLIQEVDATSHHLAVKNLETGKFILNEENDVDASSKTFIAMGVEWEYRDEDGRETLQTMGPLHGTITVLVIPVGDTRVSLTYKYMIHEDSLNVDDNNVLEEDSVVYEWALKKWSPCSKPCGGGSQFTKYGCRRRLDHKMVHRGFCAALSKPKAIRRACNPQECSQPVWVTGEWEPCSQTCGRTGMQVRSVRCIQPLHDNTTRSVHAKHCNDARPESRRACSRELCPGRWRAGPWSQCSVTCGNGTQERPVLCRTADDSFGICQEERPETARTCRLGPCPRNISDPSKKSYVVQWLSRPDPDSPIRKISSKGHCQGDKSIFCRMEVLSRYCSIPGYNKLCCKSCNLYNNLTNVEGRIEPPPGKHNDIDVFMPTLPVPTVAMEVRPSPSTPLEVPLNASSTNATEDHPETNAVDEPYKIHGLEDEVQPPNLIPRRPSPYEKTRNQRIQELIDEMRKKEMLGKF

SEQ ID NO: 354 - protein, 566 aa, Homo Sapiens
MDPPAGAARRLLCPALLLLLLLLPPPLLPPPPPPANARLAAAADPPGGPLGHGAERILAVPVRTDAQGRLVSHVVSAATSRAGVRARRAAPVRTPSFPGGNEEEPGSHLFYNVTVFGRDLHLRLRPNARLVAPGATMEWQGEKGTTRVEPLLGSCLYVGDVAGLAEASSVALSNCDGLAGLIRMEEEEFFIEPLEKGLAAQEAEQGRVHVVYRRPPTSPPLGGPQALDTGASLDSLDSLSRALGVLEEHANSSRRRARRHAADDDYNIEVLLGVDDSVVQFHGKEHVQKYLLTLMNIVNEIYHDESLGAHINVVLVRIILLSYGKSMSLIEIGNPSQSLENVCRWAYLQQKPDTGHDEYHDHAIFLTRQDFGPSGMQGYAPVTGMCHPVRSCTLNHEDGFSSAFVVAHETGHVLGMEHDGQGNRCGDEVRLGSIMAPLVQAAFHRFHWSRCSQQELSRYLHSYDCLLDDPFAHDWPALPQLPGLHYSMNEQCRFDFGLGYMMCTAFRTFDPCKQLWCSHPDNPYFCKTKKGPPLDGTMCAPGKFRPGAVAHACYPSTLGGQGRWIA

SEQ ID NO: 355 - protein, 106 aa, Homo Sapiens
VTCGNGTQERPVLCRTADDSFGICQEERPETARTCRLGPCPRNISDPSKKSYVVQWLSRPDPDSPIRKISSSNRPVYNSASALQCMPCALWSLPWAPLLSVYGKLP

SEQ ID NO: 356 - protein, 1910 aa, Homo Sapiens
MWVAKWLTGLLYHLSLFITRSWEVDFHPRQEALVRTLTSYEVVIPERVNEFGEVFPQSHHFSRQKRSSEALEPMPFRTHYRFTAYGQLFQLNLTADASFLAAGYTEVHLGTPERGAWESDAGPSDLRHCFYRGQVNSQEDYKAVVSLCGGLTGTFKGQNGEYFLEPIMKADGNEYEDGHNKPHLIYRQDLNNSFLQTLKYCSVSESQIKETSLPFHTYSNMNEDLNVMKERVLGHTSKNVPLKDERRHSRKKRLISYPRYIEIMVTADAKVVSAHGSNLQNYILTLMSIVATIYKDPSIGNLIHIVVVKLVMIHREEEGPVINFDGATTLKNFCSWQQTQNDLDDVHPSHHDTAVLITREDICSSKEKCNMLGLSYLGTICDPLQSCFINEEKGLISAFTIAHELGHTLGVQHDDNPRCKEMKVTKYHVMAPALSFHMSPWSWSNCSRKYVTEFLDTGYGECLLDKPDEEIYNLPSELPGSRYDGNKQCELAFGPGSQMCPHINICMHLWCTSTEKLHKGCFTQHVPPADGTDCGPGMHCRHGLCVNKETETRPVNGEWGPWEPYSSCSRTCGGGIESATRRCNRPEPRNGGNYCVGRRMKFRSCNTDSCPKGTQDFREKQCSDFNGKHLDISGIPSNVRWLPRYSGIGTKDRCKLYCQVAGTNYFYLLKDMVEDGTPCGTETHDICVQGQCMAAGCDHVLNSSAKIDKCGVCGGDNSSCKTITGVFNSSHYGYNVVVKIPAGATNVDIRQYSYSGQPDDSYLALSDAEGNFLFNGNFLLSTSKKEINVQGTRTVIEYSGSNNAVERINSTNRQEKELILQVLCVGNLYNPDVHYSFNIPLEERSDMFTWDPYGPWEGCTKMCQGLQRRNITCIHKSDHSVVSDKECDHLPLPSFVTQSCNTDCELRWHVIGKSECSSQCGQGYRTLDIHCMKYSIHEGQTVQVDDHYCGDQLKPPTQELCHGNCVFTRWHYSEWSQCSRSCGGGERSRESYCMNNFGHRLADNECQELSRVTRENCNEFSCPSWAASEWSECLVTCGKGTKQRQVWCQLNVDHLSDGFCNSSTKPESLSPCELHTCASWQVGPWGPCTTTCGHGYQMRDVKCVNELASAVLEDTECHEASRPSDRQSCVLTPCSFISKLETALLPTVLIKKMAQWRHGSWTPCSVSCGRGTQARYVSCRDALDRIADESYCAHLPRPAEIWDCFTPCGEWQAGDWSPCSASCGHGKTTRQVLCMNYHQPIDENYCDPEVRPLMEQECSLAACPPAHSHFPSSPVQPSYYLSTNLPLTQKLEDNENQVVHPSVRGNQWRTGPWGSCSSSCSGGLQHRAVVCQDENGQSASYCDAASKPPELQQCGPGPCPQWNYGNWGECSQTCGGGIKSRLVICQFPNGQILEDHNCEIVNKPPSVIQCHMHACPADVSWHQEPWTSCSASCGKGRKYREVFCIDQFQRKLEDTNCSQVQKPPTHKACRSVRCPSWKANSWNECSVTCGSGVQQRDVYCRLKGVGQVVEEMCDQSTRPCSQRRCWSQDCVQHKGMERGRLNCSTSCERKDSHQRMECTDNQIRQVNEIVYNSSTISLTSKNCRNPPCNYIVVTADSSQCANNCGFSYRQRITYCTEIPSTKKHKLHRLRPIVYQECPVVPSSQVYQCINSCLHLATWKVGKWSKCSVTCGIGIMKRQVKCITKHGLSSDLCLNHLKPGAQKKCYANDCKSFTTCKEIQVKNHIRKDGDYYLNIKGRIIKIYCADMYLENPKEYLTLVQGEENFSEVYGFRLKNPYQCPFNGSRREDCECDNGHLAAGYTVFSKIRIDLTSMQIKTTDLLFSKTIFGNAVPFATAGDCYSAFRCPQGQFSINLSGTGMKISSTAKWLTQGSYTSVSIRRSEDGTRFFGKCGGYCGKCLPHMTTGLPIQVI

SEQ ID NO: 357 - protein, 1504 aa, Homo Sapiens
MWVAKWLTGLLYHLSLFITRSWEVDFHPRQEALVRTLTSYEVVIPERVNEFGEVFPQSHHFSRQKRSSEALEPMPFRTHYRFTAYGQLFQLNLTADASFLAAGYTEVHLGTPERGAWESDAGPSDLRHCFYRGQVNSQEDYKAVVSLCGGLTGTFKGQNGEYFLEPIMKADGNEYEDGHNKPHLIYRQDLNNSFLQTLKYCSVSESQIKETSLPFHTYSNMNEDLNVMKERVLGHTSKNVPLKDERRHSRKKRLISYPRYIEIMVTADAKVVSAHGSNLQNYILTLMSIVATIYKDPSIGNLIHIVVVKLVMIHREEEGPVINFDGATTLKNFCSWQQTQNDLDDVHPSHHDTAVLITREDICSSKEKCNMLGLSYLGTICDPLQSCFINEEKGLISAFTIAHELGHTLGVQHDDNPRCKEMKVTKYHVMAPALSFHMSPWSWSNCSRKYVTEFLDTGYGECLLDKPDEEIYNLPSELPGSRYDGNKQCELAFGPGSQMCPHINICMHLWCTSTEKLHKGCFTQHVPPADGTDCGPGMHCRHGLCVNKETETRPVNGEWGPWEPYSSCSRTCGGGIESATRRCNRPEPRNGGNYCVGRRMKFRSCNTDSCPKGTQDFREKQCSDFNGKHLDISGIPSNVRWLPRYSGIGTKDRCKLYCQVAGTNYFYLLKDMVEDGTPCGTETHDICVQGQCMAAGCDHVLNSSAKIDKCGVCGGDNSSCKTITGVFNSSHYGYNVVVKIPAGATNVDIRQYSYSGQPDDSYLALSDAEGNFLFNGNFLLSTSKKEINVQGTRTVIEYSGSNNAVERINSTNRQEKELILQVLCVGNLYNPDVHYSFNIPLEERSDMFTWDPYGPWEGCTKMCQGLQRRNITCIHKSDHSVVSDKECDHLPLPSFVTQSCNTDCELRWHVIGKSECSSQCGQGYRTLDIHCMKYSIHEGQTVQVDDHYCGDQLKPPTQELCHGNCVFTRWHYSEWSQCSRSCGGGERSRESYCMNNFGHRLADNECQELSRVTRENCNEFSCPSWAASEWSECLVTCGKGTKQRQVWCQLNVDHLSDGFCNSSTKPESLSPCELHTCASWQVGPWGPCTTTCGHGYQMRDVKCVNELASAVLEDTECHEASRPSDRQSCVLTPCSFISKLETALLPTVLIKKMAQWRHGSWTPCSVSCGRGTQARYVSCRDALDRIADESYCAHLPRPAEIWDCFTPCGEWQAGDWSPCSASCGHGKTTRQVLCMNYHQPIDENYCDPEVRPLMEQECSLAACPPAHSHFPSSPVQPSYYLSTNLPLTQKLEDNENQVVHPSVRGNQWRTGPWGSCSSSCSGGLQHRAVVCQDENGQSASYCDAASKPPELQQCGPGPCPQWNYGNWGECSQTCGGGIKSRLVICQFPNGQILEDHNCEIVNKPPSVIQCHMHACPADVSWHQEPWTSEDLKVKLLPQRTIILWELMKNIFCHGKHSHMYLINVVTDHLLYPRHCDPETIETYFLSLWSLQFTWGDLKYYKNSL

SEQ ID NO: 358 - protein, 1504 aa, Homo Sapiens [sequence omitted]

SEQ ID NO: 359 - protein, 634 aa, Homo Sapiens
YSFNIPLEERSDMFTWDPYGPWEGCTKMCQGLQRRNITCIHKSDHSVVSDKECDHLPLPSFVTQSCNTDCELRWHVIGKSECSSQCGQGYRTLDIHCMKYSIHEGQTVQVDDHYCGDQLKPPTQELCHGNCVFTRWHYSEWSQCSRSCGGGERSRESYCMNNFGHRLADNECQELSRVTRENCNEFSCPSWAASEWSECLVTCGKGTKQRQVWCQLNVDHLSDGFCNSSTKPESLSPCELHTCASWQVGPWGPCTTTCGHGYQMRDVKCVNELASAVLEDTECHEASRPSDRQCSVSCGRGTQARYVSCRDALDRIADESYCAHLPRPAEIWDCFTPCGEWQAGDWSPCSASCGHGKTTRQVLCMNYHQPIDENYCDPEVRPLMEQECSLAACPPAHSHFPSSPVQPSYYLSTNLPLTQKLEDNENQVVHPSVRGNQWRTGPWGSCSSSCSGGLQHRAVVCQDENGQSASYCDAASKPPELQQCGPGPCPQWNYGNWGECSQTCGGGIKSRLVICQFPNGQILEDHNCEIVNKPPSVIQCHMHACPADVSWHQEPWTSEDLKVKLLPQRTIILWELMKNIFCHGKHSHMYLINVVTDHLLYPRHCDPETIETYFLSLWSLQFTWGDLKYYKNSL

SEQ ID NO: 360 - protein, 1205 aa, Homo Sapiens
MVLLSLWLIAAALVEVRTSADGQAGNEEMVQIDLPIKRYREYELVTPVSTNLEGRYLSHTLSASHKKRSARDVSSNPEQLFFNITAFGKDFHLRLKPNTQLVAPGAVVEWHETSLVPGNITDPINNHQPGSATYRIRRTEPLQTNCAYVGDIVDIPGTSVAISNCDGLAGMIKSDNEEYFIEPLERGKQMEEEKGRIHVVYKRSAVEQAPIDMSKDFHYRESDLEGLDDLGTVYGNIHQQLNETMRRRRHAGENDYNIEVLLGVDDSVVRFHGKEHVQNYLLTLMNIVNEIYHDESLGVHINVVLVRMIMLGYAKSISLIERGNPSRSLENVCRWASQQQRSDLNHSEHHDHAIFLTRQDFGPAGMQGYAPVTGMCHPVRSCTLNHEDGFSSAFVVAHETGHVLGMEHDGQGNRCGDETAMGSVMAPLVQAAFHRYHWSRCSGQELKRYIHSYDCLLDDPFDHDWPKLPELPGINYSMDEQCRFDFGVGYKMCTAFRTFDPCKQLWCSHPDNPYFCKTKKGPPLDGTECAAGKWCYKGHCMWKNANQQKQDGNWGSWTKFGSCSRTCGTGVRFRTRQCNNPMPINGGQDCPGVNFEYQLCNTEECQKHFEDFRAQQCQQRNSHFEYQNTKHHWLPYEHPDPKKRCHLYCQSKETGDVAYMKQLVHDGTHCSYKDPYSICVRGECVKVGCDKEIGSNKVEDKCGVCGGDNSHCRTVKGTFTRTPRKLGYLKMFDIPPGARHVLIQEDEASPHILAIKNQATGHYILNGKGEEAKSRTFIDLGVEWDYNIEDDIESLHTDGPLHDPVIVLIIPQENDTRSSLTYKYIIHEDSVPTINSNNVIQEELDTFEWALKSWSQCSKPCGGGFQYTKYGCRRKSDNKMVHRSFCEANKKPKPIRRMCNIQECTHPLWVAEEWEHCTKTCGSSGYQLRTVRCLQPLLDGTNRSVHSKYCMGDRPESRRPCNRVPCPAQWKTGPWSECSVTCGEGTEVRQVLCRAGDHCDGEKPESVRACQLPPCNDEPCLGDKSIFCQMEVLARYCSIPGYNKLCCESCSKRSSTLPPPYLLEAAETHDDVISNPSDLPRSLVMPTSLVPYHSETPAKKMSLSSISSVGGPNAYAAFRPNSKPDGANLRQRSAQQAGSKTVRLVTVPSSPPTKRVHLSSASQMAAASFFAASDSIGASSQARTSKKDGKIIDNRRPTRSSTLER

SEQ ID NO: 361 - protein, 1205 aa, Homo Sapiens; identical to SEQ ID NO: 360

SEQ ID NO: 362 - protein, 930 aa, Homo Sapiens
MLLGWASLLLCAFRLPLAAVGPAATPAQDKAGQPPTAAAAAQPRRRQGEEVQERAEPPGHPHPLAQRRRSKGLVQNIDQLYSGGGKVGYLVYAGGRRFLLDLERDGSVGIAGFVPAGGGTSAPWRHRSHCFYRGTVDGSPRSLAVFDLCGGLDGFFAVKHARYTLKPLLRGPWAEEEKGRVYGDGSARILHVYTREGFSFEALPPRASCETPASTPEAHEHAPAHSNPSGRAALASQLLDQSALSPAGGSGPQTWWRRRRRSISRARQVELLLVADASMARLYGRGLQHYLLTLASIANRLYSHASIENHIRLAVVKVVVLGDKDKSLEVSKNAATTLKNFCKWQHQHNQLGDDHEEHYDAAILFTREDLCGHHSCDTLGMADVGTICSPERSCAVIEDDGLHAAFTVAHEIGHLLGLSHDDSKFCEETFGSTEDKRLMSSILTSIDASKPWSKCTSATITEFLDDGHGNCLLDLPRKQILGPEELPGQTYDATQQCNLTFGPEYSVCPGMDVCARLWCAVVRQGQMVCLTKKLPAVEGTPCGKGRICLQGKCVDKTKKKYYSTSSHGNWGSWGSWGQCSRSCGGGVQFAYRHCNNPAPRNNGRYCTGKRAIYRSCSLMPCPPNGKSFRHEQCEAKNGYQSDAKGVKTFVEWVPKYAGVLPADVCKLTCRAKGTGYYVVFSPKVTDGTECRLYSNSVCVRGKCVRTGCDGIIGSKLQYDKCGVCGGDNSSCTKIVGTFNKKSKGYTDVVRIPEGATHIKVRQFKAKDQTRFTAYLALKKKNGEYLINGKYMISTSETIIDINGTVMNYSGWSHRDDFLHGMGYSATKEILIVQILATDPTKPLDVRYSFFVPKKSTPKVNSVTSHGSNKVGSHTSQPQWVTGPWLACSRTCDTGWHTRTVQCQDGNRKLAKGCPLSQRPSAFKQCLLKKC

SEQ ID NO: 363 - protein, 292 aa, Homo Sapiens
MEILWKTLTWILSLIMASSEFHSDHRLSYSSQEEFLTYLEHYQLTIPIRVDQNGAFLSFTVKNDKHSRRRRSMDPIDPQQAVSKLFFKLSAYGKHFHLNLTLNTDFVSKHFTVEYWGKDGPQWKHDFLDNCHYTGYLQDQRSTTKVALSNCVGLHGVIATEDEEYFIEPLKNTTEDSKHFSYENGHPHVIYKKSALQQRHLYDHSHCGVSDFTRSGKPWWLNDTSTVSYSLPINNTHIHHRQKRSVSIERFVETLVVADKMMVGYHGRKDIEHYILSVMNIVRLPNFTVIPA

SEQ ID NO: 364 - protein, 1117 aa, Homo Sapiens
MEILWKTLTWILSLIMASSEFHSDHRLSYSSQEEFLTYLEHYQLTIPIRVDQNGAFLSFTVKNDKHSRRRRSMDPIDPQQAVSKLFFKLSAYGKHFHLNLTLNTDFVSKHFTVEYWGKDGPQWKHDFLDNCHYTGYLQDQRSTTKVALSNCVGLHGVIATEDEEYFIEPLKNTTEDSKHFSYENGHPHVIYKKSALQQRHLYDHSHCGVSDFTRSGKPWWLNDTSTVSYSLPINNTHIHHRQKRSVSIERFVETLVVADKMMVGYHGRKDIEHYILSVMNIVAKLYRDSSLGNVVNIIVARLIVLTEDQPNLEINHHADKSLDSFCKWQKSILSHQSDGNTIPENGIAHHDNAVLITRYDICTYKNKPCGTLGLASVAGMCEPERSCSINEDIGLGSAFTIAHEIGHNFGMNHDGIGNSCGTKGHEAAKLMAAHITANTNPFSWSACSRDYITSFLDSGRGTCLDNEPPKRDFLYPAVAPGQVYDADEQCRFQYGATSRQCKYGEVCRELWCLSKSNRCVTNSIPAAEGTLCQTGNIEKGWCYQGDCVPFGTWPQSIDGGWGPWSLWGECSRTCGGGVSSSLRHCDSPAPSGGGKYCLGERKRYRSCNTDPCPLGSRDFREKQCADFDNMPFRGKYYNWKPYTGGGVKPCALNCLAEGYNFYTERAPAVIDGTQCNADSLDICINGECKHVGCDNILGSDAREDRCRVCGGDGSTCDAIEGFFNDSLPRGGYMEVVQIPRGSVHIEVREVAMSKNYIALKSEGDDYYINGAWTIDWPRKFDVAGTAFHYKRPTDEPESLEALGPTSENLIVMVLLQEQNLGIRYKFNVPITRTGSGDNEVGFTWNHQPWSECSATCAGGVQRQEVVCKRLDDNSIVQNNYCDPDSKPPENQRACNTEPCPPEWFIGDWLECSKTCDGGMRTRAVLCIRKIGPSEEETLDYSGCLTHRPVEKEPCNNQSCPPQWVALDWSECTPKCGPGFKHRIVLCKSSDLSKTFPAAQCPEESKPPVRIRCSLGRCPPPRWVTGDWGQCSAQCGLGQQMRTVQCLSYTGQASSDCLETVRPPSMQQCESKCDSTPISNTEECKDVNKVAYCPLVLKFKFCSRAYFRQMCCKTCQGH

SEQ ID NO: 365 - protein, 1686 aa, Homo Sapiens
MPGGPSPRSPAPLLRPLLLLLCALAPGAPGPAPGRATEGRAALDIVHPVRVDAGGSFLSYELWPRALRKRDVSVRRDAPAFYELQYRGRELRFNLTANQHLLAPGFVSETRRRGGLGRAHIRAHTPACHLLGEVQDPELEGGLAAISACDGLKGVFQLSNEDYFIEPLDSAPARPGHAQPHVVYKRQAPERLAQRGDSSAPSTCGVQVYPELESRRERWEQRQQWRRPRLRRLHQRSVSKEKWVETLVVADAKMVEYHGQPQVESYVLTIMNMVAGLFHDPSIGNPIHITIVRLVLLEDEEEDLKITHHADNTLKSFCKWQKSINMKGDAHPLHHDTAILLTRKDLCAAMNRPCETLGLSHVAGMCQPHRSCSINEDTGLPLAFTVAHELGHSFGIQHDGSGNDCEPVGKRPFIMSPQLLYDAAPLTWSRCSRQYITRFLDRGWGLCLDDPPAKDIIDFPSVPPGVLYDVSHQCRLQYGAYSAFCEDMDNVCHTLWCSVGTTCHSKLDAAVDGTRCGENKWCLSGECVPVGFRPEAVDGGWSGWSAWSICSRSCGMGVQSAERQCTQPTPKYKGRYCVGERKRFRLCNLQACPAGRPSFRHVQCSHFDAMLYKGQLHTWVPVVNDVNPCELHCRPANEYFAEKLRDAVVDGTPCYQVRASRDLCINGICKNVGCDFEIDSGAMEDRCGVCHGNGSTCHTVSGTFEEAEGLGYVDVGLIPAGAREIRIQEVAEAANFLALRSEDPEKYFLNGGWTIQWNGDYQVAGTTFTYARRGNWENLTSPGPTKEPVWIQLLFQESNPGVHYEYTIHREAGGHDEVPPPVFSWHYGPWTKCTVTCGRGVQRQNVYCLERQAGPVDEEHCDPLGRPDDQQRKCSEQPCPARWWAGEWQLCSSSCGPGGLSRRAVLCIRSVGLDEQSALEPPACEHLPRPPTETPCNRHVPCPATWAVGNWSQCSVTCGEGTQRRNVLCTNDTGVPCDEAQQPASEVTCSLPLCRWPLGTLGPEGSGSGSSSHELFNEADFIPHHLAPRPSPASSPKPGTMGNAIEEEAPELDLPGPVFVDDFYYDYNFINFHEDLSYGPSEEPDLDLAGTGDRTPPPHSHPAAPSTGSPVPATEPPAAKEEGVLGPWSPSPWPSQAGRSPPPPSEQTPGNPLINFLPEEDTPIGAPDLGLPSLSWPRVSTDGLQTPATPESQNDFPVGKDSQSQLPPPWRDRTNEVFKDDEEPKGRGAPHLPPRPSSTLPPLSPVGSTHSSPSPDVAELWTGGTVAWEPALEGGLGPVDSELWPTVGVASLLPPPIAPLPEMKVRDSSLEPGTPSFPTPGPGSWDLQTVAVWGTFLPTTLTGLGHMPEPALNPGPKGQPESLSPEVPLSSRLLSTPAWDSPANSHRVPETQPLAPSLAEAGPPADPLVVRNAGWQAGNWSECSTTCGLGAVWRPVRCSSGRDEDCAPAGRPQPARRCHLRPCATWHSGNWSKCSRSCGGGSSVRDVQCVDTRDLRPLRPFHCQPGPAKPPAHRPCGAQPCLSWYTSSWRECSEACGGGEQQRLVTCPEPGLCEEALRPNTTRPCNTHPCTQWVVGPWGQCSGPCGGGVQRRLVKCVNTQTGLPEEDSDQCGHEAWPESSRPCGTEDCEPVEPPRCERDRLSFGFCETLRLLGRCQLPTIRTQCCRSCSPPSHGAPSRGHQRVARR

SEQ ID NO: 366 - protein, 889 aa, Homo Sapiens
MLPAPAAPRWPPLLLLLLLLLPLARGAPARPAAGGQASELVVPTRLPGSAGELALHLSAFGKGFVLRLAPDDSFLAPEFKIERLGGSGRATGGERGLRGCFFSGTVNGEPESLAAVSLCRGLSGSFLLDGEEFTIQPQGAGGSLAQPHRLQRWGPAGARPLPRGPEWEVETGEGQRQERGDHQEDSEEESQEEEAEGASEPPPPLGATSRTKRFVSEARFVETLLVADASMAAFYGADLQNHILTLMSVAARIYKHPSIKNSINLMVVKVLIVEDEKWGPEVSDNGGLTLRNFCNWQRRFNQPSDRHPEHYDTAILLTRQNFCGQEGLCDTLGVADIGTICDPNKSCSVIEDEGLQAAHTLAHELGHVLSMPHDDSKPCTRLFGPMGKHHVMAPLFVHLNQTLPWSPCSAMYLTELLDGGHGDCLLDAPAAALPLPTGLPGRMALYQLDQQCRQIFGPDFRHCPNTSAQDVCAQLWCHTDGAEPLCHTKNGSLPWADGTPCGPGHLCSEGSCLPEEEVERPKPVADGGWAPWGPWGECSRTCGGGVQFSHRECKDPEPQNGGRYCLGRRAKYQSCHTEECPPDGKSFREQQCEKYNAYNYTDMDGNLLQWVPKYAGVSPRDRCKLFCRARGRSEFKVFEAKVIDGTLCGPETLAICVRGQCVKAGCDHVVDSPRKLDKCGVCGGKGNSCRKVSGSLTPTNYGYNDIVTIPAGATNIDVKQRSHPGVQNDGNYLALKTADGQYLLNGNLAISAIEQDILVKGTILKYSGSIATLERLQSFRPLPEPLTVQLLTVPGEVFPPKVKYTFFVPNDVDFSMQSSKERATTNIIQPLLHAQWVLGDWSECSSTCGAGWQRRTVECRDPSGQASATCNKALKPEDAKPCESQLCPL

SEQ ID NO: 367 - protein, 69 aa, Homo Sapiens
AKCPQGRFSINLYGTGLSLTESARWISQGNYAVSDIKKSPDGTRVVGKCGGYCGKCTPSSGTGLEVRVL

SEQ ID NO: 368 - protein, 1907 aa, Homo Sapiens
MQFVSWATLLTLLVRDLAEMGSPDAAAAVRKDRLHPRQVKLLETLSEYEIVSPIRVNALGEPFPTNVHFKRTRRSINSATDPWPAFASSSSSSTSSQAHYRLSAFGQQFLFNLTANAGFIAPLFTVTLLGTPGVNQTKFYSEEEAELKHCFYKGYVNTNSEHTAVISLCSGMLGTFRSHDGDYFIEPLQSMDEQEDEEEQNKPHIIYRRSAPQREPSTGRHACDTSEHKNRHSKDKKKTRARKWGERINLAGDVAALNSGLATEAFSAYGNKTDNTREKRTHRRTKRFLSYPRFVEVLVVADNRMVSYHGENLQHYILTLMSIDGPSISFNAQTTLKNFCQWQHSKNSPGGIHHDTAVLLTRQDICRAHDKCDTLGLAELGTICDPYRSCSISEDSGLSTAFTIAHELGHVFNMPHDDNNKCKEEGVKSPQHVMAPTLNFYTNPWMWSKCSRKYITEFLDTGYGECLLNEPESRPYPLPVQLPGILYNVNKQCELIFGPGSQVCPYMMQCRRLWCNNVNGVHKGCRTQHTPWADGTECEPGKHCKYGFCVPKEMDVPVTDGSWGSWSPFGTCSRTCGGGIKTAIRECNRPEPKNGGKYCVGRRMKFKSCNTEPCLKQKRDFRDEQCAHFDGKHFNINGLLPNVRWVPKYSGILMKDRCKLFCRVAGNTAYYQLRDRVIDGTPCGQDTNDICVQGLCRQAGCDHVLNSKARRDKCGVCGGDNSSCKTVAGTFNTVHYGYNTVVRIPAGATNIDVRQHSFSGETDDDNYLALSSSKGEFLLNGNFVVTMAKREIRIGNAVVEYSGSETAVERINSTDRIEQELLLQVLSVGKLYNPDVRYSFNIPIEDKPQQFYWNSHGPWQACSKPCQGERKRKLVCTRESDQLTVSDQRCDRLPQPGHITEPCGTDCDLRWHVASRSECSAQCGLGYRTLDIYCAKYSRLDGKTEKVDDGFCSSHPKPSNREKCSGECNTGGWRYSAWTECSKSCDGGTQRRRAICVNTRNDVLDDSKCTHQEKVTIQRCSEFPCPQWKSGDWSECLVTCGKGHKHRQVWCQFGEDRLNDRMCDPETKPTSMQTCQQPECASWQAGPWGQCSVTCGQGYQLRAVKCIIGTYMSVVDDNDCNAATRPTDTQDCELPSCHPPPAAPETRRSTYSAPRTQWRFGSWTPCSATCGKGTRMRYVSCRDENGSVADESACATLPRPVAKEECSVTPCGQWKALDWSSCSVTCGQGRATRQVMCVNYSDHVIDRSECDQDYIPETDQDCSMSPCPQRTPDSGLAQHPFQNEDYRPRSASPSRTHVLGGNQWRTGPWGACSSTCAGGSQRRVVVCQDENGYTANDCVERIKPDEQRACESGPCPQWAYGNWGECTKLCGGGIRTRLVVCQRSNGERFPDLSCEILDKPPDREQCNTHACPHDAAWSTGPWSSCSVSCGRGHKQRNVYCMAKDGSHLESDYCKHLAKPHGHRKCRGGRCPKWKAGAWSQCSVSCGRGVQQRHVGCQIGTHKIARETECNPYTRPESERDCQGPRCPLYTWRAEEWQECTKTCGEGSRYRKVVCVDDNKNEVHGARCDVSKRPVDRESCSLQPCEYVWITGEWSECSVTCGKGYKQRLVSCSEIYTGKENYEYSYQTTINCPGTQPPSVHPCYLRDCPVSATWRVGNWGSCSVSCGVGVMQRSVQCLTNEDQPSHLCHTDLKPEERKTCRNVYNCELPQNCKEVKRLKGASEDGEYFLMIRGKLLKIFCAGMHSDHPKEYVTLVHGDSENFSEVYGHRLHNPTECPYNGSRRDDCQCRKDYTAAGFSSFQKIRIDLTSMQIITTDLQFARTSEGHPVPFATAGDCYSAAKCPQGRFSINLYGTGLSLTESARWISQGNYAVSDIKKSPDGTRVVGKCGGYCGKCTPSSGTGLEVRVL

SEQ ID NO: 369 - protein, 1935 aa, Homo Sapiens
MQFVSWATLLTLLVRDLAEMGSPDAAAAVRKDRLHPRQVKLLETLSEYEIVSPIRVNALGEPFPTNVHFKRTRRSINSATDPWPAFASSSSSSTSSQAHYRLSAFGQQFLFNLTANAGFIAPLFTVTLLGTPGVNQTKFYSEEEAELKHCFYKGYVNTNSEHTAVISLCSGMLGTFRSHDGDYFIEPLQSMDEQEDEEEQNKPHIIYRRSAPQREPSTGRHACDTSEHKNRHSKDKKKTRARKWGERINLAGDVAALNSGLATEAFSAYGNKTDNTREKRTHRRTKRFLSYPRFVEVLVVADNRMVSYHGENLQHYILTLMSIVASIYKDPSIGNLINIVIVNLIVIHNEQDGPSISFNAQTTLKNFCQWQHSKNSPGGIHHDTAVLLTRQDICRAHDKCDTLGLAELGTICDPYRSCSISEDSGLSTAFTIAHELGHVFNMPHDDNNKCKEEGVKSPQHVMAPTLNFYTNPWMWSKCSRKYITEFLDTGYGECLLNEPESRPYPLPVQLPGILYNVNKQCELIFGPGSQVCPYMMQCRRLWCNNVNGVHKGCRTQHTPWADGTECEPGKHCKYGFCVPKEMDVPVTDGSWGSWSPFGTCSRTCGGGIKTAIRECNRPEPKNGGKYCVGRRMKFKSCNTEPCLKQKRDFRDEQCAHFDGKHFNINGLLPNVRWVPKYSGILMKDRCKLFCRVAGNTAYYQLRDRVIDGTPCGQDTNDICVQGLCRQAGCDHVLNSKARRDKCGVCGGDNSSCKTVAGTFNTVHYGYNTVVRIPAGATNIDVRQHSFSGETDDDNYLALSSSKGEFLLNGNFVVTMAKREIRIGNAVVEYSGSETAVERINSTDRIEQELLLQVLSVGKLYNPDVRYSFNIPIEDKPQQFYWNSHGPWQACSKPCQGERKRKLVCTRESDQLTVSDQRCDRLPQPGHITEPCGTDCDLRWHVASRSECSAQCGLGYRTLDIYCAKYSRLDGKTEKVDDGFCSSHPKPSNREKCSGECNTGGWRYSAWTECSKSCDGGTQRRRAICVNTRNDVLDDSKCTHQEKVTIQRCSEFPCPQWKSGDWSECLVTCGKGHKHRQVWCQFGEDRLNDRMCDPETKPTSMQTCQQPECASWQAGPWGQCSVTCGQGYQLRAVKCIIGTYMSVVDDNDCNAATRPTDTQDCELPSCHPPPAAPETRRSTYSAPRTQWRFGSWTPCSATCGKGTRMRYVSCRDENGSVADESACATLPRPVAKEECSVTPCGQWKALDWSSCSVTCGQGRATRQVMCVNYSDHVIDRSECDQDYIPETDQDCSMSPCPQRTPDSGLAQHPFQNEDYRPRSASPSRTHVLGGNQWRTGPWGACSSTCAGGSQRRVVVCQDENGYTANDCVERIKPDEQRACESGPCPQWAYGNWGECTKLCGGGIRTRLVVCQRSNGERFPDLSCEILDKPPDREQCNTHACPHDAAWSTGPWSSCSVSCGRGHKQRNVYCMAKDGSHLESDYCKHLAKPHGHRKCRGGRCPKWKAGAWSQCSVSCGRGVQQRHVGCQIGTHKIARETECNPYTRPESERDCQGPRCPLYTWRAEEWQECTKTCGEGSRYRKVVCVDDNKNEVHGARCDVSKRPVDRESCSLQPCEYVWITGEWSECSVTCGKGYKQRLVSCSEIYTGKENYEYSYQTTINCPGTQPPSVHPCYLRDCPVSATWRVGNWGSCSVSCGVGVMQRSVQCLTNEDQPSHLCHTDLKPEERKTCRNVYNCELPQNCKEVKRLKGASEDGEYFLMIRGKLLKIFCAGMHSDHPKEYVTLVHGDSENFSEVYGHRLHNPTECPYNGSRRDDCQCRKDYTAAGFSSFQKIRIDLTSMQIITTDLQFARTSEGHPVPFATAGDCYSAAKCPQGRFSINLYGTGLSLTESARWISQGNYAVSDIKKSPDGTRVVGKCGGYCGKCTPSSGTGLEVRVL

SEQ ID NO: 370 - protein, 488 aa, Homo Sapiens
MQFVSWATLLTLLVRDLAEMGSPDAAAAVRKDRLHPRQVKLLETLSEYEIVSPIRVNALGEPFPTNVHFKRTRRSINSATDPWPAFASSSSSSTSSQAHYRLSAFGQQFLFNLTANAGFIAPLFTVTLLGTPGVNQTKFYSEEEAELKHCFYKGYVNTNSEHTAVISLCSGMLGTFRSHDGDYFIEPLQSMDEQEDEEEQNKPHIIYRRSAPQREPSTGRHACDTSEHKNRHSKDKKKTRARKWGERINLAGDVAALNSGLATEAFSAYGNKTDNTREKRTHRRTKRFLSYPRFVEVLVVADNRMVSYHGENLQHYILTLMSIVASIYKDPSIGNLINIVIVNLIVIHNEQDGPSISFNAQTTLKNFCQWQHSKNSPGGIHHDTAVLLTRQDICRAHDKCDTLGLAELGTICDPYRSCSISEDSGLSTAFTIAHELGHVFNMPHDDNNKCKEEGVKSPQHVMAPTLNFYTNPWMWSKCSRKYITEFLE

SEQ ID NO: 371 - protein, 991 aa, Homo Sapiens
  misc_feature (1)..(1): Xaa can be any naturally occurring amino acid
XECSAQCGLGYRTLDIYCAKYSRLDGKTEKVDDGFCSSHPKPSNREKCSGECNTGGWRYSAWTECSKSCDGGTQRRRAICVNTRNDVLDDSKCTHQEKVTIQRCSEFPCPQWKSGDWSECLVTCGKGHKHRQVWCQFGEDRLNDRMCDPETKPTSMQTCQQPECASWQAGPWGQCSVTCGQGYQLRAVKCIIGTYMSVVDDNDCNAATRPTDTQDCELPSCHPPPAAPETRRSTYSAPRTQWRFGSWTPCSATCGKGTRMRYVSCRDENGSVADESACATLPRPVAKEECSVTPCGQWKALDWSSCSVTCGQGRATRQVMCVNYSDHVIDRSECDQDYIPETDQDCSMSPCPQRTPDSGLAQHPFQNEDYRPRSASPSRTHVLGGNQWRTGPWGACSSTCAGGSQRRVVVCQDENGYTANDCVERIKPDEQRACESGPCPQWAYGNWGECTKLCGGGIRTRLVVCQRSNGERFPDLSCEILDKPPDREQCNTHACPHDAAWSTGPWSSCSVSCGRGHKQRNVYCMAKDGSHLESDYCKHLAKPHGHRKCRGGRCPKWKAGAWSQCSVSCGRGVQQRHVGCQIGTHKIARETECNPYTRPESERDCQGPRCPLYTWRAEEWQECTKTCGEGSRYRKVVCVDDNKNEVHGARCDVSKRPVDRESCSLQPCEYVWITGEWSECSVTCGKGYKQRLVSCSEIYTGKENYEYSYQTTINCPGTQPPSVHPCYLRDCPVSATWRVGNWGSCSVSCGVGVMQRSVQCLTNEDQPSHLCHTDLKPEERKTCRNVYNCELPQNCKEVKRLKGASEDGEYFLMIRGKLLKIFCAGMHSDHPKEYVTLVHGDSENFSEVYGHRLHNPTECPYNGSRRDDCQCRKDYTAAGFSSFQKIRIDLTSMQIITTDLQFARTSEGHPVPFATAGDCYSAAKCPQGRFSINLYGTGLSLTESARWISQGNYAVSDIKKSPDGTRVVGKCGGYCGKCTPSSGTGLEVRVL

SEQ ID NO: 372 - protein, 127 aa, Homo Sapiens
MARLEAPQCPGFLARLLGGTWCLLCIAGQVCGDQSQGAVFLREFTLIRRESLHEDFLSDLLNSHKTEDSSSRTARSEEDRDGLWDAWGPWSECSRTCGGGASYSLRRCLSSKSCEGRNIRYRTCSNV

SEQ ID NO: 373 - protein, 219 aa, Homo Sapiens
MECCRRATPGTLLLFLAFLLLSSRTARSEEDRDGLWDAWGPWSECSRTCGGGASYSLRRCLSSKSCEGRNIRYRTCSNVDCPPEAGDFRAQQCSAHNDVKHHGQFYEWLPVSNDPDNPCSLKCQAKGTTLVVELAPKVLDGTRCYTESLDMCISGLCQIVGCDHQLGSTVKEDNCGVCNGDGSTCRLVRGQYKSQLSATKCKTHRDGRPLDLLTYPLLA

SEQ ID NO: 374 - protein, 683 aa, Homo Sapiens
MECCRRATPGTLLLFLAFLLLSSRTARSEEDRDGLWDAWGPWSECSRTCGGGASYSLRRCLSSKSCEGRNIRYRTCSNVDCPPEAGDFRAQQCSAHNDVKHHGQFYEWLPVSNDPDNPCSLKCQAKGTTLVVELAPKVLDGTRCYTESLDMCISGLCQIVGCDHQLGSTVKEDNCGVCNGDGSTCRLVRGQYKSQLSATKSDDTVVAIPYGSRHIRLVLKGPDHLYLETKTLQGTKGENSLSSTGTFLVDNSSVDFQKFPDKEILRMAGPLTADFIVKIRNSGSADSTVQFIFYQPIIHRWRETDFFPCSATCGGGYQLTSAECYDLRSNRVVADQYCHYYPENIKPKPKLQECNLDPCPASDGYKQIMPYDLYHPLPRWEATPWTACSSSCGGGIQSRAVSCVEEDIQGHVTSVEEWKCMYTPKMPIAQPCNIFDCPKWLAQEWSPCTVTCGQGLRYRVVLCIDHRGMHTGGCSPKTKPHIKEECIVPTPCYKPKEKLPVEAKLPWFKQAQELEEGAAVSEEPSFIPEAWSACTVTCGVGTQVRIVRCQVLLSFSQSVADLPIDECEGPKPASQRACYAGPCSGEIPEFNPDETDGLFGGLQDFDELYDWEYEGFTKCSESCGGGVQEAVVSCLNKQTREPAEENLCVTSRRPPQLLKSCNLDPCPARSSIDSAWNACNVLC

SEQ ID NO: 375 - protein, 525 aa, Homo Sapiens
MECCRRATPGTLLLFLAFLLLSSRTARSEEDRDGLWDAWGPWSECSRTCGGGASYSLRRCLSSKSCEGRNIRYRTCSNVDCPPEAGDFRAQQCSAHNDVKHHGQFYEWLPVSNDPDNPCSLKCQAKGTTLVVELAPKVLDGTRCYTESLDMCISGLCQIVGCDHQLGSTVKEDNCGVCNGDGSTCRLVRGQYKSQLSATKSDDTVVAIPYGSRHIRLVLKGPDHLYLETKTLQGTKGENSLSSTGTFLVDNSSVDFQKFPDKEILRMAGPLTADFIVKIRNSGSADSTVQFIFYQPIIHRWRETDFFPCSATCGGGYQLTSAECYDLRSNRVVADQYCHYYPENIKPKPKLQECNLDPCPASDGYKQIMPYDLYHPLPRWEATPWTACSSSCGGGIQSRAVSCVEEDIQGHVTSVEEWKCMYTPKMPIAQPCNIFDCPKWLAQEWSPCTVTCGQGLRYRVVLCIDHRGMHTGGCSPKTKPHIKEECIVPTPCYKPKEKLPVEAKLPWFKQAQELEEGAAVSEEPS

SEQ ID NO: 376 - protein, 1762 aa, Homo Sapiens
MECCRRATPGTLLLFLAFLLLSSRTARSEEDRDGLWDAWGPWSECSRTCGGGASYSLRRCLSSKSCEGRNIRYRTCSNVDCPPEAGDFRAQQCSAHNDVKHHGQFYEWLPVSNDPDNPCSLKCQAKGTTLVVELAPKVLDGTRCYTESLDMCISGLCQIVGCDHQLGSTVKEDNCGVCNGDGSTCRLVRGQYKSQLSATKSDDTVVAIPYGSRHIRLVLKGPDHLYLETKTLQGTKGENSLSSTGTFLVDNSSVDFQKFPDKEILRMAGPLTADFIVKIRNSGSADSTVQFIFYQPIIHRWRETDFFPCSATCGGGYQLTSAECYDLRSNRVVADQYCHYYPENIKPKPKLQECNLDPCPASDGYKQIMPYDLYHPLPRWEATPWTACSSSCGGGIQSRAVSCVEEDIQGHVTSVEEWKCMYTPKMPIAQPCNIFDCPKWLAQEWSPCTVTCGQGLRYRVVLCIDHRGMHTGGCSPKTKPHIKEECIVPTPCYKPKEKLPVEAKLPWFKQAQELEEGAAVSEEPSFIPEAWSACTVTCGVGTQVRIVRCQVLLSFSQSVADLPIDECEGPKPASQRACYAGPCSGEIPEFNPDETDGLFGGLQDFDELYDWEYEGFTKCSESCGGGVQEAVVSCLNKQTREPAEENLCVTSRRPPQLLKSCNLDPCPARWEIGKWSPCSLTCGVGLQTRDVFCSHLLSREMNETVILADELCRQPKPSTVQACNRFNCPPAWYPAQWQPCSRTCGGGVQKREVLCKQRMADGSFLELPETFCSASKPACQQACKKDDCPSEWLLSDWTECSTSCGEGTQTRSAICRKMLKTGLSTVVNSTLCPPLPFSSSIRPCMLATCARPGRPSTKHSPHIAAARKVYIQTRRQRKLHFVVGGFAYLLPKTAVVLRCPARRVRKPLITWEKDGQHLISSTHVTVAPFGYLKIHRLKPSDAGVYTCSAGPAREHFVIKLIGGNRKLVARPLSPRSEEEVLAGRKGGPKEALQTHKHQNGIFSNGSKAEKRGLAANPGSRYDDLVSRLLEQGGWPGELLASWEAQDSAERNTTSEEDPGAEQVLLHLPFTMVTEQRRLDDILGNLSQQPEELRDLYSKHLVAQLAQEIFRSHLEHQDTLLKPSERRTSPVTLSPHKHVSGFSSSLRTSSTGDAGGGSRRPHRKPTILRKISAAQQLSASEVVTHLGQTVALASGTLSVLLHCEAIGHPRPTISWARNGEEVQFSDRILLQPDDSLQILAPVEADVGFYTCNATNALGYDSVSIAVTLAGKPLVKTSRMTVINTEKPAVTVDIGSTIKTVQGVNVTINCQVAGVPEAEVTWFRNKSKLGSPHHLHEGSLLLTNVSSSDQGLYSCRAANLHGELTESTQLLILDPPQVPTQLEDIRALLAATGPNLPSVLTSPLGTQLVLDPGNSALLGCPIKGHPVPNITWFHGGQPIVTATGLTHHILAAGQILQVANLSGGSQGEFSCLAQNEAGVLMQKASLVIQDYWWSVDRLATCSASCGNRGVQQPRLRCLLNSTEVNPAHCAGKVRPAVQPIACNRRDCPSRWMVTSWSACTRSCGGGVQTRRVTCQKLKASGISTPVSNDMCTQVAKRPVDTQACNQQLCVEWAFSSWGQCNGPCIGPHLAVQHRQVFCQTRDGITLPSEQCSALPRPVSTQNCWSEACSVHWRVSLWTLCTATCGNYGFQSRRVECVHARTNKAVPEHLCSWGPRPANWQRCNITPCENMECRDTTRYCEKVKQLKLCQLSQFKSRCCGTCGKA

SEQ ID NO: 377 - protein, 439 aa, Homo Sapiens
MECCRRATPGTLLLFLAFLLLSSRTARSEEDRDGLWDAWGPWSECSRTCGGGASYSLRRCLSSKSCEGRNIRYRTCSNVDCPPEAGDFRAQQCSAHNDVKHHGQFYEWLPVSNDPDNPCSLKCQAKGTTLVVELAPKVLDGTRCYTESLDMCISGLCQIVGCDHQLGSTVKEDNCGVCNGDGSTCRLVRGQYKSQLSATKSDDTVVAIPYGSRHIRLVLKGPDHLYLETKTLQGTKGENSLSSTGTFLVDNSSVDFQKFPDKEILRMAGPLTADFIVKIRNSGSADSTVQFIFYQPIIHRWRETDFFPCSATCGGGYQLTSAECYDLRSNRVVADQYCHYYPENIKPKPKLQECNLDPCPARWEATPWTACSSSCGGGIQSRAVSCVEEDIQGHVTSVEEWKCMYTPKMPIAQPCNIFDCPKWLAQEWSPVTVPSFFVH

SEQ ID NO: 378 - protein, 185 aa, Homo Sapiens
MECCRRATPGTLLLFLAFLLLSSRTARSEEDRDGLWDAWGPWSECSRTCGGGASYSLRRCLSSKSCEGRNIRYRTCSNVDCPPEAGDFRAQQCSAHNDVKHHGQFYEWLPVSNDPDNPCSLKCQAKGTTLVVELAPKVLDGTRCYTESLDMCISGLCQVSADLFSFNLSRGFQCLCVNGLHSLTL

SEQ ID NO: 379 - protein, 258 aa, Homo Sapiens
MSGVFCFFFFFLGVPEAEVTWFRNKSKLGSPHHLHEGSLLLTNVSSSDQGLYSCRAANLHGELTESTQLLILDPPQVPTQLEDIRALLAATGPNLPSVLTSPLGTQLVLDPGNSALLGCPIKGHPVPNITWFHGGQPIVTATGLTHHILAAGQILQVANLSGGSQGEFSCLAQNEAGVLMQKASLVIQDYWWSVDRLATCSASCGNRGVQQPRLRCLLNSTEVNPAHCAGKVRPAVQPIACNRRDCPSRAMGLASGLT

SEQ ID NO: 380 - protein, 463 aa, Homo Sapiens
MSGVFCFFFFFLGVPEAEVTWFRNKSKLGSPHHLHEGSLLLTNVSSSDQGLYSCRAANLHGELTESTQLLILDPPQVPTQLEDIRALLAATGPNLPSVLTSPLGTQLVLDPGNSALLGCPIKGHPVPNITWFHGGQPIVTATGLTHHILAAGQILQVANLSGGSQGEFSCLAQNEAGVLMQKASLVIQDYWWSVDRLATCSASCGNRGVQQPRLRCLLNSTEVNPAHCAGKVRPAVQPIACNRRDCPSRWMVTSWSACTRSCGGGVQTRRVTCQKLKASGISTPVSNDMCTQVAKRPVDTQACNQQLCVEWAFSSWGQCNGPCIGPHLAVQHRQVFCQTRDGITLPSEQCSALPRPVSTQNCWSEACSVHWRVSLWTLCTATCGNYGFQSRRVECVHARTNKAVPEHLCSWGPRPANWQRCNITPCENMECRDTTRYCEKVKQLKLCQLSQFKSRCCGTCGKA

SEQ ID NO: 381 - protein, 275 aa, Homo Sapiens
MSGVFCFFFFFLGVPEAEVTWFRNKSKLGSPHHLHEGSLLLTNVSSSDQGLYSCRAANLHGELTESTQLLILDPPQVPTQLEDIRALLAATGPNLPSVLTSPLGTQLVLDPGNSALLGCPIKGHPVPNITWFHGGQPIVTATGLTHHILAAGQILQVANLSGGSQGEFSCLAQNEAGVLMQKASLVIQVQWALHRASPSCATQTSLLPDTGWHHLTIRAVQCSSEACEHPELLVRGLQCTLESQPVDPVHSYLWQLRLPVPACGVCACPHQQGSA

SEQ ID NO: 382 - protein, 150 aa, Homo Sapiens
TSPLGTQLVLDPGNSALLGCPIKGHPVPNITWFHGGQPIVTATGLTHHILAAGQILQVANLSGGSQGEFSCLAQNEAGVLMQKASLVIQDYWWSVDRLATCSASCGNRGVQQPRLRCLLNSTEVNPAHCAGKVRPAVQPIACNRRDCPSR

SEQ ID NO: 383 - protein, 951 aa, Homo Sapiens
MDGRWQCSCWAWFLLVLAVVAGDTVSTGSTDNSPTSNSLEGGTDATAFWWGEWTKWTACSRSCGGGVTSQERHCLQQRRKSVPGPGNRTCTGTSKRYQLCRVQECPPDGRSFREEQCVSFNSHVYNGRTHQWKPLYPDDYVHISSKPCDLHCTTVDGQRQLMVPARDGTSCKLTDLRGVCVSGKCEPIGCDGVLFSTHTLDKCGICQGDGSSCTHVTGNYRKGNAHLGYSLVTHIPAGARDIQIVERKKSADVLALADEAGYYFFNGNYKVDSPKNFNIAGTVVKYRRPMDVYETGIEYIVAQGPTNQGLNVMVWNQNGKSPSITFEYTLLQPPHESRPQPIYYGFSESAESQGLDGAGLMGFVPHNGSLYGQASSERLGLDNRLFGHPGLDMELGPSQGQETNEVCEQAGGGACEGPPRGKGFRDRNVTGTPLTGDKDDEEVDTHFASQEFFSANAISDQLLGAGSDLKDFTLNETVNSIFAQGAPRSSLAESFFVDYEENEGAGPYLLNGSYLELSSDRVANSSSEAPFPNVSTSLLTSAGNRTHKARTRPKARKQGVSPADMYRWKLSSHEPCSATCTTGVMSAYAMCVRYDGVEVDDSYCDALTRPEPVHEFCAGRECQPRWETSSWSECSRTCGEGYQFRVVRCWKMLSPGFDSSVYSDLCEAAEAVRPEERKTCRNPACGPQWEMSEWSECTAKCGERSVVTRDIRCSEDEKLCDPNTRPVGEKNCTGPPCDRQWTVSDWGPCSGSCGQGRTIRHVYCKTSDGRVVPESQCQMETKPLAIHPCGDKNCPAHWLAQDWERCNTTCGRGVKKRLVLCMELANGKPQTRSGPECGLAKKPPEESTCFERPCFKWYTSPWSECTKTCGVGVRMRDVKCYQGTDIVRGCDPLVKPVGRQACDLQPCPTEPPDDSCQDQPGTNCALAIKVNLCGHWYYSKACCRSCRPPHS

SEQ ID NO: 384 - protein, 951 aa, Homo Sapiens; identical to SEQ ID NO: 383

SEQ ID NO: 385 - protein, 1060 aa, Homo Sapiens
MLFEVGEGGGAGEEGKGRGRPGRSLCTHAAPARTAHLAPSALRSARPFLWEDNLLTRSQGLPDNHDQLVPDNLEAWALAGPRGLFPKRTLVIWKRIGAGLVVTVALLPRMDGRWQCSCWAWFLLVLAVVAGDTVSTGSTDNSPTSNSLEGGTDATAFWWGEWTKWTACSRSCGGGVTSQERHCLQQRRKSVPGPGNRTCTGTSKRYQLCRVQECPPDGRSFREEQCVSFNSHVYNGRTHQWKPLYPDDYVHISSKPCDLHCTTVDGQRQLMVPARDGTSCKLTDLRGVCVSGKCEPIGCDGVLFSTHTLDKCGICQGDGSSCTHVTGNYRKGNAHLGYSLVTHIPAGARDIQIVERKKSADVLALADEAGYYFFNGNYKVDSPKNFNIAGTVVKYRRPMDVYETGIEYIVAQGPTNQGLNVMVWNQNGKSPSITFEYTLLQPPHESRPQPIYYGFSESAESQGLDGAGLMGFVPHNGSLYGQASSERLGLDNRLFGHPGLDMELGPSQGQETNEVCEQAGGGACEGPPRGKGFRDRNVTGTPLTGDKDDEEVDTHFASQEFFSANAISDQLLGAGSDLKDFTLNETVNSIFAQGAPRSSLAESFFVDYEENEGAGPYLLNGSYLELSSDRVANSSSEAPFPNVSTSLLTSAGNRTHKARTRPKARKQGVSPADMYRWKLSSHEPCSATCTTGVMSAYAMCVRYDGVEVDDSYCDALTRPEPVHEFCAGRECQPRWETSSWSECSRTCGEGYQFRVVRCWKMLSPGFDSSVYSDLCEAAEAVRPEERKTCRNPACGPQWEMSEWSECTAKCGERSVVTRDIRCSEDEKLCDPNTRPVGEKNCTGPPCDRQWTVSDWGPCSGSCGQGRTIRHVYCKTSDGRVVPESQCQMETKPLAIHPCGDKNCPAHWLAQDWERCNTTCGRGVKKRLVLCMELANGKPQTRSGPECGLAKKPPEESTCFERPCFKWYTSPWSECTKTCGVGVRMRDVKCYQGTDIVRGCDPLVKPVGRQACDLQPCPTEPPDDSCQDQPGTNCALAIKVNLCGHWYYSKACCRSCRPPHS

SEQ ID NO: 386 - protein, 1691 aa, Homo Sapiens
MASWTSPWWVLIGMVFMHSPLPQTTAEKSPGAYFLPEFALSPQGSFLEDTTGEQFLTYRYDDQTSRNTRSDEDKDGNWDAWGDWSDCSRTCGGGASYSLRRCLTGRNCEGQNIRYKTCSNHDCPPDAEDFRAQQCSAYNDVQYQGHYYEWLPRYNDPAAPCALKCHAQGQNLVVELAPKVLDGTRCNTDSLDMCISGICQAVGCDRQLGSNAKEDNCGVCAGDGSTCRLVRGQSKSHVSPEKREENVIAVPLGSRSVRITVKGPAHLFIESKTLQGSKGEHSFNSPGVFLVENTTVEFQRGSERQTFKIPGPLMADFIFKTRYTAAKDSVVQFFFYQPISHQWRQTDFFPCTVTCGGGYQLNSAECVDIRLKRVVPDHYCHYYPENVKPKPKLKECSMDPCPSSDGFKEIMPYDHFQPLPRWEHNPWTACSVSCGGGIQRRSFVCVEESMHGEILQVEEWKCMYAPKPKVMQTCNLFDCPKWIAMEWSQCTVTCGRGLRYRVVLCINHRGEHVGGCNPQLKLHIKEECVIPIPCYKPKEKSPVEAKLPWLKQAQELEETRIATEEPTFIPEPWSACSTTCGPGVQVREVKCRVLLTFTQTETELPEEECEGPKLPTERPCLLEACDESPASRELDIPLPEDSETTYDWEYAGFTPCTATCVGGHQEAIAVCLHIQTQQTVNDSLCDMVHRPPAMSQACNTEPCPPRWHVGSWGPCSATCGVGIQTRDVYCLHPGETPAPPEECRDEKPHALQACNQFDCPPGWHIEEWQQCSRTCGGGTQNRRVTCRQLLTDGSFLNLSDELCQGPKASSHKSCARTDCPPHLAVGDWSKCSVSCGVGIQRRKQVCQRLAAKGRRIPLSEMMCRDLPGLPLVRSCQMPECSKIKSEMKTKLGEQGPQILSVQRVYIQTREEKRINLTIGSRAYLLPNTSVIIKCPVRRFQKSLIQWEKDGRCLQNSKRLGITKSGSLKIHGLAAPDIGVYRCIAGSAQETVVLKLIGTDNRLIARPALREPMREYPGMDHSEANSLGVTWHKMRQMWNNKNDLYLDDDHISNQPFLRALLGHCSNSAGSTNSWELKNKQFEAAVKQGAYSMDTAQFDELIRNMSQLMETGEVSDDLASQLIYQLVAELAKAQPTHMQWRGIQEETPPAAQLRGETGSVSQSSHAKNSGKLTFKPKGPVLMRQSQPPSISFNKTINSRIGNTVYITKRTEVINILCDLITPSEATYTWTKDGTLLQPSVKIILDGTGKIQIQNPTRKEQGIYECSVANHLGSDVESSSVLYAEAPVILSVERNITKPEHNHLSVVVGGIVEAALGANVTIRCPVKGVPQPNITWLKRGGSLSGNVSLLFNGSLLLQNVSLENEGTYVCIATNALGKAVATSVLHLLERRWPESRIVFLQGHKKYILQATNTRTNSNDPTGEPPPQEPFWEPGNWSHCSATCGHLGARIQRPQCVMANGQEVSEALCDHLQKPLAGFEPCNIRDCPARWFTSVWSQCSVSCGEGYHSRQVTCKRTKANGTVQVVSPRACAPKDRPLGRKPCFGHPCVQWEPGNRCPGRCMGRAVRMQQRHTACQHNSSDSNCDDRKRPTLRRNCTSGACDVCWHTGPWKPCTAACGRGFQSRKVDCIHTRSCKPVAKRHCVQKKKPISWRHCLGPSCDRDCTDTTHYCMFVKHLNLCSLDRYKQRCCQSCQEG

SEQ ID NO: 387 - protein, 1682 aa, Homo Sapiens
MASWTSPWWVLIGMVFMHSPLPQTTAEKSPGAYFLPEFALSPQGSFLEDTTGEQFLTYRYDDQTSRNTRSDEDKDGNWDAWGDWSDCSRTCGGGASYSLRRCLTGRNCEGQNIRYKTCSNHDCPPDAEDFRAQQCSAYNDVQYQGHYYEWLPRYNDPAAPCALKCHAQGQNLVVELAPKVLDGTRCNTDSLDMCISGICQAVGCDRQLGSNAKEDNCGVCAGDGSTCRLVRGQSKSHVSPEKREENVIAVPLGSRSVRITVKGPAHLFIESKTLQGSKGEHSFNSPGVFLVENTTVEFQRGSERQTFKIPGPLMADFIFKTRYTAAKDSVVQFFFYQPISHQWRQTDFFPCTVTCGGGYQLNSAECVDIRLKRVVPDHYCHYYPENVKPKPKLKECSMDPCPSSDGFKEIMPYDHFQPLPRWEHNPWTACSVSCGGGIQRRSFVCVEESMHGEILQVEEWKCMYAPKPKVMQTCNLFDCPKWIAMEWSQCTVTCGRGLRYRVVLCINHRGEHVGGCNPQLKLHIKEECVIPIPCYKPKEKSPVEAKLPWLKQAQELEETRIATEEPTFIPEPWSACSTTCGPGVQVREVKCRVLLTFTQTETELPEEECEGPKLPTERPCLLEACDESPASRELDIPLPEDSETTYDWEYAGFTPCTATCVGGHQEAIAVCLHIQTQQTVNDSLCDMVHRPPAMSQACNTEPCPPRWHVGSWGPCSATCGVGIQTRDVYCLHPGETPAPPEECRDEKPHALQACNQFDCPPGWHIEEWQQCSRTCGGGTQNRRVTCRQLLTDGSFLNLSDELCQGPKASSHKSCARTDCPPHLAVGDWSKCSVSCGVGIQRRKQVCQRLAAKGRRIPLSEMMCRDLPGLPLVRSCQMPECSKIKSEMKTKLGEQGPQILSVQRVYIQTREEKRINLTIGSRAYLLPNTSVIIKCPVRRFQKSLIQWEKDGRCLQNSKRLGITKSGSLKIHGLAAPDIGVYRCIAGSAQETVVLKLIGTDNRLIARPALREPMREYPGMDHSEANSLGVTWHKMRQMWNNKNDLYLDDDHISNQPFLRALLGHCSNSAGSTNSWELKNKQFEAAVKQGAYSMDTAQFDELIRNMSQLMETGEVSDDLASQLIYQLVAELAKAQPTHMQWRGIQEETPPAAQLRGETGSVSQSSHAKNSGKLTFKPKGPVLMRQSQPPSISFNKTINSRIGNTVYITKRTEVINILCDLITPSEATYTWTKDGTLLQPSVKIILDGTGKIQIQNPTRKEQGIYECSVANHLGSDVESSSVLYAEAPVILSVERNITKPEHNHLSVVVGGIVEAALGANVTIRCPVKGVPQPNITWLKRGGSLSGNVSLLFNGSLLLQNVSLENEGTYVCIATNALGKAVATSVLHLLERRWPESRIVFLQGHKKYILQATNTRTNSNDPTGEPPPQEPFWEPGNWSHCSATCGHLGARIQRPQCVMANGQEVSEALCDHLQKPLAGFEPCNIRDCPARWFTSVWSQCSVSCGEGYHSRQVTCKRTKANGTVQVVSPRACAPKDRPLGRKPCFGHPCVQWEPGNRCPGRCMGRAVRMQQRHTACQHNSSDSNCDDRKRPTLRRNCTSGACDVCWHTGPWKPCTAACGRGFQSRKVDCIHTRSCKPVAKRHCVQKKKPISWRHCLGPSCDSTYTSQTATNKGAASHVKRDKPLEGS

SEQ ID NO: 388 - protein, 1074 aa, Homo Sapiens
MENWTGRPWLYLLLLLSLPQLCLDQEVLSGHSLQTPTEEGQGPEGVWGPWVQWASCSQPCGVGVQRRSRTCQLPTVQLHPSLPLPPRPPRHPEALLPRGQGPRPQTSPETLPLYRTQSRGRGGPLRGPASHLGREETQEIRAARRSRLRDPIKPGMFGYGRVPFALPLHRNRRHPRSPPRSELSLISSRGEEAIPSPTPRAEPFSANGSPQTELPPTELSVHTPSPQAEPLSPETAQTEVAPRTRPAPLRHHPRAQASGTEPPSPTHSLGEGGFFRASPQPRRPSSQGWASPQVAGRRPDPFPSVPRGRGQQGQGPWGTGGTPHGPRLEPDPQHPGAWLPLLSNGPHASSLWSLFAPSSPIPRCSGESEQLRACSQAPCPPEQPDPRALQCAAFNSQEFMGQLYQWEPFTEVQGSQRCELNCRPRGFRFYVRHTEKVQDGTLCQPGAPDICVAGRCLSPGCDGILGSGRRPDGCGVCGGDDSTCRLVSGNLTDRGGPLGYQKILWIPAGALRLQIAQLRPSSNYLALRGPGGRSIINGNWAVDPPGSYRAGGTVFRYNRPPREEGKGESLSAEGPTTQPVDVYMIFQEENPGVFYQYVISSPPPILENPTPEPPVPQLQPEILRVEPPLAPAPRPARTPGTLQRQVRIPQMPAPPHPRTPLGSPAAYWKRVGHSACSASCGKGVWRPIFLCISRESGEELDERSCAAGARPPASPEPCHGTPCPPYWEAGEWTSCSRSCGPGTQHRQLQCRQEFGGGGSSVPPERCGHLPRPNITQSCQLRLCGHWEVGSPWSQCSVRCGRGQRSRQVRCVGNNGDEVSEQECASGPPQPPSREACDMGPCTTAWFHSDWSSKCSAECGTGIQRRSVVCLGSGAALGPGQGEAGAGTGQSCPTGSRPPDMRACSLGPCERTWRWYTGPWGECSSECGSGTQRRDIICVSKLGTEFNVTSPSNCSHLPRPPALQPCQGQACQDRWFSTPWSPCSRSCQGGTQTREVQCLSTNQTLSTRCPPQLRPSRKRPCNSQPCSQRPDDQCKDSSPHCPLVVQARLCVYPYYTATCCRSCAHVLERSPQDPS

SEQ ID NO: 389 - protein, 1097 aa, Homo Sapiens
MENWTGRPWLYLLLLLSLPQLCLDQEVLSGHSLQTPTEEGQGPEGVWGPWVQWASCSQPCGVGVQRRSRTCQLPTVQLHPSLPLPPRPPRHPEALLPRGQGPRPQTSPETLPLYRTQSRGRGGPLRGPASHLGREETQEIRAARRSRLRDPIKPGMFGYGRVPFALPLHRNRRHPRSPPRSELSLISSRGEEAIPSPTPRAEPFSANGSPQTELPPTELSVHTPSPQAEPLSPETAQTEVAPRTRPAPLRHHPRAQASGTEPPSPTHSLGEGGFFRASPQPRRPSSQGWASPQVAGRRPDPFPSVPRGRGQQGQGPWGTGGTPHGPRLEPDPQHPGAWLPLLSNGPHASSLWSLFAPSSPIPRCSGESEQLRACSQAPCPPEQPDPRALQCAAFNSQEFMGQLYQWEPFTEAPLLPLRHAFFLLPGAGSGDSTGVQGSQRCELNCRPRGFRFYVRHTEKVQDGTLCQPGAPDICVAGRCLSPGCDGILGSGRRPDGCGVCGGDDSTCRLVSGNLTDRGGPLGYQKILWIPAGALRLQIAQLRPSSNYLALRGPGGRSIINGNWAVDPPGSYRAGGTVFRYNRPPREEGKGESLSAEGPTTQPVDVYMIFQEENPGVFYQYVISSPPPILENPTPEPPVPQLQPEILRVEPPLAPAPRPARTPGTLQRQVRIPQMPAPPHPRTPLGSPAAYWKRVGHSACSASCGKGVWRPIFLCISRESGEELDERSCAAGARPPASPEPCHGTPCPPYWEAGEWTSCSRSCGPGTQHRQLQCRQEFGGGGSSVPPERCGHLPRPNITQSCQLRLCGHWEVGSPWSQCSVRCGRGQRSRQVRCVGNNGDEVSEQECASGPPQPPSREACDMGPCTTAWFHSDWSSKCSAECGTGIQRRSVVCLGSGAALGPGQGEAGAGTGQSCPTGSRPPDMRACSLGPCERTWRWYTGPWGECSSECGSGTQRRDIICVSKLGTEFNVTSPSNCSHLPRPPALQPCQGQACQDRWFSTPWSPCSRSCQGGTQTREVQCLSTNQTLSTRCPPQLRPSRKRPCNSQPCSQRPDDQCKDSSPHCPLVVQARLCVYPYYTATCCRSCAHVLERSPQDPS

SEQ ID NO: 390 - protein, 1074 aa, Homo Sapiens; identical to SEQ ID NO: 388

SEQ ID NO: 391 - protein, 877 aa, Homo Sapiens
MENWTGRPWLYLLLLLSLPQLCLDQEVLSGHSLQTPTEEGQGPEGVWGPWVQWASCSQPCGVGVQRRSRTCQLPTVQLHPSLPLPPRPPRHPEALLPRGQGPRPQTSPETLPLYRTQSRGRGGPLRGPASHLGREETQEIRAARRSRLRDPIKPGMFGYGRVPFALPLHRNRRHPRSPPRSELSLISSRGEEAIPSPTPRAEPFSANGSPQTELPPTELSVHTPSPQAEPLSPETAQTEVAPRTRPAPLRHHPRAQASGTEPPSPTHSLGEGGFFRASPQPRRPSSQGWASPQVAGRRPDPFPSVPRGRGQQGQGPWGTGGTPHGPRLEPDPQHPGAWLPLLSNGPHASSLWSLFAPSSPIPRCSGESEQLRACSQAPCPPEQPDPRALQCAAFNSQEFMGQLYQWEPFTEVQGSQRCELNCRPRGFRFYVRHTEKVQDGTLCQPGAPDICVAGRCLSPGCDGILGSGRRPDGCGVCGGDDSTCRLVSGNLTDRGGPLGYQKILWIPAGALRLQIAQLRPSSNYLALRGPGGRSIINGNWAVDPPGSYRAGGTVFRYNRPPREEGKGESLSAEGPTTQPVDVYMIFQEENPGVFYQYVISSPPPILENPTPEPPVPQLQPEILRVEPPLAPAPRPARTPGTLQRQVRIPQMPAPPHPRTPLGSPAAYWKRVGHSACSASCGKGVWRPIFLCISRESGEELDERSCAAGARPPASPEPCHGTPCPPYWEAGEWTSCSRSCGPGTQHRQLQCRQEFGGGGSSVPPERCGHLPRPNITQSCQLRLCGHWEVGSPWSQCSVRCGRGQRSRQVRCVGNNGDEVSEQECASGPPQPPSREACDMGPCTTAWFHSDWSSKVSPEPPAISCILGNHAQDTSAFPA

SEQ ID NO: 392 - protein, 471 aa, Homo Sapiens
MDSAPLFPRPHLFQNLLLFLWALLNCGLGVSAQGPGEWTPWVSWTRCSSSCGRGVSVRSRRCLRLPGEEPCWGDSHEYRLCQLPDCPPGAVPFRDLQCALYNGRPVLGTQKTYQWVPFHGAPNQCDLNCLAEGHAFYHSFGRVLDGTACSPGAQGVCVAGRCLSAGCDGLLGSGALEDRCGRCGGANDSCLFVQRVFRDAGAFAGYWNVTLIPEGARHIRVEHRSRNHLALMGGDGRYVLNGHWVVSPPGTYEAAGTHVVYTRDTGPQETLQAAGPTSHDLLLQVLLQEPNPGIEFEFWLPRERYSPFQARVQALGWPLRQPQPRGVEPQPPAAPAVTPAQTPTLAPDPCPPCPDTRGRAHRLLHYCGSDFVFQARVLGHHHQAQETRYEVRIQLVYKNRSPLRAREYVWAPGHCPCPMLAPHRDYLMAVQRLVSPDGTQDQLLLPHAGYARPWSPAEDSRIRLTARRCPG

SEQ ID NO: 393 - protein, 131 aa, Homo Sapiens
MGGDGRYVLNGHWVVSPPGTYEAAGTHVVYTRDTGPQETLQAAGPTSHDLLLQVLLQEPNPGIEFEFWLPRERYSPFQARVQALGWPLRQPQPRGVEPQPPAAPAVTPAQTPTLAPGPSAGPPPPGPGDPL

SEQ ID NO: 394 - protein, 130 aa, Homo Sapiens
MGKLRPGRVEWLASGHTERPHLFQNLLLFLWALLNCGLGVSAQGPGEWTPWVSWTRCSSSCGRGVSVRSRRCLRLPGEEPCWGDSHEYRLCQLPDCPPGAVPFRDLQCALYNGRPVLGTQKTYQWVPFHG

SEQ ID NO: 395 - protein, 141 aa, Homo Sapiens
MGKLRPGRVEWLASGHTERPHLFQNLLLFLWALLNCGLGVSAQGPGEWTPWVSWTRCSSSCGRGVSVRSRRCLRLPGEEPCWGDSHEYRLCQLPDCPPGAVPFRDLQCALYNGRPVLGTQKTYQWVPFHGAPNQCDLNCLA

SEQ ID NO: 396 - protein, 210 aa, Homo Sapiens
MGKLRPGRVEWLASGHTERPHLFQNLLLFLWALLNCGLGVSAQGPGEWTPWVSWTRCSSSCGRGVSVRSRRCLRLPGEEPCWGDSHEYRLCQLPDCPPGAVPFRDLQCALYNGRPVLGTQKTYQWVPFHGAPNQCDLNCLAEGHAFYHSFGRVLDGTACSPGAQGVCVAGRCLSAGCDGLLGSGALEDRCGRCGGANDSCLFVQRVFRDA

SEQ ID NO: 397 - protein, 135 aa, Homo Sapiens
RHIRVEHRSRNHLGILGSLMGGDGRYVLNGHWVVSPPGTYEAAGTHVVYTRDTGPQETLQAAGPTSHDLLLQVLLQEPNPGIEFEFWLPRERYSPFQARVQALGWPLRQPQPRGVEPQPPAAPAVTPAQTPTLAP

SEQ ID NO: 398 - protein, 455 aa, Homo Sapiens
MARKALKLASWTSMALAASGIYFYSNKYLDPNDFGAVRVGRAVATTAVISYDYLTSLKSVPYGSEEYLQLRSKIHDLFQSFDDTPLGTASLAQVHKAVLHDGRTVAVKVQHPKVRAQSSKDILLMEVLVLAVKQLFPEFEFMWLVDEAKKNLPLELDFLNEGRNAEKVSQMLRHFDFLKVPRIHWDLSTERVLLMEFVDGGQVNDRDYMERNKIDVNEISRHLGKMYSEMIFVNGFVHCDPHPGNVLVRKHPGTGKAEIVLLDHGLYQMLTEEFRLNYCHLWQSLIWTDMKRVKEYSQRLGAGDLYPLFACMLTARSWDSVNRGISQAPVTATEDLEIRNNAANYLPQISHLLNHVPRQMLLILKTNDLLRGIEAALGTRASASSFLNMSRCCIRALAEHKKKNTCSFFRRTQISFSEAFNLWQINLHELILRVKGLKLADRVLALICWLFPAPL

SEQ ID NO: 399 - protein, 122 aa, Homo Sapiens
MARKALKLASWTSMALAASGIYFYSNKYLDPNDFGAVRVGRAVATTAVISYDYLTSLKSVPYGSEEYLQLRSKSLAVSPRLECIGVISAHCNLYLLGSSDSPASASQVAGTTGAPSLCQASL

SEQ ID NO: 400 - protein, 266 aa, Homo Sapiens
MARKALKLASWTSMALAASGIYFYSNKYLDPNDFGAVRVGRAVATTAVISYDYLTSLKSVPYGSEEYLQLRSKVHLRSARRLCELCCANRGTFIKVGQHLGALDYLLPEEYTSTLKVLHSQAPQSSMQEIRQVIREDLGKEIHDLFQSFDDTPLGTASLAQVHKAVLHDGRTVAVKVQHPKVRAQSSKDILLMEVLVLAVKQLFPEFEFMWLVDEAKKNLPLELDFLNEGRNAEKVSQMLRHFDFLKISRHLGKMYSEMIFVNGFV

SEQ ID NO: 401 - protein, 523 aa, Homo Sapiens
MARKALKLASWTSMALAASGIYFYSNKYLDPNDFGAVRVGRAVATTAVISYDYLTSLKSVPYGSEEYLQLRSKVHLRSARRLCELCCANRGTFIKVGQHLGALDYLLPEEYTSTLKVLHSQAPQSSMQEIRQVIREDLGKEIHDLFQSFDDTPLGTASLAQVHKAVLHDGRTVAVKVQHPKVRAQSSKDILLMEVLVLAVKQLFPEFEFMWLVDEAKKNLPLELDFLNEGRNAEKVSQMLRHFDFLKVPRIHWDLSTERVLLMEFVDGGQVNDRDYMERNKIDVNEISRHLGKMYSEMIFVNGFVHCDPHPGNVLVRKHPGTGKAEIVLLDHGLYQMLTEEFRLNYCHLWQSLIWTDMKRVKEYSQRLGAGDLYPLFACMLTARSWDSVNRGISQAPVTATEDLEIRNNAANYLPQISHLLNHVPRQMLLILKTNDLLRGIEAALGTRASASSFLNMSRCCIRALAEHKKKNTCSFFRRTQISFSEAFNLWQINLHELILRVKGLKLADRVLALICWLFPAPL

SEQ ID NO: 402 - protein, 218 aa, Homo Sapiens
MARKALKLASWTSMALAASGIYFYSNKYLDPNDFGAVRVGRAVATTAVISYDYLTSLKSVPYGSEEYLQLRSKVHLRSARRLCELCCANRGTFIKVGQHLGALDYLLPEEYTSTLKVLHSQAPQSSMQEIRQVIREDLGKEVLVLAVKQLFPEFEFMWLVDEAKKNLPLELDFLNEGRNAEKVSQMLRHFDFLKPGQQSETASQGTTTTTKKKWDRKL

SEQ ID NO: 403 - protein, 176 aa, Homo Sapiens
MTMCSGARLALLVYGIIMHSSVYSSPAAAGLRFPGIRPEEEAYGEDGNPLPDFDGSEPPGAGSPASAPRAAAAWYRPAGRRDVAHGILNEAYRKVLDQLSAGKHLQSLVARGVGGSLGGGAGDDAEPLSKRHSDGIFTDSYSRYRKQMAVKKYLAAVLGKRYKQRVKNKGRRIAYL

SEQ ID NO: 404 - protein, 176 aa, Homo Sapiens; identical to SEQ ID NO: 403

SEQ ID NO: 405 - protein, 74 aa, Homo Sapiens
MAGVVHVSLAALLLLPMAPAMHSDCIFKKEQAMCLEKIQRANELMGFNDSSPGCPGMWDNITCWKPAHVGEMVL

SEQ ID NO: 406 - protein, 447 aa, Homo Sapiens
MAGVVHVSLAALLLLPMAPAMHSDCIFKKEQAMCLEKIQRANELMGFNDSSPGCPGMWDNITCWKPAHVGEMVLVSCPELFRIFNPDQDMGVVSRNCTEDGWSEPFPHYFDACGFDEYESETGDQDYYYLSVKALYTVGYSTSLVTLTTAMVILCRFRKLHCTRNFIHMNLFVSFMLRAISVFIKDWILYAEQDSNHCFISTVECKAVMVFFHYCVVSNYFWLFIEGLYLFTLLVETFFPERRYFYWYTIIGWGTPTVCVTVWATLRLYFDDTGCWDMNDSTALWWVIKGPVVGSIMVNFVLFIGIIVILVQKLQSPDMGGNESSIYLRLARSTLLLIPLFGIHYTVFAFSPENVSKRERLVFELGLGSFQGFVVAVLYCFLNGEVQAEIKRKWRSWKVNRYFAVDFKHRHPSLASSGVNGGTQLSILSKSSSQIRMSGLPADNLAT

SEQ ID NO: 407 - protein, 468 aa, Homo Sapiens
MAGVVHVSLAALLLLPMAPAMHSDCIFKKEQAMCLEKIQRANELMGFNDSSPGCPGMWDNITCWKPAHVGEMVLVSCPELFRIFNPDQVWETETIGESDFGDSNSLDLSDMGVVSRNCTEDGWSEPFPHYFDACGFDEYESETGDQDYYYLSVKALYTVGYSTSLVTLTTAMVILCRFRKLHCTRNFIHMNLFVSFMLRAISVFIKDWILYAEQDSNHCFISTVECKAVMVFFHYCVVSNYFWLFIEGLYLFTLLVETFFPERRYFYWYTIIGWGTPTVCVTVWATLRLYFDDTGCWDMNDSTALWWVIKGPVVGSIMVNFVLFIGIIVILVQKLQSPDMGGNESSIYLRLARSTLLLIPLFGIHYTVFAFSPENVSKRERLVFELGLGSFQGFVVAVLYCFLNGEVQAEIKRKWRSWKVNRYFAVDFKHRHPSLASSGVNGGTQLSILSKSSSQIRMSGLPADNLAT

SEQ ID NO: 408 - protein, 524 aa, Homo Sapiens
MAGVVHVSLAALLLLPMAPAMHSDCIFKKEQAMCLEKIQRANELMGFNDSSPGCPGMWDNITCWKPAHVGEMVLVSCPELFRIFNPDQVWETETIGESDFGDSNSLDLSDMGVVSRNCTEDGWSEPFPHYFDACGFDEYESETGDQDYYYLSVKALYTVGYSTSLVTLTTAMVILCRFRKLHCTRNFIHMNLFVSFMLRAISVFIKDWILYAEQDSNHCFISTVECKAVMVFFHYCVVSNYFWLFIEGLYLFTLLVETFFPERRYFYWYTIIGWGTPTVCVTVWATLRLYFDDTGCWDMNDSTALWWVIKGPVVGSIMVNFVLFIGIIVILVQKLQSPDMGGNESSIYLTNLSPRVPKKAREDPLPVPSDQHSLPFLSCVQKCYCKPQRAQQHSCKMSELSTITLRLARSTLLLIPLFGIHYTVFAFSPENVSKRERLVFELGLGSFQGFVVAVLYCFLNGEVQAEIKRKWRSWKVNRYFAVDFKHRHPSLASSGVNGGTQLSILSKSSSQIRMSGLPADNLAT

SEQ ID NO: 409 - protein, 496 aa, Homo Sapiens
MAGVVHVSLAALLLLPMAPAMHSDCIFKKEQAMCLEKIQRANELMGFNDSSPGCPGMWDNITCWKPAHVGEMVLVSCPELFRIFNPDQVWETETIGESDFGDSNSLDLSDMGVVSRNCTEDGWSEPFPHYFDACGFDEYESETGDQDYYYLSVKALYTVGYSTSLVTLTTAMVILCRFRKLHCTRNFIHMNLFVSFMLRAISVFIKDWILYAEQDSNHCFISTVECKAVMVFFHYCVVSNYFWLFIEGLYLFTLLVETFFPERRYFYWYTIIGWGTPTVCVTVWATLRLYFDDTGCWDMNDSTALWWVIKGPVVGSIMVNFVLFIGIIVILVQKLQSPDMGGNESSIYFSCVQKCYCKPQRAQQHSCKMSELSTITLRLARSTLLLIPLFGIHYTVFAFSPENVSKRERLVFELGLGSFQGFVVAVLYCFLNGEVQAEIKRKWRSWKVNRYFAVDFKHRHPSLASSGVNGGTQLSILSKSSSQIRMSGLPADNLAT

SEQ ID NO: 410 - protein, 496 aa, Homo Sapiens; identical to SEQ ID NO: 409

SEQ ID NO: 411 - protein, 148 aa, Homo Sapiens
  misc_feature (1)..(1): Xaa can be any naturally occurring amino acid
XATLRLYFDDTGCWDMNDSTALWWVIKGPVVGSIMVNFVLFIGIIVILVQKLQSPDMGGNESSIYLTNLSPRVPKKAREDPLPVPSDQHSLPFLRLARSTLLLIPLFGIHYTVFAFSPENVSKRERLVFELGLGSFQGFVVAVLYCFL

SEQ ID NO: 412 - protein, 97 aa, Homo Sapiens
MASYIDQDMQVLWYQDGRIVETDESQGIFVEKNMIHNCSLIASALTISNIQAGSTGNWGCHVQTKRGNNTRTVDIVVLESSAQYCPPERVVNNKGDF

SEQ ID NO: 413 - protein, 1321 aa, Homo Sapiens
MEPPGRRRGRAQPPLLLPLSLLALLALLGGGGGGGAAALPAGCKHDGRPRGAGRAAGAAEGKVVCSSLELAQVLPPDTLPNRTVTLILSNNKISELKNGSFSGLSLLERLDLRNNLISSIDPGAFWGLSSLKRLDLTNNRIGCLNADIFRGLTNLVRLNLSGNLFSSLSQGTFDYLASLRSLEFQTEYLLCDCNILWMHRWVKEKNITVRDTRCVYPKSLQAQPVTGVKQELLTCDPPLELPSFYMTPSHRQVVFEGDSLPFQCMASYIDQDMQVLWYQDGRIVETDESQGIFVEKNMIHNCSLIASALTISNIQAGSTGNWGCHVQTKRGNNTRTVDIVVLESSAQYCPPERVVNNKGDFRWPRTLAGITAYLQCTRNTHGSGIYPGNPQDERKAWRRCDRGGFWADDDYSRCQYANDVTRVLYMFNQMPLNLTNAVATARQLLAYTVEAANFSDKMDVIFVAEMIEKFGRFTKEEKSKELGDVMVDIASNIMLADERVLWLAQREAKACSRIVQCLQRIATYRLAGGAHVYSTYSPNIALEAYVIKSTGFTGMTCTVFQKVAASDRTGLSDYGRRDPEGNLDKQLSFKCNVSNTFSSLALKNTIVEASIQLPPSLFSPKQKRELRPTDDSLYKLQLIAFRNGKLFPATGNSTNLADDGKRRTVVTPVILTKIDGVNVDTHHIPVNVTLRRIAHGADAVAARWDFDLLNGQGGWKSDGCHILYSDENITTIQCYSLSNYAVLMDLTGSELYTQAASLLHPVVYTTAIILLLCLLAVIVSYIYHHSLIRISLKSWHMLVNLCFHIFLTCVVFVGGITQTRNASICQAVGIILHYSTLATVLWVGVTARNIYKQVTKKAKRCQDPDEPPPPPRPMLRFYLIGGGIPIIVCGITAAANIKNYGSRPNAPYCWMAWEPSLGAFYGPASFITFVNCMYFLSIFIQLKRHPERKYELKEPTEEQQRLAANENGEINHQDSMSLSLISTSALENEHTFHSQLLGASLTLLLYVALWMFGALAVSLYYPLDLVFSFVFGATSLSFSAFFVVHHCVNREDVRLAWIMTCCPGRSSYSVQVNVQPPNSNGTNGEAPKCPNSSAESSCTNKSASSFKNSSQGCKLTNLQAAAAQCHANSLPLNSTPQLDNSLTEHSMDNDIKMHVAPLEVQFRTNVHSSRHHKNRSKGHRASRLTVLREYAYDVPTSVEGSVQNGLPKSRLGNNEGHSRSRRAYLAYRERQYNPPQQDSSDACSTLPKSSRNFEKPVSTTSKKDALRKPAVVELENQQKSYGLNLAIQNGPIKSNGQEGPLLGTDSTGNVRTGLWKHETTV

SEQ ID NO: 414 - protein, 616 aa, Homo Sapiens
MEPPGRRRGRAQPPLLLPLSLLALLALLGGGGGGGAAALPAGCKHDGRPRGAGRAAGAAEGKVVCSSLELAQVLPPDTLPNRTVTLILSNNKISELKNGSFSGLSLLERLDLRNNLISSIDPGAFWGLSSLKRLDLTNNRIGCLNADIFRGLTNLVRLNLSGNLFSSLSQGTFDYLASLRSLEFQTEYLLCDCNILWMHRWVKEKNITVRDTRCVYPKSLQAQPVTGVKQELLTCDPPLELPSFYMTPSHRQVVFEGDSLPFQCMASYIDQDMQVLWYQDGRIVETDESQGIFVEKNMIHNCSLIASALTISNIQAGSTGNWGCHVQTKRGNNTRTVDIVVLESSAQYCPPERVVNNKGDFRWPRTLAGITAYLQCTRNTHGSGIYPGNPQDERKAWRRCDRGGFWADDDYSRCQYANDVTRVLYMFNQMPLNLTNAVATARQLLAYTVEAANFSDKMDVIFVAEMIEKFGRFTKEEKSKELGDVMVDIASNIMLADERVLWLAQREAKACSRIVQCLQRIATYRLAGGAHVYSTYSPNIALEAYVIKSTGFTGMTCTVFQKVAASDRTGLSDYGRRDPEGNLDKQLSFKCNVSNTFSSLALKVCYILQSFKTIYS

SEQ ID NO: 415 - protein, 34 aa, Homo Sapiens
MLRFYLIGGGIPIIVCGITAAANIKNYGSRPNAP

SEQ ID NO: 416 - protein, 381 aa, Homo Sapiens
MPLKRNNSKYPPLELPSFYMTPSHRQVVFEGDSLPFQCMASYIDQDMQVLWYQDGRIVETDESQGIFVEKNMIHNCSLIASALTISNIQAGSTGNWGCHVQTKRGNNTRTVDIVVLESSAQYCPPERVVNNKGDFRWPRTLAGITAYLQCTRNTHGSGIYPGNPQDERKAWRRCDRGGFWADDDYSRCQYANDVTRVLYMFNQMPLNLTNAVATARQLLAYTVEAANFSDKMDVIFVAEMIEKFGRFTKEEKSKELGDVMVDIASNIMLADERVLWLAQREAKACSRIVQCLQRIATYRLAGGAHVYSTYSPNIALEAYVIKSTGFTGMTCTVFQKVAASDRTGLSDYGRRDPEGNLDKQLSFKCNVSNTFSSLALKGKFR

SEQ ID NO: 417 - protein, 847 aa, Homo Sapiens
GKGHRMTPACPLLLSVILSLRLATAFDPAPSACSALASGVLYGAFSLQDLFPTIASGCSWTLENPDPTKYSLYLRFNRQEQVCAHFAPRLLPLDHYLVNFTCLRPSPEEAVAQAESEVGRPEEEEAEAAAGLELCSGSGPFTFLHFDKNFVQLCLSAEPSEAPRLLAPAALAFRFVEVLLINNNNSSQFTCGVLCRWSEECGRAAGRACGFAQPGCSCPGEAGAGSTTTTSPGPPAAHTLSNALVPGGPAPPAEADLHSGSSNDLFTTEMRYGEEPEEEPKVKTQWPRSADEPGLYMAQTGDPAAEEWSPWSVCSLTCGQGLQVRTRSCVSSPYGTLCSGPLRETRPCNNSATCPVEGQWLEWGPWGPCSTSCANGTQQRSRKCSVAGPAWATCTGALTDTRECSNLECPATDSKWGPWNAWSLCSKTCDTGWQRRFRMCQATGTQGYPCEGTGEEVKPCSEKRCPAFHEMCRDEYVMLMTWKKAAAGEIIYNKCPPNASGSASRRCLLSAQGVAYWGLPSFARCISHEYRYLYLSLREHLAKGQRMLAGEGMSQVVRSLQELLARRTYYSGDLLFSVDILRNVTDTFKRATYVPSADDVQRFFQVVSFMVDAENKEKWDDAQQVSPGSVHLLRVVEDFIHLVGDALKAFQSSLIVTDNLVISIQREPVSAVSSDITFPMRGRRGMKDWVRHSEDRLFLPKEVLSLSSPGKPATSGAAGSPGRGRGPGTVPPGPGHSHQRLLPADPDESSYFVIGAVLYRTLGLILPPPRPPLAVTSRVMTVTVRPPTQPPAEPLITVELSYIINGTTDPHCASWDYSRADASSGDWDTENCQTLETQAAHTRCQCQ

SEQ ID NO: 418 - protein, 1585 aa, Homo Sapiens
MENTGWMGKGHRMTPACPLLLSVILSLRLATAFDPAPSACSALASGVLYGAFSLQDLFPTIASGCSWTLENPDPTKYSLYLRFNRQEQVCAHFAPRLLPLDHYLVNFTCLRPSPEEAVAQAESEVGRPEEEEAEAAAGLELCSGSGPFTFLHFDKNFVQLCLSAEPSEAPRLLAPAALAFRFVEVLLINNNNSSQFTCGVLCRWSEECGRAAGRACGFAQPGCSCPGEAGAGSTTTTSPGPPAAHTLSNALVPGGPAPPAEADLHSGSSNDLFTTEMRYGEEPEEEPKVKTQWPRSADEPGLYMAQTGDPAAEEWSPWSVCSLTCGQGLQVRTRSCVSSPYGTLCSGPLRETRPCNNSATCPVHGVWEEWGSWSLCSRSCGRGSRSRMRTCVPPQHGGKACEGPELQTKLCSMAACPVEGQWLEWGPWGPCSTSCANGTQQRSRKCSVAGPAWATCTGALTDTRECSNLECPATDSKWGPWNAWSLCSKTCDTGWQRRFRMCQATGTQGYPCEGTGEEVKPCSEKRCPAFHEMCRDEYVMLMTWKKAAAGEIIYNKCPPNASGSASRRCLLSAQGVAYWGLPSFARCISHEYRYLYLSLREHLAKGQRMLAGEGMSQVVRSLQELLARRTYYSGDLLFSVDILRNVTDTFKRATYVPSADDVQRFFQVVSFMVDAENKEKWDDAQQVSPGSVHLLRVVEDFIHLVGDALKAFQSSLIVTDNLVISIQREPVSAVSSDITFPMRGRRGMKDWVRHSEDRLFLPKEVLSLSSPGKPATSGAAGSPGRGRGPGTVPPGPGHSHQRLLPADPDESSYFVIGAVLYRTLGLILPPPRPPLAVTSRVMTVTVRPPTQPPAEPLITVELSYIINGTTDPHCASWDYSRADASSGDWDTENCQTLETQAAHTRCQCQHLSTFAVLAQPPKDLTLELAGSPSVPLVIGCAVSCMALLTLLAIYAAFWRFIKSERSIILLNFCLSILASNILILVGQSRVLSKGVCTMTAAFLHFFFLSSFCWVLTEAWQSYLAVIGRMRTRLVRKRFLCLGWGLPALVVAVSVGFTRTKGYGTSSYCWLSLEGGLLYAFVGPAAVIVLVNMLIGIIVFNKLMARDGISDKSKKQRAGSERCPWASLLLPCSACGAVPSPLLSSASARNAMASLWSSCVVLPLLALTWMSAVLAMTDRRSVLFQALFAVFNSAQGFVITAVHCFLRREVQDVVKCQMGVCRADESEDSPDSCKNGQLQILSDFEKDVDLACQTVLFKEVNTCNPSTITGTLSRLSLDEDEEPKSCLVGPEGSLSFSPLPGNILVPMAASPGLGEPPPPQEANPVYMCGEGGLRQLDLTWLRPTEPGSEGDYMVLPRRTLSLQPGGGGGGGEDAPRARPEGTPRRAAKTVAHTEGYPSFLSVDHSGLGLGPAYGSLQNPYGMTFQPPPPTPSARQVPEPGERSRTMPRTVPGSTMKMGSLERKKLRYSDLDFEKVMHTRKRHSELYHELNQKFHTFDRYRSQSTAKREKRWSVSSGGAAERSVCTDKPSPGERPSLSQHRRHQSWSTFKSMTLGSLPPKPRERLTLHRAAAWEPTEPPDGDFQTEV

SEQ ID NO: 419 - protein, 1584 aa, Homo Sapiens
MENTGWMGKGHRMTPACPLLLSVILSLRLATAFDPAPSACSALASGVLYGAFSLQDLFPTIASGCSWTLENPDPTKYSLYLRFNRQEQVCAHFAPRLLPLDHYLVNFTCLRPSPEEAVAQAESEVGRPEEEEAEAAAGLELCSGSGPFTFLHFDKNFVQLCLSAEPSEAPRLLAPAALAFRFVEVLLINNNNSSQFTCGVLCRWSEECGRAAGRACGFAQPGCSCPGEAGAGSTTTTSPGPPAAHTLSNALVPGGPAPPAEADLHSGSSNDLFTTEMRYGEEPEEEPKVKTQWPRSADEPGLYMAQTGDPAAEEWSPWSVCSLTCGQGLQVRTRSCVSSPYGTLCSGPLRETRPCNNSATCPVHGVWEEWGSWSLCSRSCGRGSRSRMRTCVPPQHGGKACEGPELQTKLCSMAACPVEGQWLEWGPWGPCSTSCANGTQQRSRKCSVAGPAWATCTGALTDTRECSNLECPATDSKWGPWNAWSLCSKTCDTGWQRRFRMCQATGTQGYPCEGTGEEVKPCSEKRCPAFHEMCRDEYVMLMTWKKAAAGEIIYNKCPPNASGSASRRCLLSAQGVAYWGLPSFARCISHEYRYLYLSLREHLAKGQRMLAGEGMSQVVRSLQELLARRTYYSGDLLFSVDILRNVTDTFKRATYVPSADDVQRFFQVVSFMVDAENKEKWDDAQQVSPGSVHLLRVVEDFIHLVGDALKAFQSSLIVTDNLVISIQREPVSAVSSDITFPMRGRRGMKDWVRHSEDRLFLPKEVLSLSSPGKPATSGAAGSPGRGRGPGTVPPGPGHSHQRLLPADPDESSYFVIGAVLYRTLGLILPPPRPPLAVTSRVMTVTVRPPTQPPAEPLITVELSYIINGTTDPHCASWDYSRADASSGDWDTENCQTLETQAAHTRCQCQHLSTFAVLAQPPKDLTLELAGSPSVPLVIGCAVSCMALLTLLAIYAAFWRFIKSERSIILLNFCLSILASNILILVGQSRVLSKGVCTMTAAFLHFFFLSSFCWVLTEAWQSYLAVIGRMRTRLVRKRFLCLGWGLPALVVAVSVGFTRTKGYGTSSYCWLSLEGGLLYAFVGPAAVIVLVNMLIGIIVFNKLMARDGISDKSKKQRAGSERCPWASLLLPCSACGAVPSPLLSSASARNAMASLWSSCVVLPLLALTWMSAVLAMTDRRSVLFQALFAVFNSAQGFVITAVHCFLRREVQDVVKCQMGVCRADESEDSPDSCKNGQLQILSDFEKDVDLACQTVLFKEVNTCNPSTITGTLSRLSLDEDEEPKSCLVGPEGSLSFSPLPGNILVPMAASPGLGEPPPPQEANPVYMCGEGGLRQLDLTWLRPTEPGSEGDYMVLPRRTLSLQPGGGGGGGEDAPRARPEGTPRRAAKTVAHTEGYPSFLSVDHSGLGLGPAYGSLQNPYGMTFQPPPPTPSARQVPEPGERSRTMPRTVPGSTMKMGSLERKKLRYSDLDFEVMHTRKRHSELYHELNQKFHTFDRYRSQSTAKREKRWSVSSGGAAERSVCTDKPSPGERPSLSQHRRHQSWSTFKSMTLGSLPPKPRERLTLHRAAAWEPTEPPDGDFQTEV

SEQ ID NO: 420 - protein, 1551 aa, Homo Sapiens
MENTGWMGKGHRMTPACPLLLSVILSLRLATAFDPAPSACSALASGVLYGAFSLQDLFPTIASGCSWTLENPDPTKYSLYLRFNRQEQVCAHFAPRLLPLDHYLVNFTCLRPSPEEAVAQAESEVGRPEEEEAEAAAGLELCSGSGPFTFLHFDKNFVQLCLSAEPSEAPRLLAPAALAFRFVEVLLINNNNSSQFTCGVLCRWSEECGRAAGRACGFAQPGCSCPGEAGAGSTTTTSPGPPAAHTLSNALVPGGPAPPAEADLHSGSSNDLFTTEMRYGEEPEEEPKVKTQWPRSADEPGLYMAQTGDPAAEEWSPWSVCSLTCGQGLQVRTRSCVSSPYGTLCSGPLRETRPCNNSATCPVHGVWEEWGSWSLCSRSCGRGSRSRMRTCVPPQHGGKACEGPELQTKLCSMAACPVEGQWLEWGPWGPCSTSCANGTQQRSRKCSVAGPAWATCTGALTDTRECSNLECPATDSKWGPWNAWSLCSKTCDTGWQRRFRMCQATGTQGYPCEGTGEEVKPCSEKRCPAFHEMCRDEYVMLMTWKKAAAGEIIYNKCPPNASGSASRRCLLSAQGVAYWGLPSFARCISHEYRYLYLSLREHLAKGQRMLAGEGMSQVVRSLQELLARRTYYSGDLLFSVDILRNVTDTFKRATYVPSADDVQRFFQVVSFMVDAENKEKWDDAQQVSPGSVHLLRVVEDFIHLVGDALKAFQSSLIVTDNLVISIQREPVSAVSSDITFPMRGRRGMKDWVRHSEDRLFLPKEVLSLSSPGKPATSGAAGSPGRGRGPGTVPPGPGHSHQRLLPADPDESSYFVIGAVLYRTLGLILPPPRPPLAVTSRVMTVTVRPPTQPPAEPLITVELSYIINGTTDPHCASWDYSRADASSGDWDTENCQTLETQAAHTRCQCQHLSTFAVLAQPPKDLTLELAGSPSVPLVIGCAVSCMALLTLLAIYAAFWRFIKSERSIILLNFCLSILASNILILVGQSRVLSKGVCTMTAAFLHFFFLSSFCWVLTEAWQSYLAVIGRMRTRLVRKRFLCLGWGLPALVVAVSVGFTRTKGYGTSSYCWLSLEGGLLYAFVGPAAVIVLVNMLIGIIVFNKLMARDGISDKSKKQRAGASLWSSCVVLPLLALTWMSAVLAMTDRRSVLFQALFAVFNSAQGFVITAVHCFLRREVQDVVKCQMGVCRADESEDSPDSCKNGQLQILSDFEKDVDLACQTVLFKEVNTCNPSTITGTLSRLSLDEDEEPKSCLVGPEGSLSFSPLPGNILVPMAASPGLGEPPPPQEANPVYMCGEGGLRQLDLTWLRPTEPGSEGDYMVLPRRTLSLQPGGGGGGGEDAPRARPEGTPRRAAKTVAHTEGYPSFLSVDHSGLGLGPAYGSLQNPYGMTFQPPPPTPSARQVPEPGERSRTMPRTVPGSTMKMGSLERKKLRYSDLDFEVMHTRKRHSELYHELNQKFHTFDRYRSQSTAKREKRWSVSSGGAAERSVCTDKPSPGERPSLSQHRRHQSWSTFKSMTLGSLPPKPRERLTLHRAAAWEPTEPPDGDFQTEV

SEQ ID NO: 421 - protein, 507 aa, Homo Sapiens
MHLPRQHGSAHLGHLYAYAKFSAHDWHLHAQGHAICNAHGKGKGHRMTPACPLLLSVILSLRLATAFDPAPSACSALASGVLYGAFSLQDLFPTIASGCSWTLENPDPTKYSLYLRFNRQEQVCAHFAPRLLPLDHYLVNFTCLRPSPEEAVAQAESEVGRPEEEEAEAAAGLELCSGSGPFTFLHFDKNFVQLCLSAEPSEAPRLLAPAALAFRFVEVLLINNNNSSQFTCGVLCRWSEECGRAAGRACGFAQPGCSCPGEAGAGSTTTTSPGPPAAHTLSNALVPGGPAPPAEADLHSGSSNDLFTTEMRYGEEPEEEPKVKTQWPRSADEPGLYMAQTVHGVWEEWGSWSLCSRSCGRGSRSRMRTCVPPQHGGKACEGPELQTKLCSMAACPVEGQWLEWGPWGPCSTSCANGTQQRSRKCSVAGPAWATCTGALTDTRECSNLECPATDSKWGPWNAWSLCSKTCDTGWQRRFRMCQATGTQGYPCEGTGEEVKPCSEKRCP

SEQ ID NO: 422 - protein, 1500 aa, Homo Sapiens
MLSLRGPDTHGKGHRMTPACPLLLSVILSLRLATAFDPAPSACSALASGVLYGAFSLQDLFPTIASGCSWTLENPDPTKYSLYLRFNRQEQVCAHFAPRLLPLDHYLVNFTCLRPSPEEAVAQAESEVGRPEEEEAEAAAGLELCSGSGPFTFLHFDKNFVQLCLSAEPSEAPRLLAPAALAFRFVEVLLINNNNSSQFTCGVLCRWSEECGRAAGRACGFAQPGCSCPGEAGAGSTTTTSPGPPAAHTLSNALVPGGPAPPAEADLHSGSSNDLFTTEMRYGEEPEEEPKVKTQWPRSADEPGLYMAQTVHGVWEEWGSWSLCSRSCGRGSRSRMRTCVPPQHGGKACEGPELQTKLCSMAACPVEGQWLEWGPWGPCSTSCANGTQQRSRKCSVAGPAWATCTGALTDTRECSNLECPATDSKWGPWNAWSLCSKTCDTGWQRRFRMCQATGTQGYPCEGTGEEVKPCSEKRCPAFHEMCRDEYVMLMTWKKAAAGEIIYNKCPPNASGSASRRCLLSAQGVAYWGLPSFARCISHEYRYLYLSLREHLAKGQRMLAGEGMSQVVRSLQELLARRTYYSGDLLFSVDILRNVTDTFKRATYVPSADDVQRFFQVVSFMVDAENKEKWDDAQQVSPGSVHLLRVVEDFIHLVGDALKAFQSSLIVTDNLVISIQREPVSAVSSDITFPMRGRRGMKDWVRHSEDRLFLPKEVLSLSSPGKPATSGAAGSPGRGRGPGTVPPGPGHSHQRLLPADPDESSYFVIGAVLYRTLGLILPPPRPPLAVTSRVMTVTVRPPTQPPAEPLITVELSYIINGTTDPHCASWDYSRADASSGDWDTENCQTLETQAAHTRCQCQHLSTFAVLAQPPKDLTLELAGSPSVPLVIGCAVSCMALLTLLAIYAAFWRFIKSERSIILLNFCLSILASNILILVGQSRVLSKGVCTMTAAFLHFFFLSSFCWVLTEAWQSYLAVIGRMRTRLVRKRFLCLGWGLPALVVAVSVGFTRTKGYGTSSYCWLSLEGGLLYAFVGPAAVIVLVNMLIGIIVFNKLMARDGISDKSKKQRAGASLWSSCVVLPLLALTWMSAVLAMTDRRSVLFQALFAVFNSAQGFVITAVHCFLRREVQDVVKCQMGVCRADESEDSPDSCKNGQLQILSDFEKDVDLACQTVLFKEVNTCNPSTITGTLSRLSLDEDEEPKSCLVGPEGSLSFSPLPGNILVPMAASPGLGEPPPPQEANPVYMCGEGGLRQLDLTWLRPTEPGSEGDYMVLPRRTLSLQPGGGGGGGEDAPRARPEGTPRRAAKTVAHTEGYPSFLSVDHSGLGLGPAYGSLQNPYGMTFQPPPPTPSARQVPEPGERSRTMPRTVPGSTMKMGSLERKKLRYSDLDFEKVMHTRKRHSELYHELNQKFHTFDRYRSQSTAKREKRWSVSSGGAAERSVCTDKPSPGERPSLSQHRRHQSWSTFKSMTLGSLPPKPRERLTLHRAAAWEPTEPPDGDFQTEV

SEQ ID NO: 423 - protein, 1554 aa, Homo Sapiens
MTPACPLLLSVILSLRLATAFDPAPSACSALASGVLYGAFSLQDLFPTIASGCSWTLENPDPTKYSLYLRFNRQEQVCAHFAPRLLPLDHYLVNFTCLRPSPEEAVAQAESEVGRPEEEEAEAAAGLELCSGSGPFTFLHFDKNFVQLCLSAEPSEAPRLLAPAALAFRFVEVLLINNNNSSQFTCGVLCRWSEECGRAAGRACGFAQPGCSCPGEAGAGSTTTTSPGPPAAHTLSNALVPGGPAPPAEADLHSGSSNDLFTTEMRYGEEPEEEPKVKTQWPRSADEPGLYMAQTGDPAAEEWSPWSVCSLTCGQGLQVRTRSCVSSPYGTLCSGPLRETRPCNNSATCPVHGVWEEWGSWSLCSRSCGRGSRSRMRTCVPPQHGGKACEGPELQTKLCSMAACPVEGQWLEWGPWGPCSTSCANGTQQRSRKCSVAGPAWATCTGALTDTRECSNLECPATDSKWGPWNAWSLCSKTCDTGWQRRFRMCQATGTQGYPCEGTGEEVKPCSEKRCPAFHEMCRDEYVMLMTWKKAAAGEIIYNKCPPNASGSASRRCLLSAQGVAYWGLPSFARCISHEYRYLYLSLREHLAKGQRMLAGEGMSQVVRSLQELLARRTYYSGDLLFSVDILRNVTDTFKRATYVPSADDVQRFFQVVSFMVDAENKEKWDDAQQVSPGSVHLLRVVEDFIHLVGDALKAFQSSLIVTDNLVISIQREPVSAVSSDITFPMRGRRGMKDWVRHSEDRLFLPKEVLSLSSPGKPATSGAAGSPGRGRGPGTVPPGPGHSHQRLLPADPDESSYFVIGAVLYRTLGLILPPPRPPLAVTSRVMTVTVRPPTQPPAEPLITVELSYIINGTTDPHCASWDYSRADASSGDWDTENCQTLETQAAHTRCQCQHLSTFAVLAQPPKDLTLELAGSPSVPLVIGCAVSCMALLTLLAIYAAFWRFIKSERSIILLNFCLSILASNILILVGQSRVLSKGVCTMTAAFLHFFFLSSFCWVLTEAWQSYLAVIGRMRTRLVRKRFLCLGWGLPALVVAVSVGFTRTKGYGTSSYCWLSLEGGLLYAFVGPAAVIVLVNMLIGIIVFNKLMARDGISDKSKKQRAGSERCPWASLLLPCSACGAVPSPLLSSASARNAMASLWSSCVVLPLLALTWMSAVLAMTDRRSVLFQALFAVFNSAQGFVITAVHCFLRREVQDVVKCQMGVCRADESEDSPDSCKNGQLQILSDFEKDVDLACQTVLFKEVNTCNPSTITGTLSRLSLDEDEEPKSCLVGPEGSLSFSPLPGNILVPMAASPGLGEPPPPQEANPVYMCGEGGLRQLDLTWLRPTEPGSEGDYMVLPRRTLSLQPGGGGGGGEDAPRARPEGTPRRAAKTVAHTEGYPSFLSVDHSGLGLGPAYGSLQNPYGMTFQPPPPTPSARQVPEPGERSRTMPRTVPGSTMKMGSLERKKLRYSDLDFEKVMHTRKRHSELYHELNQKFHTFDRYRSQSTAKDKPSPGERPSLSQHRRHQSWSTFKSMTLGSLPPKPRERLTLHRAAAWEPTEPPDGDFQTEV

SEQ ID NO: 424 - protein, 1499 aa, Homo Sapiens
MTPACPLLLSVILSLRLATAFDPAPSACSALASGVLYGAFSLQDLFPTIASGCSWTLENPDPTKYSLYLRFNRQEQVCAHFAPRLLPLDHYLVNFTCLRPSPEEAVAQAESEVGRPEEEEAEAAAGLELCSGSGPFTFLHFDKNFVQLCLSAEPSEAPRLLAPAALAFRFVEVLLINNNNSSQFTCGVLCRWSEECGRAAGRACGFAQPGCSCPGEAGAGSTTTTSPGPPAAHTLSNALVPGGPAPPAEADLHSGSSNDLFTTEMRYGEEPEEEPKVKTQWPRSADEPGLYMAQTVHGVWEEWGSWSLCSRSCGRGSRSRMRTCVPPQHGGKACEGPELQTKLCSMAACPVEGQWLEWGPWGPCSTSCANGTQQRSRKCSVAGPAWATCTGALTDTRECSNLECPATDSKWGPWNAWSLCSKTCDTGWQRRFRMCQATGTQGYPCEGTGEEVKPCSEKRCPAFHEMCRDEYVMLMTWKKAAAGEIIYNKCPPNASGSASRRCLLSAQGVAYWGLPSFARCISHEYRYLYLSLREHLAKGQRMLAGEGMSQVVRSLQELLARRTYYSGDLLFSVDILRNVTDTFKRATYVPSADDVQRFFQVVSFMVDAENKEKWDDAQQVSPGSVHLLRVVEDFIHLVGDALKAFQSSLIVTDNLVISIQREPVSAVSSDITFPMRGRRGMKDWVRHSEDRLFLPKEVLSLSSPGKPATSGAAGSPGRGRGPGTVPPGPGHSHQRLLPADPDESSYFVIGAVLYRTLGLILPPPRPPLAVTSRVMTVTVRPPTQPPAEPLITVELSYIINGTTDPHCASWDYSRADASSGDWDTENCQTLETQAAHTRCQCQHLSTFAVLAQPPKDLTLELAGSPSVPLVIGCAVSCMALLTLLAIYAAFWRFIKSERSIILLNFCLSILASNILILVGQSRVLSKGVCTMTAAFLHFFFLSSFCWVLTEAWQSYLAVIGRMRTRLVRKRFLCLGWGLPALVVAVSVGFTRTKGYGTSSYCWLSLEGGLLYAFVGPAAVIVLVNMLIGIIVFNKLMARDGISDKSKKQRAGSERCPWASLLLPCSACGAVPSPLLSSASARNAMASLWSSCVVLPLLALTWMSAVLAMTDRRSVLFQALFAVFNSAQGFVITAVHCFLRREVQDVVKCQMGVCRADESEDSPDSCKNGQLQILSDFEKDVDLACQTVLFKEVNTCNPSTITGTLSRLSLDEDEEPKSCLVGPEGSLSFSPLPGNILVPMAASPGLGEPPPPQEANPVYMCGEGGLRQLDLTWLRPTEPGSEGDYMVLPRRTLSLQPGGGGGGGEDAPRARPEGTPRRAAKTVAHTEGYPSFLSVDHSGLGLGPAYGSLQNPYGMTFQPPPPTPSARQVPEPGERSRTMPRTVPGSTMKMGSLERKKLRYSDLDFEKVMHTRKRHSELYHELNQKFHTFDRYRSQSTAKDKPSPGERPSLSQHRRHQSWSTFKSMTLGSLPPKPRERLTLHRAAAWEPTEPPDGDFQTEV

SEQ ID NO: 425 - protein, 1466 aa, Homo Sapiens
MTPACPLLLSVILSLRLATAFDPAPSACSALASGVLYGAFSLQDLFPTIASGCSWTLENPDPTKYSLYLRFNRQEQVCAHFAPRLLPLDHYLVNFTCLRPSPEEAVAQAESEVGRPEEEEAEAAAGLELCSGSGPFTFLHFDKNFVQLCLSAEPSEAPRLLAPAALAFRFVEVLLINNNNSSQFTCGVLCRWSEECGRAAGRACGFAQPGCSCPGEAGAGSTTTTSPGPPAAHTLSNALVPGGPAPPAEADLHSGSSNDLFTTEMRYGEEPEEEPKVKTQWPRSADEPGLYMAQTGDPAAEEWSPWSVCSLTCGQGLQVRTRSCVSSPYGTLCSGPLRETRPCNNSATCPVEGQWLEWGPWGPCSTSCANGTQQRSRKCSVAGPAWATCTGALTDTRECSNLECPATDSKWGPWNAWSLCSKTCDTGWQRRFRMCQATGTQGYPCEGTGEEVKPCSEKRCPAFHEMCRDEYVMLMTWKKAAAGEIIYNKCPPNASGSASRRCLLSAQGVAYWGLPSFARCISHEYRYLYLSLREHLAKGQRMLAGEGMSQVVRSLQELLARRTYYSGDLLFSVDILRNVTDTFKRATYVPSADDVQRFFQVVSFMVDAENKEKWDDAQQVSPGSVHLLRVVEDFIHLVGDALKAFQSSLIVTDNLVISIQREPVSAVSSDITFPMRGRRGMKDWVRHSEDRLFLPKEVLSLSSPGKPATSGAAGSPGRGRGPGTVPPGPGHSHQRLLPADPDESSYFVIGAVLYRTLGLILPPPRPPLAVTSRVMTVTVRPPTQPPAEPLITVELSYIINGTTDPHCASWDYSRADASSGDWDTENCQTLETQAAHTRCQCQHLSTFAVLAQPPKDLTLELAGSPSVPLVIGCAVSCMALLTLLAIYAAFWRFIKSERSIILLNFCLSILASNILILVGQSRVLSKGVCTMTAAFLHFFFLSSFCWVLTEAWQSYLAVIGRMRTRLVRKRFLCLGWGLPALVVAVSVGFTRTKGYGTSSYCWLSLEGGLLYAFVGPAAVIVLVNMLIGIIVFNKLMARDGISDKSKKQRAGASLWSSCVVLPLLALTWMSAVLAMTDRRSVLFQALFAVFNSAQGFVITAVHCFLRREVQDVVKCQMGVCRADESEDSPDSCKNGQLQILSDFEKDVDLACQTVLFKEVNTCNPSTITGTLSRLSLDEDEEPKSCLVGPEGSLSFSPLPGNILVPMAASPGLGEPPPPQEANPVYMCGEGGLRQLDLTWLRPTEPGSEGDYMVLPRRTLSLQPGGGGGGGEDAPRARPEGTPRRAAKTVAHTEGYPSFLSVDHSGLGLGPAYGSLQNPYGMTFQPPPPTPSARQVPEPGERSRTMPRTVPGSTMKMGSLERKKLRYSDLDFEKVMHTRKRHSELYHELNQKFHTFDRYRSQSTAKDKPSPGERPSLSQHRRHQSWSTFKSMTLGSLPPKPRERLTLHRAAAWEPTEPPDGDFQTEV

SEQ ID NO: 426 - protein, 906 aa, Homo Sapiens
MEKLLRLCCWYSWLLLFYYNFQVRGVYSRSQDHPGFQVLASASHYWPLENVDGIHELQDTTGASRTHKLTVLPSRNATFVYSNDSAYSNLSATVDIVEGKVNKGIYLKEEKGVTLLYYGRYNSSCISKPEQCGPEGVTFSFFWKTQGEQSRPIPSAYGGQVISNGFKVCSSGGRGSVELYTRDNSMTWEASFSPPGPYWTHVLFTWKSKEGLKVYVNGTLSTSDPSGKVSRDYGESNVNLVIGSEQDQAKCYENGAFDEFIIWERALTPDEIAMYFTAAIGKHALLSSTLPSLFMTSTASPVMPTDAYHPIITNLTEERKTFQSPGVILSYLQNVSLSLPSKSLSEQTALNLTKTFLKAVGEILLLPGWIALSEDSAVVLSLIDTIDTVMGHVSSNLHGSTPQVTVEGSSAMAEFSVAKILPKTVNSSHYRFPAHGQSFIQIPHEAFHRHAWSTVVGLLYHSMHYYLNNIWPAHTKIAEAMHHQDCLLFATSHLISLEVSPPPTLSQNLSGSPLITVHLKHRLTRKQHSEATNSSNRVFVYCAFLDFSSGEGVWSNHGCALTRGNLTYSVCRCTHLTNFAILMQVVPLELARGHQVALSSISYVGCSLSVLCLVATLVTFAVLSSVSTIRNQRYHIHANLSFAVLVAQVLLLISFRLEPGTTPCQVMAVLLHYFFLSAFAWMLVEGLHLYSMVIKVFGSEDSKHRYYYGMGWGFPLLICIISLSFAMDSYGTSNNCWLSLASGAIWAFVAPALFVIVVNIGILIAVTRVISQISADNYKIHGDPSAFKLTAKAVAVLLPILGTSWVFGVLAVNGCAVVFQYMFATLNSLQGLFIFLFHCLLNSEVRAAFKHKTKVWSLTSSSARTSNAKPFHSDLMNGTRPGMASTKLSPWDKSSHSAHRVDLSAV

SEQ ID NO: 427 - protein, 221 aa, Homo Sapiens
MEKLLRLCCWYSWLLLFYYNFQVRGVYSRSQDHPGFQVLASASHYWPLENVDGIHELQDTTGDIVEGKVNKGIYLKEEKGVTLLYYGRYNSSCISKPEQCGPEGPYWTHVLFTWKSKEGLKVYVNGTLSTSDPSGKVSRDYGESNVNLVIGSEQDQAKCYENGAFDEFIIWERALTPDEIAMYFTAAIGKHALLSSTLPSLFMTSTASPVMPTDAYHPIIT

SEQ ID NO: 428 - protein, 874 aa, Homo Sapiens
MEKLLRLCCWYSWLLLFYYNFQVRGVYSRSQDHPGFQVLASASHYWPLENVDGIHELQDTTGDIVEGKVNKGIYLKEEKGVTLLYYGRYNSSCISKPEQCGPEGVTFSFFWKTQGEQSRPIPSAYGGQVISNGFKVCSSGGRGSVELYTRDNSMTWEASFSPPGPYWTHVLFTWKSKEGLKVYVNGTLSTSDPSGKVSRDYGESNVNLVIGSEQDQAKCYENGAFDEFIIWERALTPDEIAMYFTAAIGKHALLSSTLPSLFMTSTASPVMPTDAYHPIITNLTEERKTFQSPGVILSYLQNVSLSLPSKSLSEQTALNLTKTFLKAVGEILLLPGWIALSEDSAVVLSLIDTIDTVMGHVSSNLHGSTPQVTVEGSSAMAEFSVAKILPKTVNSSHYRFPAHGQSFIQIPHEAFHRHAWSTVVGLLYHSMHYYLNNIWPAHTKIAEAMHHQDCLLFATSHLISLEVSPPPTLSQNLSGSPLITVHLKHRLTRKQHSEATNSSNRVFVYCAFLDFSSGEGVWSNHGCALTRGNLTYSVCRCTHLTNFAILMQVVPLELARGHQVALSSISYVGCSLSVLCLVATLVTFAVLSSVSTIRNQRYHIHANLSFAVLVAQVLLLISFRLEPGTTPCQVMAVLLHYFFLSAFAWMLVEGLHLYSMVIKVFGSEDSKHRYYYGMGWGFPLLICIISLSFAMDSYGTSNNCWLSLASGAIWAFVAPALFVIVVNIGILIAVTRVISQISADNYKIHGDPSAFKLTAKAVAVLLPILGTSWVFGVLAVNGCAVVFQYMFATLNSLQGLFIFLFHCLLNSEVRAAFKHKTKVWSLTSSSARTSNAKPFHSDLMNGTRPGMASTKLSPWDKSSHSAHRVDLSAV

SEQ ID NO: 429 - protein, 393 aa, Homo Sapiens
MHRVCFLSFQTRKQHSEATNSSNRVFVYCAFLDFSSGEGVWSNHGCALTRGNLTYSVCRCTHLTNFAILMQVVPLELARGHQVALSSISYVGCSLSVLCLVATLVTFAVLSSVSTIRNQRYHIHANLSFAVLVAQVLLLISFRLEPGTTPCQVMAVLLHYFFLSAFAWMLVEGLHLYSMVIKVFGSEDSKHRYYYGMGWGFPLLICIISLSFAMDSYGTSNNCWLSLASGAIWAFVAPALFVIVVNIGILIAVTRVISQISADNYKIHGDPSAFKLTAKAVAVLLPILGTSWVFGVLAVNGCAVVFQYMFATLNSLQGLFIFLFHCLLNSEVRAAFKHKTKVWSLTSSSARTSNAKPFHSDLMNGTRPGMASTKLSPWDKSSHSAHRVDLSAV

SEQ ID NO: 430 - protein, 345 aa, Homo Sapiens
MQVVPLELARGHQVALSSISYVGCSLSVLCLVATLVTFAVLSSVSTIRNQRYHIHANLSFAVLVAQVLLLISFRLEPGTTPCQVMAVLLHYFFLSAFAWMLVEGLHLYSMVIKVFGSEDSKHRYYYGMGWGFPLLICIISLSFAMDSYGTSNNCWLSLASGAIWAFVAPALFVIVVNIGILIAVTRVISQISADNYKIHGDPSAFKLTAKAVAVLLPILGTSWVFGVLAVNGCAVVFQYMFATLNSLQGLFIFLFHCLLNSEARWAKEGRAESLSRMVAGQKGCMITKPSDPLIATPSDPLQGLRWIPVAGRQCSHGSPPAHPPACPPRICLFASLSHSPRDIHC

SEQ ID NO: 431 - protein, 156 aa, Homo Sapiens
MQVVPLEVNIGILIAVTRVISQISADNYKIHGDPSAFKLTAKAVAVLLPILGTSWVFGVLAVNGCAVVFQYMFATLNSLQGLFIFLFHCLLNSEVRAAFKHKTKVWSLTSSSARTSNAKPFHSDLMNGTRPGMASTKLSPWDKSSHSAHRVDLSAV

SEQ ID NO: 432 - protein, 437 aa, Homo Sapiens
MNSMDIRCSDIIQGDTQGPSAIAFISYSSLGNIINATFFEEMDKKDQVYLNSQVVSAAIGPKRNVSLSKSVTLTFQHVKMTPSTKKVFCVYWKSTGQGSQWSRDGCFLIHVNKSHTMCNCSHLSSFAVLMALTSQEEDPVLTVITYVGLSVSLLCLLLAALTFLLCKAIRNTSTSLHLQLSLCLFLAHLLFLVGIDRTEPKVLCSIIAGALHYLYLAAFTWMLLEGVHLFLTARNLTVVNYSSINRLMKWIMFPVGYGVPAVTVAISAASWPHLYGTADRCWLHLDQGFMWSFLGPVCAIFSANLVLFILVFWILKRKLSSLNSEVSTIQNTRMLAFKATAQLFILGCTWCLGLLQVGPAAQVMAYLFTIINSLQGFFIFLVYCLLSQQVQKQYQKWFREIVKSKSESETYTLSSKMGPDSKPSEGDVFPGQVKRKY

SEQ ID NO: 433 - protein, 57 aa, Homo Sapiens
MQGPLLLPGLCFLLSLFGAVTQKTKSECSEPEQRTCGPRAGPGATHGLQWAGEKCLF

SEQ ID NO: 434 - protein, 526 aa, Homo Sapiens
MQGPLLLPGLCFLLSLFGAVTQKTKTSCAKCPPNASCVNNTHCTCNHGYTSGSGQKLFTFPLETCNAIETQAITDNCSEERKTFNLNVQMNSMDIRCSDIIQGDTQGPSAIAFISYSSLGNIINATFFEEMDKKDQVYLNSQVVSAAIGPKRNVSLSKSVTLTFQHVKMTPSTKKVFCVYWKSTGQGSQWSRDGCFLIHVNKSHTMCNCSHLSSFAVLMALTSQEEDPVLTVITYVGLSVSLLCLLLAALTFLLCKAIRNTSTSLHLQLSLCLFLAHLLFLVGIDRTEPKVLCSIIAGALHYLYLAAFTWMLLEGVHLFLTARNLTVVNYSSINRLMKWIMFPVGYGVPAVTVAISAASWPHLYGTADRCWLHLDQGFMWSFLGPVCAIFSANLVLFILVFWILKRKLSSLNSEVSTIQNTRMLAFKATAQLFILGCTWCLGLLQVGPAAQVMAYLFTIINSLQGFFIFLVYCLLSQQVQKQYQKWFREIVKSKSESETYTLSSKMGPDSKPSEGDVFPGQVKRKY

SEQ ID NO: 435 - protein, 652 aa, Homo Sapiens
MQGPLLLPGLCFLLSLFGAVTQKTKTSCAKCPPNASCVNNTHCTCNHGYTSGSGQKLFTFPLETCNDINECTPPYSVYCGFNAVCYNVEGSFYCQCVPGYRLHSGNEQFSNSNENTCQDTTSSKTTEGRKELQKIVDKFESLLTNQTLWRTEGRQEISSTATTILRDVESKVLETALKDPEQKVLKIQNDSVAIETQAITDNCSEERKTFNLNVQMNSMDIRCSDIIQGDTQGPSAIAFISYSSLGNIINATFFEEMDKKDQVYLNSQVVSAAIGPKRNVSLSKSVTLTFQHVKMTPSTKKVFCVYWKSTGQGSQWSRDGCFLIHVNKSHTMCNCSHLSSFAVLMALTSQEEDPVLTVITYVGLSVSLLCLLLAALTFLLCKAIRNTSTSLHLQLSLCLFLAHLLFLVGIDRTEPKVLCSIIAGALHYLYLAAFTWMLLEGVHLFLTARNLTVVNYSSINRLMKWIMFPVGYGVPAVTVAISAASWPHLYGTADRCWLHLDQGFMWSFLGPVCAIFSANLVLFILVFWILKRKLSSLNSEVSTIQNTRMLAFKATAQLFILGCTWCLGLLQVGPAAQVMAYLFTIINSLQGFFIFLVYCLLSQQVQKQYQKWFREIVKSKSESETYTLSSKMGPDSKPSEGDVFPGQVKRKY

SEQ ID NO: 436 - protein, 600 aa, Homo Sapiens
MQGPLLLPGLCFLLSLFGAVTQKTKTSCAKCPPNASCVNNTHCTCNHGYTSGSGQKLFTFPLETCNDTTSSKTTEGRKELQKIVDKFESLLTNQTLWRTEGRQEISSTATTILRDVESKVLETALKDPEQKVLKIQNDSVAIETQAITDNCSEERKTFNLNVQMNSMDIRCSDIIQGDTQGPSAIAFISYSSLGNIINATFFEEMDKKDQVYLNSQVVSAAIGPKRNVSLSKSVTLTFQHVKMTPSTKKVFCVYWKSTGQGSQWSRDGCFLIHVNKSHTMCNCSHLSSFAVLMALTSQEEDPVLTVITYVGLSVSLLCLLLAALTFLLCKAIRNTSTSLHLQLSLCLFLAHLLFLVGIDRTEPKVLCSIIAGALHYLYLAAFTWMLLEGVHLFLTARNLTVVNYSSINRLMKWIMFPVGYGVPAVTVAISAASWPHLYGTADRCWLHLDQGFMWSFLGPVCAIFSANLVLFILVFWILKRKLSSLNSEVSTIQNTRMLAFKATAQLFILGCTWCLGLLQVGPAAQVMAYLFTIINSLQGFFIFLVYCLLSQQVQKQYQKWFREIVKSKSESETYTLSSKMGPDSKPSEGDVFPGQVKRKY

SEQ ID NO: 437 - protein, 786 aa, Homo Sapiens
MGGRVFLAFCVWLTLPGAETQDSRGCARWCPQNSSCVNATACRCNPGFSSFSEIITTPTETCDDINECATPSKVSCGKFSDCWNTEGSYDCVCSPGYEPVSGAKTFKNESENTCQDVDECQQNPRLCKSYGTCVNTLGSYTCQCLPGFKFIPEDPKVCTDVDECSSGQHQCDSSTVCFNTVGSYSCRCRPGWKPRHGIPNNQKDTVCEDMTFSTWTPPPGVHSQTLSRFFDKVQDLGRDSKTSSAEVTIQNVIKLVDELMEAPGDVEALAPPVRHLIATQLLSNLEDIMRILAKSLPKGPFTYISPSNTELTLMIQERGDKNVTMGQSSARMKLNWAVAAGAEDPGPAVAGILSIQNMTTLLANASLNLHSKKQAELEEIYESSIRGVQLRRLSAVNSIFLSHNNTKELNSPILFAFSHLESSDGEAGRDPPAKDVMPGPRQELLCAFWKSDSDRGGHWATEGCQVLGSKNGSTTCQCSHLSSFAILMAHYDVEDWKLTLITRVGLALSLFCLLLCILTFLLVRPIQGSRTTIHLHLCICLFVGSTIFLAGIENEGGQVGLRCRLVAGLLHYCFLAAFCWMSLEGLELYFLVVRVFQGQGLSTRWLCLIGYGVPLLIVGVSAAIYSKGYGRPRYCWLDFEQGFLWSFLGPVTFIILCNAVIFVTTVWKLTQKFSEINPDMKKLKKARALTITAIAQLFLLGCTWVFGLFIFDDRSLVLTYVFTILNCLQGAFLYLLHCLLNKKVREEYRKWACLVAGGSKYSEFTSTTSGTGHNQTRALRASESGI

SEQ ID NO: 438 - protein, 835 aa, Homo Sapiens
MGGRVFLAFCVWLTLPGAETQDSRGCARWCPQNSSCVNATACRCNPGFSSFSEIITTPTETCDDINECATPSKVSCGKFSDCWNTEGSYDCVCSPGYEPVSGAKTFKNESENTCQDVDECQQNPRLCKSYGTCVNTLGSYTCQCLPGFKFIPEDPKVCTDVNECTSGQNPCHSSTHCLNNVGSYQCRCRPGWQPIPGSPNGPNNTVCEDVDECSSGQHQCDSSTVCFNTVGSYSCRCRPGWKPRHGIPNNQKDTVCEDMTFSTWTPPPGVHSQTLSRFFDKVQDLGRDSKTSSAEVTIQNVIKLVDELMEAPGDVEALAPPVRHLIATQLLSNLEDIMRILAKSLPKGPFTYISPSNTELTLMIQERGDKNVTMGQSSARMKLNWAVAAGAEDPGPAVAGILSIQNMTTLLANASLNLHSKKQAELEEIYESSIRGVQLRRLSAVNSIFLSHNNTKELNSPILFAFSHLESSDGEAGRDPPAKDVMPGPRQELLCAFWKSDSDRGGHWATEGCQVLGSKNGSTTCQCSHLSSFAILMAHYDVEDWKLTLITRVGLALSLFCLLLCILTFLLVRPIQGSRTTIHLHLCICLFVGSTIFLAGIENEGGQVGLRCRLVAGLLHYCFLAAFCWMSLEGLELYFLVVRVFQGQGLSTRWLCLIGYGVPLLIVGVSAAIYSKGYGRPRYCWLDFEQGFLWSFLGPVTFIILCNAVIFVTTVWKLTQKFSEINPDMKKLKKARALTITAIAQLFLLGCTWVFGLFIFDDRSLVLTYVFTILNCLQGAFLYLLHCLLNKKVREEYRKWACLVAGGSKYSEFTSTTSGTGHNQTRALRASESGI

SEQ ID NO: 439 - protein, 742 aa, Homo Sapiens
MGGRVFLAFCVWLTLPGAETQDSRGCARWCPQNSSCVNATACRCNPGFSSFSEIITTPTETCDDINECATPSKVSCGKFSDCWNTEGSYDCVCSPGYEPVSGAKTFKNESENTCQDVDECSSGQHQCDSSTVCFNTVGSYSCRCRPGWKPRHGIPNNQKDTVCEDMTFSTWTPPPGVHSQTLSRFFDKVQDLGRDSKTSSAEVTIQNVIKLVDELMEAPGDVEALAPPVRHLIATQLLSNLEDIMRILAKSLPKGPFTYISPSNTELTLMIQERGDKNVTMGQSSARMKLNWAVAAGAEDPGPAVAGILSIQNMTTLLANASLNLHSKKQAELEEIYESSIRGVQLRRLSAVNSIFLSHNNTKELNSPILFAFSHLESSDGEAGRDPPAKDVMPGPRQELLCAFWKSDSDRGGHWATEGCQVLGSKNGSTTCQCSHLSSFAILMAHYDVEDWKLTLITRVGLALSLFCLLLCILTFLLVRPIQGSRTTIHLHLCICLFVGSTIFLAGIENEGGQVGLRCRLVAGLLHYCFLAAFCWMSLEGLELYFLVVRVFQGQGLSTRWLCLIGYGVPLLIVGVSAAIYSKGYGRPRYCWLDFEQGFLWSFLGPVTFIILCNAVIFVTTVWKLTQKFSEINPDMKKLKKARALTITAIAQLFLLGCTWVFGLFIFDDRSLVLTYVFTILNCLQGAFLYLLHCLLNKKVREEYRKWACLVAGGSKYSEFTSTTSGTGHNQTRALRASESGI

SEQ ID NO: 440 - protein, 164 aa, Homo Sapiens
MGGRVFLAFCVWLTLPGAETQDSRGCARWCPQNSSCVNATACRCNPGFSSFSEIITTPTETCDDINECATPSKVSCGKFSDCWNTEGSYDCVCSPGYEPVSGAKTFKNESENTCQDVNECTSGQNPCHSSTHCLNNVGSYQCRCRPGWQPIPGSPNGPNNTVCE

SEQ ID NO: 441 - protein, 154 aa, Homo Sapiens
MGGRVFLAFCVWLTLPGAETQDSRGCARWCPQNSSCVNATACRCNPGFSSFSEIITTPTETCDDINECATPSKVSCGKFSDCWNTEGSYDCVCSPGYEPVSGAKTFKNESENTCQGKNHPTSSDFPSMRFGVTRAILAASREQGLGCRVSAWRL

SEQ ID NO: 442 - protein, 157 aa, Homo Sapiens [sequence omitted]

SEQ ID NO: 443 - protein, 160 aa, Homo Sapiens
EYQLLLQVTYRDSKEKRDLRNFLKLLKPPLLWSHGLIRIIRAKATTDCNSLNGVLQCTCEDSYTWFPPSCLDPQNCYLHTAGALPSCECHLNNLSQSVNFCERTKIWGTFKINERFTNDLLNSSSAIYSKYANGIEIQLKKAYERIQGFESVQVTQFRPV

SEQ ID NO: 444 - protein, 713 aa, Homo Sapiens
MDISIQRNGSIVAGYEVVGSSSASELLSAIEHVAEKAKTALHKLFPLEDGSFRVFGKAQCNDIVFGFGSKDDEYTLPCSSGYRGNITAKCESSGWQVIRETCVLSLLEELNKNFSMIVGNATEAAVSSFVQNLSVIIRQNPSTTVGNLASVVSILSNISSLSLASHFRVSNSTMEDVISIADNILNSASVTNWTVLLREEKYASSRLLETLENISTLVPPTALPLNFSRKFIDWKGIPVNKSQLKRGYSYQIKMCPQNTSIPIRGRVLIGSDQFQRSLPETIISMASLTLGNILPVSKNGNAQVNGPVISTVIQNYSINEVFLFFSKIESNLSQPHCVFWDFSHLQWNDAGCHLVNETQDIVTCQCTHLTSFSILMSPFVPSTIFPVVKWITYVGLGISIGSLILCLIIEALFWKQIKKSQTSHTRRICMVNIALSLLIADVWFIVGATVDTTVNPSGVCTAAVFFTHFFYLSLFFWMLMLGILLAYRIILVFHHMAQHLMMAVGFCLGYGCPLIISVITIAVTQPSNTYKRKDVCWLNWSNGSKPLLAFVVPALAIVAVNFVVVLLVLTKLWRPTVGERLSRDDKATIIRVGKSLLILTPLLGLTWGFGIGTIVDSQNLAWHVIFALLNAFQGFFILCFGILLDSKLRQLLFNKLSALSSWKQTEKQNSSDLSAKPKFSKPFNPLQNKGHYAFSHTGDSSDNIMLTQFVSNE

SEQ ID NO: 445 - protein, 218 aa, Homo Sapiens
MKVGVLWLISFFTFTDGHGGFLGKNDGIKTKKELIVNKKKHLGPVEEYQLLLQVTYRDSKEKRDLRNFLKLLKPPLLWSHGLIRIIRAKATTDCNSLNGVLQCTCEDSYTWFPPSCLDPQNCYLHTAGALPSCECHLNNLSQSVNFCERTKIWGTFKINERFTNDLLNSSSAIYSKYANGIEIQLKKAYERIQGFESVQVTQFRMSLLSPKLECNGTI

SEQ ID NO: 446 - protein, 910 aa, Homo Sapiens
MKVGVLWLISFFTFTDGHGGFLGKNDGIKTKKELIVNKKKHLGPVEEYQLLLQVTYRDSKEKRDLRNFLKLLKPPLLWSHGLIRIIRAKATTDCNSLNGVLQCTCEDSYTWFPPSCLDPQNCYLHTAGALPSCECHLNNLSQSVNFCERTKIWGTFKINERFTNDLLNSSSAIYSKYANGIEIQLKKAYERIQGFESVQVTQFRNGSIVAGYEVVGSSSASELLSAIEHVAEKAKTALHKLFPLEDGSFRVFGKAQCNDIVFGFGSKDDEYTLPCSSGYRGNITAKCESSGWQVIRETCVLSLLEELNKNFSMIVGNATEAAVSSFVQNLSVIIRQNPSTTVGNLASVVSILSNISSLSLASHFRVSNSTMEDVISIADNILNSASVTNWTVLLREEKYASSRLLETLENISTLVPPTALPLNFSRKFIDWKGIPVNKSQLKRGYSYQIKMCPQNTSIPIRGRVLIGSDQFQRSLPETIISMASLTLGNILPVSKNGNAQVNGPVISTVIQNYSINEVFLFFSKIESNLSQPHCVFWDFSHLQWNDAGCHLVNETQDIVTCQCTHLTSFSILMSPFVPSTIFPVVKWITYVGLGISIGSLILCLIIEALFWKQIKKSQTSHTRRICMVNIALSLLIADVWFIVGATVDTTVNPSGVCTAAVFFTHFFYLSLFFWMLMLGILLAYRIILVFHHMAQHLMMAVGFCLGYGCPLIISVITIAVTQPSNTYKRKDVCWLNWSNGSKPLLAFVVPALAIVAVNFVVVLLVLTKLWRPTVGERLSRDDKATIIRVGKSLLILTPLLGLTWGFGIGTIVDSQNLAWHVIFALLNAFQGFFILCFGILLDSKLRQLLFNKLSALSSWKQTEKQNSSDLSAKPKFSKPFNPLQNKGHYAFSHTGDSSDNIMLTQFVSNE

SEQ ID NO: 447 - protein, 137 aa, Homo Sapiens
  misc_feature (1)..(1): Xaa can be any naturally occurring amino acid
XWSHGLIRIIRAKATTDCNSLNGVLQCTCEDSYTWFPPSCLDPQNCYLHTAGALPSCECHLNNLSQSVNFCERTKIWGTFKINERFTNDLLNSSSAIYSKYANGIEIQLKKAYERIQGFESVQVTQFRTVIHLWNLV

SEQ ID NO: 448 - protein, 6 aa, Homo Sapiens
MTPQSL

SEQ ID NO: 449 - protein, 95 aa, Homo Sapiens
MTPQSLLQTTLFLLSLLFLVQAHPASRSFPDPRGLYHFCLYWNRHAGRLHLLYGKRDFLLSDKASSLLCFQHQEESLAQGPPLLATSVTSWWSPQ

SEQ ID NO: 450 - protein, 125 aa, Homo Sapiens
MTPQSLLQTTLFLLSLLFLVQAHPASRSFPDPRGLYHFCLYWNRHAGRLHLLYGKRDFLLSDKASSLLCFQHQEESLAQGPPLLATSVTSWWSPQNISLPSAASFTFSFHSPPHTAAHNASVDMC

SEQ ID NO: 451 - protein, 90 aa, Homo Sapiens
MTPQSLLQTTLFLLSLLFLVQAPATGSHLQPLPPQVPTAGATGKTFASAASGTRHTGAASTTNPHQTCASPSRTPKRPSQSMPLSLQPTL

SEQ ID NO: 452 - protein, 118 aa, Homo Sapiens
MTPQSLLQTTLFLLSLLFLVQAPATGSHLQPLPPQVPTAGATGKTFASAASGTRHTGAASTTNPHQTCASPSRTPKRPSQSMPLSLQPTLLPDPSLTPGASTTSASTGTDMLGDYIFS

SEQ ID NO: 453 - protein, 91 aa, Homo Sapiens
MTPQSLLQTTLFLLSLLFLVQASASSGAHGRGHREDFRFCSQRNQTHRSSLHYKPTPDLRISIENSEEALTVHAPFPAAHPASRSFPDPRG

SEQ ID NO: 454 - protein, 98 aa, Homo Sapiens
MTPQSLLQTTLFLLSLLFLVQASASSGAHGRGHREDFRFCSQRNQTHRSSLHYKPTPDLRISIENSEEALTVHAPFPAAHPASRSFPDPRGLYHFCLY

SEQ ID NO: 455 - protein, 103 aa, Homo Sapiens
MTPQSLLQTTLFLLSLLFLVQASASSGAHGRGHREDFRFCSQRNQTHRSSLHYKPTPDLRISIENSEEALTVHAPFPAAHPASRSFPDPRGLYHFCLYWNRHA

SEQ ID NO: 456 - protein, 114 aa, Homo Sapiens
MTPQSLLQTTLFLLSLLFLVQASASSGAHGRGHREDFRFCSQRNQTHRSSLHYKPTPDLRISIENSEEALTVHAPFPAAHPASRSFPDPRGLYHFCLYWNRHAGRLHLLYGKRD

SEQ ID NO: 457 - protein, 118 aa, Homo Sapiens
MTPQSLLQTTLFLLSLLFLVQASASSGAHGRGHREDFRFCSQRNQTHRSSLHYKPTPDLRISIENSEEALTVHAPFPAAHPASRSFPDPRGLYHFCLYWNRHAGRLHLLYGKRDFLLS

SEQ ID NO: 458 - protein, 118 aa, Homo Sapiens; identical to SEQ ID NO: 457

SEQ ID NO: 459 - protein, 125 aa, Homo Sapiens
MTPQSLLQTTLFLLSLLFLVQASASSGAHGRGHREDFRFCSQRNQTHRSSLHYKPTPDLRISIENSEEALTVHAPFPAAHPASRSFPDPRGLYHFCLYWNRHAGRLHLLYGKRDFLLSDKASSLL

SEQ ID NO: 460 - protein, 145 aa, Homo Sapiens
MTPQSLLQTTLFLLSLLFLVQASASSGAHGRGHREDFRFCSQRNQTHRSSLHYKPTPDLRISIENSEEALTVHAPFPAAHPASRSFPDPRGLYHFCLYWNRHAGRLHLLYGKRDFLLSDKASSLLCFQHQEESLAQGPPLLATSV

SEQ ID NO: 461 - protein, 146 aa, Homo Sapiens
MTPQSLLQTTLFLLSLLFLVQASASSGAHGRGHREDFRFCSQRNQTHRSSLHYKPTPDLRISIENSEEALTVHAPFPAAHPASRSFPDPRGLYHFCLYWNRHAGRLHLLYGKRDFLLSDKASSLLCFQHQEESLAQGPPLLATSVT

SEQ ID NO: 462 - protein, 164 aa, Homo Sapiens
MTPQSLLQTTLFLLSLLFLVQASASSGAHGRGHREDFRFCSQRNQTHRSSLHYKPTPDLRISIENSEEALTVHAPFPAAHPASRSFPDPRGLYHFCLYWNRHAGRLHLLYGKRDFLLSDKASSLLCFQHQEESLAQGPPLLATSVTSWWSPQNISLPSAASFTF

SEQ ID NO: 463 - protein, 168 aa, Homo Sapiens
MTPQSLLQTTLFLLSLLFLVQASASSGAHGRGHREDFRFCSQRNQTHRSSLHYKPTPDLRISIENSEEALTVHAPFPAAHPASRSFPDPRGLYHFCLYWNRHAGRLHLLYGKRDFLLSDKASSLLCFQHQEESLAQGPPLLATSVTSWWSPQNISLPSAASFTFSFHS

SEQ ID NO: 464 - protein, 198 aa, Homo Sapiens
MTPQSLLQTTLFLLSLLFLVQASASSGAHGRGHREDFRFCSQRNQTHRSSLHYKPTPDLRISIENSEEALTVHAPFPAAHPASRSFPDPRGLYHFCLYWNRHAGRLHLLYGKRDFLLSDKASSLLCFQHQEESLAQGPPLLATSVTSWWSPQNISLPSAASFTFSFHSPPHTAAHNASVDMCELKRDLQLLSQFLKHP

SEQ ID NO: 465 - protein, 692 aa, Homo Sapiens
MTPQSLLQTTLFLLSLLFLVQASASSGAHGRGHREDFRFCSQRNQTHRSSLHYKPTPDLRISIENSEEALTVHAPFPAAHPASRSFPDPRGLYHFCLYWNRHAGRLHLLYGKRDFLLSDKASSLLCFQHQEESLAQGPPLLATSVTSWWSPQNISLPSAASFTFSFHSPPHTAAHNASVDMCELKRDLQLLSQFLKHPQKASRRPSAAPASQQLQSLESKLTSVRFMGDMVSFEEDRINATVWKLQPTAGLQDLHIHSRQEEEQSEIMEYSVLLPRTLFQRTKGRSGEAEKRLLLVDFSSQALFQDKNSSQVLGEKVLGIVVQNTKVANLTEPVVLTFQHQLQPKNVTLQCVFWVEDPTLSSPGHWSSAGCETVRRETQTSCFCNHLTYFAVLMVSSVEVDAVHKHYLSLLSYVGCVVSALACLVTIAAYLCSRRKPRDYTIKVHMNLLLAVFLLDTSFLLSEPVALTGSEAGCRASAIFLHFSLLTCLSWMGLEGYNLYRLVVEVFGTYVPGYLLKLSAMGWGFPIFLVTLVALVDVDNYGPIILAVHRTPEGVIYPSMCWIRDSLVSYITNLGLFSLVFLFNMAMLATMVVQILRLRPHTQKWSHVLTLLGLSLVLGLPWALIFFSFASGTFQLVVLYLFSIITSFQGFLIFIWYWSMRLQARGGPSPLKSNSDSARLPISSGSTSSSRI

SEQ ID NO: 466 - protein, 97 aa, Homo Sapiens
MTPQSLLQTTLFLLSLLFLVQASGTRHTGAASTTNPHQTCASPSRTPKRPSQSMPLSLQPTLLPDPSLTPGASTTSASTGTDMLGDYIFSMASVTSC

SEQ ID NO: 467 - protein, 97 aa, Homo Sapiens; identical to SEQ ID NO: 466

SEQ ID NO: 468 - protein, 97 aa, Homo Sapiens; identical to SEQ ID NO: 466

SEQ ID NO: 469 - protein, 68 aa, Homo Sapiens
MTPQSLLQTTLFLLSLLFLVQASSLLCFQHQEESLAQGPPLLATSVTSWWSPQNISLPSAASFTFSFH

SEQ ID NO: 470 - protein, 42 aa, Homo Sapiens
MTPQSLLQTTLFLLSLLFLVQGAHGRGHREDFRFCSQRNQTH

SEQ ID NO: 471 - protein, 50 aa, Homo Sapiens
MTPQSLLQTTLFLLSLLFLVQGAHGRGHREDFRFCSQRNQTHRSSLHYKP

SEQ ID NO: 472 - protein, 55 aa, Homo Sapiens
MTPQSLLQTTLFLLSLLFLVQGAHGRGHREDFRFCSQRNQTHRSSLHYKPTPDLR

SEQ ID NO: 473 - protein, 56 aa, Homo Sapiens
MTPQSLLQTTLFLLSLLFLVQGAHGRGHREDFRFCSQRNQTHRSSLHYKPTPDLRI

SEQ ID NO: 474 - protein, 70 aa, Homo Sapiens
MTPQSLLQTTLFLLSLLFLVQGAHGRGHREDFRFCSQRNQTHRSSLHYKPTPDLRISIENSEEALTVHAP

SEQ ID NO: 475 - protein, 77 aa, Homo Sapiens
MTPQSLLQTTLFLLSLLFLVQGAHGRGHREDFRFCSQRNQTHRSSLHYKPTPDLRISIENSEEALTVHAPFPAAHPA

SEQ ID NO: 476 - protein, 84 aa, Homo Sapiens
MTPQSLLQTTLFLLSLLFLVQGAHGRGHREDFRFCSQRNQTHRSSLHYKPTPDLRISIENSEEALTVHAPFPAAHPASRSFPDP

SEQ ID NO: 477 - protein, 84 aa, Homo Sapiens; identical to SEQ ID NO: 476

SEQ ID NO: 478 - protein, 94 aa, Homo Sapiens
MTPQSLLQTTLFLLSLLFLVQGAHGRGHREDFRFCSQRNQTHRSSLHYKPTPDLRISIENSEEALTVHAPFPAAHPASRSFPDPRGLYHFCLYW

SEQ ID NO: 479 - protein, 94 aa, Homo Sapiens; identical to SEQ ID NO: 478

SEQ ID NO: 480 - protein, 100 aa, Homo Sapiens
MTPQSLLQTTLFLLSLLFLVQGAHGRGHREDFRFCSQRNQTHRSSLHYKPTPDLRISIENSEEALTVHAPFPAAHPASRSFPDPRGLYHFCLYWNRHAGR

SEQ ID NO: 481 - protein, 107 aa, Homo Sapiens
MTPQSLLQTTLFLLSLLFLVQGAHGRGHREDFRFCSQRNQTHRSSLHYKPTPDLRISIENSEEALTVHAPFPAAHPASRSFPDPRGLYHFCLYWNRHAGRLHLLYGK

SEQ ID NO: 482 - protein, 110 aa, Homo Sapiens
MTPQSLLQTTLFLLSLLFLVQGAHGRGHREDFRFCSQRNQTHRSSLHYKPTPDLRISIENSEEALTVHAPFPAAHPASRSFPDPRGLYHFCLYWNRHAGRLHLLYGKRDF

SEQ ID NO: 483 - protein, 111 aa, Homo Sapiens
MTPQSLLQTTLFLLSLLFLVQGAHGRGHREDFRFCSQRNQTHRSSLHYKPTPDLRISIENSEEALTVHAPFPAAHPASRSFPDPRGLYHFCLYWNRHAGRLHLLYGKRDFL

SEQ ID NO: 484 - protein, 113 aa, Homo Sapiens
MTPQSLLQTTLFLLSLLFLVQGAHGRGHREDFRFCSQRNQTHRSSLHYKPTPDLRISIENSEEALTVHAPFPAAHPASRSFPDPRGLYHFCLYWNRHAGRLHLLYGKRDFLLS

SEQ ID NO: 485 - protein, 116 aa, Homo Sapiens
MTPQSLLQTTLFLLSLLFLVQGAHGRGHREDFRFCSQRNQTHRSSLHYKPTPDLRISIENSEEALTVHAPFPAAHPASRSFPDPRGLYHFCLYWNRHAGRLHLLYGKRDFLLSDKA

SEQ ID NO: 486 - protein, 116 aa, Homo Sapiens; identical to SEQ ID NO: 485

SEQ ID NO: 487 - protein, 119 aa, Homo Sapiens
MTPQSLLQTTLFLLSLLFLVQGAHGRGHREDFRFCSQRNQTHRSSLHYKPTPDLRISIENSEEALTVHAPFPAAHPASRSFPDPRGLYHFCLYWNRHAGRLHLLYGKRDFLLSDKASSL

SEQ ID NO: 488 - protein, 119 aa, Homo Sapiens; identical to SEQ ID NO: 487

SEQ ID NO: 489 - protein, 122 aa, Homo Sapiens
MTPQSLLQTTLFLLSLLFLVQGAHGRGHREDFRFCSQRNQTHRSSLHYKPTPDLRISIENSEEALTVHAPFPAAHPASRSFPDPRGLYHFCLYWNRHAGRLHLLYGKRDFLLSDKASSLLCF

SEQ ID NO: 490 - protein, 131 aa, Homo Sapiens
MTPQSLLQTTLFLLSLLFLVQGAHGRGHREDFRFCSQRNQTHRSSLHYKPTPDLRISIENSEEALTVHAPFPAAHPASRSFPDPRGLYHFCLYWNRHAGRLHLLYGKRDFLLSDKASSLLCFQHQEESLAQ

SEQ ID NO: 491 - protein, 131 aa, Homo Sapiens; identical to SEQ ID NO: 490

SEQ ID NO: 492 - protein, 141 aa, Homo Sapiens
MTPQSLLQTTLFLLSLLFLVQGAHGRGHREDFRFCSQRNQTHRSSLHYKPTPDLRISIENSEEALTVHAPFPAAHPASRSFPDPRGLYHFCLYWNRHAGRLHLLYGKRDFLLSDKASSLLCFQHQEESLAQGPPLLATSVT

SEQ ID NO: 493 - protein, 153 aa, Homo Sapiens
MTPQSLLQTTLFLLSLLFLVQGAHGRGHREDFRFCSQRNQTHRSSLHYKPTPDLRISIENSEEALTVHAPFPAAHPASRSFPDPRGLYHFCLYWNRHAGRLHLLYGKRDFLLSDKASSLLCFQHQEESLAQGPPLLATSVTSWWSPQNISLPS

SEQ ID NO: 494 - protein, 154 aa, Homo Sapiens
MTPQSLLQTTLFLLSLLFLVQGAHGRGHREDFRFCSQRNQTHRSSLHYKPTPDLRISIENSEEALTVHAPFPAAHPASRSFPDPRGLYHFCLYWNRHAGRLHLLYGKRDFLLSDKASSLLCFQHQEESLAQGPPLLATSVTSWWSPQNISLPSA

SEQ ID NO: 495 - protein, 160 aa, Homo Sapiens
MTPQSLLQTTLFLLSLLFLVQGAHGRGHREDFRFCSQRNQTHRSSLHYKPTPDLRISIENSEEALTVHAPFPAAHPASRSFPDPRGLYHFCLYWNRHAGRLHLLYGKRDFLLSDKASSLLCFQHQEESLAQGPPLLATSVTSWWSPQNISLPSAASFTFS

SEQ ID NO: 496 - protein, 162 aa, Homo Sapiens
MTPQSLLQTTLFLLSLLFLVQGAHGRGHREDFRFCSQRNQTHRSSLHYKPTPDLRISIENSEEALTVHAPFPAAHPASRSFPDPRGLYHFCLYWNRHAGRLHLLYGKRDFLLSDKASSLLCFQHQEESLAQGPPLLATSVTSWWSPQNISLPSAASFTFSFH

SEQ ID NO: 497 - protein, 167 aa, Homo Sapiens
MTPQSLLQTTLFLLSLLFLVQGAHGRGHREDFRFCSQRNQTHRSSLHYKPTPDLRISIENSEEALTVHAPFPAAHPASRSFPDPRGLYHFCLYWNRHAGRLHLLYGKRDFLLSDKASSLLCFQHQEESLAQGPPLLATSVTSWWSPQNISLPSAASFTFSFHSPPHT

SEQ ID NO: 498 - protein, 167 aa, Homo Sapiens; identical to SEQ ID NO: 497

SEQ ID NO: 499 - protein, 199 aa, Homo Sapiens
MTPQSLLQTTLFLLSLLFLVQGAHGRGHREDFRFCSQRNQTHRSSLHYKPTPDLRISIENSEEALTVHAPFPAAHPASRSFPDPRGLYHFCLYWNRHAGRLHLLYGKRDFLLSDKASSLLCFQHQEESLAQGPPLLATSVTSWWSPQNISLPSAASFTFSFHSPPHTAAHNASVDMCELKRDLQLLSQFLKHPQKASRR

SEQ ID NO: 500 - protein, 687 aa, Homo Sapiens
MTPQSLLQTTLFLLSLLFLVQGAHGRGHREDFRFCSQRNQTHRSSLHYKPTPDLRISIENSEEALTVHAPFPAAHPASRSFPDPRGLYHFCLYWNRHAGRLHLLYGKRDFLLSDKASSLLCFQHQEESLAQGPPLLATSVTSWWSPQNISLPSAASFTFSFHSPPHTAAHNASVDMCELKRDLQLLSQFLKHPQKASRRPSAAPASQQLQSLESKLTSVRFMGDMVSFEEDRINATVWKLQPTAGLQDLHIHSRQEEEQSEIMEYSVLLPRTLFQRTKGRSGEAEKRLLLVDFSSQALFQDKNSSQVLGEKVLGIVVQNTKVANLTEPVVLTFQHQLQPKNVTLQCVFWVEDPTLSSPGHWSSAGCETVRRETQTSCFCNHLTYFAVLMVSSVEVDAVHKHYLSLLSYVGCVVSALACLVTIAAYLCSRRKPRDYTIKVHMNLLLAVFLLDTSFLLSEPVALTGSEAGCRASAIFLHFSLLTCLSWMGLEGYNLYRLVVEVFGTYVPGYLLKLSAMGWGFPIFLVTLVALVDVDNYGPIILAVHRTPEGVIYPSMCWIRDSLVSYITNLGLFSLVFLFNMAMLATMVVQILRLRPHTQKWSHVLTLLGLSLVLGLPWALIFFSFASGTFQLVVLYLFSIITSFQGFLIFIWYWSMRLQARGGPSPLKSNSDSARLPISSGSTSSSRI

SEQ ID NO: 501 - protein, 687 aa, Homo Sapiens; identical to SEQ ID NO: 500

SEQ ID NO: 502 - protein, 687 aa, Homo Sapiens; identical to SEQ ID NO: 500

SEQ ID NO: 503 - protein, 687 aa, Homo Sapiens; identical to SEQ ID NO: 500

SEQ ID NO: 504 - protein, 693 aa, Homo Sapiens
MTPQSLLQTTLFLLSLLFLVQGAHGRGHREDFRFCSQRNQTHRSSLHYKPTPDLRISIENSEEALTVHAPFPAAHPASRSFPDPRGLYHFCLYWNRHAGRLHLLYGKRDFLLSDKASSLLCFQHQEESLAQGPPLLATSVTSWWSPQNISLPSAASFTFSFHSPPHTAAHNASVDMCELKRDLQLLSQFLKHPQKASRRPSAAPASQQLQSLESKLTSVRFMGDMVSFEEDRINATVWKLQPTAGLQDLHIHSRQEEEQSEIMEYSVLLPRTLFQRTKGRSGEAEKRLLLVDFSSQALFQDKNSSQVLGEKVLGIVVQNTKVANLTEPVVLTFQHQLQPKNVTLQCVFWVEDPTLSSPGHWSSAGCETVRRETQTSCFCNHLTYFAVLMVSSVEVDAVHKHYLSLLSYVGCVVSALACLVTIAAYLCSRVPLPCRRKPRDYTIKVHMNLLLAVFLLDTSFLLSEPVALTGSEAGCRASAIFLHFSLLTCLSWMGLEGYNLYRLVVEVFGTYVPGYLLKLSAMGWGFPIFLVTLVALVDVDNYGPIILAVHRTPEGVIYPSMCWIRDSLVSYITNLGLFSLVFLFNMAMLATMVVQILRLRPHTQKWSHVLTLLGLSLVLGLPWALIFFSFASGTFQLVVLYLFSIITSFQGFLIFIWYWSMRLQARGGPSPLKSNSDSARLPISSGSTSSSRI

SEQ ID NO: 505 - protein, 693 aa, Homo Sapiens; identical to SEQ ID NO: 504

SEQ ID NO: 506 - protein, 687 aa, Homo Sapiens; identical to SEQ ID NO: 500

SEQ ID NO: 507 - protein, 256 aa, Homo Sapiens
MTPQSLLQTTLFLLSLLFLVQGAHGRGHREDFRFCSQRNQTHRSSLHYKPTPDLRISIENSEEALTVHAPFPAAHPASRSFPDPRGLYHFCLYWNRHAGRLHLLYGKRDFLLSDKASSLLCFQHQEESLAQGPPLLATSVTSWWSPQNISLPSAASFTFSFHSPPHTAAHNASVDMCELKRDLQLLSQFLKHPQKASRRPSAAPASQQLQSLESKLTSVRFMGDMVSFEEDRINATVWKLQPTAGLQDLHIHSRQE

SEQ ID NO: 508 - protein, 78 aa, Homo Sapiens
MTPQSLLQTTLFLLSLLFLVQGRCPRQGPQGRLSLLQPAEPDTQEQPPLQTHTRPAHLHRELRRGPHSPCPFPCSPPC

SEQ ID NO: 509 - protein, 81 aa, Homo Sapiens
MTPQSLLQTTLFLLSLLFLVQGRCPRQGPQGRLSLLQPAEPDTQEQPPLQTHTRPAHLHRELRRGPHSPCPFPCSPPCFPI

SEQ ID NO: 510 - protein, 97 aa, Homo Sapiens
MTPQSLLQTTLFLLSLLFLVQGSGTRHTGAASTTNPHQTCASPSRTPKRPSQSMPLSLQPTLLPDPSLTPGASTTSASTGTDMLGDYIFSMASVTSC

SEQ ID NO: 511 - protein, 97 aa, Homo Sapiens; identical to SEQ ID NO: 510

SEQ ID NO: 512 - protein, 187 aa, Homo Sapiens
  misc_feature (1)..(1): Xaa can be any naturally occurring amino acid
XSVDMCELKRDLQLLSQFLKHPQKASRRPSAAPASQQLQSLESKLTSVRFMGDMVSFEEDRINATVWKLQPTAGLQDLHIHSRQEEEQSEIMEYSVLLPRTLFQRTKGRSGEAEKRLLLVDFSSQALFQDKNSSQVLGEKVFGTYVPGYLLKLSAMGWGFPIFLVTLVALVDVDNYGPIILAVHRTP

SEQ ID NO: 513 - protein, 528 aa, Homo Sapiens
MDHCGALFLCLCLLTLQNATTETWEELLSYMENMQVSRGRSSVFSSRQLHQLEQMLLNTSFPGYNLTLQTPTIQSLAFKLSCDFSGLSLTSATLKRVPQAGGQHARGQHAMQFPAELTRDACKTRPRELRLICIYFSNTHFFKDENNSSLLNNYVLGAQLSHGHVNNLRDPVNISFWHNQSLEGYTLTCVFWKEGARKQPWGGWSPEGCRTEQPSHSQVLCRCNHLTYFAVLMQLSPALVPAELLAPLTYISLVGCSISIVASLITVLLHFHFRKQSDSLTRIHMNLHASVLLLNIAFLLSPAFAMSPVPGSACTALAAALHYALLSCLTWMAIEGFNLYLLLGRVYNIYIRRYVFKLGVLGWGAPALLVLLSLSVKSSVYGPCTIPVFDSWENGTGFQNMSICWVRSPVVHSVLVMGYGGLTSLFNLVVLAWALWTLRRLRERADAPSVRACHDTVTVLGLTVLLGTTWALAFFSFGVFLLPQLFLFTILNSLYGFFLFLWFCSQRCRSEAEAKAQIEAFSSSQTTQ

SEQ ID NO: 514 - protein, 528 aa, Homo Sapiens; identical to SEQ ID NO: 513

SEQ ID NO: 515 - protein, 221 aa, Homo Sapiens
MDHCGALFLCLCLLTLQNATTETWEELLSYMENMQVSRGRSSVFSSRQLHQLEQMLLNTSFPGYNLTLQTPTIQSLAFKLSCDFSGLSLTSATLKRVPQAGGQHARGQHAMQFPAELTRDACKTRPRELRLICIYFSNTHFFKDENNSSLLNNYVLGAQLSHGHVNNLRDPVNISFWHNQSLVLLGAPPFPLHPCPSVTLLLNTGLTRPKPVEPSWKSITL

SEQ ID NO: 516 - protein, 141 aa, Homo Sapiens
MFRSDRMWSCHWKWKPSPLLFLFALYIMCVPHSAVWGCANCRVVLSNPSGTFTSPCYPNDYPNSQACMWTLRAPTGYIIQITFNDFDIEEAPNCIYDSLSLDNGESQTKFCGATAKGLSFNSSANEMHVSFSSDFSIQKKG

SEQ ID NO: 517 - protein, 241 aa, Homo Sapiens
MFRSDRMWSCHWKWKPSPLLFLFALYIMCVPHSVWGCANCRVVLSNPSGTFTSPCYPNDYPNSQACMWTLRAPTGYIIQITFNDFDIEEAPNCIYDSLSLDNGESQTKFCGATAKGLSFNSSANEMHVSFSSDFSIQKKGFNASYIRVAVSLRNQKVILPQTSDAYQVSVAKSISIPELSAFTLCFEATKVGHEDSDWTAFSYSNASFTQLLSFGKAKSGYFLSISDSKCLLNNALPVKEK

SEQ ID NO: 518 - protein, 1221 aa, Homo Sapiens
MMFRSDRMWSCHWKWKPSPLLFLFALYIMCVPHSVWGCANCRVVLSNPSGTFTSPCYPNDYPNSQACMWTLRAPTGYIIQITFNDFDIEEAPNCIYDSLSLDNGESQTKFCGATAKGLSFNSSANEMHVSFSSDFSIQKKGFNASYIRVAVSLRNQKVILPQTSDAYQVSVAKSISIPELSAFTLCFEATKVGHEDSDWTAFSYSNASFTQLLSFGKAKSGYFLSISDSKCLLNNALPVKEKEDIFAESFEQLCLVWNNSLGSIGVNFKRNYETVPCDSTISKVIPGNGKLLLGSNQNEIVSLKGDIYNFRLWNFTMNAKILSNLSCNVKGNVVDWQNDFWNIPNLALKAESNLSCGSYLIPLPAAELASCADLGTLCQATVNSPSTTPPTVTTNMPVTNRIDKQRNDGIIYRISVVIQNILRHPEVKVQSKVAEWLNSTFQNWNYTVYVVNISFHLSAGEDKIKVKRSLEDEPRLVLWALLVYNATNNTNLEGKIIQQKLLKNNESLDEGLRLHTVNVRQLGHCLAMEEPKGYYWPSIQPSEYVLPCPDKPGFSASRICFYNATNPLVTYWGPVDISNCLKEANEVANQILNLTADGQNLTSANITNIVEQVKRIVNKEENIDITLGSTLMNIFSNILSSSDSDLLESSSEALKTIDELAFKIDLNSTSHVNITTRNLALSVSSLLPGTNAISNFSIGLPSNNESYFQMDFESGQVDPLASVILPPNLLENLSPEDSVLVRRAQFTFFNKTGLFQDVGPQRKTLVSYVMACSIGNITIQNLKDPVQIKIKHTRTQEVHHPICAFWDLNKNKSFGGWNTSGCVAHRDSDASETVCLCNHFTHFGVLMDLPRSASQLDARNTKVLTFISYIGCGISAIFSAATLLTYVAFEKLRRDYPSKILMNLSTALLFLNLLFLLDGWITSFNVDGLCIAVAVLLHFFLLATFTWMGLEAIHMYIALVKVFNTYIRRYILKFCIIGWGLPALVVSVVLASRNNNEVYGKESYGKEKGDEFCWIQDPVIFYVTCAGYFGVMFFLNIAMFIVVMVQICGRNGKRSNRTLREEVLRNLRSVVSLTFLLGMTWGFAFFAWGPLNIPFMYLFSIFNSLQGLFIFIFHCAMKENVQKQWRQHLCCGRFRLADNSDWSKTATNIIKKSSDNLGKSLSSSSIGSNSTYLTSKSKSSSTTYFKRNSHTDNVSYEHSFNKSGSLRQCFHGQVLVKTGPC

SEQ ID NO: 519 - protein, 1193 aa, Homo Sapiens
MMFRSDRMWSCHWKWKPSPLLFLFALYIMCVPHSVWGCANCRVVLSNPSGTFTSPCYPNDYPNSQACMWTLRAPTGYIIQITFNDFDIEEAPNCIYDSLSLDNGESQTKFCGATAKGLSFNSSANEMHVSFSSDFSIQKKGFNASYIRVAVSLRNQKVILPQTSDAYQVSVAKSISIPELSAFTLCFEATKVGHEDSDWTAFSYSNASFTQLLSFGKAKSGYFLSISDSKCLLNNALPVKEKEDIFAESFEQLCLVWNNSLGSIGVNFKRNYETVPCDSTISKVIPGNGKLLLGSNQNEIVSLKGDIYNFRLWNFTMNAKILSNLSCNVKGNVVDWQNDFWNIPNLALKAESNLSCGSYLIPLPAAELASCADLGTLCQDGIIYRISVVIQNILRHPEVKVQSKVAEWLNSTFQNWNYTVYVVNISFHLSAGEDKIKVKRSLEDEPRLVLWALLVYNATNNTNLEGKIIQQKLLKNNESLDEGLRLHTVNVRQLGHCLAMEEPKGYYWPSIQPSEYVLPCPDKPGFSASRICFYNATNPLVTYWGPVDISNCLKEANEVANQILNLTADGQNLTSANITNIVEQVKRIVNKEENIDITLGSTLMNIFSNILSSSDSDLLESSSEALKTIDELAFKIDLNSTSHVNITTRNLALSVSSLLPGTNAISNFSIGLPSNNESYFQMDFESGQVDPLASVILPPNLLENLSPEDSVLVRRAQFTFFNKTGLFQDVGPQRKTLVSYVMACSIGNITIQNLKDPVQIKIKHTRTQEVHHPICAFWDLNKNKSFGGWNTSGCVAHRDSDASETVCLCNHFTHFGVLMDLPRSASQLDARNTKVLTFISYIGCGISAIFSAATLLTYVAFEKLRRDYPSKILMNLSTALLFLNLLFLLDGWITSFNVDGLCIAVAVLLHFFLLATFTWMGLEAIHMYIALVKVFNTYIRRYILKFCIIGWGLPALVVSVVLASRNNNEVYGKESYGKEKGDEFCWIQDPVIFYVTCAGYFGVMFFLNIAMFIVVMVQICGRNGKRSNRTLREEVLRNLRSVVSLTFLLGMTWGFAFFAWGPLNIPFMYLFSIFNSLQGLFIFIFHCAMKENVQKQWRQHLCCGRFRLADNSDWSKTATNIIKKSSDNLGKSLSSSSIGSNSTYLTSKSKSSSTTYFKRNSHTDNVSYEHSFNKSGSLRQCFHGQVLVKTGPC

SEQ ID NO: 520 - protein, 1250 aa, Homo Sapiens
MMFRSDRMWSCHWKWKPSPLLFLFALYIMCVPHSVWGCANCRVVLSNPSGTFTSPCYPNDYPNSQACMWTLRAPTGYIIQITFNDFDIEEAPNCIYDSLSLDNGESQTKFCGATAKGLSFNSSANEMHVSFSSDFSIQKKGFNASYIRVAVSLRNQKVILPQTSDAYQVSVAKSISIPELSAFTLCFEATKVGHEDSDWTAFSYSNASFTQLLSFGKAKSGYFLSISDSKCLLNNALPVKEKEDIFAESFEQLCLVWNNSLGSIGVNFKRNYETVPCDSTISKVIPGNGKLLLGSNQNEIVSLKGDIYNFRLWNFTMNAKILSNLSCNVKGNVVDWQNDFWNIPNLALKAESNLSCGSYLIPLPAAELASCADLGTLCQATVNSPSTTPPTVTTNMPVTNRIDKQRNDGIIYRISVVIQNILRHPEVKVQSKVAEWLNSTFQNWNYTVYVVNISFHLSAGEDKIKVKRSLEDEPRLVLWALLVYNATNNTNLEGKIIQQKLLKNNESLDEGLRLHTVNVRQLGHCLAMEEPKGYYWPSIQPSEYVLPCPDKPGFSASRICFYNATNPLVTYWGPVDISNCLKEANEVANQILNLTADGQNLTSANITNIVEQVKRIVNKEENIDITLGSTLMNIFSNILSSSDSDLLESSSEALKTIDELAFKIDLNSTSHVNITTRNLALSVSSLLPGTNAISNFSIGLPSNNESYFQMDFESGQVDPLASVILPPNLLENLSPEDSVLVRRAQFTFFNKTGLFQDVGPQRKTLVSYVMACSIGNITIQNLKDPVQIKIKHTRTQEVHHPICAFWDLNKNKSFGGWNTSGCVAHRDSDASETVCLCNHFTHFGVLMDLPRSASQLDARNTKVLTFISYIGCGISAIFSAATLLTYVAFEKLRRDYPSKILMNLSTALLFLNLLFLLDGWITSFNVDGLCIAVAVLLHFFLLATFTWMGLEAIHMYIALVKVFNTYIRRYILKFCIIGWGLPALVVSVVLASRNNNEVYGKESYGKEKGDEFCWIQDPVIFYVTCAGYFGVMFFLNIAMFIVVMVQICGRNGKRSNRTLREEVLRNLRSVVSLTFLLGMTWGFAFFAWGPLNIPFMYLFSIFNSLQGLFIFIFHCAMKENVQKQWRQHLCCGRFRLADNSDWSKTATNIIKKSSDNLGKSLSSSSIGSNSTYLTSKSKSSSTTYFKRNSHTDSASMDKSLSKLAHADGDQTSIIPVHQVIDKVKGYCNAHSDNFYKNIIMSDTFSHSTKF

SEQ ID NO: 521 - protein, 1222 aa, Homo Sapiens
MMFRSDRMWSCHWKWKPSPLLFLFALYIMCVPHSVWGCANCRVVLSNPSGTFTSPCYPNDYPNSQACMWTLRAPTGYIIQITFNDFDIEEAPNCIYDSLSLDNGESQTKFCGATAKGLSFNSSANEMHVSFSSDFSIQKKGFNASYIRVAVSLRNQKVILPQTSDAYQVSVAKSISIPELSAFTLCFEATKVGHEDSDWTAFSYSNASFTQLLSFGKAKSGYFLSISDSKCLLNNALPVKEKEDIFAESFEQLCLVWNNSLGSIGVNFKRNYETVPCDSTISKVIPGNGKLLLGSNQNEIVSLKGDIYNFRLWNFTMNAKILSNLSCNVKGNVVDWQNDFWNIPNLALKAESNLSCGSYLIPLPAAELASCADLGTLCQDGIIYRISVVIQNILRHPEVKVQSKVAEWLNSTFQNWNYTVYVVNISFHLSAGEDKIKVKRSLEDEPRLVLWALLVYNATNNTNLEGKIIQQKLLKNNESLDEGLRLHTVNVRQLGHCLAMEEPKGYYWPSIQPSEYVLPCPDKPGFSASRICFYNATNPLVTYWGPVDISNCLKEANEVANQILNLTADGQNLTSANITNIVEQVKRIVNKEENIDITLGSTLMNIFSNILSSSDSDLLESSSEALKTIDELAFKIDLNSTSHVNITTRNLALSVSSLLPGTNAISNFSIGLPSNNESYFQMDFESGQVDPLASVILPPNLLENLSPEDSVLVRRAQFTFFNKTGLFQDVGPQRKTLVSYVMACSIGNITIQNLKDPVQIKIKHTRTQEVHHPICAFWDLNKNKSFGGWNTSGCVAHRDSDASETVCLCNHFTHFGVLMDLPRSASQLDARNTKVLTFISYIGCGISAIFSAATLLTYVAFEKLRRDYPSKILMNLSTALLFLNLLFLLDGWITSFNVDGLCIAVAVLLHFFLLATFTWMGLEAIHMYIALVKVFNTYIRRYILKFCIIGWGLPALVVSVVLASRNNNEVYGKESYGKEKGDEFCWIQDPVIFYVTCAGYFGVMFFLNIAMFIVVMVQICGRNGKRSNRTLREEVLRNLRSVVSLTFLLGMTWGFAFFAWGPLNIPFMYLFSIFNSLQGLFIFIFHCAMKENVQKQWRQHLCCGRFRLADNSDWSKTATNIIKKSSDNLGKSLSSSSIGSNSTYLTSKSKSSSTTYFKRNSHTDSASMDKSLSKLAHADGDQTSIIPVHQVIDKVKGYCNAHSDNFYKNIIMSDTFSHSTKF

SEQ ID NO: 522 - protein, 103 aa, Homo Sapiens
  misc_feature (1)..(1): Xaa can be any naturally occurring amino acid
XLGSTLMNIFSNILSSSDSDLLESSSEALKTIDELAFKIDLNSTSHVNITTRNLALSVSSLLPGTNAISNFSIGLPSNNESYFQLLSFTTCFEKTSKSAADGF

SEQ ID NO: 523 - protein, 135 aa, Homo Sapiens
  misc_feature (1)..(1): Xaa can be any naturally occurring amino acid
XVKVQSKVAEWLNSTFQNWNYTVYVVNISFHLSAGEDKIKVKRSLEDEPRLVLWALLVYNATNNTNLEGKIIQQKLLKNNESLDEGLRLHTVNVRQLGHCLAMEEPKGYYWPSIQPSEYVLPCPDKPGFSASRIW

SEQ ID NO: 524 - protein, 73 aa, Homo Sapiens
GQNLIRSIQINITRLAGTFGDVAVGLRISSDHKEQPIVTENAERQLVVKDGATYKVDVVPIKNQVVGCQSLPW

SEQ ID NO: 525 - protein, 123 aa, Homo Sapiens
MAAVTHYLYLCQFSWMLIQSVNFWYVLVMNDEHTERRYLLFFLLSWGLPAFVVILLIVILKGIYHQSMSQIYGLIHGDLCFIPNVYAALFTAALVPLTCLVVVFVVFIHAYQVKPQWKAYDDV

SEQ ID NO: 526 - protein, 123 aa, Homo Sapiens; identical to SEQ ID NO: 525

SEQ ID NO: 527 - protein, 334 aa, Homo Sapiens
MAAVTHYLYLCQFSWMLIQSVNFWYVLVMNDEHTERRYLLFFLLSWGLPAFVVILLIVILKGIYHQSMSQIYGLIHGDLCFIPNVYAALFTAALVPLTCLVVVFVVFIHAYQVKPQWKAYDDVFRGRTNAAEIPLILYLFALISVTWLWGGLHMAYRHFWMLVLFVIFNSLQGLYVFMVYFILHNQMCCPMKASYTVEMNGHPGPSTAFFTPGSGMPPAGGEISKSTQNLIGAMEEVPPDWERASFQQGSQASPDLKPSPQNGATFPSSGGYGQGSLIADEESQEFDDLIFALKTGAGLSVSDNESGQGSQEGGTLTDSQIVELRRIPIADTHL

SEQ ID NO: 528 - protein, 192 aa, Homo Sapiens
MAAVTHYLYLCQFSWMLIQSVNFWYVLVMNDEHTERRYLLFFLLSWGLPAFVVILLIVILKGIYHQSMSQIYGLIHGDLCFIPNVYAALFTAALVPLTCLVVVFVVFIHAYQVKPQWKAYDDVFRGRTNAAEIPLILYLFALISVTWLWGGLHMAYRHFWMLVLFVIFNSLQVLVSVSVIMNLVKAARRGAP

SEQ ID NO: 529 - protein, 148 aa, Homo Sapiens
MAKRSAAAAVPGMPSASLLVNLLSALLILFVFGETEIRFTGQTEFVVNETSTTVIRLIIERIGEPANVTAIVSLYGEDAGDFFDTYAAAFIPAGETNRTVYIAVCDDDLPEPDETFIFHLTLQLPSIAVSEPKGRNESMPLTLIREKG

SEQ ID NO: 530 - protein, 2038 aa, Homo Sapiens
MINESKGDAIYSAVYDVVRNRGNFGDVSVSWVVSPDFTQDVFPVQGTVVFGDQEFSKNITIYSLPDEIPEEMEEFTVILLNGTGGAKVGNRTTATLRIRRNDDPIYFAEPRVVRVQEGETANFTVLRNGSVDVTCMVQYATKDGKATARERDFIPVEKGETLIFEVGSRQQSISIFVNEDGIPETDEPFYIILLNSTGDTVVYQYGVATVIIEANDDPNGIFSLEPIDKAVEEGKTNAFWILRHRGYFGSVSVSWQLFQNDSALQPGQEFYETSGTVNFMDGEEAKPIILHAFPDKIPEFNEFYFLKLVNISGPGGQLAETNLQVTVMVPFNDDPFGVFILDPECLEREVAEDVLSEDDMSYITNFTILRQQGVFGDVQLGWEILSSEFPAGLPPMIDFLLVGIFPTTVHLQQHMRRHHSGTDALYFTGLEGAFGTVNPKYHPSRNNTIANFTFSAWVMPNANTNGFIIAKDDGNGSIYYGVKIQTNESHVTLSLHYKTLGSNATYIAKTTVMKYLEESVWLHLLIILEDGIIEFYLDGNAMPRGIKSLKGEAITDGPGILRIGAGINGNDRFTGLMQDVRSYERKLTLEEIYELHAMPAKSDLHPISGYLEFRQGETNKSFIISARDDNDEEGEELFILKLVSVYGGARISEENTTARLTIQKSDNANGLFGFTGACIPEIAEEGSTISCVVERTRGALDYVHVFYTISQIETDGINYLVDDFANASGTITFLPWQRSEVLNIYVLDDDIPELNEYFRVTLVSAIPGDGKLGSTPTSGASIDPEKETTDITIKASDHPYGLLQFSTGLPPQPKDAMTLPASSVPHITVEEEDGEIRLLVIRAQGLLGRVTAEFRTVSLTAFSPEDYQNVAGTLEFQPGERYKYIFINITDNSIPELEKSFKVELLNLEGGVAELFRVDGSGSGDGDMEFFLPTIHKRASLGVASQILVTIAASDHAHGVFEFSPESLFVSGTEPEDGYSTVTLNVIRHHGTLSPVTLHWNIDSDPDGDLAFTSGNITFEIGQTSANITVEILPDEDPELDKAFSVSVLSVSSGSLGAHINATLTVLASDDPYGIFIFSEKNRPVKVEEATQNITLSIIRLKGLMGKVLVSYATLDDMEKPPYFPPNLARATQGRDYIPASGFALFGANQSEATIAISILDDDEPERSESVFIELLNSTLVAKVQSRSIPNSPRLGPKVETIAQLIIIANDDAFGTLQLSAPIVRVAENHVGPIINVTRTGGAFADVSVKFKAVPITAIAGEDYSIASSDVVLLEGETSKAVPIYVINDIYPELEESFLVQLMNETTGGARLGALTEAVIIIEASDDPYGLFGFQITKLIVEEPEFNSVKVNLPIIRNSGTLGNVTVQWVATINGQLATGDLRVVSGNVTFAPGETIQTLLLEVLADDVPEIEEVIQVQLTDASGGGTIGLDRIANIIIPANDDPYGTVAFAQMVYRVQEPLERSSCANITVRRSGGHFGRLLLFYSTSDIDVVALAMEEGQDLLSYYESPIQGVPDPLWRTWMNVSAVGEPLYTCATLCLKEQACSAFSFFSASEGPQCFWMTSWISPAVNNSDFWTYRKNMTRVASLFSGQAVAGSDYEPVTRQWAIMQEGDEFANLTVSILPDDFPEMDESFLISLLEVHLMNISASLKNQPTIGQPNISTVVIALNGDAFGVFVIYNISPNTSEDGLFVEVQEQPQTLVELMIHRTGGSLGQVAVEWRVVGGTATEGLDFIGAGEILTFAEGETKKTVILTILDDSEPEDDESIIVSLVYTEGGSRILPSSDTVRVNILANDNVAGIVSFQTASRSVIGHEGEILQFHVIRTFPGRGNVTVNWKIIGQNLELNFANFSGQLFFPEGSLNTTLFVHLLDDNIPEEKEVYQVILYDVRTQGVPPAGIALLDAQGYAAVLTVEASDEPHGVLNFALSSRFVLLQEANITIQLFINREFGSLGAINVTYTTVPGMLSLKNQTVGNLAEPEVDFVPIIGFLILEEGETAAAINITILEDDVPELEEYFLVNLTYVGLTMAASTSFPPRL

SEQ ID NO: 531 - protein, 6306 aa, Homo Sapiens
MSVFLGPGMPSASLLVNLLSALLILFVFGETEIRFTGQTEFVVNETSTTVIRLIIERIGEPANVTAIVSLYGEDAGDFFDTYAAAFIPAGETNRTVYIAVCDDDLPEPDETFIFHLTLQKPSANVKLGWPRTVTVTILSNDNAFGIISFNMLPSIAVSEPKGRNESMPLTLIREKGTYGMVMVTFEVEGGPNPPDEDLSPVKGNITFPPGRATVIYNLTVLDDEVPENDEIFLIQLKSVEGGAEINTSRNSIEIIIKKNDSPVRFLQSIYLVPEEDHILIIPVVRGKDNNGNLIGSDEYEVSISYAVTTGNSTAHAQQNLDFIDLQPNTTVVFPPFIHESHLKFQIVDDTIPEIAESFHIMLLKDTLQGDAVLISPSVVQVTIKPNDKPYGVLSFNSVLFERTVIIDEDRISRYEEITVVRNGGTHGNVSANWVLTRNSTDPSPVTADIRPSSGVLHFAQGQMLATIPLTVVDDDLPEEAEAYLLQILPHTIRGGAEVSEPAELLFYIQDSDDVYGLITFFPMENQKIESSPGERYLSLSFTRLGGTKGDVRLLYSVLYIPAGAVDPLQAKEGILNISRRNDLIFPEQKTQVTTKLPIRNDAFLQNGAHFLVQLETVELLNIIPLIPPISPRFGEICNISLLVTPAIANGEIGFLSNLPIILHEPEDFAAEVVYIPLHRDGTDGQATVYWSLKPSGFNSKAVTPDDIGPFNGSVLFLSGQSDTTINITIKGDDIPEMNETVTLSLDRVNVENQVLKSGYTSRDLIILENDDPGGVFEFSPASRGPYVIKEGESVELHIIRSRGSLVKQFLHYRVEPRDSNEFYGNTGVLEFKPGEREIVITLLARLDGIPELDEHYWVVLSSHGERESKLGSATIVNITILKNDDPHGIIEFVSDGLIVMINESKGDAIYSAVYDVVRNRGNFGDVSVSWVVSPDFTQDVFPVQGTVVFGDQEFSKNITIYSLPDEIPEEMEEFTVILLNGTGGAKVGNRTTATLRIRRNDDPIYFAEPRVVRVQEGETANFTVLRNGSVDVTCMVQYATKDGKATARERDFIPVEKGETLIFEVGSRQQSISIFVNEDGIPETDEPFYIILLNSTGDTVVYQYGVATVIIEANDDPNGIFSLEPIDKAVEEGKTNAFWILRHRGYFGSVSVSWQLFQNDSALQPGQEFYETSGTVNFMDGEEAKPIILHAFPDKIPEFNEFYFLKLVNISGGSPGPGGQLAETNLQVTVMVPFNDDPFGVFILDPECLEREVAEDVLSEDDMSYITNFTILRQQGVFGDVQLGWEILSSEFPAGLPPMIDFLLVGIFPTTVHLQQHMRRHHSGTDALYFTGLEGAFGTVNPKYHPSRNNTIANFTFSAWVMPNANTNGFIIAKDDGNGSIYYGVKIQTNESHVTLSLHYKTLGSNATYIAKTTVMKYLEESVWLHLLIILEDGIIEFYLDGNAMPRGIKSLKGEAITDGPGILRIGAGINGNDRFTGLMQDVRSYERKLTLEEIYELHAMPAKSDLHPISGYLEFRQGETNKSFIISARDDNDEEGEELFILKLVSVYGGARISEENTTARLTIQKSDNANGLFGFTGACIPEIAEEGSTISCVVERTRGALDYVHVFYTISQIETDGINYLVDDFANASGTITFLPWQRSEVLNIYVLDDDIPELNEYFRVTLVSAIPGDGKLGSTPTSGASIDPEKETTDITIKASDHPYGLLQFSTGLPPQPKDAMTLPASSVPHITVEEEDGEIRLLVIRAQGLLGRVTAEFRTVSLTAFSPEDYQNVAGTLEFQPGERYKYIFINITDNSIPELEKSFKVELLNLEGGVAELFRVDGSGSGDGDMEFFLPTIHKRASLGVASQILVTIAASDHAHGVFEFSPESLFVSGTEPEDGYSTVTLNVIRHHGTLSPVTLHWNIDSDPDGDLAFTSGNITFEIGQTSANITVEILPDEDPELDKAFSVSVLSVSSGSLGAHINATLTVLASDDPYGIFIFSEKNRPVKVEEATQNITLSIIRLKGLMGKVLVSYATLDDMEKPPYFPPNLARATQGRDYIPASGFALFGANQSEATIAISILDDDEPERSESVFIELLNSTLVAKVQSRSIPNSPRLGPKVETIAQLIIIANDDAFGTLQLSAPIVRVAENHVGPIINVTRTGGAFADVSVKFKAVPITAIAGEDYSIASSDVVLLEGETSKAVPIYVINDIYPELEESFLVQLMNETTGGARLGALTEAVIIIEASDDPYGLFGFQITKLIVEEPEFNSVKVNLPIIRNSGTLGNVTVQWVATINGQLATGDLRVVSGNVTFAPGETIQTLLLEVLADDVPEIEEVIQVQLTDASGGGTIGLDRIANIIIPANDDPYGTVAFAQMVYRVQEPLERSSCANITVRRSGGHFGRLLLFYSTSDIDVVALAMEEGQDLLSYYESPIQGVPDPLWRTWMNVSAVGEPLYTCATLCLKEQACSAFSFFSASEGPQCFWMTSWISPAVNNSDFWTYRKNMTRVASLFSGQAVAGSDYEPVTRQWAIMQEGDEFANLTVSILPDDFPEMDESFLISLLEVHLMNISASLKNQPTIGQPNISTVVIALNGDAFGVFVIYNISPNTSEDGLFVEVQEQPQTLVELMIHRTGGSLGQVAVEWRVVGGTATEGLDFIGAGEILTFAEGETKKTVILTILDDSEPEDDESIIVSLVYTEGGSRILPSSDTVRVNILANDNVAGIVSFQTASRSVIGHEGEILQFHVIRTFPGRGNVTVNWKIIGQNLELNFANFSGQLFFPEGSLNTTLFVHLLDDNIPEEKEVYQVILYDVRTQGVPPAGIALLDAQGYAAVLTVEASDEPHGVLNFALSSRFVLLQEANITIQLFINREFGSLGAINVTYTTVPGMLSLKNQTVGNLAEPEVDFVPIIGFLILEEGETAAAINITILEDDVPELEEYFLVNLTYVGLTMAASTSFPPRLDSEGLTAQVIIDANDGARGVIEWQQSRFEVNETHGSLTLVAQRSREPLGHVSLFVYAQNLEAQVGLDYIFTPMILHFADGERYKNVNIMILDDDIPEGDEKFQLILTNPSPGLELGKNTIALIIVLANDDGPGVLSFNNSEHFFLREPTALYVQESVAVLYIVREPAQGLFGTVTVQFIVTEVNSSNESKDLTPSKGYIVLEEGVRFKALQISAILDTEPEMDEYFVCTLFNPTGGARLGVHVQTLITVLQNQAPLGLFSISAVENRATSIDIEEANRTVYLNVSRTNGIDLAVSVQWETVSETAFGMRGMDVVFSVFQSFLDESASGWCFFTLENLIYGIMLRKSSVTVYRWQGIFIPVEDLNIENPKTCEAFNIGFSPYFVITHEERNEEKPSLNSVFTFTSGFKLFLVQTIIILESSQVRYFTSDSQDYLIIASQRDDSELTQVFRWNGGSFVLHQKLPVRGVLTVALFNKGGSVFLAISQANARLNSLLFRWSGSGFINFQEVPVSGTTEVEALSSANDIYLIFAENVFLGDQNSIDIFIWEMGQSSFRYFQSVDFAAVNRIHSFTPASGIAHILLIGQDMSALYCWNSERNQFSFVLEVPSAYDVASVTVKSLNSSKNLIALVGAHSHIYELAYISSHSDFIPSSGELIFEPGEREATIAVNILDDTVPEKEESFKVQLKNPKGGAEIGINDSVTITILSNDDAYGIVAFAQNSLYKQVEEMEQDSLVTLNVERLKGTYGRITIAWEADGSISDIFPTSGVILFTEGQVLSTITLTILADNIPELSEVVIVTLTRITTEGVEDSYKGATIDQDRSKSVITTLPNDSPFGLVGWRAASVFIRVAEPKENTTTLQLQIARDKGLLGDIAIHLRAQPNFLLHVDNQATENEDYVLQETIIIMKENIKEAHAEVSILPDDLPELEEGFIVTITEVNLVNSDFSTGQPSVRRPGMEIAEIMIEENDDPRGIFMFHVTRGAGEVITAYEVPPPLNVLQVPVVRLAGSFGAVNVYWKASPDSAGLEDFKPSHGILEFADKQVTAMIEITIIDDAEFELTETFNISLISVAGGGRLGDDVVVTVVIPQNDSPFGVFGFEEKTVMIDESLSSDDPDSYVTLTVVRSPGGKGTVRLEWTIDEKAKHNLSPLNGTLHFDETESQKTIVLHTLQDTVLEEDRRFTIQLISIDEVEISPVKGSASIIIRGDKRASGEVGIAPSSRHILIGEPSAKYNGTAIISLVRGPGILGEVTVFWRIFPPSVGEFAETSGKLTMRDEQSAVIVVIQALNDDIPEEKSFYEFQLTAVSEGGVLSESSSTANITVVASDSPYGRFAFSHEQLRVSEAQRVNITIIRSSGDFGHVRLWYKTMSGTAEAGLDFVPAAGELLFEAGEMRKSLHVEILDDDYPEGPEEFSLTITKVELQGRGYDFTIQENGLQIDQPPEIGNISIVRIIIMKNDNAEGIIEFDPKYTAFEVEEDVGLIMIPVVRLHGTYGYVTADFISQSSSASPGGVDYILHGSTVTFQHGQNLSFINISIIDDNESEFEEPIEILLTGATGGAVLGRHLVSRIIIAKSDSPFGVIRFLNQSKISIANPNSTMILSLVLERTGGLLGEIQVNWETVGPNSQEALLPQNRDIADPVSGLFYFGEGEGGVRTIILTIYPHEEIEVEETFIIKLHLVKGEAKLDSRAKDVTLTIQEFGDPNGVVQFAPETLSKKTYSEPLALEGPLLITFFVRRVKGTFGEIMVYWELSSEFDITEDFLSTSGFFTIADGESEASFDVHLLPDEVPEIEEDYVIQLVSVEGGAELDLEKSITWFSVYANDDPHGVFALYSDRQSILIGQNLIRSIQINITRLAGTFGDVAVGLRISSDHKEQPIVTENAERQLVVKDGATYKVDVVPIKNQVFLSLGSNFTLQLVTVMLVGGRFYGMPTILQEAKSAVLPVSEKAANSQVGFESTAFQLMNITAGTSHVMISRRGTYGALSVAWTTGYAPGLEIPEFIVVGNMTPTLGSLSFSHGEQRKGVFLWTFPSPGWPEAFVLHLSGVQSSAPGGAQLRSGFIVAEIEPMGVFQFSTSSRNIIVSEDTQMIRLHVQRLFGFHSDLIKVSYQTTAGSAKPLEDFEPVQNGELFFQKFQTEVDFEITIINDQLSEIEEFFYINLTSVEIRGLQKFDVNWSPRLNLDFSVAVITILDNDDLAGMDISFPETTVAVAVDTTLIPVETESTTYLSTSKTTTILQPTNVVAIVTEATGVSAIPEKLVTLHGTPAVSEKPDVATVTANVSIHGTFSLGPSIVYIEEEMKNGTFNTAEVLIRRTGGFTGNVSITVKTFGERCAQMEPNALPFRGIYGISNLTWAVEEEDFEEQTLTLIFLDGERERKVSVQILDDDEPEGQEFFYVFLTNPQGGAQIVEEKDDTGFAAFAMVIITGSDLHNGIIGFSEESQSGLELREGAVMRRLHLIVTRQPNRAFEDVKVFWRVTLNKTVVVLQKDGVNLVEELQSVSGTTTCTMGQTKCFISIELKPEKVPQVEVYFFVELYEATAGAAINNSARFAQIKILESDESQSLVYFSVGSRLAVAHKKATLISLQVARDSGTGLMMSVNFSTQELRSAETIGRTIISPAISGKDFVITEGTLVFEPGQRSTVLDVILTPETGSLNSFPKRFQIVLFDPKGGARIDKVYGTANITLVSDADSQAIWGLADQLHQPVNDDILNRVLHTISMKVATENTDEQLSAMMHLIEKITTEGKIQAFSVASRTLFYEILCSLINPKRKDTRGFSHFAEVTENFAFSLLTNVTCGSPGEKSKTILDSCPYLSILALHWYPQQINGHKFEGKEGDYIRIPERLLDVQDAEIMAGKSTCKLVQFTEYSSQQWFISGNNLPTLKNKVLSLSVKGQSSQLLTNDNEVLYRIYAAEPRIIPQTSLCLLWNQAAASWLSDSQFCKVVEETADYVECACSHMSVYAVYARTDNLSSYNEAFFTSGFICISGLCLAVLSHIFCARYSMFAAKLLTHMMAASLGTQILFLASAYASPQLAEESCSAMAAVTHYLYLCQFSWMLIQSVNFWYVLVMNDEHTERRYLLFFLLSWGLPAFVVILLIVILKGIYHQSMSQIYGLIHGDLCFIPNVYAALFTAALVPLTCLVVVFVVFIHAYQVKPQWKAYDDVFRGRTNAAEIPLILYLFALISVTWLWGGLHMAYRHFWMLVLFVIFNSLQGLYVFMVYFILHNQMCCPMKASYTVEMNGHPGPSTAFFTPGSGMPPAGGEISKSTQNLIGAMEEVPPDWERASFQQGSQASPDLKPSPQNGATFPSSGGYGQGSLIADEESQEFDDLIFALKTGAGLSVSDNESGQGSQEGGTLTDSQIVELRRIPIADTHL

SEQ ID NO: 532 - protein, 6306 aa, Homo Sapiens; identical to SEQ ID NO: 531

SEQ ID NO: 533 - protein, 938 aa, Homo Sapiens
NSTMILSLVLERTGGLLGEIQVNWETVGPNSQEALLPQNRDIADPVSGLFYFGEGEGGVRTIILTIYPHEEIEVEETFIIKLHLVKGEAKLDSRAKDVTLTIQEFGDPNGVVQFAPETLSKKTYSEPLALEGPLLITFFVRRVKGTFGEIMVYWELSSEFDITEDFLSTSGFFTIADGESEASFDVHLLPDEVPEIEEDYVIQLVSVEGGAELDLEKSITWFSVYANDDPHGVFALYSDRQSILIGQNLIRSIQINITRLAGTFGDVAVGLRISSDHKEQPIVTENAERQLVVKDGATYKVDVVPIKNQVFLSLGSNFTLQLVTVMLVGGRFYGMPTILQEAKSAVLPVSEKAANSQVGFESTAFQLMNITAGTSHVMISRRGTYGALSVAWTTGYAPGLEIPEFIVVGNMTPTLGSLSFSHGEQRKGVFLWTFPSPGWPEAFVLHLSGVQSSAPGGAQLRSGFIVAEIEPMGVFQFSTSSRNIIVSEDTQMIRLHVQRLFGFHSDLIKVSYQTTAGSAKPLEDFEPVQNGELFFQKFQTEVDFEITIINDQLSEIEEFFYINLTSVEIRGLQKFDVNWSPRLNLDFSVAVITILDNDDLAGMDISFPETTVAVAVDTTLIPVETESTTYLSTSKTTTILQPTNVVAIVTEATGVSAIPEKLVTLHGTPAVSEKPDVATVTANVSIHGTFSLGPSIVYIEEEMKNGTFNTAEVLIRRTGGFTGNVSITVKTFGERCAQMEPNALPFRGIYGISNLTWAVEEEDFEEQTLTLIFLDGERERKVSVQILDDDEPEGQEFFYVFLTNPQGGAQIVEEKDDTGFAAFAMVIITGSDLHNGIIGFSEESQSGLELREGAVMRRLHLIVTRQPNRAFEDVKVFWRVTLNKTVVVLQKDGVNLVEELQSVSGTTTCTMGQTKCFISIELKPEKRNATEPIIKSFS

SEQ ID NO: 534 - protein, 2624 aa, Homo Sapiens
QLKNPKGGAEIGINDSVTITILSNDDAYGIVAFAQNSLYKQVEEMEQDSLVTLNVERLKGTYGRITIAWEADGSISDIFPTSGVILFTEGQVLSTITLTILADNIPELSEVVIVTLTRITTEGVEDSYKGATIDQDRSKSVITTLPNDSPFGLVGWRAASVFIRVAEPKENTTTLQLQIARDKGLLGDIAIHLRAQPNFLLHVDNQATENEDYVLQETIIIMKENIKEAHAEVSILPGAGEVITAYEVPPPLNVLQVPVVRLAGSFGAVNVYWKASPDSAGLEDFKPSHGILEFADKQVTAMIEITIIDDAEFELTETFNISLISVAGGGRLGDDVVVTVVIPQNDSPFGVFGFEEKTVMIDESLSSDDPDSYVTLTVVRSPGGKGTVRLEWTIDEKAKHNLSPLNGTLHFDETESQKTIVLHTLQDTVLEEDRRFTIQLISIDEVEISPVKGSASIIIRGDKRASGEVGIAPSSRHILIGEPSAKYNGTAIISLVRGPGILGEVTVFWRIFPPSVGEFAETSGKLTMRDEQSAVIVVIQALNDDIPEEKSFYEFQLTAVSEGGVLSESSSTANITVVASDSPYGRFAFSHEQLRVSEAQRVNITIIRSSGDFGHVRLWYKTMSGTAEAGLDFVPAAGELLFEAGEMRKSLHVEILDDDYPEGPEEFSLTITKVELQGRGYDFTIQENGLQIDQPPEIGNISIVRIIIMKNDNAEGIIEFDPKYTAFEVEEDVGLIMIPVVRLHGTYGYVTADFISQSSSASPGGVDYILHGSTVTFQHGQNLSFINISIIDDNESEFEEPIEILLTGATGGAVLGRHLVSRIIIAKSDSPFGVIRFLNQSKISIANPNSTMILSLVLERTGGLLGEIQVNWETVGPNSQEALLPQNRDIADPVSGLFYFGEGEGGVRTIILTIYPHEEIEVEETFIIKLHLVKGEAKLDSRAKDVTLTIQEFGDPNGVVQFAPETLSKKTYSEPLALEGPLLITFFVRRVKGTFGEIMVYWELSSEFDITEDFLSTSGFFTIADGESEASFDVHLLPDEVPEIEEDYVIQLVSVEGGAELDLEKSITWFSVYANDDPHGVFALYSDRQSILIGQNLIRSIQINITRLAGTFGDVAVGLRISSDHKEQPIVTENAERQLVVKDGATYKVDVVPIKNQVFLSLGSNFTLQLVTVMLVGGRFYGMPTILQEAKSAVLPVSEKAANSQVGFESTAFQLMNITAGTSHVMISRRGTYGALSVAWTTGYAPGLEIPEFIVVGNMTPTLGSLSFSHGEQRKGVFLWTFPSPGWPEAFVLHLSGVQSSAPGGAQLRSGFIVAEIEPMGVFQFSTSSRNIIVSEDTQMIRLHVQRLFGFHSDLIKVSYQTTAGSAKPLEDFEPVQNGELFFQKFQTEVDFEITIINDQLSEIEEFFYINLTSVEIRGLQKFDVNWSPRLNLDFSVAVITILDNDDLAGMDISFPETTVAVAVDTTLIPVETESTTYLSTSKTTTILQPTNVVAIVTEATGVSAIPEKLVTLHGTPAVSEKPDVATVTANVSIHGTFSLGPSIVYIEEEMKNGTFNTAEVLIRRTGGFTGNVSITVKTFGERCAQMEPNALPFRGIYGISNLTWAVEEEDFEEQTLTLIFLDGERERKVSVQILDDDEPEGQEFFYVFLTNPQGGAQIVEEKDDTGFAAFAMVIITGSDLHNGIIGFSEESQSGLELREGAVMRRLHLIVTRQPNRAFEDVKVFWRVTLNKTVVVLQKDGVNLVEELQSVSGTTTCTMGQTKCFISIELKPEKVPQVEVYFFVELYEATAGAAINNSARFAQIKILESDESQSLVYFSVGSRLAVAHKKATLISLQVARDSGTGLMMSVNFSTQELRSAETIGRTIISPAISGKDFVITEGTLVFEPGQRSTVLDVILTPETGSLNSFPKRFQIVLFDPKGGARIDKVYGTANITLVSDADSQAIWGLADQLHQPVNDDILNRVLHTISMKVATENTDEQLSAMMHLIEKITTEGKIQAFSVASRTLFYEILCSLINPKRKDTRGFSHFAEVTENFAFSLLTNVTCGSPGEKSKTILDSCPYLSILALHWYPQQINGHKFEGKEGDYIRIPERLLDVQDAEIMAGKSTCKLVQFTEYSSQQWFISGNNLPTLKNKVLSLSVKGQSSQLLTNDNEVLYRIYAAEPRIIPQTSLCLLWNQAAASWLSDSQFCKVVEETADYVECACSHMSVYAVYARTDNLSSYNEAFFTSGFICISGLCLAVLSHIFCARYSMFAAKLLTHMMAASLGTQILFLASAYASPQLAEESCSAMAAVTHYLYLCQFSWMLIQSVNFWYVLVMNDEHTERRYLLFFLLSWGLPAFVVILLIVILKGIYHQSMSQIYGLIHGDLCFIPNVYAALFTAALVPLTCLVVVFVVFIHAYQVKPQWKAYDDVFRGRTNAAEIPLILYLFALISVTWLWGGLHMAYRHFWMLVLFVIFNSLQGLYVFMVYFILHNQMCCPMKASYTVEMNGHPGPSTAFFTPGSGMPPAGGEISKSTQNLIGAMEEVPPDWERASFQQGSQASPDLKPSPQNGATFPSSGGYGQGSLIADEESQEFDDLIFALKTGAGLSVSDNESGQGSQEGGTLTDSQIVELRRIPIADTHL

SEQ ID NO: 535 - protein, 390 aa, Homo Sapiens
TFQHGQNLSFINISIIDDNESEFEEPIEILLTGATGGAVLGRHLVSRIIIAKSDSPFGVIRFLNQSKISIANPNSTMILSLVLERTGGLLGEIQVNWETVGPNSQEALLPQNRDIADPVSGLFYFGEGEGGVRTIILTIYPHEEIEVEETFIIKLHLVKGEAKLDSRAKDVTLTIQEFGDPNGVVQFAPETLSKKTYSEPLALEGPLLITFFVRRVKGTFGEIMVYWELSSEFDITEDFLSTSGFFTIADGESEASFDVHLLPDEVPEIEEDYVIQLVSVEGGAELDLEKSITWFSVYANDDPHGVFALYSDRQSILIGQNLIRSIQINITRLAGTFGDVAVGLRISSDHKEQPIVTENAERQLVVKDGATYKVDVVPIKNQVCGISSVS

SEQ ID NO: 536 - protein, 99 aa, Homo Sapiens
VPHITVEEEDGEIRLLVIRAQGLLGRVTAEFRTVSLTAFSPEDYQNVAGTLEFQPGERYKYIFINITDNSIPELEKSFKVELLNLEGGVCEFLVRAGDE

SEQ ID NO: 537 - protein, 80 aa, Homo Sapiens
  misc_feature (1)..(1): Xaa can be any naturally occurring amino acid
XDEQLSAMMHLIEKITTEGKIQAFSVASRTLFYEILCSLINPKRKDTRGFSHFAEVTENFAFSLLTNVTCGSPGEKSPAC

SEQ ID NO: 538 - protein, 72 aa, Homo Sapiens
  misc_feature (1)..(1): Xaa can be any naturally occurring amino acid
XEGSTISCVVERTRGALDYVHVFYTISQIETDGINYLVDDFANASGTITFLPWQRSELLIEVSLPIIIYNCN

SEQ ID NO: 539 - protein, 567 aa, Homo Sapiens
  misc_feature (1)..(1): Xaa can be any naturally occurring amino acid
XITVEEEDGEIRLLVIRAQGLLGRVTAEFRTVSLTAFSPEDYQNVAGTLEFQPGERYKYIFINITDNSIPELEKSFKVELLNLEGGAELFRVDGSGSGDGDMEFFLPTIHKRASLGVASQILVTIAASDHAHGVFEFSPESLFVSGTEPEDGYSTVTLNVIRHHGTLSPVTLHWNIDSDPDGDLAFTSGNITFEIGQTSANITVEILPDEDPELDKAFSVSVLSVSSGSLGAHINATLTVLASDDPYGIFIFSEKNRPVKVEEATQNITLSIIRLKGLMGKVLVSYATLDDMEKPPYFPPNLARATQGRDYIPASGFALFGANQSEATIAISILDDDEPERSESVFIELLNSTLVAKVQSRSIPNSPRLGPKVETIAQLIIIANDDAFGTLQLSAPIVRVAENHVGPIINVTRTGGAFADVSVKFKAVPITAIAGEDYSIASSDVVLLEGETSKAVPIYVINDIYPELEESFLVQLMNETTGGARLGALTEAVIIIEASDDPYGLFGFQITKLIVEEPEFNSVKVNLPIIRNSGTLGNVTVQWVATINGQLATGDLRVVSGYPSATN

SEQ ID NO: 540 - protein, 65 aa, Homo Sapiens
  misc_feature (1)..(1): Xaa can be any naturally occurring amino acid
XLPTIHKRASLGVASQILVTIAASDHAHGVFEFSPESLFVSGTEPEDGYSTVTLNFQILHVLGLR

SEQ ID NO: 541 - protein, 173 aa, Homo Sapiens
MSVKSSKLMFLCHGSSRSLHSGSLTSCNTGVCCSLDADKYENDPELEKIRRERNYSWMDIITICKDKLPNYEEKIKMFYEEHLHLDDEIRYILDGSGYFDVRDKEDQWIRIFMEKGDMVTLPAGIYHRFTVDEKNYTKAMRLFVGEPVWTAYNRPADHFEARGQYVKFLAQTA

SEQ ID NO: 542 - protein, 179 aa, Homo Sapiens
MVQAWYMDDAPGDPRQPHRPDPGRPVGLEQLRRLGVLYWKLDADKYENDPELEKIRRERNYSWMDIITICKDKLPNYEEKIKMFYEEHLHLDDEIRYILDGSGYFDVRDKEDQWIRIFMEKGDMVTLPAGIYHRFTVDEKNYTKAMRLFVGEPVWTAYNRPADHFEARGQYVKFLAQTA

SEQ ID NO: 543 - protein, 117 aa, Homo Sapiens
  misc_feature (1)..(1): Xaa can be any naturally occurring amino acid
XRWECCAFSPGPACVVALAVASLPLNCAASADSKRGRWARDSSTCASRRVCGAAGDVRGDSCPSVAASVAPACDPGGQNYTKAMRLFVGEPVWTAYNRPADHFEARGQYVKFLAQTA

SEQ ID NO: 544 - protein, 59 aa, Homo Sapiens
MKYPLMPLVNDLTFSFLVFWFCLPVGLLLLLIIWLRFLLSQDILQVRRYRYDANILTAS

SEQ ID NO: 545 - protein, 80 aa, Homo Sapiens
MKYPLMPLVNDLTFSFLVFWFCLPVGLLLLLIIWLRFLLSQDSEENDSSVCLDWEPWSKGPAEFCWKGTLHGQEKERPCW

SEQ ID NO: 546 - protein, 80 aa, Homo Sapiens; identical to SEQ ID NO: 545

SEQ ID NO: 547 - protein, 179 aa, Homo Sapiens
  misc_feature (1)..(1): Xaa can be any naturally occurring amino acid
XWFCLPVGLLLLLIIWLRFLLSQDSEENDSSVCLDWEPWSKGPAEFCWKGTLHGQEKERPCCLVFLESAGQWQWQKWMGETCQGGKRTLATVVPPWNPQLISSSDRHVKASRGPSPSPASQMTSSPAGSRSSLGGHGSSEQAHGEKLANLIQRGLKAGLGRRVWVHIKEARVFPYPGDP

SEQ ID NO: 548 - protein, 244 aa, Homo Sapiens
MLLLGAVLLLLALPGHDQETTTQGPGVLLPLPKGACTGWMAGIPGHPGHNGAPGRDGRDGTPGEKGEKGDPGLIGPKGDIGETGVPGAEGPRGFPGIQGRKGEPGEGAYVYRSAFSVGLETYVTIPNMPIRFTKIFYNQQNHYDGSTGKFHCNIPGLYYFAYHITVYMKDVKVSLFKKDKAMLFTYDQYQENNVDQASGSVLLHLEVGDQVWLQVYGEGERNGLYADNDNDSTFTGFLLYHDTN

SEQ ID NO: 549 - protein, 244 aa, Homo Sapiens; identical to SEQ ID NO: 548

SEQ ID NO: 550 - protein, 117 aa, Homo Sapiens
MGSQVAFLPPPPARSSPDAARIRVKRYRQSMNNFQGLRSFGCRFGTCTVQKLAHQIYQFTDKDKDNVAPRSKISPQGYGRRRRRSLPEAGPGRTLVSSKPQAHGAPAPPSGSAPHFL

SEQ ID NO: 551 - protein, 83 aa, Homo Sapiens
MKLVSVALMYLGSLAFLGADTARLDVASEFRKKWNKWALSRGKRELRMSSSYPTGLADVKAGPAQTLIRPQDMKGASRSPEDR

SEQ ID NO: 552 - protein, 83 aa, Homo Sapiens; identical to SEQ ID NO: 551

SEQ ID NO: 553 - protein, 139 aa, Homo Sapiens
MKLVSVALMYLGSLAFLGADTARLDVASEFRKKWNKWALSRGKRELRMSSSYPTGLADVKAGPAQTLIRPQDMKGASRSPEDSCLSSPSPRPQQSGCRPHPSQALPPEHEQLPGPPELWLPLRDVHGAEAGTPDLPVHR

SEQ ID NO: 554 - protein, 185 aa, Homo Sapiens
MKLVSVALMYLGSLAFLGADTARLDVASEFRKKWNKWALSRGKRELRMSSSYPTGLADVKAGPAQTLIRPQDMKGASRSPEDSSPDAARIRVKRYRQSMNNFQGLRSFGCRFGTCTVQKLAHQIYQFTDKDKDNVAPRSKISPQGYGRRRRRSLPEAGPGRTLVSSKPQAHGAPAPPSGSAPHFL

SEQ ID NO: 555 - protein, 185 aa, Homo Sapiens; identical to SEQ ID NO: 554

SEQ ID NO: 556 - protein, 185 aa, Homo Sapiens; identical to SEQ ID NO: 554

SEQ ID NO: 557 - protein, 138 aa, Homo Sapiens
MSSSYPTGLADVKAGPAQTLIRPQDMKGASRSPEDSSPDAARIRVKRYRQSMNNFQGLRSFGCRFGTCTVQKLAHQIYQFTDKDKDNVAPRSKISPQGYGRRRRRSLPEAGPGRTLVSSKPQAHGAPAPPSGSAPHFL

SEQ ID NO: 558 - protein, 148 aa, Homo Sapiens
MARIPTAALGCISLLCLQLPGSLSRSLGGDPRPVKPREPPARSPSSSLQPRHPAPRPVVWKLHRALQAQRGAGLAPVMGQPLRDGGRQHSGPRRHSGPRRTQAQLLRVGCVLGTCQVQNLSHRLWQLMGPAGRQDSAPVDPSSPHSYG

SEQ ID NO: 559 - protein, 148 aa, Homo Sapiens; identical to SEQ ID NO: 558

SEQ ID NO: 560 - protein, 153 aa, Homo Sapiens
MTIHILILLLLLAFSAQGDLDTAARRGQHQVPQHRGHVCYLGVCRTHRLAEIIYWIRCLHQGALGEGQPRAPGPLQLWAPPVARGGSPARFPGFRPAARGLAQCPARWVTSGTARPLLGFSLPICMLELLLHISSPLTPAPETVFPSPSPGCD

SEQ ID NO: 561 - protein, 57 aa, Homo Sapiens
LLEPELPGSALRSLWSSLCLGPAPAPPGPVSPEGRLAAAWDALIVRPVRRWRRVAVG

SEQ ID NO: 562 - protein, 222 aa, Homo Sapiens
MAASCRVVTSISDIPTGIPVHLELASMTNRELMSSIVHQVFPAVTSLGLNEQELLFLTQSASGPHSSLSSWNGVPDVGMVSDILFWILKEHGRSKSRASDLTRIHFHTLVYHILATVDGHWANQLAAVAAGARVAGTQACATETIDTSRVSLRAPQEFMTSHSEAGSRIVLNPNKPVVEWHREGISFHFTPVLVCKDPIRTVGLGDAISAEGLFYSEVHPHY

SEQ ID NO: 563 - protein, 78 aa, Homo Sapiens
MALWRGSAYAGFLALAVGCVFLLEPELPGSALRSLWSSLCLGPAPAPPGPVSPEGRLAAAWDALIVRPVRRWRRVAVG

SEQ ID NO: 564 - protein, 78 aa, Homo Sapiens; identical to SEQ ID NO: 563

SEQ ID NO: 565 - protein, 78 aa, Homo Sapiens; identical to SEQ ID NO: 563

SEQ ID NO: 566 - protein, 113 aa, Homo Sapiens
MALWRGSAYAGFLALAVGCVFLLEPELPGSALRSLWSSLCLGPAPAPPGPVSPEGRLAAAWDALIVRPVRRWRRVAVGFFFAVQLVQSYMSFLMTMSLFHQSHCRKWMSSTSF

SEQ ID NO: 567 - protein, 496 aa, Homo Sapiens
MALWRGSAYAGFLALAVGCVFLLEPELPGSALRSLWSSLCLGPAPAPPGPVSPEGRLAAAWDALIVRPVRRWRRVAVGVNACVDVVLSGVKLLQALGLSPGNGKDHSILHSRNDLEEAFIHFMGKGAAAERFFSDKETFHDIAQVASEFPGAQHYVGGNAALIGQKFAANSDLKVLLCGPVGPKLHELLDDNVFVPPESLQEVDEFHLILEYQAGEEWGQLKAPHANRFIFSHDLSNGAMNMLEVFVSSLEEFQPDLVVLSGLHMMEGQSKELQRKRLLEVVTSISDIPTGIPVHLELASMTNRELMSSIVHQVFPAVTSLGLNEQELLFLTQSASGPHSSLSSWNGVPDVGMVSDILFWILKEHGRSKSRASDLTRIHFHTLVYHILATVDGHWANQLAAVAAGARVAGTQACATETIDTSRVSLRAPQEFMTSHSEAGSRIVLNPNKPVVEWHREGISFHFTPVLVCKDPIRTVGLGDAISAEGLFYSEVHPHY

SEQ ID NO: 568 - protein, 154 aa, Homo Sapiens
MGKGAAAERFFSDKETFHDIAQVASEFPGAQHYVGGNAALIGQKFAANSDLKVLLCGPVGPKLHELLDDNVFVPPESLQEVDEFHLILEYQAGEEWGQLKAPHANRFIFSHDLSNGAMNMLEVFVSSLEEFQPDLVVLSGLHMMEGQSKELQRK

SEQ ID NO: 569 - protein, 204 aa, Homo Sapiens
  misc_feature (1)..(1): Xaa can be any naturally occurring amino acid
XEPELPGSALRSLWSSLCLGPAPAPPGPVSPEGRLAAAWDALIVRPVRRWRRVAVGVNACVDVVLSGVKLLQALGLSPGNGKDHSILHSRNDLEEAFIHFMGKGAAAERFFSDKETFHDIAQVASEFPGAQHYVGGNAALIGQKFAANSDLKVLLCGPVGPKLHELLDDNVFVPPESLQEVDEFHLILEYQAAGLSRGDFPWAE

SEQ ID NO: 570 - protein, 26 aa, Homo Sapiens
  misc_feature (1)..(1): Xaa can be any naturally occurring amino acid
XKRLLEVLASQGHILAAGCGACLLLQ

SEQ ID NO: 571 - protein, 363 aa, Homo Sapiens
MAAAAMAAAAGGGAGAARSLSRFRGCLAGALLGDCVGSFYEAHDTVDLTSVLRHVQSLEPDPGTPGSERTEALYYTDDTAMARALVQSLLAKEAFDEVDMAHRFAQEYKKDPDRGYGAGVVTVFKKLLNPKCRDVFEPARAQFNGKGSYGNGGAMRVAGISLAYSSVQDVQKFARLSAQLTHASSLGYNGAILQALAVHLALQGESSSEHFLKQLLGHMEDLEGDAQSVLDARELGMEERPYSSRLKKIGELLDQASVTREEVVSELGNGIAAFESVPTAIYCFLRCMEPDPEIPSAFNSLQRTLIYSISLGGDTDTIATMAGAIAGAYYGMDQVPESWQQSCEGYEETDILAQSLHRVFQKS

SEQ ID NO: 572 - protein, 69 aa, Homo Sapiens
KPDAERQTDEEKEELKKPKKEDSSPKEETDKWAVEKGKDHKEPRKGEELEEEWTPTEKVRPLCRRSPSG

SEQ ID NO: 573 - protein, 54 aa, Homo Sapiens
LMKVVNEECPTITRTYSLGKSSRGLKIYAMEISDNPGEHELGEGLWGPAAGLCC

SEQ ID NO: 574 - protein, 1158 aa, Homo Sapiens
MAAVRGAPLLSCLLALLALCPGGRPQTVLTDDEIEEFLEGFLSELEPEPREDDVEAPPPPEPTPRVRKAQAGGKPGKRPGTAAEVPPEKTKDKGKKGKKDKGPKVPKESLEGSPRPPKKGKEKPPKATKKPKEKPPKATKKPKEKPPKATKKPKEKPPKATKKPPSGKRPPILAPSETLEWPLPPPPSPGPEELPQEGGAPLSNNWQNPGEETHVEAREHQPEPEEETEQPTLDYNDQIEREDYEDFEYIRRQKQPRPPPSRRRRPERVWPEPPEEKAPAPAPEERIEPPVKPLLPPLPPDYGDGYVIPNYDDMDYYFGPPPPQKPDAERQTDEEKEELKKPKKEDSSPKEETDKWAVEKGKDHKEPRKGEELEEEWTPTEKVKCPPIGMESHRIEDNQIRASSMLRHGLGAQRGRLNMQTGATEDDYYDGAWCAEDDARTQWIEVDTRRTTRFTGVITQGRDSSIHDDFVTTFFVGFSNDSQTWVMYTNGYEEMTFHGNVDKDTPVLSELPEPVVARFIRIYPLTWNGSLCMRLEVLGCSVAPVYSYYAQNEVVATDDLDFRHHSYKDMRQLMKVVNEECPTITRTYSLGKSSRGLKIYAMEISDNPGEHELGEPEFRYTAGIHGNEVLGRELLLLLMQYLCREYRDGNPRVRSLVQDTRIHLVPSLNPDGYEVAAQMGSEFGNWALGLWTEEGFDIFEDFPDLNSVLWGAEERKWVPYRVPNNNLPIPERYLSPDATVSTEVRAIIAWMEKNPFVLGANLNGGERLVSYPYDMARTPTQEQLLAAAMAAARGEDEDEVSEAQETPDHAIFRWLAISFASAHLTLTEPYRGGCQAQDYTGGMGIVNGAKWNPRTGTINDFSYLHTNCLELSFYLGCDKFPHESELPREWENNKEALLTFMEQVHRGIKGVVTDEQGIPIANATISVSGINHGVKTASGGDYWRILNPGEYRVTAHAEGYTPSAKTCNVDYDIGATQCNFILARSNWKRIREIMAMNGNRPIPHIDPSRPMTPQQRRLQQRRLQHRLRLRAQMRLRRLNATTTLGPHTVPPTLPPAPATTLSTTIEPWGLIPPTTAGWEESETETYTEVVTEFGTEVEPEFGTKVEPEFETQLEPEFETQLEPEFEEEEEEEKEEEIATGQAFPFTTVETYTVNFGDF

SEQ ID NO: 575 - protein, 162 aa, Homo Sapiens
MPPEKTKDKGKKGKKDKGPKVPKESLEGSPRPPKKGKEKPPKATKKPKEKPPKATKKPKEKPPKATKKPKEKPPKATKKPPSGKRPPILAPSETLEWPLPPPPSPGPEELPQEGGAPLSNNWQNPGEETHVEAREHQPEPEEETEQPTLDYNDQIEREDYED

SEQ ID NO: 576 - protein, 733 aa, Homo Sapiens
MRKWWAPCPGSWLCSHCLGEGWALRGAGSTALRPASPQTFHGNVDKDTPVLSELPEPVVARFIRIYPLTWNGSLCMRLEVLGCSVARECGGLAGALSGGGVLGWASRHPAKDNPASLAAVYSYYAQNEVVATDDLDFRHHSYKDMRQLMKVVNEECPTITRTYSLGKSSRGLKIYAMEISDNPGEHELGEPEFRYTAGIHGNEVLGRELLLLLMQYLCREYRDGNPRVRSLVQDTRIHLVPSLNPDGYEVAAQMGSEFGNWALGLWTEEGFDIFEDFPDLNSVLWGAEERKWVPYRVPNNNLPIPERYLSPDATVSTEVRAIIAWMEKNPFVLGANLNGGERLVSYPYDMARTPTQEQLLAAAMAAARGEDEDEVSEAQETPDHAIFRWLAISFASAHLTLTEPYRGGCQAQDYTGGMGIVNGAKWNPRTGTINDFSYLHTNCLELSFYLGCDKFPHESELPREWENNKEALLTFMEQVHRGIKGVVTDEQGIPIANATISVSGINHGVKTASGGDYWRILNPGEYRVTAHAEGYTPSAKTCNVDYDIGATQCNFILARSNWKRIREIMAMNGNRPIPHIDPSRPMTPQQRRLQQRRLQHRLRLRAQMRLRRLNATTTLGPHTVPPTLPPAPATTLSTTIEPWGLIPPTTAGWEESETETYTEVVTEFGTEVEPEFGTKVEPEFETQLEPEFETQLEPEFEEEEEEEKEEEIATGQAFPFTTVETYTVNFGDF

SEQ ID NO: 577 - protein, 104 aa, Homo Sapiens
RTQWIEVDTRRTTRFTGVITQGRDSSIHDDFVTTFFVGFSNDSQTWVMYTNGYEEMVGTMPRLLALLPLSGRGVGSQRGWQYCSEACLSPDLSWERGQGHTRAE

SEQ ID NO: 578 - protein, 251 aa, Homo Sapiens
  misc_feature (1)..(1): Xaa can be any naturally occurring amino acid
XELEPEPREDDVEAPPPPEPTPRVRKAQAGGKPGKRPGTAAEVPPEKTKDKGKKGKKDKGPKVPKESLEGSPRPPKKGKEKPPKATKKPKEKPPKATKKPKEKPPKATKKPKEKPPKATKKPPSGKRPPILAPSETLEWPLPPPPSPGPEELPQEGGAPLSNNWQNPGEETHVEAREHQPEPPVKPLLPPLPPDYGDGYVIPNYDDMDYYFGPPPPQKPDAERQTDEEKEELKKPKKEDSSPKEETDKWAV

SEQ ID NO: 579 - protein, 66 aa, Homo Sapiens
  misc_feature (1)..(1): Xaa can be any naturally occurring amino acid
XFRHHSYKDMRQLMKVVNEECPTITRTYSLGKSSRGLKIYAMEISDNPGEHELGEGLWGPAAGLCC

SEQ ID NO: 580 - protein, 481 aa, Homo Sapiens
MAASWSLLVTLRPLAQSPLRGRCVGCGAWAAALAPLATAPGKPFWKAYTVQTSESMTPTATSETYLKALAVCHGPLDHYDFLIKAHELKDDEHQRRVIQCLQKLHEDLKGYNIEAEGLFSKLFSRSKPPRGLYVYGDVGTGKTMVMDMFYAYVEMKRKKRVHFHGFMLDVHKRIHRLKQSLPKRKPGFMAKSYDPIAPIAEEISEEACLLCFDEFQVTDIADAMILKQLFENLFKNGVVVVATSNRPPEDLYKNGLQRANFVPFIAVLKEYCNTVQLDSGIDYRKRELPAAGKLYYLTSEADVEAVMDKLFDELAQKQNDLTRPRILKVQGRELRLNKACGTVADCTFEELCERPLGASDYLELSKNFDTIFLRNIPQFTLANRTQGRRFITLIDNFYDLKVRIICSASTPISSLFLHQHHDSELEQSRILMDDLGLSQDSAEGLSMFTGEEEIFAFQRTISRLTEMQTEQYWNEGDRTKK

SEQ ID NO: 581 - protein, 160 aa, Homo Sapiens
MCATPPSLNFKKLAYTVQTSESMTPTATSETYLKALAVCHGPLDHYDFLIKAHELKDDEHQRRVIQCLQKLHEDLKGYNIEAEGLFSKLFSRSKPPRGLYVYGDVGTGKTMVMDMFYAYVEMKRKKRVHFHGFMLDVHKRIHRLKQSLPKRKPGFMAKSY

SEQ ID NO: 582 - protein, 80 aa, Homo Sapiens
  misc_feature (1)..(1): Xaa can be any naturally occurring amino acid
XIHRLKQSLPKRKPGFMAKSYDPIAPIAEEISEEACLLCFDEFQVTDIADAMILKQLFENLFKNGVVVVATSNRPPEGIL

SEQ ID NO: 583 - protein, 349 aa, Homo Sapiens
  misc_feature (1)..(1): Xaa can be any naturally occurring amino acid
XKPFWKGTGKTMVMDMFYAYVEMKRKKRVHFHGFMLDVHKRIHRLKQSLPKRKPGFMAKSYDPIAPIAEEISEEACLLCFDEFQVTDIADAMILKQLFENLFKNGVVVVATSNRPPEDLYKNGLQRANFVPFIAVLKEYCNTVQLDSGIDYRKRELPAAGKLYYLTSEADVEAVMDKLFDELAQKQNDLTRPRILKVQGRELRLNKACGTVADCTFEELCERPLGASDYLELSKNFDTIFLRNIPQFTLANRTQGRRFITLIDNFYDLKVRIICSASTPISSLFLHQHHDSELEQSRILMDDLGLSQDSAEGLSMFTGEEEIFAFQRTISRLTEMQTEQYWNEGDRTKK

SEQ ID NO: 584 - protein, 599 aa, Homo Sapiens
MKLLKLTGFIFFLFFLTESLTLPTQPRDIENFNSTQKFIEDNIEYITIIAFAQYVQEATFEEMEKLVKDMVEYKDRCMADKTLPECSKLPNNVLQEKICAMEGLPQKHNFSHCCSKVDAQRRLCFFYNKKSDVGFLPPFPTLDPEEKCQAYESNRESLLNHFLYEVARRNPFVFAPTLLTVAVHFEEVAKSCCEEQNKVNCLQTRAIPVTQYLKAFSSYQKHVCGALLKFGTKVVHFIYIAILSQKFPKIEFKELISLVEDVSSNYDGCCEGDVVQCIRDTSKVMNHICSKQDSISSKIKECCEKKIPERGQCIINSNKDDRPKDLSLREGKFTDSENVCQERDADPDTFFAKFTFEYSRRHPDLSIPELLRIVQIYKDLLRNCCNTENPPGCYRYAEDKFNETTEKSLKMVQQECKHFQNLGKDGLKYHYLIRLTKIAPQLSTEELVSLGEKMVTAFTTCCTLSEEFACVDNLADLVFGELCGVNENRTINPAVDHCCKTNFAFRRPCFESLKADKTYVPPPFSQDLFTFHADMCQSQNEELQRKTDRFLVNLVKLKHELTDEELQSLFTNFANVVDKCCKAESPEVCFNEESPKIGN

SEQ ID NO: 585 - protein, 622 aa, Homo Sapiens
MKWVESIFLIFLLNFTESRTLHRNEYGIASILDSYQCTAEISLADLATIFFAQFVQEATYKEVSKMVKDALTAIEKPTGDEQSSGCLENQLPAFLEELCHEKEILEKYGHSDCCSQSEEGRHNCFLAHKKPTPASIPLFQVPEPVTSCEAYEEDRETFMNKFIYEIARRHPFLYAPTILLWAARYDKIIPSCCKAENAVECFQTKAATVTKELRESSLLNQHACAVMKNFGTRTFQAITVTKLSQKFTKVNFTEIQKLVLDVAHVHEHCCRGDVLDCLQDGEKIMSYICSQQDTLSNKITECCKLTTLERGQCIIHAENDEKPEGLSPNLNRFLGDRDFNQFSSGEKNIFLASFVHEYSRRHPQLAVSVILRVAKGYQELLEKCFQTENPLECQDKGEEELQKYIQESQALAKRSCGLFQKLGEYYLQNAFLVAYTKKAPQLTSSELMAITRKMAATAATCCQLSEDKLLACGEGAADIIIGHLCIRHEMTPVNPGVGQCCTSSYANRRPCFSSLVVDETYVPPAFSDDKFIFHKDLCQAQGVALQTMKQEFLINLVKQKPQITEEQLEAVIADFSGLLEKCCQGQEQEVCFAEEGKRRQNESFIRCELFSLILTDLTLFVN

SEQ ID NO: 586 - protein, 609 aa, Homo Sapiens
MKWVESIFLIFLLNFTESRTLHRNEYGIASILDSYQCTAEISLADLATIFFAQFVQEATYKEVSKMVKDALTAIEKPTGDEQSSGCLENQLPAFLEELCHEKEILEKYGHSDCCSQSEEGRHNCFLAHKKPTPASIPLFQVPEPVTSCEAYEEDRETFMNKFIYEIARRHPFLYAPTILLWAARYDKIIPSCCKAENAVECFQTKAATVTKELRESSLLNQHACAVMKNFGTRTFQAITVTKLSQKFTKVNFTEIQKLVLDVAHVHEHCCRGDVLDCLQDGEKIMSYICSQQDTLSNKITECCKLTTLERGQCIIHAENDEKPEGLSPNLNRFLGDRDFNQFSSGEKNIFLASFVHEYSRRHPQLAVSVILRVAKGYQELLEKCFQTENPLECQDKGEEELQKYIQESQALAKRSCGLFQKLGEYYLQNAFLVAYTKKAPQLTSSELMAITRKMAATAATCCQLSEDKLLACGEGAADIIIGHLCIRHEMTPVNPGVGQCCTSSYANRRPCFSSLVVDETYVPPAFSDDKFIFHKDLCQAQGVALQTMKQEFLINLVKQKPQITEEQLEAVIADFSGLLEKCCQGQEQEVCFAEEGQKLISKTRAALGV

SEQ ID NO: 587 - protein, 346 aa, Homo Sapiens
MARKSNLPVLLVPFLLCQALVRCSSPLPLVVNTWPFKNATEAAWRALASGGSALDAVESGCAMCEREQCDGSVGFGGSPDELGETTLDAMIMDGTTMDVGAVGDLRRIKNAIGVARKVLEHTTHTLLVGESATTFAQSMGFINEDLSTTASQALHSDWLARNCQPNYWRNVIPDPSKYCGPYKPPGILKQDIPIHKETEDDRGHDTIGMVVIHKTGHIAAGTSTNGIKFKIHGRVGDSPIPGAGAYADDTAGAAAATGNGDILMRFLPSYQAVEYMRRGEDPTIACQKVISRIQKHFPEFFGAVICANVTGSYGAACNKLSTFTQFSFMVYNSEKNQPTEEKVDCI

SEQ ID NO: 588 - protein, 155 aa, Homo Sapiens
RKVLEHTTHTLLVGESATTFAQSMGFINEDLSTTASQALHSDWLARNCQPNYWRNVIPDPSKYCGPYKPPGILKQDIPIHKETEDDRGHDTIGDSPIPGAGAYADDTAGAAAATGNGDILMRFLPSYQAVEYMRRGEDPTIACQKVISRIQKHFP

SEQ ID NO: 589 - protein, 138 aa, Homo Sapiens
  misc_feature (1)..(1): Xaa can be any naturally occurring amino acid
XGDLRRIKNAIGVARKVLEHTTHTLLVGESATTFAQSMGFINEDLSTTASQALHSDWLARNCQPNYWRNVIPDPSKYCGPYKPPGILKQDIPIHKETEDDRGHDTIGMVVIHKTGHIAAGTSTNGDSPIPGAGAYADD

SEQ ID NO: 590 - protein, 342 aa, Homo Sapiens
MAAGTAVGAWVLVLSLWGAVVGAQNITARIGEPLVLKCKGAPKKPPQRLEWKLGGGPWDSVARVLPNGSLFLPAVGIQDEGIFRCQAMNRNGKETKSNYRVRVYQIPGKPEIVDSASELTAGVPNKVGTCVSEGSYPAGTLSWHLDGKPLVPNEKGVSVKEQTRRHPETGLFTLQSELMVTPARGGDPRPTFSCSFSPGLPRHRALRTAPIQPRVWEPVPLEEVQLVVEPEGGAVAPGGTVTLTCEVPAQPSPQIHWMKDVSDLERGAGRTRRGGANCRLCGRIRAGNSSPGPGDPGRPGDSRPAHWGHLVAKAATPRRGEEGPRKPGGRGGACRTESVGGT

SEQ ID NO: 591 - protein, 234 aa, Homo Sapiens
MAAGTAVGAWVLVLSLWGAVVGAQNITARIGEPLVLKCKGAPKKPPQRLEWKLNTGRTEAWKVLSPQGGGPWDSVARVLPNGSLFLPAVGIQDEGIFRCQAMNRNGKETKSNYRSLRTFTITASDWIFPPSEIPGKPEIVDSASELTAGVPNKVGTCVSEGSYPAGTLSWHLDGKPLVPNEKGVSVKEQTRRHPETGLFTLQSELMVTPARGGDPRPTFSCSFSPGLPRHRALR

SEQ ID NO: 592 - protein, 128 aa, Homo Sapiens
MAAGTAVGAWVLVLSLWGAVVGAQNITARIGEPLVLKCKGAPKKPPQRLEWKLNTGRTEAWKVLSPQGGGPWDSVARVLPNGSLFLPAVGIQDEGIFRCQAMNRNGKETKSNYRVRVYQFENLHNYSL

SEQ ID NO: 593 - protein, 404 aa, Homo Sapiens
MAAGTAVGAWVLVLSLWGAVVGAQNITARIGEPLVLKCKGAPKKPPQRLEWKLNTGRTEAWKVLSPQGGGPWDSVARVLPNGSLFLPAVGIQDEGIFRCQAMNRNGKETKSNYRVRVYQIPGKPEIVDSASELTAGVPNKVGTCVSEGSYPAGTLSWHLDGKPLVPNEKGVSVKEQTRRHPETGLFTLQSELMVTPARGGDPRPTFSCSFSPGLPRHRALRTAPIQPRVWEPVPLEEVQLVVEPEGGAVAPGGTVTLTCEVPAQPSPQIHWMKDGVPLPLPPSPVLILPEIGPQDQGTYSCVATHSSHGPQESRAVSISIIEPGEEGPTAGSVGGSGLGTLALALGILGGLGTAALLIGVILWQRRQRRGEERKAPENQEEEEERAELNQSEEPEAGESSTGGP

SEQ ID NO: 594 - protein, 347 aa, Homo Sapiens
MAAGTAVGAWVLVLSLWGAVVGAQNITARIGEPLVLKCKGAPKKPPQRLEWKLNTGRTEAWKVLSPQGGGPWDSVARVLPNGSLFLPAVGIQDEGIFRCQAMNRNGKETKSNYRVRVYQIPGKPEIVDSASELTAGVPNKVGTCVSEGSYPAGTLSWHLDGKPLVPNEKGVSVKEQTRRHPETGLFTLQSELMVTPARGGDPRPTFSCSFSPGLPRHRALRTAPIQPRVWEPVPLEEVQLVVEPEGGAVAPGGTVTLTCEVPAQPSPQIHWMKDGVPLPLPPSPVLILPEIGPQDQGTYSCVATHSSHGPQESRAVSISIIEPGEEGPTAGEGFDKVREAEDSPQHM

SEQ ID NO: 595 - protein, 233 aa, Homo Sapiens
MAAGTAVGAWVLVLSLWGAVVGAQNITARIGEPLVLKCKGAPKKPPQRLEWKLNTGRTEAWKVLSPQGGGPWDSVARVLPNGSLFLPAVGIQDEGIFRCQAMNRNGKETKSNYRVRVYQIPGKPEIVDSASELTAGVPNKVVEESRRSRKRPCEQEVGTCVSEGSYPAGTLSWHLDGKPLVPNEKGVSVKEQTRRHPETGLFTLQSELMVTPARGGDPRPTFSCSFSPGLPRH

SEQ ID NO: 596 - protein, 363 aa, Homo Sapiens
MAAGTAVGAWVLVLSLWGAVVGAQNITARIGEPLVLKCKGAPKKPPQRLEWKLNTGRTEAWKVLSPQGGGPWDSVARVLPNGSLFLPAVGIQDEGIFRCQAMNRNGKETKSNYRVRVYQIPGKPEIVDSASELTAGVPNKVVEESRRSRKRPCEQEVGTCVSEGSYPAGTLSWHLDGKPLVPNEKGVSVKEQTRRHPETGLFTLQSELMVTPARGGDPRPTFSCSFSPGLPRHRALRTAPIQPRVWEPVPLEEVQLVVEPEGGAVAPGGTVTLTCEVPAQPSPQIHWMKDGVPLPLPPSPVLILPEIGPQDQGTYSCVATHSSHGPQESRAVSISIIEPGEEGPTAGEGFDKVREAEDSPQHM

SEQ ID NO: 597 - protein, 420 aa, Homo Sapiens
MAAGTAVGAWVLVLSLWGAVVGAQNITARIGEPLVLKCKGAPKKPPQRLEWKLNTGRTEAWKVLSPQGGGPWDSVARVLPNGSLFLPAVGIQDEGIFRCQAMNRNGKETKSNYRVRVYQIPGKPEIVDSASELTAGVPNKVVEESRRSRKRPCEQEVGTCVSEGSYPAGTLSWHLDGKPLVPNEKGVSVKEQTRRHPETGLFTLQSELMVTPARGGDPRPTFSCSFSPGLPRHRALRTAPIQPRVWEPVPLEEVQLVVEPEGGAVAPGGTVTLTCEVPAQPSPQIHWMKDGVPLPLPPSPVLILPEIGPQDQGTYSCVATHSSHGPQESRAVSISIIEPGEEGPTAGSVGGSGLGTLALALGILGGLGTAALLIGVILWQRRQRRGEERKAPENQEEEEERAELNQSEEPEAGESSTGGP

SEQ ID NO: 598 - protein, 153 aa, Homo Sapiens
MAAGTAVGAWVLVLSLWGAVVGAQNITARIGEPLVLKCKGAPKKPPQRLEWKLNTGRTEAWKVLSPQGGGPWDSVARVLPNGSLFLPAVGIQDEGILGGLGTAALLIGVILWQRRQRRGEERKAPENQEEEEERAELNQSEEPEAGESSTGGP

SEQ ID NO: 599 - protein, 133 aa, Homo Sapiens
MKDGVPLPLPPSPVLILPEIGPQDQGTYSCVATHSSHGPQESRAVSISIIEPGEEGPTAGSVGGSGLGTLALALGILGGLGTAALLIGVILWQRRQRRGEERKAPENQEEEEERAELNQSEEPEAGESSTGGP

SEQ ID NO: 600 - protein, 294 aa, Homo Sapiens
MNRNGKETKSNYRVRVYQIPGKPEIVDSASELTAGVPNKVGTCVSEGSYPAGTLSWHLDGKPLVPNEKGVSVKEQTRRHPETGLFTLQSELMVTPARGGDPRPTFSCSFSPGLPRHRALRTAPIQPRVWEPVPLEEVQLVVEPEGGAVAPGGTVTLTCEVPAQPSPQIHWMKDGVPLPLPPSPVLILPEIGPQDQGTYSCVATHSSHGPQESRAVSISIIGSVGGSGLGTLALALGILGGLGTAALLIGVILWQRRQRRGEERKAPENQEEEEERAELNQSEEPEAGESSTGGP

SEQ ID NO: 601 - protein, 394 aa, Homo Sapiens
MENTDSDNLLRRAACQEAQVFGNQLIPPNAQVKKATVFLNPAACKGKARTLFEKNAAPILHLSGMDVTIVKTDYEGQAKKLLELMENTDVIIVAGGDGTLQEVVTGVLRRTDEATFSKIPIGFIPLGETSSLSHTLFAESGNKVQHITDATLAIVKGETVPLDVLQIKGEKEQPVFAMTGLRWGSFRDAGVKVSKYWYLGPLKIKAAHFFSTLKEWPQTHQASISYTGPTERPPNEPEETPVQRPSLYRRILRRLASYWAQPQDALSQEVSPEVWKDVQLSTIELSITTRNNQLDPTSKEDFLNICIEPDTISKGDFITIGSRKVRNPKLHVEGTECLQASQCTLLIPEGAGGSFSIDSEEYEAMPVEVKLLPRKLQFFCDPRKREQMLTSPTQ

SEQ ID NO: 602 - protein, 65 aa, Homo Sapiens
MTVFFKTLRNHWKKTTAGLCLLTWGGHWLYGKHCDNLLRRAACQEAQHYQDESRWEPTLSRTPGS

SEQ ID NO: 603 - protein, 422 aa, Homo Sapiens
MTVFFKTLRNHWKKTTAGLCLLTWGGHWLYGKHCDNLLRRAACQEAQVFGNQLIPPNAQVKKATVFLNPAACKGKARTLFEKNAAPILHLSGMDVTIVKTDYEGQAKKLLELMENTDVIIVAGGDGTLQEVVTGVLRRTDEATFSKIPIGFIPLGETSSLSHTLFAESGNKVQHITDATLAIVKGETVPLDVLQIKGEKEQPVFAMTGLRWGSFRDAGVKVSKYWYLGPLKIKAAHFFSTLKEWPQTHQASISYTGPTERPPNEPEETPVQRPSLYRRILRRLASYWAQPQDALSQEVSPEVWKDVQLSTIELSITTRNNQLDPTSKEDFLNICIEPDTISKGDFITIGSRKVRNPKLHVEGTECLQASQCTLLIPEGAGGSFSIDSEEYEAMPVEVKLLPRKLQFFCDPRKREQMLTSPTQ

SEQ ID NO: 604 - protein, 244 aa, Homo Sapiens
MTVFFKTLRNHWKKTTAGLCLLTWGGHWLYGKHCDNLLRRAACQEAQVFGNQLIPPNAQVKKATVFLNPAACKGTLFEKNAAPILHLSGMDVTIVKTDYEGQAKKLLELMENTDVIIVAGGDGTLQEVVTGVLRRTDEATFSKIPIGFIPLGETSSLSHTLFAESGNKVQHITDATLAIVKGETVPLDVLQIKGEKEQPVFAMTGLRWGSFRDAGVKVSKYWYLGPLKIKAAHFFSTLKPFPKR

SEQ ID NO: 605 - protein, 244 aa, Homo Sapiens; identical to SEQ ID NO: 604

SEQ ID NO: 606 - protein, 46 aa, Homo Sapiens
MTVFFKTLRNHWKKTTAGLCLLTWGGHWLYGKHWCLAINSFLPMHK

SEQ ID NO: 607 - protein, 189 aa, Homo Sapiens
MAEAAAAAGGTGLGAGASYGSAADRDRDPDPDRAGRRLRVLSGHLLGRPREALSTNECKARRAASAATAAPTATPAAQESGTIPKKRQEVMKWNGWGYNDSKFIFNKKGQIELTGKRGISDPLTVFEQTEAAAREEILANGGSLSHHHGVGKLRKQWLKESISDVGFGMLKSVKEYVDPNNIFGNRNLL

SEQ ID NO: 608 - protein, 658 aa, Homo Sapiens
MAEAAAAAGGTGLGAGASYGSAADRDRDPDPDRAGRRLRVLSGHLLGRPREALSTNECKARRAASAATAAPTATPAAQESGTIPKKRQEVMKWNGWGYNDSKFIFNKKGQIELTGKRYPLSGMGLPTFKEWIQNTLGVNVEHKTTSKASLNPSDTPPSVVNEDFLHDLKETNISYSQEADDRVFRAHGHCLHEIFLLREGMFERIPDIVLWPTCHDDVVKIVNLACKYNLCIIPIGGGTSVSYGLMCPADETRTIISLDTSQMNRILWVDENNLTAHVEAGITGQELERQLKESGYCTGHEPDSLEFSTVGGWVSTRASGMKKNIYGNIEDLVVHIKMVTPRGIIEKSCQGPRMSTGPDIHHFIMGSEGTLGVITEATIKIRPVPEYQKYGSVAFPNFEQGVACLREIAKQRCAPASIRLMDNKQFQFGHALKPQVSSIFTSFLDGLKKFYITKFKGFDPNQLSVATLLFEGDREKVLQHEKQVYDIAAKFGGLAAGEDNGQRGYLLTYVIAYIRDLALEYYVLGESFETSAPWDRVVDLCRNVKERITRECKEKGVQFAPFSTCRVTQTYDAGACIYFYFAFNYRGISDPLTVFEQTEAAAREEILANGGSLSHHHGVGKLRKQWLKESISDVGFGMLKSVKEYVDPNNIFGNRNLL

SEQ ID NO: 609 - protein, 543 aa, Homo Sapiens
  misc_feature (1)..(1): Xaa can be any naturally occurring amino acid
XQEVMKWNGWGYNDSKFIFNKKGQIELTGKRYPLSGMGLPTFKEWIQNTLGVNVEHKTTSKASLNPSDTPPSVVNEDFLHDLKETNISYSQEADDRVFRAHGHCLHEIFLLREGMFERIPDIVLWPTCHDDVVKIVNLACKYNLCIIPIGGGTSVSYGLMCPADETRTIISLDTSQMNRILWVDENNLTAHVEAGITGQELERQLKESGYCTGHEPDSLEFSTVGGWVSTRASGMKKNIYGNIEDLVVHIKMVTPRGIIEKSCQGPRMSTGPDIHHFIMGSEGTLGVITEATIKIRPVPEYQKYGSVAFPNFEQGVACLREIAKQRCAPASIRLMDNKQFQFGHALKPQVSSIFTSFLDGLKKFYITKFKGFDPNQLSVATLLFEGDREKVLQHEKQVYDIAAKFGGLAAGEDNGQRGYLLTYVIAYIRDLALEYYVLGESFETSAPWDRVVDLCRNVKERITRECKEKGVQFAPFSTCRVTQTYDAGACIYFYFAFNYRGISDPLTVFEQTEAAAREEILANGGSLSHHHGGLQLEGTCYES

SEQ ID NO: 610 - protein, 560 aa, Homo Sapiens
  misc_feature (1)..(1): Xaa can be any naturally occurring amino acid
XYPLSGMGLPTFKEWIQNTLGVNVEHKTTSKASLNPSDTPPSVVNEDFLHDLKETNISYSQEADDRVFRAHGHCLHEIFLLREGMFERIPDIVLWPTCHDDVVKIVNLACKYNLCIIPIGGGTSVSYGLMCPADETRTIISLDTSQMNRILWVDENNLTAHVEAGITGQELERQLKESGYCTGHEPDSLEFSTVGGWVSTRASGMKKNIYGNIEDLVVHIKMVTPRGIIEKSCQGPRMSTGPDIHHFIMGSEGTLGVITEATIKIRPVPEYQKYGSVAFPNFEQGVACLREIAKQRCAPASIRLMDNKQFQFGHALKPQVSSIFTSFLDGLKKFYITKFKGFDPNQLSVATLLFEGDREKVLQHEKQVYDIAAKFGGLAAGEDNGQRGYLLTYVIAYIRDLALEYYVLGESFETSAPWDRVVDLCRNVKERITRECKEKGVQFAPFSTCRVTQTYDAGACIYFYFAFNYRGISDPLTVFEQTEAAAREEILANGGSLSHHHGEHEPHSTSTHHGRYRIPQICGRSFPPLDNFQDSSRFLPEPSTQECISPWFHHIHSLPF

SEQ ID NO: 611 - protein, 131 aa, Homo Sapiens
MEKIPVSAFLLLVALSYTLARDTTVKPGAKKDTKDSRPKLPQTLSRGWGDQLIWTQTYEEALYKSKTSNKPLMIIHHLDECPHSQALKKVFAENKEIQKLAEQFVLLNLVYETTDKHLSPDGQYVPRIMFV

SEQ ID NO: 612 - protein, 188 aa, Homo Sapiens
MEKIPVSAFLLLVALSYTLARDTTVKPGAKKDTKDSRPKLPQTLSRGWGDQLIWTQTYEEALYKSKTSNKPLMIIHHLDECPHSQALKKVFAENKEIQKLAEQFVLLNLVYETTDKHLSPDGQYVPRIMFVDPSLTVRADITGRYSNRLYAYEPADTALCKCDLQFGCCPRVEHLYCCSDGTRGCMVR

SEQ ID NO: 613 - protein, 175 aa, Homo Sapiens
MEKIPVSAFLLLVALSYTLARDTTVKPGAKKDTKDSRPKLPQTLSRGWGDQLIWTQTYEEALYKSKTSNKPLMIIHHLDECPHSQALKKVFAENKEIQKLAEQFVLLNLVYETTDKHLSPDGQYVPRIMFVDPSLTVRADITGRYSNRLYAYEPADTALLLDNMKKALKLLKTEL

SEQ ID NO: 614 - protein, 119 aa, Homo Sapiens
PLMIIHHLDECPHSQALKKVFAENKEIQKLAEQFVLLNLVYETTDKHLSPDGQYVPRIMFVDPSLTVRADITGRYSNRLYAYEPADTALCKCDLQFGCCPRVEHLYCCSDGTRGCMVSA

SEQ ID NO: 615 - protein, 163 aa, Homo Sapiens
MMLHSALGLCLLLVTVSSNLAIAIKKEKRPPQTLSRGWGDDITWVQTYEEGLFYAQKSKKPLMVIHHLEDCQYSQALKKVFAQNEEIQEMAQNKFIMLNLMHETTDKNLSPDGQYVPRIMFVDPSLTVRADIAGRYSNRLYTYEPRDLPLCKYSQMISNSGHS

SEQ ID NO: 616 - protein, 166 aa, Homo Sapiens
MMLHSALGLCLLLVTVSSNLAIAIKKEKRPPQTLSRGWGDDITWVQTYEEGLFYAQKSKKPLMVIHHLEDCQYSQALKKVFAQNEEIQEMAQNKFIMLNLMHETTDKNLSPDGQYVPRIMFVDPSLTVRADIAGRYSNRLYTYEPRDLPLLIENMKKALRLIQSEL

SEQ ID NO: 617 - protein, 129 aa, Homo Sapiens
  misc_feature (1)..(1): Xaa can be any naturally occurring amino acid
XNIQNTFPTRALAKSGWGDDITWVQTYEEGLFYAQKSKKPLMVIHHLEDCQYSQALKKVFAQNEEIQEMAQNKFIMLNLMHETTDKNLSPDGQYVPRIMFVDPSLTVRADIAGRYSNRLYTYEPRDLPL

SEQ ID NO: 618 - protein, 2045 aa, Homo Sapiens
MAGRSHPGPLRPLLPLLVVAACVLPGAGGTCPERALERREEEANVVLTGTVEEILNVDPVQHTYSCKVRVWRYLKGKDLVARESLLDGGNKVVISGFGDPLICDNQVSTGDTRIFFVNPAPPYLWPAHKNELMLNSSLMRITLRNLEEVEFCVEDKPGTHFTPVPPTPPDACRGMLCGFGAVCEPNAEGPGRASCVCKKSPCPSVVAPVCGSDASTYSNECELQRAQCSQQRRIRLLSRGPCGSRDPCSNVTCSFGSTCARSADGLTASCLCPATCRGAPEGTVCGSDGADYPGECQLLRRACARQENVFKKFDGPCDPCQGALPDPSRSCRVNPRTRRPEMLLRPESCPARQAPVCGDDGVTYENDCVMGRSGAARGLLLQKVRSGQCQGRDQCPEPCRFNAVCLSRRGRPRCSCDRVTCDGAYRPVCAQDGRTYDSDCWRQQAECRQQRAIPSKHQGPCDQAPSPCLGVQCAFGATCAVKNGQAACECLQACSSLYDPVCGSDGVTYGSACELEATACTLGREIQVARKGPCDRCGQCRFGALCEAETGRCVCPSECVALAQPVCGSDGHTYPSECMLHVHACTHQISLHVASAGPCETCGDAVCAFGAVCSAGQCVCPRCEHPPPGPVCGSDGVTYGSACELREAACLQQTQIEEARAGPCEQAECGSGGSGSGEDGDCEQELCRQRGGIWDEDSEDGPCVCDFSCQSVPGSPVCGSDGVTYSTECELKKARCESQRGLYVAAQGACRGPTFAPLPPVAPLHCAQTPYGCCQDNITAARGVGLAGCPSACQCNPHGSYGGTCDPATGQCSCRPGVGGLRCDRCEPGFWNFRGIVTDGRSGCTPCSCDPQGAVRDDCEQMTGLCSCKPGVAGPKCGQCPDGRALGPAGCEADASAPATCAEMRCEFGARCVEESGSAHCVCPMLTCPEANATKVCGSDGVTYGNECQLKTIACRQGLQISIQSLGPCQEAVAPSTHPTSASVTVTTPGLLLSQALPAPPGALPLAPSSTAHSQTTPPPSSRPRTTASVPRTTVWPVLTVPPTAPSPAPSLVASAFGESGSTDGSSDEELSGDQEASGGGSGGLEPLEGSSVATPGPPVERASCYNSALGCCSDGKTPSLDAEGSNCPATKVFQGVLELEGVEGQELFYTPEMADPKSELFGETARSIESTLDDLFRNSDVKKDFRSVRLRDLGPGKSVRAIVDVHFDPTTAFRAPDVARALLRQIQVSRRRSLGVRRPLQEHVRFMDFDWFPAFITGATSGAIAAGATARATTASRLPSSAVTPRAPHPSHTSQPVAKTTAAPTTRRPPTTAPSRVPGRRPPAPQQPPKPCDSQPCFHGGTCQDWALGGGFTCSCPAGRGGAVCEKVLGAPVPAFEGRSFLAFPTLRAYHTLRLALEFRALEPQGLLLYNGNARGKDFLALALLDGRVQLRFDTGSGPAVLTSAVPVEPGQWHRLELSRHWRRGTLSVDGETPVLGESPSGTDGLNLDTDLFVGGVPEDQAAVALERTFVGAGLRGCIRLLDVNNQRLELGIGPGAATRGSGVGECGDHPCLPNPCHGGAPCQNLEAGRFHCQCPPGRVGPTCADEKSPCQPNPCHGAAPCRVLPEGGAQCECPLGREGTFCQTASGQDGSGPFLADFNGFSHLELRGLHTFARDLGEKMALEVVFLARGPSGLLLYNGQKTDGKGDFVSLALRDRRLEFRYDLGKGAAVIRSREPVTLGAWTRVSLERNGRKGALRVGDGPRVLGESPVPHTVLNLKEPLYVGGAPDFSKLARAAAVSSGFDGAIQLVSLGGRQLLTPEHVLRQVDVTSFAGHPCTRASGHPCLNGASCVPREAAYVCLCPGGFSGPHCEKGLVEKSAGDVDTLAFDGRTFVEYLNAVTESEKALQSNHFELSLRTEATQGLVLWSGKATERADYVALAIVDGHLQLSYNLGSQPVVLRSTVPVNTNRWLRVVAHREQREGSLQVGNEAPVTGSSPLGATQLDTDGALWLGGLPELPVGPALPKAYGTGFVGCLRDVVVGRHPLHLLEDAVTKPELRPCPTP

SEQ ID NO: 619 - protein, 86 aa, Homo Sapiens
MPPLPLARDTRQPPGASLLVRGFMVPCNACLILLATATLGFAVLLFLNNYKPGTHFTPVPPTPPDACRGMLCGFGAVCEPNAEGPG

SEQ ID NO: 620 - protein, 1930 aa, Homo Sapiens
MRITLRNLEEVEFCVEDKPGTHFTPVPPTPPDACRGMLCGFGAVCEPNAEGPGRASCVCKKSPCPSVVAPVCGSDASTYSNECELQRAQCSQQRRIRLLSRGPCGSRDPCSNVTCSFGSTCARSADGLTASCLCPATCRGAPEGTVCGSDGADYPGECQLLRRACARQENVFKKFDGPCDPCQGALPDPSRSCRVNPRTRRPEMLLRPESCPARQAPVCGDDGVTYENDCVMGRSGAARGLLLQKVRSGQCQGRDQCPEPCRFNAVCLSRRGRPRCSCDRVTCDGAYRPVCAQDGRTYDSDCWRQQAECRQQRAIPSKHQGPCDQAPSPCLGVQCAFGATCAVKNGQAACECLQACSSLYDPVCGSDGVTYGSACELEATACTLGREIQVARKGPCDRCGQCRFGALCEAETGRCVCPSECVALAQPVCGSDGHTYPSECMLHVHACTHQISLHVASAGPCETCGDAVCAFGAVCSAGQCVCPRCEHPPPGPVCGSDGVTYGSACELREAACLQQTQIEEARAGPCEQAECGSGGSGSGEDGDCEQELCRQRGGIWDEDSEDGPCVCDFSCQSVPGSPVCGSDGVTYSTECELKKARCESQRGLYVAAQGACRGPTFAPLPPVAPLHCAQTPYGCCQDNITAARGVGLAGCPSACQCNPHGSYGGTCDPATGQCSCRPGVGGLRCDRCEPGFWNFRGIVTDGRSGCTPCSCDPQGAVRDDCEQMTGLCSCKPGVAGPKCGQCPDGRALGPAGCEADASAPATCAEMRCEFGARCVEESGSAHCVCPMLTCPEANATKVCGSDGVTYGNECQLKTIACRQGLQISIQSLGPCQEAVAPSTHPTSASVTVTTPGLLLSQALPAPPGALPLAPSSTAHSQTTPPPSSRPRTTASVPRTTVWPVLTVPPTAPSPAPSLVASAFGESGSTDGSSDEELSGDQEASGGGSGGLEPLEGSSVATPGPPVERASCYNSALGCCSDGKTPSLDAEGSNCPATKVFQGVLELEGVEGQELFYTPEMADPKSELFGETARSIESTLDDLFRNSDVKKDFRSVRLRDLGPGKSVRAIVDVHFDPTTAFRAPDVARALLRQIQVSRRRSLGVRRPLQEHVRFMDFDWFPAFITGATSGAIAAGATARATTASRLPSSAVTPRAPHPSHTSQPVAKTTAAPTTRRPPTTAPSRVPGRRPPAPQQPPKPCDSQPCFHGGTCQDWALGGGFTCSCPAGRGGAVCEKVLGAPVPAFEGRSFLAFPTLRAYHTLRLALEFRALEPQGLLLYNGNARGKDFLALALLDGRVQLRFDTGSGPAVLTSAVPVEPGQWHRLELSRHWRRGTLSVDGETPVLGESPSGTDGLNLDTDLFVGGVPEDQAAVALERTFVGAGLRGCIRLLDVNNQRLELGIGPGAATRGSGVGECGDHPCLPNPCHGGAPCQNLEAGRFHCQCPPGRVGPTCADEKSPCQPNPCHGAAPCRVLPEGGAQCECPLGREGTFCQTASGQDGSGPFLADFNGFSHLELRGLHTFARDLGEKMALEVVFLARGPSGLLLYNGQKTDGKGDFVSLALRDRRLEFRYDLGKGAAVIRSREPVTLGAWTRVSLERNGRKGALRVGDGPRVLGESPKSRKVPHTVLNLKEPLYVGGAPDFSKLARAAAVSSGFDGAIQLVSLGGRQLLTPEHVLRQVDVTSFAGHPCTRASGHPCLNGASCVPREAAYVCLCPGGFSGPHCEKGLVEKSAGDVDTLAFDGRTFVEYLNAVTESELANEIPVPETLDSGALHSEKALQSNHFELSLRTEATQGLVLWSGKATERADYVALAIVDGHLQLSYNLGSQPVVLRSTVPVNTNRWLRVVAHREQREGSLQVGNEAPVTGSSPLGATQLDTDGALWLGGLPELPVGPALPKAYGTGFVGCLRDVVVGRHPLHLLEDAVTKPELRPCPTP

SEQ ID NO: 621 - protein, 287 aa, Homo Sapiens
  misc_feature (1)..(1): Xaa can be any naturally occurring amino acid
XKGDFVSLALRDRRLEFRYDLGKGAAVIRSREPVTLGAWTRVSLERNGRKGALRVGDGPRVLGESPKSRKVPHTVLNLKEPLYVGGAPDFSKLARAAAVSSGFDGAIQLVSLGGRQLLTPEHVLRQVDVTSFAGHPCTRASGHPCLNGASCVPREAAYVCLCPGGFSGPHCEKGLVEKSAGDVDTLAFDGRTFVEYLNAVTESELANEIPVPETLDSGALHSEKALQSNHFELSLRTEATQGLVLWSGKATERADYVALAIVDGHLQLSYNLGSQPVVLRSTVPVNT

SEQ ID NO: 622 - protein, 132 aa, Homo Sapiens
MLTAAVLSCALLLALPATRGAQMGLAPMEGIRRPDQALLPELPGLGLRAPLKKTTAEQAEEDLLQEAQALAEVLDLQDREPRSSRRCVRLHESCLGQQVPCCDPCATCYCRFFNAFCYCRKLGTAMNPCSRT

SEQ ID NO: 623 - protein, 485 aa, Homo Sapiens
MRKRAPQSEMAPAGVSLRATILCLLAWAGLAAGDRVYIHPFHLVIHNESTCEQLAKANAGKPKDPTFIPAPIQAKTSPVDEKALQDQLVLVAAKLDTEDKLRAAMVGMLANFLGFRIYGMHSELWGVVHGATVLSPTAVFGTLASLYLGALDHTADRLQAILGVPWKDKNCTSRLDAHKVLSALQAVQGLLVAQGRADSQAQLLLSTVVGVFTAPGLHLKQPFVQGLALYTPVVLPRSLDFTELDVAAEKIDRFMQAVTGWKTGCSLMGASVDSTLAFNTYVHFQGKMKGFSLLAEPQEFWVDNSTSVSVPMLSGMGTFQHWSDIQDNFSVTQVPFTESACLLLIQPHYASDLDKVEGLTFQQNSLNWMKKLSPRTIHLTMPQLVLQGSYDLQDLLAQAELPAILHTELNLQKLSNDRIRVGEVLNSIFFELEADEREPTESTQQLNKPEVLEVTLNRPFLFAVYDQSATALHFLGRVANPLSTA

SEQ ID NO: 624 - protein, 1278 aa, Homo Sapiens
MRTGSAASSAAAAAAAAAASASPATGVCMKTPGGGRRGIRRDPGAEPGAAALRGPRQRPILSRLTNNSRIVGLLAQLEKINAEPSESDTARYVTSKILHLAQSQEKTRREMTAKGSTGMEILLSTLENTKDLQTTLNILSILVELVSAGGGRRVSFLVTKGGSQILLQLLMNASKESPPHEDLMVQIHSILAKIGPKDKKFGVKARINGALNITLNLVKQNLQNHRLVLPCLQLLRVYSANSVNSVSLGKNGVVELMFKIIGPFSKKNSSLIKVALDTLAALLKSKTNARRAVDRGYVQVLLTIYVDWHRHDNRHRNMLIRKGILQSLKSVTNIKLGRKAFIDANGMKILYNTSQECLAVRTLDPLVNTSSLIMRKCFPKNRLPLPTIKSSFHFQLPVIPVTGPVAQLYSLPPEVDDVVDESDDNDDIDVEAENETENEDDLDQNFKNDDIETDINKLKPQQEPGRTIEDLKMYEHLFPELVDDFQDYDLISKEPKPFVFEGKVRGPIVVPTAGEETSGNSGNLRKVVMKENISSKGDEGEKKSTFMDLAKEDIKDNDRTLQQQPGDQNRTISSVHGLNNDIVKALDRITLQNIPSQTAPGFTAEMKKDCSLPLTVLTCAKACPHMATCGNVLFEGRTVQLGKLCCTGVETEDDEDTESNSSVEQASVEVPDGPTLHDPDLYIEIVKNTKSVPEYSEVAYPDYFGHIPPPFKEPILERPYGVQRTKIAQDIERLIHQSDIIDRVVYDLDNPNYTIPEEGDILKFNSKFESGNLRKVIQIRKNEYDLILNSDINSNHYHQWFYFEVSGMRPGVAYRFNIINCEKSNSQFNYGMQPLMYSVQEALNARPWWIRMGTDICYYKNHFSRSSVAAGGQKGKSYYTITFTVNFPHKDDVCYFAYHYPYTYSTLQMHLQKLESAHNPQQIYFRKDVLCETLSGNSCPLVTITAMPESNYYEHICHFRNRPYVFLSARVHPGETNASWVMKGTLEYLMSNNPTAQSLRESYIFKIVPMLNPDGVINGNHRCSLSGEDLNRQWQSPSPDLHPTIYHAKGLLQYLAAVKRLPLVYCDYHGHSRKKNVFMYGCSIKETVWHTNDNATSCDVVEDTGYRTLPKILSHIAPAFCMSSCSFVVEKSKESTARVVVWREIGVQRSYTMESTLCGCDQGKYKGLQIGTRELEEMGAKFCVGLLRLKRLTSPLEYNLPSSLLDFENDLIESSCKVTSPTTYVLDEDEPRFLEEVDYSAESNDELDIELAENVGDYEPSAQEEVLSDSELSRTYLP

SEQ ID NO: 625 - protein, 1238 aa, Homo Sapiens
MRTGSAASSAAAAAAAAAASASPATGVCMKTPGGGRRGIRRDPGAEPGAAALRGPRQRPILSRLTNNSRIVGLLAQLEKINAEPSESDTARYVTSKILHLAQSQEKTRREMTAKGSTGMEILLSTLENTKDLQTTLNILSILVELVSAGGGRRVSFLVTKGGSQILLQLLMNASKESPPHEDLMVQIHSILAKIGPKDKKFGVKARINGALNITLNLVKQNLQNHRLVLPCLQLLRVYSANSVNSVSLGKNGVVELMFKIIGPFSKKNSSLIKVALDTLAALLKSKTNARRAVDRGYVQVLLTIYVDWHRHDNRHRNMLIRKGILQSLKSVTNIKLGRKAFIDANGMKILYNTSQLPVIPVTGPVAQLYSLPPEVDDVVDESDDNDDIDVEAENETENEDDLDQNFKNDDIETDINKLKPQQEPGRTIEDLKMYEHLFPELVDDFQDYDLISKEPKPFVFEGKVRGPIVVPTAGEETSGNSGNLRKVVMKENISSKGDEGEKKSTFMDLAKEDIKDNDRTLQQQPGDQNRTISSVHGLNNDIVKALDRITLQNIPSQTAPGFTAEMKKDCSLPLTVLTCAKACPHMATCGNVLFEGRTVQLGKLCCTGVETEDDEDTESNSSVEQASVEVPDGPTLHDPDLYIEIVKNTKSVPEYSEVAYPDYFGHIPPPFKEPILERPYGVQRTKIAQDIERLIHQSDIIDRVVYDLDNPNYTIPEEGDILKFNSKFESGNLRKVIQIRKNEYDLILNSDINSNHYHQWFYFEVSGMRPGVAYRFNIINCEKSNSQFNYGMQPLMYSVQEALNARPWWIRMGTDICYYKNHFSRSSVAAGGQKGKSYYTITFTVNFPHKDDVCYFAYHYPYTYSTLQMHLQKLESAHNPQQIYFRKDVLCETLSGNSCPLVTITAMPESNYYEHICHFRNRPYVFLSARVHPGETNASWVMKGTLEYLMSNNPTAQSLRESYIFKIVPMLNPDGVINGNHRCSLSGEDLNRQWQSPSPDLHPTIYHAKGLLQYLAAVKRLPLVYCDYHGHSRKKNVFMYGCSIKETVWHTNDNATSCDVVEDTGYRTLPKILSHIAPAFCMSSCSFVVEKSKESTARVVVWREIGVQRSYTMESTLCGCDQGKYKGLQIGTRELEEMGAKFCVGLLRLKRLTSPLEYNLPSSLLDFENDLIESSCKVTSPTTYVLDEDEPRFLEEVDYSAESNDELDIELAENVGDYEPSAQEEVLSDSELSRTYLP

SEQ ID NO: 626 - protein, 1226 aa, Homo Sapiens
MSKLKVIPEKSLTNNSRIVGLLAQLEKINAEPSESDTARYVTSKILHLAQSQEKTRREMTAKGSTGMEILLSTLENTKDLQTTLNILSILVELVSAGGGRRVSFLVTKGGSQILLQLLMNASKESPPHEDLMVQIHSILAKIGPKDKKFGVKARINGALNITLNLVKQNLQNHRLVLPCLQLLRVYSANSVNSVSLGKNGVVELMFKIIGPFSKKNSSLIKVALDTLAALLKSKTNARRAVDRGYVQVLLTIYVDWHRHDNRHRNMLIRKGILQSLKSVTNIKLGRKAFIDANGMKILYNTSQECLAVRTLDPLVNTSSLIMRKCFPKNRLPLPTIKSSFHFQLPVIPVTGPVAQLYSLPPEVDDVVDESDDNDDIDVEAENETENEDDLDQNFKNDDIETDINKLKPQQEPGRTIEDLKMYEHLFPELVDDFQDYDLISKEPKPFVFEGKVRGPIVVPTAGEETSGNSGNLRKVVMKENISSKGDEGEKKSTFMDLAKEDIKDNDRTLQQQPGDQNRTISSVHGLNNDIVKALDRITLQNIPSQTAPGFTAEMKKDCSLPLTVLTCAKACPHMATCGNVLFEGRTVQLGKLCCTGVETEDDEDTESNSSVEQASVEVPDGPTLHDPDLYIEIVKNTKSVPEYSEVAYPDYFGHIPPPFKEPILERPYGVQRTKIAQDIERLIHQSDIIDRVVYDLDNPNYTIPEEGDILKFNSKFESGNLRKVIQIRKNEYDLILNSDINSNHYHQWFYFEVSGMRPGVAYRFNIINCEKSNSQFNYGMQPLMYSVQEALNARPWWIRMGTDICYYKNHFSRSSVAAGGQKGKSYYTITFTVNFPHKDDVCYFAYHYPYTYSTLQMHLQKLESAHNPQQIYFRKDVLCETLSGNSCPLVTITAMPESNYYEHICHFRNRPYVFLSARVHPGETNASWVMKGTLEYLMSNNPTAQSLRESYIFKIVPMLNPDGVINGNHRCSLSGEDLNRQWQSPSPDLHPTIYHAKGLLQYLAAVKRLPLVYCDYHGHSRKKNVFMYGCSIKETVWHTNDNATSCDVVEDTGYRTLPKILSHIAPAFCMSSCSFVVEKSKESTARVVVWREIGVQRSYTMESTLCGCDQGKYKGLQIGTRELEEMGAKFCVGLLRLKRLTSPLEYNLPSSLLDFENDLIESSCKVTSPTTYVLDEDEPRFLEEVDYSAESNDELDIELAENVGDYEPSAQEEVLSDSELSRTYLP

SEQ ID NO: 627 - protein, 1186 aa, Homo Sapiens
MSKLKVIPEKSLTNNSRIVGLLAQLEKINAEPSESDTARYVTSKILHLAQSQEKTRREMTAKGSTGMEILLSTLENTKDLQTTLNILSILVELVSAGGGRRVSFLVTKGGSQILLQLLMNASKESPPHEDLMVQIHSILAKIGPKDKKFGVKARINGALNITLNLVKQNLQNHRLVLPCLQLLRVYSANSVNSVSLGKNGVVELMFKIIGPFSKKNSSLIKVALDTLAALLKSKTNARRAVDRGYVQVLLTIYVDWHRHDNRHRNMLIRKGILQSLKSVTNIKLGRKAFIDANGMKILYNTSQLPVIPVTGPVAQLYSLPPEVDDVVDESDDNDDIDVEAENETENEDDLDQNFKNDDIETDINKLKPQQEPGRTIEDLKMYEHLFPELVDDFQDYDLISKEPKPFVFEGKVRGPIVVPTAGEETSGNSGNLRKVVMKENISSKGDEGEKKSTFMDLAKEDIKDNDRTLQQQPGDQNRTISSVHGLNNDIVKALDRITLQNIPSQTAPGFTAEMKKDCSLPLTVLTCAKACPHMATCGNVLFEGRTVQLGKLCCTGVETEDDEDTESNSSVEQASVEVPDGPTLHDPDLYIEIVKNTKSVPEYSEVAYPDYFGHIPPPFKEPILERPYGVQRTKIAQDIERLIHQSDIIDRVVYDLDNPNYTIPEEGDILKFNSKFESGNLRKVIQIRKNEYDLILNSDINSNHYHQWFYFEVSGMRPGVAYRFNIINCEKSNSQFNYGMQPLMYSVQEALNARPWWIRMGTDICYYKNHFSRSSVAAGGQKGKSYYTITFTVNFPHKDDVCYFAYHYPYTYSTLQMHLQKLESAHNPQQIYFRKDVLCETLSGNSCPLVTITAMPESNYYEHICHFRNRPYVFLSARVHPGETNASWVMKGTLEYLMSNNPTAQSLRESYIFKIVPMLNPDGVINGNHRCSLSGEDLNRQWQSPSPDLHPTIYHAKGLLQYLAAVKRLPLVYCDYHGHSRKKNVFMYGCSIKETVWHTNDNATSCDVVEDTGYRTLPKILSHIAPAFCMSSCSFVVEKSKESTARVVVWREIGVQRSYTMESTLCGCDQGKYKGLQIGTRELEEMGAKFCVGLLRLKRLTSPLEYNLPSSLLDFENDLIESSCKVTSPTTYVLDEDEPRFLEEVDYSAESNDELDIELAENVGDYEPSAQEEVLSDSELSRTYLP

SEQ ID NO: 628 - protein, 159 aa, Homo Sapiens
MELPAVNLKCASSSVPRNHPHVILLGHWLLTTCFWRHFSAKPRLETIELTCALCKLRSAAHRATAGLHCILRLLCLGQLHHPGLGRVGCGSAGLHRRHKHVSGWLAGHHLPGHRAHQHLLPAGQPHGHGPLWRGHGHPQLAAQAALLLLRLPHVPGARG

SEQ ID NO: 629 - protein, 111 aa, Homo Sapiens
MELPAVNLKGLHCILRLLCLGQLHHPGLGRVGCGSAGLHRRHKHVSGWLAGHHLPGHRAHQHLLPAGQPHGHGPLWRGHGHPQLAAQAALLLLRLPHVPGARGFPWVFSGP

SEQ ID NO: 630 - protein, 147 aa, Homo Sapiens
MELPAVNLKVILLGHWLLTTCFWRHFSAKPRLETIELTCALCKLRSAAHRATAGLHCILRLLCLGQLHHPGLGRVGCGSAGLHRRHKHVSGWLAGHHLPGHRAHQHLLPAGQPHGHGPLWRGHGHPQLAAQAALLLLRLPHVPGARG

SEQ ID NO: 631 - protein, 155 aa, Homo Sapiens
MELPAVNLKVILLGHWLLTTCFWRHFSAKPRLETIELTCALCKLRSAAHRATAGLHCILRLLCLGQLHHPGLGRVGCGSAGLHRRHKHVSGWLAGHHLPGHRAHQHLLPAGQPHGHGPLWRGHGHPQLAAQAALLLLRLPHVPGARGFPWVFSGP

SEQ ID NO: 632 - protein, 155 aa, Homo Sapiens
MELPAVNLKVILLGHWLLTTCFWVACWPPSSWTSCTSASSTRGSASRTRAALAWAWPSSACCSSRSPAASSTTCTGSAGVSSWSTLVSLGLLRTVVPTRRLTQQRRPQIPLQSQRAGVKMPEGTEASHAAPGPAPGLPRAWEVVLGMLLTSVSWT

SEQ ID NO: 633 - protein, 159 aa, Homo Sapiens
MELPAVNLKVILLGHWLLTTWGCIVFSGSYAWANFTILALGVWAVAQRDSIDAISMFLGGLLATIFLDIVHISIFYPRVSLTDTGRFGVGMAILSLLLKPLSCCFVYHMYRERGGELLVHTGFLGSSQDRSAYQTIDSAEAPADPFAVPEGRSQDARGY

SEQ ID NO: 634 - protein, 152 aa, Homo Sapiens
MELPAVNLKVILLGHWLLTTWGCIVFSGSYAWANFTILALGVWAVAQRDSIDAISMFLGGLLATIFLDIVHISIFYPRVSLTDTGRFGVGMAILSLLLKPLSCCFVYHMYRERGGFLGSSQDRSAYQTIDSAEAPADPFAVPEGRSQDARGY

SEQ ID NO: 635 - protein, 63 aa, Homo Sapiens
MELPAVNLKVILLGHWLLTTWHKDCTPCRSWEGDVEVLIRAPQGLPHSEASALQLDFHLYHLF

SEQ ID NO: 636 - protein, 508 aa, Homo Sapiens
MEKWDGNEGTSAFHMPEWMIQFADQKQEFNKRPTKIGRRSLSRSISQSSTDSYSSAASYTDSSDDETSPRDKQQKNSKGSSDFCVKNIKQAEFGRREIEIAEQEMPALMALRKRAQGEKPLAGAKIVGCTHITAQTAVLMETLGALGAQCRWAACNIYSTLNEVAAALAESGFPVFAWKGESEDDFWWCIDRCVNVEGWQPNMILDDGGDLTHWIYKKYPNMFKKIKGIVEESVTGVHRLYQLSKAGKLCVPAMNVNDSVTKQKFDNLYCCRESILDGLKRTTDMMFGGKQVVVCGYGEVGKGCCAALKAMGSIVYVTEIDPICALQACMDGFRLVKLNEVIRQVDIVITCTGNKNVVTREHLDRMKNSCIVCNMGHSNTEIDVASLRTPELTWERVRSQVDHVIWPDGKRIVLLAEGRLLNLSCSTVPTFVLSITATTQALALIELYNAPEGRYKQDVYLLPKKMDEYVASLHLPTFDAHLTELTDEQAKYLGLNKNGPFKPNYYRY

SEQ ID NO: 637 - protein, 75 aa, Homo Sapiens
MEKWDGNEGTSAFHMPEWMQIQFADQKQEFNKRPTKIGRRSLSRSISQSSTDSYSSAASYTDSSDDETSPRDKQQ

SEQ ID NO: 638 - protein, 508 aa, Homo Sapiens
MLGSKKKYIVNGNSGIKAQIQFADQKQEFNKRPTKIGRRSLSRSISQSSTDSYSSAASYTDSSDDETSPRDKQQKNSKGSSDFCVKNIKQAEFGRREIEIAEQEMPALMALRKRAQGEKPLAGAKIVGCTHITAQTAVLMETLGALGAQCRWAACNIYSTLNEVAAALAESGFPVFAWKGESEDDFWWCIDRCVNVEGWQPNMILDDGGDLTHWIYKKYPNMFKKIKGIVEESVTGVHRLYQLSKAGKLCVPAMNVNDSVTKQKFDNLYCCRESILDGLKRTTDMMFGGKQVVVCGYGEVGKGCCAALKAMGSIVYVTEIDPICALQACMDGFRLVKLNEVIRQVDIVITCTGNKNVVTREHLDRMKNSCIVCNMGHSNTEIDVASLRTPELTWERVRSQVDHVIWPDGKRIVLLAEGRLLNLSCSTVPTFVLSITATTQALALIELYNAPEGRYKQDVYLLPKKMDEYVASLHLPTFDAHLTELTDEQAKYLGLNKNGPFKPNYYRY

SEQ ID NO: 639 - protein, 183 aa, Homo Sapiens [sequence omitted]

SEQ ID NO: 640 - protein, 610 aa, Homo Sapiens
MSVQVVSAAAAAKVPEVELKDLSPSEAESQLGLSTAAVGAMAPPAGGGDPEAPAPAAERPPVPGPGSGPAAALSPAAGKVPQASAMKRSDPHHQHQRHRDGGEALVSPDGTVTEAPRTVKKIQFADQKQEFNKRPTKIGRRSLSRSISQSSTDSYSSAASYTDSSDDETSPRDKQQKNSKGSSDFCVKNIKQAEFGRREIEIAEQEMPALMALRKRAQGEKPLAGAKIVGCTHITAQTAVLMETLGALGAQCRWAACNIYSTLNEVAAALAESGFPVFAWKGESEDDFWWCIDRCVNVEGWQPNMILDDGGDLTHWIYKKYPNMFKKIKGIVEESVTGVHRLYQLSKAGKLCVPAMNVNDSVTKQKFDNLYCCRESILDGLKRTTDMMFGGKQVVVCGYGEVGKGCCAALKAMGSIVYVTEIDPICALQACMDGFRLVKLNEVIRQVDIVITCTGNKNVVTREHLDRMKNSCIVCNMGHSNTEIDVASLRTPELTWERVRSQVDHVIWPDGKRIVLLAEGRLLNLSCSTVPTFVLSITATTQALALIELYNAPEGRYKQDVYLLPKKMDEYVASLHLPTFDAHLTELTDEQAKYLGLNKNGPFKPNYYRY

SEQ ID NO: 641 - protein, 611 aa, Homo Sapiens
MSVQVVSAAAAAKVPEVELKDLSPSEAESQLGLSTAAVGAMAPPAGGGDPEAPAPAAERPPVPGPGSGPAAALSPAAGKVPQASAMKRSDPHHQHQRHRDGGEALVSPDGTVTEAPRTVKKQIQFADQKQEFNKRPTKIGRRSLSRSISQSSTDSYSSAASYTDSSDDETSPRDKQQKNSKGSSDFCVKNIKQAEFGRREIEIAEQEMPALMALRKRAQGEKPLAGAKIVGCTHITAQTAVLMETLGALGAQCRWAACNIYSTLNEVAAALAESGFPVFAWKGESEDDFWWCIDRCVNVEGWQPNMILDDGGDLTHWIYKKYPNMFKKIKGIVEESVTGVHRLYQLSKAGKLCVPAMNVNDSVTKQKFDNLYCCRESILDGLKRTTDMMFGGKQVVVCGYGEVGKGCCAALKAMGSIVYVTEIDPICALQACMDGFRLVKLNEVIRQVDIVITCTGNKNVVTREHLDRMKNSCIVCNMGHSNTEIDVASLRTPELTWERVRSQVDHVIWPDGKRIVLLAEGRLLNLSCSTVPTFVLSITATTQALALIELYNAPEGRYKQDVYLLPKKMDEYVASLHLPTFDAHLTELTDEQAKYLGLNKNGPFKPNYYRY

SEQ ID NO: 642 - protein, 518 aa, Homo Sapiens
  misc_feature (1)..(1): Xaa can be any naturally occurring amino acid
XRKWSRQFLLSFWCTVCSAHQGTIFLSLKIQFADQKQEFNKRPTKIGRRSLSRSISQSSTDSYSSAASYTDSSDDETSPRDKQQKNSKGSSDFCVKNIKQAEFGRREIEIAEQEMPALMALRKRAQGEKPLAGAKIVGCTHITAQTAVLMETLGALGAQCRWAACNIYSTLNEVAAALAESGFPVFAWKGESEDDFWWCIDRCVNVEGWQPNMILDDGGDLTHWIYKKYPNMFKKIKGIVEESVTGVHRLYQLSKAGKLCVPAMNVNDSVTKQKFDNLYCCRESILDGLKRTTDMMFGGKQVVVCGYGEVGKGCCAALKAMGSIVYVTEIDPICALQACMDGFRLVKLNEVIRQVDIVITCTGNKNVVTREHLDRMKNSCIVCNMGHSNTEIDVASLRTPELTWERVRSQVDHVIWPDGKRIVLLAEGRLLNLSCSTVPTFVLSITATTQALALIELYNAPEGRYKQDVYLLPKKMDEYVASLHLPTFDAHLTELTDEQAKYLGLNKNGPFKPNYYRY

SEQ ID NO: 643 - protein, 368 aa, Homo Sapiens
MKSLVLLLCLAQLWGCHSAPHGPGLIYRQPNCDDPETEEAALVAIDYINQNLPWGYKHTLNQIDEVKVWPQQPSGELFEIEIDTLETTCHVLDPTPVARCSVRQLKEHAVEGDCDFQLLKLDGKFSVVYAKCDSSPADSAEDVRKVCQDCPLLAPLNDTRVVHAAKAALAAFNAQNNGSNFQLEEISRAQLVPLPPSTYVEFTVSGTDCVAKEATEAAKCNLLAEKQYGFCKATLSEKLGGAEVAVTCMVFQTQPVSSQPQPEGANEAVPTPVVDPDAPPSPPLGAPGLPPAGSPPDSHVLLAAPPGHQLHRAHYDLRHTFMGVVSLGSPSGEVSHPRKTRTVVQPSVGAAAGPVVPPCPGRIRHFKV

SEQ ID NO: 644 - protein, 367 aa, Homo Sapiens
MKSLVLLLCLAQLWGCHSAPHGPGLIYRQPNCDDPETEEAALVAIDYINQNLPWGYKHTLNQIDEVKVWPQQPSGELFEIEIDTLETTCHVLDPTPVARCSVRQLKEHAVEGDCDFQLLKLDGKFSVVYAKCDSSPDSAEDVRKVCQDCPLLAPLNDTRVVHAAKAALAAFNAQNNGSNFQLEEISRAQLVPLPPSTYVEFTVSGTDCVAKEATEAAKCNLLAEKQYGFCKATLSEKLGGAEVAVTCMVFQTQPVSSQPQPEGANEAVPTPVVDPDAPPSPPLGAPGLPPAGSPPDSHVLLAAPPGHQLHRAHYDLRHTFMGVVSLGSPSGEVSHPRKTRTVVQPSVGAAAGPVVPPCPGRIRHFKV

SEQ ID NO: 645 - protein, 47 aa, Homo Sapiens
MALVPCQVLRMAILLSYCSILCNYKAIEMPSHQTYGGSWKFLTFIDL

SEQ ID NO: 646 - protein, 124 aa, Homo Sapiens
MALVPCQVLRMAILLSYCSILCNYKAIEMPSHQTYGGSWKFLTFIDLFVVAVFWIIYAYDREMIYPKLLDNFIPGWLNHGMHTTVLPFILIEMRTSHHQYPSRSSGLTAICTFSVGYILWVCWV

SEQ ID NO: 647 - protein, 137 aa, Homo Sapiens
MALVPCQVLRMAILLSYCSILCNYKAIEMPSHQTYGGSWKFLTFIDLVIQAVFFGICVLTDLSSLLTRGSGNQEQERQLKKLISLRDWMLAVLAFPVGVFVVAVFWIIYAYDREMIYPKLLDNFIPGWLNHGMHFKA

SEQ ID NO: 648 - protein, 245 aa, Homo Sapiens
MALVPCQVLRMAILLSYCSILCNYKAIEMPSHQTYGGSWKFLTFIDLVIQAVFFGICVLTDLSSLLTRGSGNQEQERQLKKLISLRDWMLAVLAFPVGVFVVAVFWIIYAYDREMIYPKLLDNFIPGWLNHGMHTTVLPFILIEMRTSHHQYPSRSSGLTAICTFSVGYILWVCWVHHVTGMWVYPFLEHIGPGARIIFFGSTTILMNFLYLLGEVLNNYIWDTQKKPPSWQDMKIKFMYLGPSS

SEQ ID NO: 649 - protein, 238 aa, Homo Sapiens
MALVPCQVLRMAILLSYCSILCNYKAIEMPSHQTYGGSWKFLTFIDLVIQAVFFGICVLTDLSSLLTRGSGNQEQERQLKKLISLRDWMLAVLAFPVGVFVVAVFWIIYAYDREMIYPKLLDNFIPGWLNHGMHTTVLPFILIEMRTSHHQYPSRSSGLTAICTFSVGYILWVCWVHHVTGMWVYPFLEHIGPGARIIFFGSTTILMNFLYLLGEVLNNYIWDTQKSMEEEKEKPKLE

SEQ ID NO: 650 - protein, 231 aa, Homo Sapiens
MALVPCQVLRMAILLSYCSILCNYKAIEMPSHQTYGGSWKFLTFIDLVIQAVFFGICVLTDLSSLLTRGSGNQEQERQLKKLISLRDWMLAVLAFPVGVFVVAVFWIIYAYDREMIYPKLLDNFIPGWLNHGMHTTVLPFILIEMRTSHHQYPSRSSGLTAICTFSVGYILWVCWVHHVTGMWVYPFLEHIGPGARIIFFGSTTILMNFLYLLGEVLNNYIWDTQKTAKLK

SEQ ID NO: 651 - protein, 134 aa, Homo Sapiens
MALVPCQVLRMAILLSYCSILCNYKAIEMPSHQTYGGSWKFLTFIDLVIQAVFFGICVLTDLSSLLTRGSGNQEQERQLKKLISLRDWMLAVLAFPVGVFVVAVFWIIYAYDREMIYPKLLDNFIPGWLNHGML

SEQ ID NO: 652 - protein, 138 aa, Homo Sapiens
MLAVLAFPVGVFVVAVFWIIYAYDREMIYPKLLDNFIPGWLNHGMHTTVLPFILIEMRTSHHQYPSRSSGLTAICTFSVGYILWVCWVHHVTGMWVYPFLEHIGPGARIIFFGSTTILMNFLYLLGEVLNNYIWDTQK

SEQ ID NO: 653 - protein, 192 aa, Homo Sapiens
MTKVLRMAILLSYCSILCNYKAIEMPSHQTYGGSWKFLTFIDLVIQAVFFGICVLTDLSSLLTRGSGNQEQERQLKKLISLRDWMLAVLAFPVGVFVVAVFWIIYAYDREMIYPKLLDNFIPGWLNHGMHTTVLPFILIEMRTSHHQYPSRSSGLTAICTFSVGYILWVCWVHHVTGMWVYPFLEHIGPGAR

SEQ ID NO: 654 - protein, 171 aa, Homo Sapiens
MAKQYIEKSLLVPDHVITRLMMSELENRRGQHWLLDGFPRTLGQAEALDKICEVDLVISLNIPFETLKDRLSRRWIHPPSGRVYNLDFNPPHVHGIDDVTGEPLVQQEDDKPEAVAARLRQYKDVAKPVIELYKSRGVLHQFSGTETNKIWPYVYTLFSNKITPIQSKEAY

SEQ ID NO: 655 - protein, 223 aa, Homo Sapiens
MASKLLRAVILGPPGSGKGTVCQRIAQNFGLQHLSSGHFLRENIKASTEVGEMAKQYIEKSLLVPDHVITRLMMSELENRRGQHWLLDGFPRTLGQAEALDKICEVDLVISLNIPFETLKDRLSRRWIHPPSGRVYNLDFNPPHVHGIDDVTGEPLVQQEDDKPEAVAARLRQYKDVAKPVIELYKSRGVLHQFSGTETNKIWPYVYTLFSNKITPIQSKEAY

SEQ ID NO: 656 - protein, 223 aa, Homo Sapiens; identical to SEQ ID NO: 655

SEQ ID NO: 657 - protein, 223 aa, Homo Sapiens; identical to SEQ ID NO: 655

SEQ ID NO: 658 - protein, 78 aa, Homo Sapiens
LALLALLMSLTQGVLTALRLRKMTFGRVSDLGQFIRESEPEPDVRKSKGSMFSQAMKKWVQGNTDEAQEELAWKIAKM

SEQ ID NO: 659 - protein, 138 aa, Homo Sapiens
MRGAGPSPRQSPRTLRPDPGPAMSFFRRKVKGKEQEKTSDVKSIKALKIMPCWRLQDQVMLQSMPFLPTWTPFQVAGQPHLRSSQATWRPLILVTWADLVWTTRLKRPNQAFLRPLNKSCTTLLSSLTSFNSWNFGEW

SEQ ID NO: 660 - protein, 150 aa, Homo Sapiens
MRGAGPSPRQSPRTLRPDPGPAMSFFRRKVKGKEQEKTSDVKSIKASISVHSPQKSTKNHALLEAAGPSHVAINAISANMDSFSSSRTATLKKQPSHMEAAHFGDLDLVWTTRLKRPNQAFLRPLNKSCTTLLSSLTSFNSWNFGEWSIW

SEQ ID NO: 661 - protein, 662 aa, Homo Sapiens
MRGAGPSPRQSPRTLRPDPGPAMSFFRRKVKGKEQEKTSDVKSIKASISVHSPQKSTKNHALLEAAGPSHVAINAISANMDSFSSSRTATLKKQPSHMEAAHFGDLGRSCLDYQTQETKSSLSKTLEQVLHDTIVLPYFIQFMELRRMEHLVKFWLEAESFHSTTWSRIRAHSLNTVKQSSLAEPVSPSKKHETTASFLTDSLDKRLEDSGSAQLFMTHSEGIDLNNRTNSTQNHLLLSQECDSAHSLRLEMARAGTHQVSMETQESSSTLTVASRNSPASPLKELSGKLMKSIEQDAVNTFTKYISPDAAKPIPITEAMRNDIIARICGEDGQVDPNCFVLAQSIVFSAMEQEHFSEFLRSHHFCKYQIEVLTSGTVYLADILFCESALFYFSEYMEKEDAVNILQFWLAADNFQSQLAAKKGQYDGQEAQNDAMILYDKYFSLQATHPLGFDDVVRLEIESNICREGGPLPNCFTTPLRQAWTTMEKVFLPGFLSSNLYYKYLNDLIHSVRGDEFLGGNVSLTAPGSVGPPDESHPGSSDSSASQSSVKKASIKILKNFDEAIIVDAASLDPESLYQRTYAGKMTFGRVSDLGQFIRESEPEPDVRKSKGSMFSQAMKKWVQGNTDEAQEELAWKIAKMIVSDIMQQAQYDQPLEKSTKL

SEQ ID NO: 662 - protein, 604 aa, Homo Sapiens
MRGAGPSPRQSPRTLRPDPGPAMSFFRRKVKGKEQEKTSDVKSIKASISVHSPQKSTKNHALLEAAGPSHVAINAISANMDSFSSSRTATLKKQPSHMEAAHFGDLGRSCLDYQTQETKSSLSKTLEQVLHDTIVLPYFIQFMELRRMEHLVKFWLEAESFHSTTWSRIRAHSLNTVKQSSLAEPVSPSKKHETTASFLTDSLDKRLEDSGSAQLFMTHSEGIDLNNRTNSTQNHLLLSQECDSAHSLRLEMARAGTHQVSMETQESSSTLTVASRNSPASPLKELSGKLMKSIEQDAVNTFTKYISPDAAKPIPITEAMRNDIIARICGEDGQVDPNCFVLAQSIVFSAMEQEHFSEFLRSHHFCKYQIEVLTSGTVYLADILFCESALFYFSEYMEKEDAVNILQFWLAADNFQSQLAAKKGQYDGQEAQNDAMILYDKYFSLQATHPLGFDDVVRLEIESNICREGGPLPNCFTTPLRQAWTTMEKSSVKKASIKILKNFDEAIIVDAASLDPESLYQRTYAGKMTFGRVSDLGQFIRESEPEPDVRKSKGSMFSQAMKKWVQGNTDEAQEELAWKIAKMIVSDIMQQAQYDQPLEKSTKL

SEQ ID NO: 663 - protein, 66 aa, Homo Sapiens
MRGAGPSPRQSPRTLRPDPGPAMSFFRRKVKGKEQEKTSDVKSIKGCRTKSCCNQCHFCQHGLLFK

SEQ ID NO: 664 - protein, 63 aa, Homo Sapiens
MRGAGPSPRQSPRTLRPDPGPAMSFFRRKVKGKEQEKTSDVKSIKVETEFHHVSQYGLDLLTL

SEQ ID NO: 665 - protein, 59 aa, Homo Sapiens
  misc_feature (1)..(1): Xaa can be any naturally occurring amino acid
XKYISPDAAKPIPITEAMRNDIIARICGEDGQVDPNCFVLAQSIVFSAMEQDTWKKRMQ

SEQ ID NO: 666 - protein, 31 aa, Homo Sapiens
  misc_feature (1)..(1): Xaa can be any naturally occurring amino acid
XLTAPGSVGPPDESHPGSSDSSASQCEKSQY

SEQ ID NO: 667 - protein, 323 aa, Homo Sapiens
MDSKYQCVKLNDGHFMPVLGFGTYAPAEVPKSKALEATKLAIEAGFRHIDSAHLYNNEEQVGLAIRSKIADGSVKREDIFYTSKLWCNSHRPELVRPALERSLKNLQLDYVDLYLIHFPVSVKPGEEVIPKDENGKILFDTVDLCATWEAVEKCKDAGLAKSIGVSNFNRRQLEMILNKPGLKYKPVCNQVECHPYFNQRKLLDFCKSKDIVLVAYSALGSHREEPWVDPNSPVLLEDPVLCALAKKHKRTPALIALRYQLQRGVVVLAKSYNEQRIRQNVQVFEFQLTSEEMKAIDGLNRNVRYLTLDIFAGPPNYPFSDEY

SEQ ID NO: 668 - protein, 205 aa, Homo Sapiens
MGVVSLFLCIVEQIFTSSKKIQFRGIFMAKVPKSKALEATKLAIEAGFRHIDSAHLYNNEEQVGLAIRSKIADGSVKREDIFYTSKLWCNSHRPELVRPALERSLKNLQLDYVDLYLIHFPVSVKPGEEVIPKDENGKILFDTVDLCATWEAVEKCKDAGLAKSIGVSNFNRRQLEMILNKPGLKYKPVCNQPRDNSIFSLSPDW

SEQ ID NO: 669 - protein, 248 aa, Homo Sapiens
  misc_feature (1)..(1): Xaa can be any naturally occurring amino acid
XSKYQCVKLNDGHFMPVLGFGTYAPAEVGLAIRSKIADGSVKREDIFYTSKLWCNSHRPELVRPALERSLKNLQLDYVDLYLIHFPVSVKPGEEVIPKDENGKILFDTVDLCATWEAVEKCKDAGLAKSIGVSNFNRRQLEMILNKPGLKYKPVCNQVECHPYFNQRKLLDFCKSKDIVLVAYSALGSHREEPWVDPNSPVLLEDPVLCALAKKHKRTPALIALRYQLQRGVVVLAKSYNEQRIRQNV

SEQ ID NO: 670 - protein, 172 aa, Homo Sapiens
MPVPASWPHLPSPFLLMTLLLGRLTGVAGEDELQVIQPEKSVSVAAGESATLRCAMTSLIPVGPIMWFRGAGAGRELIYNQKEGHFPRVTTVSELTKRNNLDFSISISNITPADAGTYYCVKFRKGSPDDVEFKSGAGTELSVRAFFQESHMCSMCNKRRCHRLYQLGSQSS

SEQ ID NO: 671 - protein, 177 aa, Homo Sapiens
MPVPASWPHPPCPFLLLTLLLGLTGVAGEDELQVIQPEKSVSVAAGESATLRCAMTSLIPVGPIMWFRGAGAGRELIYNQKEGHFPRVTTVSELTKRNNLDFSISISNITPADAGTYYCVKFRKGSPDDVEFKSGAGTELSVRGVTHVFHVQQTEMSQTVSTGESIILSCSVPNTLP

SEQ ID NO: 672 - protein, 140 aa, Homo Sapiens
  misc_feature (1)..(1): Xaa can be any naturally occurring amino acid
XLIYNQKEGHFPRVTTVSDLTKRNNMDFSIRISNITPADAGTYYCVKFRKGSPDHVEFKSGAGTELSVREARTVFSARSTESRASPGQAFRQSKLQVSPQCPSLPPHSTHLCLPYCCICCLNWQSLTVLEARSLKSASLD

SEQ ID NO: 673 - protein, 45 aa, Homo Sapiens
  misc_feature (1)..(1): Xaa can be any naturally occurring amino acid
XVHKAVVEVDESGTRAAAATGTIFTFRYSLNGHCVPGTVPSAEEK

SEQ ID NO: 674 - protein, 85 aa, Homo Sapiens
KKEHVFIHERPRKINGICISPKKVACQNLSAIFCFQSETKFKMTVCQLIEGTRYPACRYHYSPTEGFVLVTCDDLRPDSFLGYVK

SEQ ID NO: 675 - protein, 96 aa, Homo Sapiens
MIIMVIIFLVLLFWENEVNDEAVMSTLEHLHVDYPQNDVPVPARRDYTTSEMETFPLLLLSLGLVLAEASESTMKIIKEEFTDEEMQYDMAKSGQE

SEQ ID NO: 676 - protein, 31 aa, Homo Sapiens
MVMGLGVLLLVFVLGLGLTPPTLAQDNSRHL

SEQ ID NO: 677 - protein, 190 aa, Homo Sapiens
MCLCVCLYVCICVYVCVCHFVCFWVCLPLRVSVYLYLRVCVCVCVFVCLCMCVRGCVSVCVCVCIEREGERKGATDGSAWKVYPHSQPWEESVNPPTGQDQLWWCLADSGNVTFHLRMGLHFLGKECRSWSLKECFFFPFVIERAQPCVHWLTVTNLRVGDSHREETEGTADSEQESGGTSLPLGPNPQL

SEQ ID NO: 678 - protein, 23 aa, Homo Sapiens
MSRLVRGSSLLTYLVVALVLQSR

SEQ ID NO: 679 - protein, 1266 aa, Homo Sapiens
MGPLMVLFCLLFLYPGLADSAPSCPQNVNISGGTFTLSHGWAPGSLLTYSCPQGLYPSPASRLCKSSGQWQTPGATRSLSKAVCKPGHCPNPGISLGAVRTGFRFGHGDKVRYRCSSNLVLTGSSERECQGNGVWSGTEPICRQPYSYDFPEDVAPALGTSFSHMLGATNPTQKTKDHENGTGTNTYAALNSVYLMMNNQMRLLGMETMAWQEIRHAIILLTDGKSNMGGSPKTAVDHIREILNINQKRNDYLDIYAIGVGKLDVDWRELNELGSKKDGERHAFILQDTKALHQVFEHMLDVSKLTDTICGVGNMSANASDQERTPWHVTIKPKSQETCRGALISDQWVLTAAHCFRDGNDHSLWRVNVGDPKSQWGKEFLIEKAVISPGFDVFAKKNQGILEFYGDDIALLKLAQKVKMSTHARPICLPCTMEANLALRRPQGSTCRDHENELLNKQSVPAHFVALNGSKLNINLKMGVEWTSCAEVVSQEKTMFPNLTDVREVVTDQFLCSGTQEDESPCKGVTTTPWSLARPQGSCSLEGVEIKGGSFRLLQEGQALEYVCPSGFYPYPVQTRTCRSTGSWSTLKTQDQKTVRKAECRAIHCPRPHDFENGEYWPRSPYYNVSDEISFHCYDGYTLRGSANRTCQVNGRWSGQTAICDNGAGYCSNPGIPIGTRKVGSQYRLEDSVTYHCSRGLTLRGSQRRTCQEGGSWSGTEPSCQDSFMYDTPQEVAEAFLSSLTETIEGVDAEDGHGPGEQQKRKIVLDPSGSMNIYLVLDGSDSIGASNFTGAKKCLVNLIEKVASYGVKPRYGLVTYATYPKIWVKVSEADSSNADWVTKQLNEINYEDHKLKSGTNTKKALQAVYSMMSWPDDVPPEGWNRTRHVIILMTDGLHNMGGDPITVIDEIRDLLYIGKDRKNPREDYLDVYVFGVGPLVNQVNINALASKKDNEQHVFKVKDMENLEDVFYQMIDESQSLSLCGMVWEHRKGTDYHKQPWQAKISVIRPSKGHESCMGAVVSEYFVLTAAHCFTVDDKEHSIKVSVGGEKRDLEIEVVLFHPNYNINGKKEAGIPEFYDYDVALIKLKNKLKYGQTIRPICLPCTEGTTRALRLPPTTTCQQQKEELLPAQDIKALFVSEEEKKLTRKEVYIKNGDKKGSCERDAQYAPGYDKVKDISEVVTPRFLCTGGVSPYADPNTCRGDSGGPLIVHKRSRFIQVGVISWGVVDVCKNQKRQKQVPAHARDFHINLFQVLPWLKEKLQDEDLGFL

SEQ ID NO: 680 - protein, 1115 aa, Homo Sapiens
MGPLMVLFCLLFLYPGLADSAPSCPQNVNISGGTFTLSHGWAPGSLLTYSCPQGLYPSPASRLCKSSGQWQTPGATRSLSKAVCKPVRCPAPVSFENGIYTPRLGSYPVGGNVSFECEDGFILRGSPVRQCRPNGMWDGETAVCDNGDHENGTGTNTYAALNSVYLMMNNQMRLLGMETMAWQEIRHAIILLTDGKSNMGGSPKTAVDHIREILNINQKRNDYLDVSKLTDTICGVGNMSANASDQERTPWHVTIKPKSQETCRGALISDQWVLTAAHCFRDGNDHSLWRVNVGDPKSQWGKEFLIEKAVISPGFDVFAKKNQGILEFYGDDIALLKLAQKVKMSTHARPICLPCTMEANLALRRPQGSTCRDHENELLNKQSVPAHFVALNGSKLNINLKMGVEWTSCAEVVSQEKTMFPNLTDVREVVTDQFLCSGTQEDESPCKGGSAIHCPRPHDFENGEYWPRSPYYNVSDEISFHCYDGYTLRGSANRTCQVNGRWSGQTAICDNGAGYCSNPGIPIGTRKVGSQYRLEDSVTYHCSRGLTLRGSQRRTCQEGGSWSGTEPSCQDSFMYDTPQEVAEAFLSSLTETIEGVDAEDGHGPGEQQKRKIVLDPSGSMNIYLVLDGSDSIGASNFTGAKKCLVNLIEKVASYGVKPRYGLVTYATYPKIWVKVSEADSSNADWVTKQLNEINYEDHKLKSGTNTKKALQAVYSMMSWPDDVPPEGWNRTRHVIILMTDGLHNMGGDPITVIDEIRDLLYIGKDRKNPREDYLDVYVFGVGPLVNQVNINALASKKDNEQHVFKVKDMENLEDVFYQMIDESQSLSLCGMVWEHRKGTDYHKQPWQAKISVIRPSKGHESCMGAVVSEYFVLTAAHCFTVDDKEHSIKVSVGGEKRDLEIEVVLFHPNYNINGKKEAGIPEFYDYDVALIKLKNKLKYGQTIRPICLPCTEGTTRALRLPPTTTCQQQKEELLPAQDIKALFVSEEEKKLTRKEVYIKNGDKKGSCERDAQYAPGYDKVKDISEVVTPRFLCTGGVSPYADPNTCRGDSGGPLIVHKRSRFIQVGVISWGVVDVCKNQKRQKQVPAHARDFHINLFQVLPWLKEKLQDEDLGFL

SEQ ID NO: 681 - protein, 175 aa, Homo Sapiens
MGHEQNQGAALLQMLPLLWLLPHSWAVPEEQSMITFLPLLLGLSLGCTGAGGFVAHVESTCLLDDAGTPKDFTYCISFNKDLLTCWDPEENKMAPCEFGVLNSLANVLSQHLNQKDTLMQRLRNGLQNCATHTQPFWGSLTNRTRPPSVQVAKTTPFNTREPVMLACYVWGFYPA

SEQ ID NO: 682 - protein, 63 aa, Homo Sapiens
MGTSSIFLCVLFLCGALGLTMSPARGRLRCYICGFTKPCHPVPTECRDDEACGISIGTSDAHC

SEQ ID NO: 683 - protein, 33 aa, Homo Sapiens
  misc_feature (1)..(1): Xaa can be any naturally occurring amino acid
XLGLTYLSLLLIPAAGASSCPRTPLPAMAPLPQ

SEQ ID NO: 684 - protein, 198 aa, Homo Sapiens
MLSELQDGKSKIVQKAAPEVQEDVKAFKTDLPSSLVSVSLRKPFSGPQEQEQISGKVTHLIQNNMPGNYVFSYDQFFRDKIMEKKQDHTYRVFKTVNRWADAYPFAQHFSEASVASKDVSVWCSNDYLGMSRHPQVLQATQETLQRHGAGAGGTRNISGTSKFHVELEQELAELHQKDSALLFSSCFVANDSTLFTLA

SEQ ID NO: 685 - protein, 171 aa, Homo Sapiens
MLSELQDGKSKIVQKAAPEVQEDVKAFKTGNYVFSYDQFFRDKIMEKKQDHTYRVFKTVNRWADAYPFAQHFSEASVASKDVSVWCSNDYLGMSRHPQVLQATQETLQRHGAGAGGTRNISGTSKFHVELEQELAELHQKDSALLFSSCFVANDSTLFTLAKILPGCEIYS

SEQ ID NO: 686 - protein, 165 aa, Homo Sapiens
MRGGEVALGWNKKKRLFCEDFRFKMVTAAMLLQCCPVLARGPTSLLGKVVKTHQFLFGIGRCPILATQGPNCSQIHLKATKAGGDSPSWAKGHCPFMLSELQDGKSKIVQKAAPEVQEDVKAFKTDLPSSLVSVSLRKPFSGPQEQEQISGKVTHLIQNNMPGNY

SEQ ID NO: 687 - protein, 574 aa, Homo Sapiens
MRGGEVALGWNKKKRLFCEDFRFKMVTAAMLLQCCPVLARGPTSLLGKVVKTHQFLFGIGRCPILATQGPNCSQIHLKATKAGGDSPSWAKGHCPFMLSELQDGKSKIVQKAAPEVQEDVKAFKTGNYVFSYDQFFRDKIMEKKQDHTYRVFKTVNRWADAYPFAQHFSEASVASKDVSVWCSNDYLGMSRHPQVLQATQETLQRHGAGAGGTRNISGTSKFHVELEQELAELHQKDSALLFSSCFVANDSTLFTLAKILPGCEIYSDAGNHASMIQGIRNSGAAKFVFRHNDPDHLKKLLEKSNPKIPKIVAFETVHSMDGAICPLEELCDVSHQYGALTFVDEVHAVGLYGSRGAGIGERDGIMHKIDIISGTLGKAFGCVGGYIASTRDLVDMVRSYAAGFIFTTSLPPMVLSGALESVRLLKGEEGQALRRAHQRNVKHMRQLLMDRGLPVIPCPSHIIPIRVGNAALNSKLCDLLLSKHGIYVQAINYPTVPRGEELLRLAPSPHHSPQMMEDFVEKLLLAWTAVGLPLQDVSVAACNFCRRPVHFELMSEWERSYFGNMGPQYVTTYA

SEQ ID NO: 688 - protein, 587 aa, Homo Sapiens
MVTAAMLLQCCPVLARGPTSLLGKVVKTHQFLFGIGRCPILATQGPNCSQIHLKATKAGGDSPSWAKGHCPFMLSELQDGKSKIVQKAAPEVQEDVKAFKTDLPSSLVSVSLRKPFSGPQEQEQISGKVTHLIQNNMPGNYVFSYDQFFRDKIMEKKQDHTYRVFKTVNRWADAYPFAQHFSEASVASKDVSVWCSNDYLGMSRHPQVLQATQETLQRHGAGAGGTRNISGTSKFHVELEQELAELHQKDSALLFSSCFVANDSTLFTLAKILPGCEIYSDAGNHASMIQGIRNSGAAKFVFRHNDPDHLKKLLEKSNPKIPKIVAFETVHSMDGAICPLEELCDVSHQYGALTFVDEVHAVGLYGSRGAGIGERDGIMHKIDIISGTLGKAFGCVGGYIASTRDLVDMVRSYAAGFIFTTSLPPMVLSGALESVRLLKGEEGQALRRAHQRNVKHMRQLLMDRGLPVIPCPSHIIPIRVGNAALNSKLCDLLLSKHGIYVQAINYPTVPRGEELLRLAPSPHHSPQMMEDFVEKLLLAWTAVGLPLQDVSVAACNFCRRPVHFELMSEWERSYFGNMGPQYVTTYA

SEQ ID NO: 689 - protein, 550 aa, Homo Sapiens
MVTAAMLLQCCPVLARGPTSLLGKVVKTHQFLFGIGRCPILATQGPNCSQIHLKATKAGGDSPSWAKGHCPFMLSELQDGKSKIVQKAAPEVQEDVKAFKTGNYVFSYDQFFRDKIMEKKQDHTYRVFKTVNRWADAYPFAQHFSEASVASKDVSVWCSNDYLGMSRHPQVLQATQETLQRHGAGAGGTRNISGTSKFHVELEQELAELHQKDSALLFSSCFVANDSTLFTLAKILPGCEIYSDAGNHASMIQGIRNSGAAKFVFRHNDPDHLKKLLEKSNPKIPKIVAFETVHSMDGAICPLEELCDVSHQYGALTFVDEVHAVGLYGSRGAGIGERDGIMHKIDIISGTLGKAFGCVGGYIASTRDLVDMVRSYAAGFIFTTSLPPMVLSGALESVRLLKGEEGQALRRAHQRNVKHMRQLLMDRGLPVIPCPSHIIPIRVGNAALNSKLCDLLLSKHGIYVQAINYPTVPRGEELLRLAPSPHHSPQMMEDFVEKLLLAWTAVGLPLQDVSVAACNFCRRPVHFELMSEWERSYFGNMGPQYVTTYA

SEQ ID NO: 690 - protein, 141 aa, Homo Sapiens
MVTAAMLLQCCPVLARGPTSLLGKVVKTHQFLFGIGRCPILATQGPNCSQIHLKATKAGGDSPSWAKGHCPFMLSELQDGKSKIVQKAAPEVQEDVKAFKTGRPCSVMVLELVAPATSQAPILPGCEIYSDAGNHASMIQG

SEQ ID NO: 691 - protein, 276 aa, Homo Sapiens
  misc_feature (1)..(1): Xaa can be any naturally occurring amino acid
XELEQELAELHQKDSALLFSSCFVANDSTLFTLAKILPGCEIYSDAGNHASMIQGIRNSGAAKFVFRHNDPDHLKKLLEKSNPKIPKIVAFETVHSMDGAICPLEELCDVSHQYGALTFVDEVHAVGLYGSRGAGIGERDGIMHKIDIISGTLGKAFGCVGGYIASTRDLVDMVRSYAAGFIFTTSLPPMVLSGALESVRLLKGEEGQALRRAHQRNVKHMRQLLMDRGLPVIPCPSHIIPIRRSCCWLGLRWGCPSRMCLWLPAISVAVLYTLSS

SEQ ID NO: 692 - protein, 197 aa, Homo Sapiens
GFEWGGQRRASHNSTFSAYSRGVFRRDAHKSEVAHRFKDLGEENFKALVLIAFAQYLQQCPFEDHVKLVNEVTEFAKTCVADESAENCDKSLHTLFGDKLCTVATLRETYGEMADCCAKQEPERNECFLQHKDDNPNLPRLVRPEVDVMCTAFHDNEETFLKKYLYEIARRHPYFYAPELLFFAKRYKAAFTECCQA

SEQ ID NO: 693 - protein, 417 aa, Homo Sapiens
MKWVTFISLLFLFSSAYSRGVFRRDAHKSEVAHRFKDLGEENFKALAVARLSQRFPKAEFAEVSKLVTDLTKVHTECCHGDLLECADDRADLAKYICENQDSISSKLKECCEKPLLEKSHCIAEVENDEMPADLPSLAADFVESKDVCKNYAEAKDVFLGMFLYEYARRHPDYSVVLLLRLAKTYETTLEKCCAAADPHECYAKVFDEFKPLVEEPQNLIKQNCELFEQLGEYKFQNALLVRYTKKVPQVSTPTLVEVSRNLGKVGSKCCKHPEAKRMPCAEDYLSVVLNQLCVLHEKTPVSDRVTKCCTESLVNRRPCFSALEVDETYVPKEFNAETFTFHADICTLSEKERQIKKQTALVELVKHKPKATKEQLKAVMDDFAAFVEKCCKADDKETCFAEEGKKLVAASQAALGL

SEQ ID NO: 694 - protein, 609 aa, Homo Sapiens [sequence omitted]

SEQ ID NO: 695 - protein, 604 aa, Homo Sapiens
MKWVTFISLLFLFSSAYSRGVFRRDAHKSEVAHRFKDLGEENFKALVLIAFAQYLQQCPFEDHVKLVNEVTEFAKTCVADESAENCDKSLHTLFGDKLCTVATLRETYGEMADCCAKQEPERNECFLQHKDDNPNLPRLVRPEVDVMCTAFHDNEETFLKKYLYEIARRHPYFYAPELLFFAKRYKAAFTECCQAADKAACLLPKLDELRDEGKASSAKQRLKCASLQKFGERAFKAWAVARLSQRFPKAEFAEVSKLVTDLTKVHTECCHGDLLECADDRADLAKYICENQDSISSKLKECCEKPLLEKSHCIAEVENDEMPADLPSLAADFVESKDVCKNYAEAKDVFLGMFLYEYARRHPDYSVVLLLRLAKTYETTLEKCCAAADPHECYAKVFDEFKPLVEEPQNLIKQNCELFEQLGEYKFQNALLVRYTKKVPQVSTPTLVEVSRNLGKVGSKCCKHPEAKRMPCAEDYLSVVLNQLCVLHEKTPVSDRVTKCCTESLVNRRPCFSALEVDETYVPKEFNAETFTFHADICTLSEKERQIKKQTALVELVKHKPKATKEQLKAVMDDFAAFVEKCCKADDKETCFAEEPTMRIRERK

SEQ ID NO: 696 - protein, 396 aa, Homo Sapiens
MKWVTFISLLFLFSSAYSRGVFRRDAHKSEVAHRFKDLGEENFKALVLIAFAQYLQQCPFEDHVKLVNEVTEFAKTCVADESAENCDKSLHTLFGDKLCTVATLRETYGEMADCCAKQEPERNECFLQHKDDNPNLPRLVRPEVDVMCTAFHDNEETFLKKYLYETTLEKCCAAADPHECYAKVFDEFKPLVEEPQNLIKQNCELFEQLGEYKFQNALLVRYTKKVPQVSTPTLVEVSRNLGKVGSKCCKHPEAKRMPCAEDYLSVVLNQLCVLHEKTPVSDRVTKCCTESLVNRRPCFSALEVDETYVPKEFNAETFTFHADICTLSEKERQIKKQTALVELVKHKPKATKEQLKAVMDDFAAFVEKCCKADDKETCFAEEGKKLVAASQAALGL

SEQ ID NO: 697 - protein, 396 aa, Homo Sapiens
MKWVTFISLLFLFSSAYSRGVFRRDAHKSEVAHRFKDLGEENFKALVLIAFAQYLQQCPFEDHVKLVNEVTEFAKTCVADESAENCDKSLHTLFGDKLCTVATLRETYGEMADCCAKQEPERNECFLQHKDDNPNLPRLVRPEVDVMCTAFHDNEETFLKKYTYETTLEKCCAAADPHECYAKVFDEFKPLVEEPQNLIKQNCELFEQLGEYKFQNALLVRYTKKVPQVSTPTLVEVSRNLGKVGSKCCKHPEAKRMPCAEDYLSVVLNQLCVLHEKTPVSDRVTKCCTESLVNRRPCFSALEVDETYVPKEFNAETFTFHADICTLSEKERQIKKQTALVELVKHKPKATKEQLKAVMDDFAAFVEKCCKADDKETCFAEEGKKLVAASQAALGL

SEQ ID NO: 698 - protein, 494 aa, Homo Sapiens
MKWVTFISLLFLFSSAYSRGVFRRDAHKSEVAHRFKDLGEENFKALYLYEIARRHPYFYAPELLFFAKRYKAAFTECCQAADKAACLLPKLDELRDEGKASSAKQRLKCASLQKFGERAFKAWAVARLSQRFPKAEFAEVSKLVTDLTKVHTECCHGDLLECADDRADLAKYICENQDSISSKLKECCEKPLLEKSHCIAEVENDEMPADLPSLAADFVESKDVCKNYAEAKDVFLGMFLYEYARRHPDYSVVLLLRLAKTYETTLEKCCAAADPHECYAKVFDEFKPLVEEPQNLIKQNCELFEQLGEYKFQNALLVRYTKKVPQVSTPTLVEVSRNLGKVGSKCCKHPEAKRMPCAEDYLSVVLNQLCVLHEKTPVSDRVTKCCTESLVNRRPCFSALEVDETYVPKEFNAETFTFHADICTLSEKERQIKKQTALVELVKHKPKATKEQLKAVMDDFAAFVEKCCKADDKETCFAEEGKKLVAASQAALGL

SEQ ID NO: 699 - protein, 105 aa, Homo Sapiens
MKWVTFISLLFLFSSAYSRGVFRRDAHTYMKLPEDILTFMPRNSFSLLKGIKLLLQNVAKLLIKLPACCQSSMNFGMKGRLRLPNRDSSVPVSKNLEKELSKHGQ

SEQ ID NO: 700 - protein, 459 aa, Homo Sapiens
MSQLKIVTNHLYLYEIARRHPYFYAPELLFFAKRYKAAFTECCQAADKAACLLPKLDELRDEGKASSAKQRLKCASLQKFGERAFKAWAVARLSQRFPKAEFAEVSKLVTDLTKVHTECCHGDLLECADDRADLAKYICENQDSISSKLKECCEKPLLEKSHCIAEVENDEMPADLPSLAADFVESKDVCKNYAEAKDVFLGMFLYEYARRHPDYSVVLLLRLAKTYETTLEKCCAAADPHECYAKVFDEFKPLVEEPQNLIKQNCELFEQLGEYKFQNALLVRYTKKVPQVSTPTLVEVSRNLGKVGSKCCKHPEAKRMPCAEDYLSVVLNQLCVLHEKTPVSDRVTKCCTESLVNRRPCFSALEVDETYVPKEFNAETFTFHADICTLSEKERQIKKQTALVELVKHKPKATKEQLKAVMDDFAAFVEKCCKADDKETCFAEEGKKLVAASQAALGL

SEQ ID NO: 701 - protein, 454 aa, Homo Sapiens
  misc_feature (1)..(1): Xaa can be any naturally occurring amino acid
XFSKFRYLYEIARRHPYFYAPELLFFAKRYKAAFTECCQAADKAACLLPKLDELRDEGKASSAKQRLKCASLQKFGERAFKAWAVARLSQRFPKAEFAEVSKLVTDLTKVHTECCHGDLLECADDRADLAKYICENQDSISSKLKECCEKPLLEKSHCIAEVENDEMPADLPSLAADFVESKDVCKNYAEAKDVFLGMFLYEYARRHPDYSVVLLLRLAKTYETTLEKCCAAADPHECYAKVFDEFKPLVEEPQNLIKQNCELFEQLGEYKFQNALLVRYTKKVPQVSTPTLVEVSRNLGKVGSKCCKHPEAKRMPCAEDYLSVVLNQLCVLHEKTPVSDRVTKCCTESLVNRRPCFSALEVDETYVPKEFNAETFTFHADICTLSEKERQIKKQTALVELVKHKPKATKEQLKAVMDDFAAFVEKCCKADDKETCFAEEGKKLVAASQAALGL

SEQ ID NO: 702 - protein, 518 aa, Homo Sapiens
MFLRAGLAALSPLLRSLRPSPVAAMSTGTFVVSQPLNYRGGARVEPADASGTEKAFEPATGRVIATFTCSGEKEVNLAVQNAKAAFKIWSQKSGMERCRILLEAARIIREREDEIATMECINNGKSIFEARLDIDISWQCLEYYAGLAASMAGEHIQLPGGSFGYTRREPLGVCVGIGAWNYPFQIASWKSAPALACGNAMVFKPSPFTPVSALLLAEIYSEAGVPPGLFNVVQGGAATGQFLCQHPDVAKVSFTGSVPTGMKIMEMSAKGIKPVTLELGGKSPLIIFSDCDMNNAVKGALMANFLTQGQVCCNGTRVFVQKEILDKFTEEVVKQTQRIKIGDPLLEDTRMGPLINRPHLERVLGFVKVAKEQGAKVLCGGDIYVPEDPKLKDGYYMRPCVLTNCRDDMTCVKEEIFGPVMSILSFDTEAEVLERANDTTFGLAAGVFTRDIQRAHRVVAELQAGTCFINNYNVSPVELPFGGYKKSGFGRENGRVTIEYYSQLKTVCVEMGDVESAF

SEQ ID NO: 703 - protein, 418 aa, Homo Sapiens
MARRKPEGSSFNMTHLSMAMAFSFPPVASGQLHPQLGNTQHQTELGKELATTSTMPYQYPALTPEQKKELSDIAHRIVAPGKGILAADESTGSIAKRLQSIGTENTEENRRFYRQLLLTADDRVNPCIGGVILFHETLYQKADDGRPFPQVIKSKGGVVGIKVDKGVVPLAGTNGETTTQGLDGLSERCAQYKKDGADFAKWRCVLKIGEHTPSALAIMENANVLARYASICQQNGIVPIVEPEILPDGDHDLKRCQYVTEKVLAAVYKALSDHHIYLEGTLLKPNMVTPGHACTQKFSHEEIAMATVTALRRTVPPAVTGITFLSGGQSEEEASINLNAINKCPLLKPWALTFSYGRALQASALKAWGGKKENLKAAQEEYVKRALANSLACQGKYTPSGQAGAAASESLFVSNHAY

SEQ ID NO: 704 - protein, 278 aa, Homo Sapiens
MARRKPEGSSFNMTHLSMAMAFSFPPVASGQLHPQLGNTQHQTELGKELATTSTMPYQYPALTPEQKKELSDIAHRIVAPGKGILAADESTGSIAKRLQSIGTENTEENRRFYRQLLLTADDRVNPCIGGVILFHETLYQKADDGRPFPQVIKSKGGVVGIKVDKGVVPLAGTNGETTTQGLDGLSERCAQYKKDGADFAKWRCVLKIGEHTPSALAIMENANVLARYASICQQNGIVPIVEPEILPDGDHDLKRCQYVTEKVLAAVYKALSDHHIYL

SEQ ID NO: 705 - protein, 418 aa, Homo Sapiens; identical to SEQ ID NO: 703

SEQ ID NO: 706 - protein, 155 aa, Homo Sapiens
MPYQYPALTPEQKKELSDIAHRIVAPGKGILAADESTGSIAKRLQSIGTENTEENRRFYRQLLLTADDRVNPCIGGVILFHETLYQKADDGRPFPQVIKSKGGVVGIKVDKGVVPLAGTNGETTTQGLDGLSERCAQYKKDGADFAKWRCVLKIG

SEQ ID NO: 707 - protein, 364 aa, Homo Sapiens
MPYQYPALTPEQKKELSDIAHRIVAPGKGILAADESTGSIAKRLQSIGTENTEENRRFYRQLLLTADDRVNPCIGGVILFHETLYQKADDGRPFPQVIKSKGGVVGIKVDKGVVPLAGTNGETTTQGLDGLSERCAQYKKDGADFAKWRCVLKIGEHTPSALAIMENANVLARYASICQQNGIVPIVEPEILPDGDHDLKRCQYVTEKVLAAVYKALSDHHIYLEGTLLKPNMVTPGHACTQKFSHEEIAMATVTALRRTVPPAVTGITFLSGGQSEEEASINLNAINKCPLLKPWALTFSYGRALQASALKAWGGKKENLKAAQEEYVKRALANSLACQGKYTPSGQAGAAASESLFVSNHAY

SEQ ID NO: 708 - protein, 364 aa, Homo Sapiens; identical to SEQ ID NO: 707

SEQ ID NO: 709 - protein, 364 aa, Homo Sapiens; identical to SEQ ID NO: 707

SEQ ID NO: 710 - protein, 364 aa, Homo Sapiens; identical to SEQ ID NO: 707

SEQ ID NO: 711 - protein, 361 aa, Homo Sapiens
MPYQYPALTPEQKKELSDIAHRIVAPGKGILAADESTGSIAKRLQSIGTENTEENRRFYRQLLLTADDRVNPCIGGVILFHETLYQKADDGRPFPQVIKSKGGVVGIKVDKGVVPLAGTNGETTTQGLDGLSERCAQYKKDGADFAKWRCVLKIGEHTPSALAIMENANVLARYASICQQNGIVPIVEPEILPDGDHDLKRCQYVTEKVLAAVYKALSDHHIYLEGTLLKPNMVTPGHACTQKFSHEEIAMATVTALRRTVPPAVTGITFLSGGQSEEEASINLNAINKCPLLKPWALTFSYGRALQASALKAWGGKKENLKAAQEEYVKRALVRIGRRWAGCLGGWDSEKSPSHSTPLPA

SEQ ID NO: 712 - protein, 364 aa, Homo Sapiens; identical to SEQ ID NO: 707

SEQ ID NO: 713 - protein, 368 aa, Homo Sapiens
MPYQYPALTPEQKKELSDIAHRIVAPGKGILAADESTGSIAKRLQSIGTENTEENRRFYRQLLLTADDRVNPCIGGVILFHETLYQKADDGRPFPQVIKSKGGVVGIKVDKGVVPLAGTNGETTTQGLDGLSERCAQYKKDGADFAKWRCVLKIGEHTPSALAIMENANVLARYASICQQVGLQNGIVPIVEPEILPDGDHDLKRCQYVTEKVLAAVYKALSDHHIYLEGTLLKPNMVTPGHACTQKFSHEEIAMATVTALRRTVPPAVTGITFLSGGQSEEEASINLNAINKCPLLKPWALTFSYGRALQASALKAWGGKKENLKAAQEEYVKRALANSLACQGKYTPSGQAGAAASESLFVSNHAY

SEQ ID NO: 714 - protein, 140 aa, Homo Sapiens
MPYQYPALTPEQKKELSDIAHRIVAPGSIAKRLQSIGTENTEENRRFYRQLLLTADDRVNPCIGGVILFHETLYQKADDGRPFPQVIKSKGGVVGIKVDKGVVPLAGTNGETTTQGLDGLSERCAQYKKDGADFAKWRCV

SEQ ID NO: 715 - protein, 162 aa, Homo Sapiens
MPYQYPALTPEQKKELSDIAHRIVAPGSIAKRLQSIGTENTEENRRFYRQLLLTADDRVNPCIGGVILFHETLYQKADDGRPFPQVIKSKGGVVGIKVDKGVVPLAGTNGETTTQGLDGLSERCAQYKKDGADFAKWRCVLKIGEHTPSALAIMENANVLAR

SEQ ID NO: 716 - protein, 204 aa, Homo Sapiens
RRFYRQLLLTADDRVNPCIGGVILFHETLYQKADDGRPFPQVIKSKGGVVGIKVDKGVVPLAGTNGETTTQGLDGLSERCAQYKKDGADFAKWRCVLKIGEHTPSALAIMENANVLARYASICQQVLAAVYKALSDHHIYLEGTLLKPNMVTPGHACTQKFSHEEIAMATVTALRRTVPPAVTGITFLSGGQSEEEASINLNAI

SEQ ID NO: 717 - protein, 130 aa, Homo Sapiens
  misc_feature (1)..(1): Xaa can be any naturally occurring amino acid
XPGHACTQKFSHEEIAMATVTALRRTVPPAVTGITFLSGGQSEEEASINLNAINKCPLLKPWALTFSYGRALQASALKAWGGKKENLKAAQEEYVKRALANSLACQGKYTPSGQAGAAASESLFVSNHAY

SEQ ID NO: 718 - protein, 464 aa, Homo Sapiens
MAASCLVLLALCLLLPLLLLGGWKRWRRGRAARHVVAVVLGDVGRSPRMQYHALSLAMHGFSVTLLGFCNSKPHDELLQNNRIQIVGLTELQSLAVGPRVFQYGVKVVLQAMYLLWKLMWREPGAYIFLQNPPGLPSIAVCWFVGCLCGSKLVIDWHNYGYSIMGLVHGPNHPLVLLAKWYEKFFGRLSHLNLCVTNAMREDLADNWHIRAVTVYDKPASFFKETPLDLQHRLFMKLGSMHSPFRARSEPEDPVTERSAFTERDAGSGLVTRLRERPALLVSSTSWTEDEDFSILLAALEKFEQLTLDGHNLPSLVCVITGKGPLREYYSRLIHQKHFQHIQVCTPWLEAEDYPLLLGSADLGVCLHTSSSGLDLPMKVVDMFGCCLPVCAVNFKCLHELVKHEENGLVFEDSEELAAQLQMLFSNFPDPAGKLNQFRKNLRESQQLRWDESWVQTVLPLVMDT

SEQ ID NO: 719 - protein, 184 aa, Homo Sapiens
MAASCLVLLALCLLLPLLLLGGWKRWRRGRAARHVVAVVLGDVGRSPRMQYHALSLAMHGFSVTLLGFCNSKPHDELLQNNRIQIVGLTELQSLAVGPRVFQYGVKVVLQAMYLLWKLMWREPGAYIFLQVCLALLSAGSWAAFVEASSSLTGTTMATPSWVWCMAPTIPSFCWPSGTRSSLGA

SEQ ID NO: 720 - protein, 84 aa, Homo Sapiens
MAASCLVLLALCLLLPLLLLGGWKRWRRGRAARHVVAVVLGDVGRSPRMQYHALSLAMHGFSVTLLGFCSEWPRVWEGRCSLSR

SEQ ID NO: 721 - protein, 168 aa, Homo Sapiens
MYLLWKLMWREPGAYIFLQNPPGLPSIAVCWFVGCLCGSKLVIDWHNYGYSIMGLVHGPNHPLVLLAKWYEKFFGRLSHLNLCVTNAMREDLADNWHIRAVTVYDKPASFFKETPLDLQHRLFMKLGSMHSPFRARSEPEDPVTERSAFTERDAGSGLVTRLRERPAL

SEQ ID NO: 722 - protein, 353 aa, Homo Sapiens
MYLLWKLMWREPGAYIFLQNPPGLPSIAVCWFVGCLCGSKLVIDWHNYGYSIMGLVHGPNHPLVLLAKWYEKFFGRLSHLNLCVTNAMREDLADNWHIRAVTVYDKPASFFKETPLDLQHRLFMKLGSMHSPFRARSEPEDPVTERSAFTERDAGSGLVTRLRERPALLVSSTSWTEDEDFSILLAALEKFEQLTLDGHNLPSLVCVITGKGPLREYYSRLIHQKHFQHIQVCTPWLEAEDYPLLLGSADLGVCLHTSSSGLDLPMKVVDMFGCCLPVCAVNFKCLHELVKHEENGLVFEDSEELAAQLQMLFSNFPDPAGKLNQFRKNLRESQQLRWDESWVQTVLPLVMDT

SEQ ID NO: 723 - protein, 353 aa, Homo Sapiens; identical to SEQ ID NO: 722

SEQ ID NO: 724 - protein, 324 aa, Homo Sapiens
MAPLLLQLAVLGAALAAAALVLISIVAFTTATKMPALHRHEEEKFFLNAKGQKETLPSIWDSPTKQLSVVVPSYNEEKRLPVMMDEALSYLEKRQKRDPAFTYEVIVVDDGSKDQTSKVAFKYCQKYGSDKVRVITLVKNRGKGGAIRMGIFSSRGEKILMADADGATKFPDVEKLEKGLNDLQPWPNQMAIACGSRAHLEKESIAQRSYFRTLLMYGFHFLVWFLCVKGIRDTQCGFKLFTREAASRTFSSLHVERWAFDVELLYIAQFFKIPIAEIAVNWTEIEGSKLVPFWSWLQMGKDLLFIRLRYLTGAWRLEQTRKMN

SEQ ID NO: 725 - protein, 294 aa, Homo Sapiens
MAPLLLQLAVLGAALAAAALVLISIVAFTTATKMPALHRHEEEKFFLNAKGQKETLPSIWDSPTKQLSVVVPSYNEEKRLPVMMDEALSYLEKRQKYGSDKVRVITLVKNRGKGGAIRMGIFSSRGEKILMADADGATKFPDVEKLEKGLNDLQPWPNQMAIACGSRAHLEKESIAQRSYFRTLLMYGFHFLVWFLCVKGIRDTQCGFKLFTREAASRTFSSLHVERWAFDVELLYIAQFFKIPIAEIAVNWTEIEGSKLVPFWSWLQMGKDLLFIRLRYLTGAWRLEQTRKMN

SEQ ID NO: 726 - protein, 102 aa, Homo Sapiens
MASRGARQRLKGSGASSGDTAPAADKLRELLGSREAGGAEHRTEHTTSSMGKGFRLGNIPQHMPFAPMLTCCFMPGQLHFMQEFYKLIRFLCFTFCDVFWLL

SEQ ID NO: 727 - protein, 168 aa, Homo Sapiens
MASRGARQRLKGSGASSGDTAPAADKLRELLGSREAGGAEHRTELSGNKAGQVWAPEGSTAFKCLLSARLCAALLSNISDCDETFNYWEPTHYLIYGEGFQTWEYSPAYAIRSYAYLLLHAWPAAFHARILQTNKGCVQEVWVARESNDASLLGSQHWHVLLIISIPS

SEQ ID NO: 728 - protein, 618 aa, Homo Sapiens
MASRGARQRLKGSGASSGDTAPAADKLRELLGSREAGGAEHRTELSGNKAGQVWAPEGSTAFKCLLSARLCAALLSNISDCDETFNYWEPTHYLIYGEGFQTWEYSPAYAIRSYAYLLLHAWPAAFHARILQTNKILVFYFLRCLLAFVSCICELYFYKAVCKKFGLHVSRMMLAFLVLSTGMFCSSSAFLPSSFCMYTTLIAMTGWYMDKTSIAVLGVAAGAILGWPFSAALGLPIAFDLLVMKHRWKSFFHWSLMALILFLVPVVVIDSYYYGKLVIAPLNIVLYNVFTPHGPDLYGTEPWYFYLINGFLNFNVAFALALLVLPLTSLMEYLLQRFHVQNLGHPYWLTLAPMYIWFIIFFIQPHKEERFLFPVYPLICLCGAVALSALQHSFLYFQKCYHFVFQRYRLEHYTVTSNWLALGTVFLFGLLSFSRSVALFRGYHGPLDLYPEFYRIATDPTIHTVPEGRPVNVCVGKEWYRFPSSFLLPDNWQLQFIPSEFRGQLPKPFAEGPLATRIVPTDMNDQNLEEPSRYIDISKCHYLVDLDTMRETPREPKYSSNKEEWISLAYRPFLDASRSSKLLRAFYVPFLSDQYTVYVNYTILKPRKAKQIRKKSGG

SEQ ID NO: 729 - protein, 611 aa, Homo Sapiens
MASRGARQRLKGSGASSGDTAPAADKLRELLGSREAGGAEHRTELSGNKAGQVWAPEGSTAFKCLLSARLCAALLSNISDCDETFNYWEPTHYLIYGEGFQTWEYSPAYAIRSYAYLLLHAWPAAFHARILQTNKILVFYFLRCLLAFVSCICELYFYKAVCKKFGLHVSRMMLAFLVLSTGMFCSSSAFLPSSFCMYTTLIAMTGWYMDKTSIAVLGVAAGAILGWPFSAALGLPIAFDLLVMKHRWKSFFHWSLMALILFLVPVVVIDSYYYGKLVIAPLNIVLYNVFTPHGPDLYGTEPWYFYLINGFLNFNVAFALALLVLPLTSLMEYLLQRFHVQNLGHPYWLTLAPMYIWFIIFFIQPHKEERFLFPVYPLICLCGAVALSALQKCYHFVFQRYRLEHYTVTSNWLALGTVFLFGLLSFSRSVALFRGYHGPLDLYPEFYRIATDPTIHTVPEGRPVNVCVGKEWYRFPSSFLLPDNWQLQFIPSEFRGQLPKPFAEGPLATRIVPTDMNDQNLEEPSRYIDISKCHYLVDLDTMRETPREPKYSSNKEEWISLAYRPFLDASRSSKLLRAFYVPFLSDQYTVYVNYTILKPRKAKQIRKKSGG

SEQ ID NO: 730 - protein, 198 aa, Homo Sapiens
MASRGARQRLKGSGASSGDTAPAADKLRELLGSREAGGAEHRTELSGNKAGQVWAPEGSTAFKCLLSARLCAALLSNISDCDETFNYWEPTHYLIYGEGFQTWEYSPAYAIRSYAYLLLHAWPAAFHARILQTNKILVFYFLRCLLAFVSCICELYFYKAVCKKFGLHVSRMMLAFLVLSTGMFCSSSVYPLPLICWS

SEQ ID NO: 731 - protein, 134 aa, Homo Sapiens
MASRGARQRLKGSGASSGDTAPAADKLRELLGSREAGGAEHRTELSGNKAGQVWAPEGSTAFKCLLSARLCAALLSNISDCDETFNYWEPVDTLPHLWGRVSDLGIFPSICHSLLCLPVASCLASCISCKNSTN

SEQ ID NO: 732 - protein, 447 aa, Homo Sapiens
MMLAFLVLSTGMFCSSSAFLPSSFCMYTTLIAMTGWYMDKTSIAVLGVAAGAILGWPFSAALGLPIAFDLLVMKHRWKSFFHWSLMALILFLVPVVVIDSYYYGKLVIAPLNIVLYNVFTPHGPDLYGTEPWYFYLINGFLNFNVAFALALLVLPLTSLMEYLLQRFHVQNLGHPYWLTLAPMYIWFIIFFIQPHKEERFLFPVYPLICLCGAVALSALQHSFLYFQKCYHFVFQRYRLEHYTVTSNWLALGTVFLFGLLSFSRSVALFRGYHGPLDLYPEFYRIATDPTIHTVPEGRPVNVCVGKEWYRFPSSFLLPDNWQLQFIPSEFRGQLPKPFAEGPLATRIVPTDMNDQNLEEPSRYIDISKCHYLVDLDTMRETPREPKYSSNKEEWISLAYRPFLDASRSSKLLRAFYVPFLSDQYTVYVNYTILKPRKAKQIRKKSGG

SEQ ID NO: 733 - protein, 440 aa, Homo Sapiens
MMLAFLVLSTGMFCSSSAFLPSSFCMYTTLIAMTGWYMDKTSIAVLGVAAGAILGWPFSAALGLPIAFDLLVMKHRWKSFFHWSLMALILFLVPVVVIDSYYYGKLVIAPLNIVLYNVFTPHGPDLYGTEPWYFYLINGFLNFNVAFALALLVLPLTSLMEYLLQRFHVQNLGHPYWLTLAPMYIWFIIFFIQPHKEERFLFPVYPLICLCGAVALSALQKCYHFVFQRYRLEHYTVTSNWLALGTVFLFGLLSFSRSVALFRGYHGPLDLYPEFYRIATDPTIHTVPEGRPVNVCVGKEWYRFPSSFLLPDNWQLQFIPSEFRGQLPKPFAEGPLATRIVPTDMNDQNLEEPSRYIDISKCHYLVDLDTMRETPREPKYSSNKEEWISLAYRPFLDASRSSKLLRAFYVPFLSDQYTVYVNYTILKPRKAKQIRKKSGG

SEQ ID NO: 734 - protein, 24 aa, Homo Sapiens
  misc_feature (1)..(1): Xaa can be any naturally occurring amino acid
XEEWISLAYRPFLDASRVSLCCPG

SEQ ID NO: 735 - protein, 35 aa, Homo Sapiens
  misc_feature (1)..(1): Xaa can be any naturally occurring amino acid
XKYSSNKEEWISLAYRPFLDASSFEGWKTKITMPV

SEQ ID NO: 736 - protein, 207 aa, Homo Sapiens
  misc_feature (1)..(1): Xaa can be any naturally occurring amino acid
XTVFLFGLLSFSRSVALFRGYHGPLDLYPEFYRIATDPTIHTVPEGRPVNVCVGKEWYRFPSSFLLPDNWQLQFIPSEFRGQLPKPFAEGPLATRIVPTDMNDQNLEEPSRYIDISKCHYLVDLDTMRETPREPKYSSNKEEWISLAYRPFLDASRSSKLLRAFYVPFLSDQYTVYVNYTILKPRKAKQIRKKSGDRRRAEPTYRKN

SEQ ID NO: 737 - protein, 111 aa, Homo Sapiens
MRPLKPGAPLPALFLLALALSPHGAHGRPRGRRGARVTDKEPKPLLFLPAAGAGRTPSGSRSAEIFPRDSNLKDKFIKHFTGPVTFSPECSKHFHRLYYNTRECSTPAYIS

SEQ ID NO: 738 - protein, 129 aa, Homo Sapiens
MRPLKPGAPLPALFLLALALSPHGAHGRPRGRRGARVTDKEPKPLLFLPAAGAGRTPSGSRSAEIFPRDSNLKDKFIKHFTGPVTFSPECSKHFHRLYYNTRECSTPAYYKRCARLLTRLAVSPLCSQT

SEQ ID NO: 739 - protein, 59 aa, Homo Sapiens
MKDKFLKHLTGPLYFSPKCSKHFHRLYHNTRDCTIPAYYKRCARLLTRLAVSPVCMEDK

SEQ ID NO: 740 - protein, 59 aa, Homo Sapiens; identical to SEQ ID NO: 739

SEQ ID NO: 741 - protein, 60 aa, Homo Sapiens
MKDKFLKHLTGPLYFSPKCSKHFHRLYHNTRDCTIPAYYKRCARLLTRLAVSPVCMEDKQ

SEQ ID NO: 742 - protein, 151 aa, Homo Sapiens
MRGPGHPLLLGLLLVLGAAGRGRGGAEPREPADGQALLRLVVELVQELRKHHSAEHKGLQLLGRDCALGRAEAAGLGPSPEQRVEIVPRDLRMKDKFLKHLTGPLYFSPKCSKHFHRLYHNTRDCTIPAYYKRCARLLTRLAVSPVCMEDK

SEQ ID NO: 743 - protein, 152 aa, Homo Sapiens
MRGPGHPLLLGLLLVLGAAGRGRGGAEPREPADGQALLRLVVELVQELRKHHSAEHKGLQLLGRDCALGRAEAAGLGPSPEQRVEIVPRDLRMKDKFLKHLTGPLYFSPKCSKHFHRLYHNTRDCTIPAYYKRCARLLTRLAVSPVCMEDKQ

SEQ ID NO: 744 - protein, 91 aa, Homo Sapiens
MRGPGHPLLLGLLLVLGPSPEQRVEIVPRDLRMKDKFLKHLTGPLYFSPKCSKHFHRLYHNTRDCTIPAYYKRCARLLTRLAVSPVCMEDK

SEQ ID NO: 745 - protein, 102 aa, Homo Sapiens
  misc_feature (1)..(1): Xaa can be any naturally occurring amino acid
XHHSAEHKGLQLLGRDCALGRAEAAGLGPSPEQRVEIVPRDLRMKDKFLKHLTGPLYFSPKCSKHFHRLYHNTRDCTIPAYYKRCARLLTRLAVSPVCMEDK

SEQ ID NO: 746 - protein, 112 aa, Homo Sapiens
AAAVGSVATLATEPGEDAFRKLFRFYRQSRPGTADLEGVIDFSAAHAARGKGPGAQKVIKSQLNVSSVSEQNAYRAGLQPVSKWQAYGLKGYPGIKKRLNGDPEVYWRNCVG

SEQ ID NO: 747 - protein, 389 aa, Homo Sapiens
MGKMAAAVGSVATLATEPGEDAFRKLFRFYRQSRPGTADLEGVIDFSAAHAARGKGPGAQKVIKSQLNVSSVSEQNAYRAGLQPVSKWQAYGLKGYPGFIFIPNPFLPGYQWHWVKQCLKLYSQKPNVCNLDKHMSKEETQDLWEQSKEFLRYKEATKRRPRSLLEKLRWVTVGYHYNWDSKKYSADHYTPFPSDLGFLSEQVAAACGFEDFRAEAGILNYYRLDSTLGIHVDRSELDHSKPLLSFSFGQSAIFLLGGLQRDEAPTAMFMHSGDIMIMSGFSRLLNHAVPRVLPNPEGEGLPHCLEAPLPAVLPRDSMVEPCSMEDWQVCASYLKTARVNMTVRQVLATDQNFPLEPIEDEKRDISTEGFCHLDDQNSEVKRARINPDS

SEQ ID NO: 748 - protein, 116 aa, Homo Sapiens
MGKMAAAVGSVATLATEPGEDAFRKLFRFYRQSRPGTADLEGVIDFSAAHAARGKGPGAQKVIKSQLNVSSVSEQNAYRAGLQPVSKWQAYGLKGYPGIKKRLNGDPEVYWRNCVG

SEQ ID NO: 749 - protein, 394 aa, Homo Sapiens
MAAASGYTDLREKLKSMTSRDNYKAGSREAAAAAAAAVAAAAAAAAAAEPYPVSGAKRKYQEDSDPERSDYEEQQLQKEEEARKVKSGIRQMRLFSQDECAKIEARIDEVVSRAEKGLYNEHTVDRAPLRNKYFFGEGYTYGAQLQKRGPGQERLYPPGDVDEIPEWVHQLVIQKLVEHRVIPEGFVNSAVINDYQPGGCIVSHVDPIHIFERPIVSVSFFSDSALCFGCKFQFKPIRVSEPVLSLPVRRGSVTVLSGYAADEITHCIRPQDIKERRAVIILRKTRLDAPRLETKSLSSSVLPPSYASDRLSGNNRDPALKPKRSHRKADPDAAHRPRILEMDKEENRRSVLLPTHRRRGSFSSENYWRKSYESSEDCSEAAGSPARKVKMRRH

SEQ ID NO: 750 - protein, 53 aa, Homo Sapiens
MDKEENRRSVLLPTHRRRGSFSSENYWRKSYESSEDCSEAAGSPARKVKMRRH

SEQ ID NO: 751 - protein, 528 aa, Homo Sapiens
MQGPWVLLLLGLRLQLSLGVIPAEEENPAFWNRQAAEALDAAKKLQPIQKVAKNLILFLGDGLGVPTVTATRILKGQKNGKLGPETPLAMDRFPYLALSKTYNVDRQVPDSAATATAYLCGVKANFQTIGLSAAARFNQCNTTRGNEVISVMNRAKQAGKSVGVVTTTRVQHASPAGTYAHTVNRNWYSDADMPASARQEGCQDIATQLISNMDIDVILGGGRKYMFPMGTPDPEYPADASQNGIRLDGKNLVQEWLAKHQGAWYVWNRTELMQASLDQSVTHLMGLFEPGDTKYEIHRDPTLDPSLMEMTEAALRLLSRNPRGFYLFVEGGRIDHGHHEGVAYQALTEAVMFDDAIERAGQLTSEEDTLTLVTADHSHVFSFGGYTLRGSSIFGLAPSKAQDSKAYTSILYGNGPGYVFNSGVRPDVNESESGSPDYQQQAAVPLSSETHGGEDVAVFARGPQAHLVHGVQEQSFVAHVMAFAACLEPYTACDLAPPACTTDAAHPVAASLPLLAGTLLLLGASAAP

SEQ ID NO: 752 - protein, 50 aa, Homo Sapiens
MQGPWVLLLLGLRLQLSLGVIPGNEAPQAVPHTGHPLSQADLISTLPLAS

SEQ ID NO: 753 - protein, 469 aa, Homo Sapiens
MFLGDGMGVSTVTAARILKGQLHHNPGEETRLEMDKFPFVALSKTYNTNAQVPDSAGTATAYLCGVKANEGTVGVSAATERSRCNTTQGNEVTSILRWAKDAGKSVGIVTTTRVNHATPSAAYAHSADRDWYSDNEMPPEALSQGCKDIAYQLMHNIRDIDVIMGGGRKYMYPKNKTDVEYESDEKARGTRLDGLDLVDTWKSFKPRYKHSHFIWNRTELLTLDPHNVDYLLGLFEPGDMQYELNRNNVTDPSLSEMVVVAIQILRKNPKGFFLLVEGGRIDHGHHEGKAKQALHEAVEMDRAIGQAGSLTSSEDTLTVVTADHSHVFTFGGYTPRGNSIFGLAPMLSDTDKKPFTAILYGNGPGYKVVGGERENVSMVDYAHNNYQAQSAVPLRHETHGGEDVAVFSKGPMAHLLHGVHEQNYVPHVMAYAACIGANLGHCAPASSAGSLAAGPLLLALALYPLSVLF

SEQ ID NO: 754 - protein, 524 aa, Homo Sapiens
MISPFLVLAIGTCLTNSLVPEKEKDPKYWRDQAQETLKYALELQKLNTNVAKNVIMFLGDGMGVSTVTAARILKGQLHHNPGEETRLEMDKFPFVALSKTYNTNAQVPDSAGTATAYLCGVKANEGTVGVSAATERSRCNTTQGNEVTSILRWAKDAGKSVGIVTTTRVNHATPSAAYAHSADRDWYSDNEMPPEALSQGCKDIAYQLMHNIRDIDVIMGGGRKYMYPKNKTDVEYESDEKARGTRLDGLDLVDTWKSFKPRYKHSHFIWNRTELLTLDPHNVDYLLGLFEPGDMQYELNRNNVTDPSLSEMVVVAIQILRKNPKGFFLLVEGGRIDHGHHEGKAKQALHEAVEMDRAIGQAGSLTSSEDTLTVVTADHSHVFTFGGYTPRGNSIFGLAPMLSDTDKKPFTAILYGNGPGYKVVGGERENVSMVDYAHNNYQAQSAVPLRHETHGGEDVAVFSKGPMAHLLHGVHEQNYVPHVMAYAACIGANLGHCAPASSAGSLAAGPLLLALALYPLSVLF

SEQ ID NO: 755 - protein, 524 aa, Homo Sapiens; identical to SEQ ID NO: 754

SEQ ID NO: 756 - protein, 447 aa, Homo Sapiens
MPWSFRSSTPTWLRMSSCSWEMTYNTNAQVPDSAGTATAYLCGVKANEGTVGVSAATERSRCNTTQGNEVTSILRWAKDAGKSVGIVTTTRVNHATPSAAYAHSADRDWYSDNEMPPEALSQGCKDIAYQLMHNIRDIDVIMGGGRKYMYPKNKTDVEYESDEKARGTRLDGLDLVDTWKSFKPRYKHSHFIWNRTELLTLDPHNVDYLLGLFEPGDMQYELNRNNVTDPSLSEMVVVAIQILRKNPKGFFLLVEGGRIDHGHHEGKAKQALHEAVEMDRAIGQAGSLTSSEDTLTVVTADHSHVFTFGGYTPRGNSIFGLAPMLSDTDKKPFTAILYGNGPGYKVVGGERENVSMVDYAHNNYQAQSAVPLRHETHGGEDVAVFSKGPMAHLLHGVHEQNYVPHVMAYAACIGANLGHCAPASSAGSLAAGPLLLALALYPLSVLF

SEQ ID NO: 757 - protein, 216 aa, Homo Sapiens
  misc_feature (1)..(1): Xaa can be any naturally occurring amino acid
XHSHFIWNRTELLTLDPHNVDYLLGGRIDHGHHEGKAKQALHEAVEMDRAIGQAGSLTSSEDTLTVVTADHSHVFTFGGYTPRGNSIFGLAPMLSDTDKKPFTAILYGNGPGYKVVGGERENVSMVDYAHNNYQAQSAVPLRHETHGGEDVAVFSKGPMAHLLHGVHEQNYVPHVMAYAACIGANLGHCAPASSAGSLAAGPLLLALALYPLSVLF

SEQ ID NO: 758 - protein, 535 aa, Homo Sapiens
MLGPCMLLLLLLLGLRLQLSLGIIPVEEENPDFWNREAAEALGAAKKLQPAQTAAKNLIIFLGDGMGVSTVTAARILKGQKKDKLGPEIPLAMDRFPYVALSKTYNVDKHVPDSGATATAYLCGVKGNFQTIGLSAAARFNQCNTTRGNEVISVMNRAKKAGKSVGVVTTTRVQHASPAGTYAHTVNRNWYSDADVPASARQEGCQDIATQLISNMDIDVILGGGRKYMFRMGTPDPEYPDDYSQGGTRLDGKNLVQEWLAKRQGARYVWNRTELMQASLDPSVTHLMGLFEPGDMKYEIHRDSTLDPSLMEMTEAALRLLSRNPRGFFLFVEGGRIDHGHHESRAYRALTETIMFDDAIERAGQLTSEEDTLSLVTADHSHVFSFGGYPLRGSSIFGLAPGKARDRKAYTVLLYGNGPGYVLKDGARPDVTESESGSPEYRQQSAVPLDEETHAGEDVAVFARGPQAHLVHGVQEQTFIAHVMAFAACLEPYTACDLAPPAGTTDAAHPGRSVVPALLPLLAGTLLLLETATAP

SEQ ID NO: 759 - protein, 532 aa, Homo Sapiens
MQGPWVLLLLGLRLQLSLGIIPVEEENPDFWNRQAAEALGAAKKLQPAQTAAKNLIIFLGDGMGVSTVTAARILKGQKKDKLGPETFLAMDRFPYVALSKTYSVDKHVPDSGATATAYLCGVKGNFQTIGLSAAARFNQCNTTRGNEVISVMNRAKKAGKSVGVVTTTRVQHASPAGAYAHTVNRNWYSDADVPASARQEGCQDIATQLISNMDIDVILGGGRKYMFPMGTPDPEYPDDYSQGGTRLDGKNLVQEWLAKHQGARYVWNRTELLQASLDPSVTHLMGLFEPGDMKYEIHRDSTLDPSLMEMTEAALLLLSRNPRGFFLFVEGGRIDHGHHESRAYRALTETIMFDDAIERAGQLTSEEDTLSLVTADHSHVFSFGGYPLRGSSIFGLAPGKARDRKAYTVLLYGNGPGYVLKDGARPDVTESESGSPEYRQQSAVPLDGETHAGEDVAVFARGPQAHLVHGVQEQTFIAHVMAFAACLEPYTACDLAPRAGTTDAAHPGPSVVPALLPLLAGTLLLLGTATAP

SEQ ID NO: 760 - protein, 432 aa, Homo Sapiens
MSASKIPLFKMKDLILILCLLEMSFAVPFFPQQSGTPGMASLSLETMRQLGSLQRLNTLSQYSRYGFGKSFNSLWMHGLLPPHSSLPWMRPREHETQQPSLKPQQPGLKPFLQSAAATTNQATALKEALQPPIHLGHLPLQEGELPLVQQQVAPSDKPPKPELPGVDFADPQGPSLPGMDFPDPQGPSLPGLDFADPQGSTIFQIARLISHGPMPQNKQSPLYPGMLYVPFGANQLNAPARLGIMSSEEVAGGREDPMAYGAMFPGFGGMRPGFEGMPHNPAMGGDFTLEFDSPVAATKGPENEEGGAQGSPMPEANPDNLENPAFLTELEPAPHAGLLALPKDDIPGLPRSPSGKMKGLPSVTPAAADPLMTPELADVYRTYDADMTTSVDFQEEATMDTTMAPNSLQTSMPGNKAQEPEMMHDAWHFQEP

SEQ ID NO: 761 - protein, 447 aa, Homo Sapiens
MSASKIPLFKMKDLILILCLLEMSFAVPFFPQQSGTPGMASLSLETMRQLGSLQRLNTLSQYSRYGFGKSFNSLWMHGLLPPHSSLPWMRPREHETQQYEYSLPVHPPPLPSQPSLKPQQPGLKPFLQSAAATTNQATALKEALQPPIHLGHLPLQEGELPLVQQQVAPSDKPPKPELPGVDFADPQGPSLPGMDFPDPQGPSLPGLDFADPQGSTIFQIARLISHGPMPQNKQSPLYPGMLYVPFGANQLNAPARLGIMSSEEVAGGREDPMAYGAMFPGFGGMRPGFEGMPHNPAMGGDFTLEFDSPVAATKGPENEEGGAQGSPMPEANPDNLENPAFLTELEPAPHAGLLALPKDDIPGLPRSPSGKMKGLPSVTPAAADPLMTPELADVYRTYDADMTTSVDFQEEATMDTTMAPNSLQTSMPGNKAQEPEMMHDAWHFQEP

SEQ ID NO: 762 - protein, 446 aa, Homo Sapiens [sequence omitted]

SEQ ID NO: 763 - protein, 193 aa, Homo Sapiens
HKSKWNITMESYVVHTNYDEYAIFLTKKFSRHHGPTITAKLYGRAPQLRETLLQDFRVVAQGVGIPEDSIFTMADRGECVPGEQEPEPILIPRVRRAVLPQEEEGSGGGQLVTEVTKKEDSCQLGYSAGPCMGMTSRYFYNGTSMACETFQYGGCMGNGNNFVTVRGPCRAFIQLWAFDAVKGKCVLFPYGGC

SEQ ID NO: 764 - protein, 352 aa, Homo Sapiens
MRSLGALLLLLSACLAVSAGPVPTPPDNIQVQENFNISRIYGKWYNLAIGSTCPWLKKIMDRMTVSTLVLGEGATEAEISMTSTRWRKGVCEETSGAYEKTDTDGKFLYHKSKWNITMESYVVHTNYDEYAIFLTKKFSRHHGPTITAKLYGRAPQLRETLLQDFRVVAQGVGIPEDSIFTMADRGECVPGEQEPEPILIPRVRRAVLPQEEEGSGGGQLVTEVTKKEDSCQLGYSAGPCMGMTSRYFYNGTSMACETFQYGGCMGNGNNFVTEKECLQTCRTVAACNLPIVRGPCRAFIQLWAFDAVKGKCVLFPYGGCQGNGNKFYSEKECREYCGVPGDGDEELLRFSN

SEQ ID NO: 765 - protein, 238 aa, Homo Sapiens
MRSLGALLLLLSACLAVSAGPVPTPPDNIQVQENFNISRIYGKWYNLAIGSTCPWLKKIMDRMTVSTLVLGEGATEAEISMTSTRWRKGVCEETSGAYEKTDTDGKFLYHKSKWNITMESYVVHTNYDEYAIFLTKKFSRHHGPTITAKLYGRAPQLRETLLQDFRVVAQGVGIPEDSIFTMADRVNGLEQATQAGPFMKWTKARQVPSTMLTKDTNPGLGWPLGLVLLFTPLSCSVT

SEQ ID NO: 766 - protein, 205 aa, Homo Sapiens
MGTWILFACLLGAAFAMPLPPHPGHPGYINFSYENSHSQAINVDRTALVLTPLKWYQSIRPPYPSYGYEPMGGWLHHQIIPVLSQQHPPTHTLQPHHHIPVVPAQQPVIPQQPMMPVPGQHSMTPIQHHQPNLPPPAQQPYQPQPVQPQPHQPMQPQPPVHPMQPLPPQPPLPPMFPMQPLPPMLPDLTLEAWPSTDKTKREEVD

SEQ ID NO: 767 - protein, 191 aa, Homo Sapiens
MGTWILFACLLGAAFAMPLPPHPGHPGYINFSYEVLTPLKWYQSIRPPYPSYGYEPMGGWLHHQIIPVLSQQHPPTHTLQPHHHIPVVPAQQPVIPQQPMMPVPGQHSMTPIQHHQPNLPPPAQQPYQPQPVQPQPHQPMQPQPPVHPMQPLPPQPPLPPMFPMQPLPPMLPDLTLEAWPSTDKTKREEVD

SEQ ID NO: 768 - protein, 175 aa, Homo Sapiens
MGTWILFACLLGAAFAMPVLTPLKWYQSIRPPYPSYGYEPMGGWLHHQIIPVLSQQHPPTHTLQPHHHIPVVPAQQPVIPQQPMMPVPGQHSMTPIQHHQPNLPPPAQQPYQPQPVQPQPHQPMQPQPPVHPMQPLPPQPPLPPMFPMQPLPPMLPDLTLEAWPSTDKTKREEVD

SEQ ID NO: 769 - protein, 206 aa, Homo Sapiens
MGTWILFACLVGAAFAMPLPPHPGHPGYINFSYENSHSQAINVDRIALVLTPLKWYQSMIRPPYSSYGYEPMGGWLHHQIIPVVSQQHPLTHTLQSHHHIPVVPAQQPRVRQQALMPVPGQQSMTPTQHHQPNLPLPAQQPFQPQPVQPQPHQPMQPQPPVQPMQPLLPQPPLPPMFPLRPLPPILPDLHLEAWPATDKTKQEEVD

SEQ ID NO: 770 - protein, 192 aa, Homo Sapiens
MGTWILFACLVGAAFAMPLPPHPGHPGYINFSYEVLTPLKWYQSMIRPPYSSYGYEPMGGWLHHQIIPVVSQQHPLTHTLQSHHHIPVVPAQQPRVRQQALMPVPGQQSMTPTQHHQPNLPLPAQQPFQPQPVQPQPHQPMQPQPPVQPMQPLLPQPPLPPMFPLRPLPPILPDLHLEAWPATDKTKQEEVD

SEQ ID NO: 771 - protein, 560 aa, Homo Sapiens
MRDLPLTSLALVLSALGALLGTEALRAEEPAVGTSGLIFREDLDWPPGSPQEPLCLVALGGDSNGSSSPLRVVGALSAYEQAFLGAVQRARWGPRDLATFGVCNTGDRQAALPSLRRLGAWLRDPGGQRLVVLHLEEVTWEPTPSLRFQEPPPGGAGPPELALLVLYPGPGPEVTVTRAGLPGAQSLCPSRDTRYLVLAVDRPAGAWRGSGLALTLQPRGEDSRLSTARLQALLFGDDHRCFTRMTPALLLLPRSEPAPLPAHGQLDTVPFPPPRPSAELEESPPSADPFLETLTRLVRALRVPPARASAPRLALDPDALAGFPQGLVNLSDPAALERLLDGEEPLLLLLRPTAATTGDPAPLHDPTSAPWATALARRVAAELQAAAAELRSLPGLPPATAPLLARLLALCPGGPGGLGDPLRALLLLKALQGLRVEWRGRDPRGPGRAQRSAGATAADGPCALRELSVDLRAERSVLIPETYQANNCQGVCGWPQSDRNPRYGNHVVLLLKMQVRGAALARPPCCVPTAYAGKLLISLSEERISAHHVPNMVATECGCR

SEQ ID NO: 772 - protein, 780 aa, Homo Sapiens
MNVRIFYSVSQSPHSLLSLLFYCAILESRISATMPLFKLPAEEKQIDDAMRNFAEKVFASEVKDEGGRQEISPFDVDEICPISHHEMQAHIFHLETLSTSTEARRKKRFQGRKTVNLSIPLSETSSTKLSHIDEYISSSPTYQTVPDFQRVQITGDYASGVTVEDFEIVCKGLYRALCIREKYMQKSFQRFPKTPSKYLRNIDGEAWVANESFYPVFTPPVKKGEDPFRTDNLPENLGYHLKMKDGVVYVYPNEAAVSKDEPKPLPYPNLDTFLDDMNFLLALIAQGPVKTYTHRRLKFLSSKFQVHQMLNEMDELKELKNNPHRDFYNCRKVDTHIHAAACMNQKHLLRFIKKSYQIDADRVVYSTKEKNLTLKELFAKLKMHPYDLTVDSLDVHAGRQTFQRFDKFNDKYNPVGASELRDLYLKTDNYINGEYFATIIKEVGADLVEAKYQHAEPRLSIYGRSPDEWSKLSSWFVCNRIHCPNMTWMIQVPRIYDVFRSKNFLPHFGKMLENIFMPVFEATINPQADPELSVFLKHITGFDSVDDESKHSGHMFSSKSPKPQEWTLEKNPSYTYYAYYMYANIMVLNSLRKERGMNTFLFRPHCGEAGALTHLMTAFMIADDISHGLNLKKSPVLQYLFFLAQIPIAMSPLSNNSLFLEYAKNPFLDFLQKGLMISLSTDDPMQFHFTKEPLMEEYAIAAQVFKLSTCDMCEVARNSVLQCGISHEEKVKFLGDNYLEEGPAGNDIRRTNVAQIRMAYRYETWCYELNLIAEGLKSTE

SEQ ID NO: 773 - protein, 776 aa, Homo Sapiens
MNVRIFYSVSQSPHSLLSLLFYCAILESRISATMPLFKLPEIDDAMRNFAEKVFASEVKDEGGRQEISPFDVDEICPISHHEMQAHIFHLETLSTSTEARRKKRFQGRKTVNLSIPLSETSSTKLSHIDEYISSSPTYQTVPDFQRVQITGDYASGVTVEDFEIVCKGLYRALCIREKYMQKSFQRFPKTPSKYLRNIDGEAWVANESFYPVFTPPVKKGEDPFRTDNLPENLGYHLKMKDGVVYVYPNEAAVSKDEPKPLPYPNLDTFLDDMNFLLALIAQGPVKTYTHRRLKFLSSKFQVHQMLNEMDELKELKNNPHRDFYNCRKVDTHIHAAACMNQKHLLRFIKKSYQIDADRVVYSTKEKNLTLKELFAKLKMHPYDLTVDSLDVHAGRQTFQRFDKFNDKYNPVGASELRDLYLKTDNYINGEYFATIIKEVGADLVEAKYQHAEPRLSIYGRSPDEWSKLSSWFVCNRIHCPNMTWMIQVPRIYDVFRSKNFLPHFGKMLENIFMPVFEATINPQADPELSVFLKHITGFDSVDDESKHSGHMFSSKSPKPQEWTLEKNPSYTYYAYYMYANIMVLNSLRKERGMNTFLFRPHCGEAGALTHLMTAFMIADDISHGLNLKKSPVLQYLFFLAQIPIAMSPLSNNSLFLEYAKNPFLDFLQKGLMISLSTDDPMQFHFTKEPLMEEYAIAAQVFKLSTCDMCEVARNSVLQCGISHEEKVKFLGDNYLEEGPAGNDIRRTNVAQIRMAYRYETWCYELNLIAEGLKSTE

SEQ ID NO: 774 - protein, 191 aa, Homo Sapiens
QCLCSNSQVGVQKIDDAMRNFAEKVFASEVKDEGGRQEISPFDVDEICPISHHEMQAHIFHLETLSTSTEARRKKRFQGRKTVNLSIPLSETSSTKLSHIDEYISSSPTYQTVPDFQRVQITGDYASGVTVEDFEIVCKGLYRALCIREKYMQKSFQRFPKTPSKYLRNIDGEAWVANESFYPVRPIPTGA

SEQ ID NO: 775 - protein, 208 aa, Homo Sapiens
MRSTILLFCLLGSTRSLPLKPALGLPPTKLAPDQGTLPNQQQSNQVFPSLSLIPLTQMLTLGPDLHLLNPAAGMTPGTQTHPLTLGGLNVQQQLHPHVLPIFVTQLGAQGTILSSEELPQIFTSLIIHSLFPGGILPTSQAGANPDVQDGSLPAGGAGVNPATQGTPAGRLPTPSGTDDDFAVTTPAGIQRSTHAIEEATTESANGIQ

SEQ ID NO: 776 - protein, 209 aa, Homo Sapiens
MRSTILLFCLLGSTRSLPQLKPALGLPPTKLAPDQGTLPNQQQSNQVFPSLSLIPLTQMLTLGPDLHLLNPAAGMTPGTQTHPLTLGGLNVQQQLHPHVLPIFVTQLGAQGTILSSEELPQIFTSLIIHSLFPGGILPTSQAGANPDVQDGSLPAGGAGVNPATQGTPAGRLPTPSGTDDDFAVTTPAGIQRSTHAIEEATTESANGIQ

SEQ ID NO: 777 - protein, 105 aa, Homo Sapiens
MKLFWLLFTIGFCWAQYSSNTQQGRTSIVHLFEWRWVDIALECERYLAPKGFGGVQVSPPNENVAIHNPFRPWWERYQPVSYKLCTRSGNEDEFRNMVTRCNNVG

SEQ ID NO: 778 - protein, 226 aa, Homo Sapiens
MKLFWLLFTIGFCWAQYSSNTQQGRTSIVHLFEWRWVDIALECERYLAPKGFGGVQVSPPNENVAIHNPFRPWWERYQPVSYKLCTRSGNEDEFRNMVTRCNNVGVRIYVDAVINHMCGNAVSAGTSSTCGSYFNPGSRDFPAVPYSGWDFNDGKCKTGSGDIENYNDATQVRDCRLSGLLDLALGKDYVRSKIAEYMNHLIDIGVAGFRIDASKHMWPGDIKAIL

SEQ ID NO: 779 - protein, 511 aa, Homo Sapiens
MKLFWLLFTIGFCWAQYSSNTQQGRTSIVHLFEWRWVDIALECERYLAPKGFGGVQVSPPNENVAIHNPFRPWWERYQPVSYKLCTRSGNEDEFRNMVTRCNNVGVRIYVDAVINHMCGNAVSAGTSSTCGSYFNPGSRDFPAVPYSGWDFNDGKCKTGSGDIENYNDATQVRDCRLSGLLDLALGKDYVRSKIAEYMNHLIDIGVAGFRIDASKHMWPGDIKAILDKLHNLNSNWFPEGSKPFIYQEVIDLGGEPIKSSDYFGNGRVTEFKYGAKLGTVIRKWNGEKMSYLKNWGEGWGFMPSDRALVFVDNHDNQRGHGAGGASILTFWDARLYKMAVGFMLAHPYGFTRVMSSYRWPRYFENGKDVNDWVGPPNDNGVTKEVTINPDTTCGNDWVCEHRWRQIRNMVNFRNVVDGQPFTNWYDNGSNQVAFGRGNRGFIVFNNDDWTFSLTLQTGLPAGTYCDVISGDKINGNCTGIKIYVSDDGKAHFSISNSAEDPFIAIHAESKL

SEQ ID NO: 780 - protein, 105 aa, Homo Sapiens; identical to SEQ ID NO: 777

SEQ ID NO: 781 - protein, 226 aa, Homo Sapiens; identical to SEQ ID NO: 778

SEQ ID NO: 782 - protein, 511 aa, Homo Sapiens; identical to SEQ ID NO: 779

SEQ ID NO: 783 - protein, 511 aa, Homo Sapiens; identical to SEQ ID NO: 779

SEQ ID NO: 784 - protein, 511 aa, Homo Sapiens; identical to SEQ ID NO: 779

SEQ ID NO: 785 - protein, 511 aa, Homo Sapiens
MKFFLLLFTIGFCWAQYSPNTQQGRTSIVHLFEWRWVDIALECERYLAPKGFGGVQVSPPNENVAIYNPFRPWWERYQPVSYKLCTRSGNEDEFRNMVTRCNNVGVRIYVDAVINHMCGNAVSAGTSSTCGSYFNPGSRDFPAVPYSGWDFNDGKCKTGSGDIENYNDATQVRDCRLTGLLDLALEKDYVRSKIAEYMNHLIDIGVAGFRLDASKHMWPGDIKAILDKLHNLNSNWFPAGSKPFIYQEVIDLGGEPIKSSDYFGNGRVTEFKYGAKLGTVIRKWNGEKMSYLKNWGEGWGFVPSDRALVFVDNHDNQRGHGAGGASILTFWDARLYKMAVGFMLAHPYGFTRVMSSYRWPRQFQNGNDVNDWVGPPNNNGVIKEVTINPDTTCGNDWVCEHRWRQIRNMVIFRNVVDGQPFTNWYDNGSNQVAFGRGNRGFIVFNNDDWSFSLTLQTGLPAGTYCDVISGDKINGNCTGIKIYVSDDGKAHFSISNSAEDPFIAIHAESKL

SEQ ID NO: 786 - protein, 511 aa, Homo Sapiens; identical to SEQ ID NO: 785

SEQ ID NO: 787 - protein, 209 aa, Homo Sapiens
  misc_feature (1)..(1): Xaa can be any naturally occurring amino acid
XFFLLLFTIGFCWAQYSPNTQQGRTSIVHLFEWRWVDIALECERYLAPKGFGGVQVSPPNENVAIYNPFRPWWERYQPVSYKLCTRSGNEDEFRNMVTRCNNVGVRIYVDAVINHMCGNAVSAGTSSTCGSYFNPGSRDFPAVPYSGWDFNDGKCKTGSGDIENYNDATQVIDLGGEPIKSSDYFGNGRVTEFKYGAKLGTVIRKWNGE

SEQ ID NO: 788 - protein, 86 aa, Homo Sapiens
MKFFLLLFTIGFCWAQYSPNTQQGRTSIVHLFEWRWVDIALECERYLAPKGFGGVQVSPPNENVAIHNPFRPWWERYQPVSYKLCT

SEQ ID NO: 789 - protein, 96 aa, Homo Sapiens
MKFFLLLFTIGFCWAQYSPNTQQGRTSIVHLFEWRWVDIALECERYLAPKGFGGVQVSPPNENVAIHNPFRPWWERYQPVSYKLCTRSGNEDEFRN

SEQ ID NO: 790 - protein, 511 aa, Homo Sapiens
MKFFLLLFTIGFCWAQYSPNTQQGRTSIVHLFEWRWVDIALECERYLAPKGFGGVQVSPPNENVAIHNPFRPWWERYQPVSYKLCTRSGNEDEFRNMVTRCNNVGVRIYVDAVINHMSGNAVSAGTSSTCGSYFNPGSRDFPAVPYSGWDFNDGKCKTGSGDIENYNDATQVRDCRLVGLLDLALEKDYVRSKIAEYMNHLIDIGVAGFRLDASKHMWPGDIKAILDKLHNLNSNWFPAGSKPFIYQEVIDLGGEPIKSSDYFGNGRVTEFKYGAKLGTVIRKWNGEKMSYLKNWGEGWGFMPSDRALVFVDNHDNQRGHGAGGASILTFWDARLYKMAVGFMLAHPYGFTRVMSSYRWPRQFQNGNDVNDWVGPPNNNGVIKEVTINPDTTCGNDWVCEHRWRQIRNMVNFRNVVDGQPFTNWYDNGSNQVAFGRGNRGFIVFNNDDWTFSLTLQTGLPAGTYCDVISGDKINGNCTGIKIYVSDDGKAHFSISNSAEDPFIAIHAESKL

SEQ ID NO: 791 - protein, 370 aa, Homo Sapiens
MKFFLLLFTIGFCWAQYSPNTQQGRTSIVHLFEWRWVDIALECERYLAPKGFGGVQVSPPNENVAIHNPFRPWWERYQPVSYKLCTRSGNEDEFRNMVTRCNNVGVRIYVDAVINHMSGNAVSAGTSSTCGSYFNPGSRDFPAVPYSGWDFNDGKCKTGSGDIENYNDATQVRDCRLVGLLDLALEKDYVRSKIAEYMNHLIDIGVAGFRLDASKHMWPGDIKAILDKLHNLNSNWFPAGSKPFIYQEVIDLGGEPIKSSDYFGNGRVTEFKYGAKLGTVIRKWNGEKMSYLKNWGEGWGFMPSDRALVFVDNHDNQRGHGAGGASILTFWDARLYKMAVGFMLAHPYGFTRVMSSYRWPRQFQNGNEHG

SEQ ID NO: 792 - protein, 511 aa, Homo Sapiens; identical to SEQ ID NO: 790

SEQ ID NO: 793 - protein, 147 aa, Homo Sapiens
MVMGLGVLLLVFVLGLGLTPPTLAQDNSRYTHFLTQHYDAKPQGRDDRYCESIMRRRGLTSPCKDINTFIHGNKRSIKAICENKNGNPHRENLRISKSSFQVTTCKLHGGSPWPPCQYRATAGFRNVVVACENGLPVHLDQSIFRRP

SEQ ID NO: 794 - protein, 147 aa, Homo Sapiens; identical to SEQ ID NO: 793

SEQ ID NO: 795 - protein, 129 aa, Homo Sapiens
MAPRGPEQEECEGLLQQWREEGLSQVLSTASEGPLIDKGLAQSSLALLMDNPGEENAASEDRWSSRQLSDLRAAENLDEPFPEMLGEEPLLEVEGVEGSMWAAIPMQSEPQYADCAALPVGALATEQWE

SEQ ID NO: 796 - protein, 67 aa, Homo Sapiens
MEGVTDTKPERPAGWAESVLEEDASELEPAFSRTVGTIQHCLHLTSVYTHFLPQRGRPEVTTMPLGL

SEQ ID NO: 797 - protein, 670 aa, Homo Sapiens
MIASCLCYLLLPATRLFRALSDAFFTCRKNVLLANSSSPQVEGDFAMAPRGPEQEECEGLLQQWREEGLSQVLSTASEGPLIDKGLAQSSLALLMDNPGEENAASEDRWSSRQLSDLRAAENLDEPFPEMLGEEPLLEVEGVEGSMWAAIPMQSEPQYADCAALPVGALATEQWEEDPAVLAWSIAPEPVPQEEASIWPFEGLGQLQPPAVEIPYHEILWREWEDFSTQPDAQGLKAGDGPQFQFTLMSYNILAQDLMQQSSELYLHCHPDILNWNYRFVNLMQEFQHWDPDILCLQEVQEDHYWEQLEPSLRMMGFTCFYKRRTGCKTDGCAVCYKPTRFRLLCASPVEYFRPGLELLNRDNVGLVLLLQPLVPEGLGQVSVAPLCVANTHILYNPRRGDVKLAQMAILLAEVDKVARLSDGSHCPIILCGDLNSVPDSPLYNFIRDGELQYHGMPAWKVSGQEDFSHQLYQRKLQAPLWPSSLGITDCCQYVTSCHPKRSERRKYGRDFLLRFRFCSIACQRPVGLVLMEGVTDTKPERPAGWAESVLEEDASELEPAFSRTVGTIQHCLHLTSVYTHFLPQRGRPEVTTMPLGLGMTVDYIFFSAESCENGNRTDHRLYRDGTLKLLGRLSLLSEEILWAANGLPNPFCSSDHLCLLASFGMEVTAP

SEQ ID NO: 798 - protein, 235 aa, Homo Sapiens
MSQNMGCYFLFLSWFPYSHPSFSTQVSGQEDFSHQLYQRKLQAPLWPSSLGITDCCQYVTSCHPKRSERRKYGRDFLLRFRFCSIACQRPVGLVLMEGVTDTKPERPAGWAESVLEEDASELEPAFSRTVGTIQHCLHLTSVYTHFLPQRGRPEVTTMPLGLGMTVDYIFFSAESCENGNRTDHRLYRDGTLKLLGRLSLLSEEILWAANGLPNPFCSSDHLCLLASFGMEVTAP

SEQ ID NO: 799 - protein, 298 aa, Homo Sapiens
MEGKHKEELDTLKEEKENLQGLVTRQTYIIQELEKQLNRATTNNSVLQKQQLELMDTVHNLVNLCTKEGVLLKGGKREEEKPFRDCADVYQAGFNKSGIYTIYINNMPEPKKVFCNMDVNGGGWTVIQHREDGSLDFQRGWKEYKMGFGNPSGEYWLGNEFIFAITSQRQYMLRIELMDWEGNRAYSQYDRFHIGNEKQNYRLYLKGHTGTAGKQSSLILHGADFSTKDADNDNCMCKCALMLTGGWWFDACGPSNLNGMFYTAGQNHGKLNGIKWHYFKGPSYSLRSTTMMIRPLDF

SEQ ID NO: 800 - protein, 297 aa, Homo Sapiens
MEGKHKEELDTLKEEKENLQGLVTRQTYIIQELEKQLNRATTNNSVLQKQQLELMDTVHNLVNLCTKEVLLKGGKREEEKPFRDCADVYQAGFNKSGIYTIYINNMPEPKKVFCNMDVNGGGWTVIQHREDGSLDFQRGWKEYKMGFGNPSGEYWLGNEFIFAITSQRQYMLRIELMDWEGNRAYSQYDRFHIGNEKQNYRLYLKGHTGTAGKQSSLILHGADFSTKDADNDNCMCKCALMLTGGWWFDACGPSNLNGMFYTAGQNHGKLNGIKWHYFKGPSYSLRSTTMMIRPLDF

SEQ ID NO: 801 - protein, 30 aa, Homo Sapiens
MKSEMAQIQQNAVQNHTATMLEIGTSLLSQ

SEQ ID NO: 802 - protein, 497 aa, Homo Sapiens
MTVFLSFAFLAAILTHIGCSNQRRSPENSGRRYNRIQHGQCAYTFILPEHDGNCRESTTDQYNTNALQRDAPHVEPDFSSQKLQHLEHVMENYTQWLQKLENYIVENMKSEMAQIQQNAVQNHTATMLEIGTSLLSQTAEQTRKLTDVETQVLNQTSRLEIQLLENSLSTYKLEKQLLQQTNEILKIHEKNSLLEHKILEMEGKHKEELDTLKEEKENLQGLVTRQTYIIQELEKQLNRATTNNSVLQKQQLELMDTVHNLVNLCTKEVLLKGGKREEEKPFRDCADVYQAGFNKSGIYTIYINNMPEPKKVFCNMDVNGGGWTVIQHREDGSLDFQRGWKEYKMGFGNPSGEYWLGNEFIFAITSQRQYMLRIELMDWEGNRAYSQYDRFHIGNEKQNYRLYLKGHTGTAGKQSSLILHGADFSTKDADNDNCMCKCALMLTGGWWFDACGPSNLNGMFYTAGQNHGKLNGIKWHYFKGPSYSLRSTTMMIRPLDF

SEQ ID NO: 803 - protein, 498 aa, Homo Sapiens
MTVFLSFAFLAAILTHIGCSNQRRSPENSGRRYNRIQHGQCAYTFILPEHDGNCRESTTDQYNTNALQRDAPHVEPDFSSQKLQHLEHVMENYTQWLQKLENYIVENMKSEMAQIQQNAVQNHTATMLEIGTSLLSQTAEQTRKLTDVETQVLNQTSRLEIQLLENSLSTYKLEKQLLQQTNEILKIHEKNSLLEHKILEMEGKHKEELDTLKEEKENLQGLVTRQTYIIQELEKQLNRATTNNSVLQKQQLELMDTVHNLVNLCTKEGVLLKGGKREEEKPFRDCADVYQAGFNKSGIYTIYINNMPEPKKVFCNMDVNGGGWTVIQHREDGSLDFQRGWKEYKMGFGNPSGEYWLGNEFIFAITSQRQYMLRIELMDWEGNRAYSQYDRFHIGNEKQNYRLYLKGHTGTAGKQSSLILHGADFSTKDADNDNCMCKCALMLTGGWWFDACGPSNLNGMFYTAGQNHGKLNGIKWHYFKGPSYSLRSTTMMIRPLDF

SEQ ID NO: 804 - protein, 496 aa, Homo Sapiens
MWQIVFFTLSCDLVLAAAYNNFRKSMDSIGKKQYQVQHGSCSYTFLLPEMDNCRSSSSPYVSNAVQRDAPLEYDDSVQRLQVLENIMENNTQWLMKLENYIQDNMKKEMVEIQQNAVQNQTAVMIEIGTNLLNQTAEQTRKLTDVEAQVLNQTTRLELQLLEHSLSTNKLEKQILDQTSEINKLQDKNSFLEKKVLAMEDKHIIQLQSIKEEKDQLQVLVSKQNSIIEELEKKIVTATVNNSVLQKQQHDLMETVNNLLTMMSTSNSAKDPTVAKEEQISFRDCAEVFKSGHTTNGIYTLTFPNSTEEIKAYCDMEAGGGGWTIIQRREDGSVDFQRTWKEYKVGFGNPSGEYWLGNEFVSQLTNQQRYVLKIHLKDWEGNEAYSLYEHFYLSSEELNYRIHLKGLTGTAGKISSISQPGNDFSTKDGDNDKCICKCSQMLTGGWWFDACGPSNLNGMYYPQRQNTNKFNGIKWYYWKGSGYSLKATTMMIRPADF

SEQ ID NO: 805 - protein, 459 aa, Homo Sapiens
MWQIVFFTLSCDLVLAAAYNNFRKSMDSIGKKQYQVQHGSCSYTFLLPEMDNCRSSSSPYVSNAVQRDAPLEYDDSVQRLQVLENIMENNTQWLMKLENYIQDNMKKEMVEIQQNAVQNQTAVMIEIGTNLLNQTAEQTRKLTDVEAQVLNQTTRLELQLLEHSLSTNKLEKQILDQTSEINKLQDKNSFLEKKVLAMEDKHIIQLQSIKEEKDQLQVLVSKQNSIIEELEKKIVTATVNNSVLQKQQHDLMETVNNLLTMMSTSNSKDPTVAKEEQISFRDCAEVFKSGHTTNGIYTLTFPNSTEEIKAYCDMEAGGGGWTIIQRREDGSVDFQRTWKEYKVGFGNPSGEYWLGNEFVSQLTNQQRYVLKIHLKDWEGNEAYSLYEHFYLSSEELNYRIHLKGLTGTAGKISSISQPGNDFSTKDGDNDKCICKCSQMLTGGRDDFLSSYLYWQGMIS

SEQ ID NO: 806 - protein, 495 aa, Homo Sapiens
MWQIVFFTLSCDLVLAAAYNNFRKSMDSIGKKQYQVQHGSCSYTFLLPEMDNCRSSSSPYVSNAVQRDAPLEYDDSVQRLQVLENIMENNTQWLMKLENYIQDNMKKEMVEIQQNAVQNQTAVMIEIGTNLLNQTAEQTRKLTDVEAQVLNQTTRLELQLLEHSLSTNKLEKQILDQTSEINKLQDKNSFLEKKVLAMEDKHIIQLQSIKEEKDQLQVLVSKQNSIIEELEKKIVTATVNNSVLQKQQHDLMETVNNLLTMMSTSNSKDPTVAKEEQISFRDCAEVFKSGHTTNGIYTLTFPNSTEEIKAYCDMEAGGGGWTIIQRREDGSVDFQRTWKEYKVGFGNPSGEYWLGNEFVSQLTNQQRYVLKIHLKDWEGNEAYSLYEHFYLSSEELNYRIHLKGLTGTAGKISSISQPGNDFSTKDGDNDKCICKCSQMLTGGWWFDACGPSNLNGMYYPQRQNTNKFNGIKWYYWKGSGYSLKATTMMIRPADF

SEQ ID NO: 807 - protein, 444 aa, Homo Sapiens
MWQIVFFTLSCDLVLAAAYNNFRKSMDSIGKKQYQVQHGSCSYTFLLPEMDNCRSSSSPYVSNAVQRDAPLEYDDSVQRLQVLENIMENNTQWLMKVLNQTTRLELQLLEHSLSTNKLEKQILDQTSEINKLQDKNSFLEKKVLAMEDKHIIQLQSIKEEKDQLQVLVSKQNSIIEELEKKIVTATVNNSVLQKQQHDLMETVNNLLTMMSTSNSAKDPTVAKEEQISFRDCAEVFKSGHTTNGIYTLTFPNSTEEIKAYCDMEAGGGGWTIIQRREDGSVDFQRTWKEYKVGFGNPSGEYWLGNEFVSQLTNQQRYVLKIHLKDWEGNEAYSLYEHFYLSSEELNYRIHLKGLTGTAGKISSISQPGNDFSTKDGDNDKCICKCSQMLTGGWWFDACGPSNLNGMYYPQRQNTNKFNGIKWYYWKGSGYSLKATTMMIRPADF

SEQ ID NO: 808 - protein, 503 aa, Homo Sapiens
MLSQLAMLQGSLLLVVATMSVAQQTRQEADRGCETLVVQHGHCSYTFLLPKSEPCPPGPEVSRDSNTLQRESLANPLHLGKLPTQQVKQLEQALQNNTQWLKKLERAIKTILRSKLEQVQQQMAQNQTAPMLELGTSLLNQTTAQIRKLTDMEAQLLNQTSRMDAQMPETFLSTNKLENQLLLQRQKLQQLQGQNSALEKRLQALETKQQEELASILSKKAKLLNTLSRQSAALTNIERGLRGVRHNSSLLQDQQHSLRQLLVLLRHLVQERANASAPAFIMAGEQVFQDCAEIQRSGASASGVYTIQVSNATKPRKVFCDLQSSGGRWTLIQRRENGTVNFQRNWKDYKQGFGDPAGEHWLGNEVVHQLTRRAAYSLRVELQDWEGHEAYAQYEHFHLGSENQLYRLSVVGYSGSAGRQSSLVLQNTSFSTLDSDNDHCLCKCAQVMSGGWWFDACGLSNLNGVYYHAPDNKYKMDGIRWHYFKGPSYSLRASRMMIRPLDI

SEQ ID NO: 809 - protein, 114 aa, Homo Sapiens
MKTFTWTLGVLFFLLVDTGHCRGGQFKIKKINQRRYPRATDGKEEAKKCAYTFLVPEQRITGPICVNTKGQDASTIKDMITRMDLENLKDVLSRQKREIDVLQLVVDVDGNIVN

SEQ ID NO: 810 - protein, 491 aa, Homo Sapiens
MKTFTWTLGVLFFLLVDTGHCRGGQFKIKKINQRRYPRATDGKEEAKKCAYTFLVPEQRITGPICVNTKGQDASTIKDMITRMDLENLKDVLSRQKREIDVLQLVVDVDGNIVNEVKLLRKESRNMNSRVTQLYMQLLHEIIRKRDNSLELSQLENKILNVTTEMLKMATRYRELEVKYASLTDLVNNQSVMITLLEEQCLRIFSRQDTHVSPPLVQVVPQHIPNSQQYTPGLLGGNEIQRDPGYPRDLMPPPDLATSPTKSPFKIPPVTFINEGPFKDCQQAKEAGHSVSGIYMIKPENSNGPMQLWCENSLDPGGWTVIQKRTDGSVNFFRNWENYKKGFGNIDGEYWLGLENIYMLSNQDNYKLLIELEDWSDKKVYAEYSSFRLEPESEFYRLRLGTYQGNAGDSMMWHNGKQFTTLDRDKDMYAGNCAHFHKGGWWYNACAHSNLNGVWYRGGHYRSKHQDGIFWAEYRGGSYSLRAVQMMIKPID

SEQ ID NO: 811 - protein, 491 aa, Homo Sapiens; identical to SEQ ID NO: 810

SEQ ID NO: 812 - protein, 191 aa, Homo Sapiens
MQVWCDQRHDPGGWTVIQRRLDGSVNFFRNWETYKQGFGNIDGEYWLGLENIYWLTNQGNYKLLVTMEDWSGRKVFAEYASFRLEPESEYYKLRLGRYHGNAGDSFTWHNGKQFTTLDRDHDVYTGNCAHYQKGGWWYNACAHSNLNGVWYRGGHYRSRYQDGVYWAEFRGGSYSLKKVVMMIRPNPNTFH

SEQ ID NO: 813 - protein, 493 aa, Homo Sapiens
MRPLCVTCWWLGLLAAMGAVAGQEDGFEGTEEGSPREFIYLNRYKRAGESQDKCTYTFIVPQQRVTGAICVNSKEPEVLLENRVHKQELELLNNELLKQKRQIETLQQLVEVDGGIVSEVKLLRKESRNMNSRVTQLYMQLLHEIIRKRDNALELSQLENRILNQTADMLQLASKYKDLEHKYQHLATLAHNQSEIIAQLEEHCQRVPSARPVPQPPPAAPPRVYQPPTYNRIINQISTNEIQSDQNLKVLPPPLPTMPTLTSLPSSTDKPSGPWRDCLQALEDGHDTSSIYLVKPENTNRLMQVWCDQRHDPGGWTVIQRRLDGSVNFFRNWETYKQGFGNIDGEYWLGLENIYWLTNQGNYKLLVTMEDWSGRKVFAEYASFRLEPESEYYKLRLGRYHGNAGDSFTWHNGKQFTTLDRDHDVYTGNCAHYQKGGWWYNACAHSNLNGVWYRGGHYRSRYQDGVYWAEFRGGSYSLKKVVMMIRPNPNTFH

SEQ ID NO: 814 - protein, 460 aa, Homo Sapiens
MFTIKLLLFIVPLVISSRIDQDNSSFDSLSPEPKSRFAMLDDVKILANGLLQLGHGLKDFVHKTKGQINDIFQKLNIFDQSFYDLSLQTSEIKEEEKELRRTTYKLQVKNEEVKNMSLELNSKLESLLEEKILLQQKVKYLEEQLTNLIQNQPETPEHPEVTSLKTFVEKQDNSIKDLLQTVEDQYKQLNQQHSQIKEIENQLRRTSIQEPTEISLSSKPRAPRTTPFLQLNEIRNVKHDGIPAECTTIYNRGEHTSGMYAIRPSNSQVFHVYCDVISGSPWTLIQHRIDGSQNFNETWENYKYGFGRLDGEFWLGLEKIYSIVKQSNYVLRIELEDWKDNKHYIEYSFYLGNHETNYTLHLVAITGNVPNAIPENKDLVFSTWDHKAKGHFNCPEGYSGGWWWHDECGENNLNGKYNKPRAKSKPERRRGLSWKSQNGRLYSIKSTKMLIHPTDSESFE

SEQ ID NO: 815 - protein, 86 aa, Homo Sapiens
MSGAPTAGAALMLCAATAVLLSAQGGPVQSKSPRFASWDEMNVLAHGLLQLGQGLREHAERTRSQLSALERRLSACGSACQGTEGS

SEQ ID NO: 816 - protein, 96 aa, Homo Sapiens
MSGAPTAGAALMLCAATAVLLSAQGGPVQSKSPRFASWDEMNVLAHGLLQLGQGLREHAERTRSQLSALERRLSACGSACQGTEGSTDLPLAPESR

SEQ ID NO: 817 - protein, 105 aa, Homo Sapiens
MSGAPTAGAALMLCAATAVLLSAQGGPVQSKSPRFASWDEMNVLAHGLLQLGQGLREHAERTRSQLSALERRLSACGSACQGTEGSTDLPLAPESRVDPEVLHSL

SEQ ID NO: 818 - protein, 368 aa, Homo Sapiens
MSGAPTAGAALMLCAATAVLLSAQGGPVQSKSPRFASWDEMNVLAHGLLQLGQGLREHAERTRSQLSALERRLSACGSACQGTEGSTDLPLAPESRVDPEVLHSLQTQLKAQNSRIQQLFHKVAQQQRHLEKQHLRIQHLQSQFGLLDHKHLDHEVAKPARRKRLPEMAQPVDPAHNVSRLHHGGWTVIQRRHDGSVDFNRPWEAYKAGFGDPHGEFWLGLEKVHSITGDRNSRLAVQLRDWDGNAELLQFSVHLGGEDTAYSLQLTAPVAGQLGATTVPPSGLSVPFSTWDQDHDLRRDKNCAKSLSGGWWFGTCSHSNLNGQYFRSIPQQRQKLKKGIFWKTWRGRYYPLQATTMLIQPMAAEAAS

SEQ ID NO: 819 - protein, 406 aa, Homo Sapiens
MSGAPTAGAALMLCAATAVLLSAQGGPVQSKSPRFASWDEMNVLAHGLLQLGQGLREHAERTRSQLSALERRLSACGSACQGTEGSTDLPLAPESRVDPEVLHSLQTQLKAQNSRIQQLFHKVAQQQRHLEKQHLRIQHLQSQFGLLDHKHLDHEVAKPARRKRLPEMAQPVDPAHNVSRLHRLPRDCQELFQVGERQSGLFEIQPQGSPPFLVNCKMTSDGGWTVIQRRHDGSVDFNRPWEAYKAGFGDPHGEFWLGLEKVHSITGDRNSRLAVQLRDWDGNAELLQFSVHLGGEDTAYSLQLTAPVAGQLGATTVPPSGLSVPFSTWDQDHDLRRDKNCAKSLSGGWWFGTCSHSNLNGQYFRSIPQQRQKLKKGIFWKTWRGRYYPLQATTMLIQPMAAEAAS

SEQ ID NO: 820 - protein, 406 aa, Homo Sapiens; identical to SEQ ID NO: 819

SEQ ID NO: 821 - protein, 128 aa, Homo Sapiens
MSGAPTAGAALMLCAATAVLLSAQGGPVQSKSPRFASWDEMNVLAHGLLQLGQGLREHAERTRSQLSALERRLSACGSFTACRHNSRLRTAGSSNSSTRWPSSSGTWRSSTCEFSICKASLASWTTST

SEQ ID NO: 822 - protein, 129 aa, Homo Sapiens
  misc_feature (1)..(1): Xaa can be any naturally occurring amino acid
XPVQSKSPRFASWDEMNVLAHGLLQLGQGLREHAERTRSQLSALERRLSACGSACQGTEGSTDLPLAPESRVDPEVLHSLQTQLKAQNSRIQQLFHKVAQQQRHLEKQHLRIQHLQSQTGLNGGLSHID

SEQ ID NO: 823 - protein, 192 aa, Homo Sapiens
MMSPSQASLLFLNVCIFICGEAVQGNCVHHSTDSSVVNIVEDGSNAKDESKSNDTVCKEDCEESCDVKTKITREEKHFMCRNLQNSIVSYTRSTKKLLRNMMDEQQASLDYLSNQVMCDMDYRGGGRTVIQKRIDGIIDFQRLWCDYLDGFGDLLGEFWLGLKKIFYIVNQKNTSFMLYVALESEDDTLAYA

SEQ ID NO: 824 - protein, 388 aa, Homo Sapiens
MMSPSQASLLFLNVCIFICGEAVQGNCVHHSTDSSVVNIVEDGSNAKDESKSNDTVCKEDCEESCDVKTKITREEKHFMCRNLQNSIVSYTRSTKKLLRNMMDEQQASLDYLSNQVNELMNRVLLLTTEVFRKQLDPFPHRPVQSHGLDCTDIKDTIGSVTKTPSGLYIIHPEGSSYPFEVMCDMDYRGGGRTVIQKRIDGIIDFQRLWCDYLDGFGDLLGEFWLGLKKIFYIVNQKNTSFMLYVALESEDDTLAYASYDNFWLEDETRFFKMHLGRYSGNAGDAFRGLKKEDNQNAMPFSTSDVDNDGCRPACLVNGQSVKSCSHLHNKTGWWFNECGLANLNGIHHFSGKLLATGIQWGTWTKNNSPVKIKSVSMKIRRMYNPYFK

SEQ ID NO: 825 - protein, 470 aa, Homo Sapiens
MGKPWLRALQLLLLLGASWARAGAPRCTYTFVLPPQKFTGAVCWSGPASTRATPEAANASELAALRMRVGRHEELLRELQRLAAADGAVAGEVRALRKESRGLSARLGQLRAQLQHEAGPGAGPGADLGAEPAAALALLGERVLNASAEAQRAAARFHQLDVKFRELAQLVTQQSSLIARLERLCPGGAGGQQQVLPPPPLVPVVPVRLVGSTSDTSRMLDPAPEPQRDQTQRQQEPMASPMPAGHPAVPTKPVGPWQDCAEARQAGHEQSGVYELRVGRHVVSVWCEQQLEGGGWTVIQRRQDGSVNFFTTWQHYKAGFGRPDGEYWLGLEPVYQLTSRGDHELLVLLEDWGGRGARAHYDGFSLEPESDHYRLRLGQYHGDAGDSLSWHNDKPFSTVDRDRDSYSGNCALYQRGGWWYHACAHSNLNGVWHHGGHYRSRYQDGVYWAEFRGGAYSLRKAAMLIRPLKL

SEQ ID NO: 826 - protein, 470 aa, Homo Sapiens; identical to SEQ ID NO: 825

SEQ ID NO: 827 - protein, 430 aa, Homo Sapiens
MGKPWLRALQLLLLLGASWARAGAPRCTYTFVLPPQKFTGAVCWSGPASTRATPEAANASELAALRMRVGRHEELLRELQRLAAADGAVAGEVRALRKESRGLSARLGQLRAQLQHEAGPGAGPGADLGAEPAAALALLGERVLNASAEAQRAAARFHQLDVKFRELAQLVTQQSSLIARLERLCPGGAGGQQQVLPPPPLVPVVPVRLVGSTSDTSRMLDPAPEPQRDQTQRQQEPMASPMPAGHPAVPTKPVGPWQDCAEARQAGHEQSGVYELRAGFGRPDGEYWLGLEPVYQLTSRGDHELLVLLEDWGGRGARAHYDGFSLEPESDHYRLRLGQYHGDAGDSLSWHNDKPFSTVDRDRDSYSGNCALYQRGGWWYHACAHSNLNGVWHHGGHYRSRYQDGVYWAEFRGGAYSLRKAAMLIRPLKL

SEQ ID NO: 828 - protein, 346 aa, Homo Sapiens
MLKKPLSAVTWLCIFIVAFVSHPAWLQKLSKHKTPAQPQLKAANCCEEVKELKAQVANLSSLLSELNKKQERDWVSVVMQVMELESNSKRMESRLTDAESKYSEMNNQIDIMQLQAAQTVTQTSADAIYDCSSLYQKNYRISGVYKLPPDDFLGSPELEVFCDMETSGGGWTIIQRRKSGLVSFYRDWKQYKQGFGSIRGDFWLGNEHIHRLSRQPTRLRVEMEDWEGNLRYAEYSHFVLGNELNSYRLFLGNYTGNVGNDALQYHNNTAFSTKDKDNDNCLDKCAQLRKGGYWYNCCTDSNLNGVYYRLGEHNKHLDGITWYGWHGSTYSLKRVEMKIRPEDFKP

SEQ ID NO: 829 - protein, 99 aa, Homo Sapiens
MEEDILQLQAEATAEVLGEVAQAQKVLRDSVQRLEVQLRSAWLGPAYREFEVLKAHADKQSHILWALTGHVQRQRREMVAQQHRLRQIQERLHTAALPA

SEQ ID NO: 830 - protein, 198 aa, Homo Sapiens
MPVPALCLLWALAMVTRPASAAPMGGPELAQHEELTLLFHGTLQLGQALNGVYRTTEGRLTKARNSLGLYGRTIELLGQEVSRGRDAAQELRASLLETQMEEDILQLQAEATAEVLGEVAQAQKVLRDSVQRLEVQLRSAWLGPAYREFEVLKAHADKQSHILWALTGHVQRQRREMVAQQHRLRQIQERLHTAALPA

SEQ ID NO: 831 - protein, 198 aa, Homo Sapiens; identical to SEQ ID NO: 830

SEQ ID NO: 832 - protein, 58 aa, Homo Sapiens
  misc_feature (1)..(1): Xaa can be any naturally occurring amino acid
XAQELRASLLETQAHADKQSHILWALTGHVQRQRREMVAQQHRLRQIQERLHTAALPA

SEQ ID NO: 833 - protein, 1897 aa, Homo Sapiens
MAQAAKQLKKIKDIEAQALQEQKEKEESNRKRRNRSRDRKKKADAATSFLRAARSGNLDKALDHLRNGVDINTCNQNGLNGLHLASKEGHVKMVVELLHKEIILETTTKKGNTALHIAALAGQDEVVRELVNYGANVNAQSQKGFTPLYMAAQENHLEVVKFLLENGANQNVATEDGFTPLAVALQQGHENVVAHLINYGTKGKVRLPALHIAARNDDTRTAAVLLQNDPNPDVLSKTGFTPLHIAAHYENLNVAQLLLNRGASVNFTPQNGITPLHIASRRGNVIMVRLLLDRGAQIETKTKDELTPLHCAARNGHVRISEILLDHGAPIQAKTKNGLSPIHMAAQGDHLDCVRLLLQYDAEIDDITLDHLTPLHVAAHCGHHRVAKVLLDKGAKPNSRALNGFTPLHIACKKNHVRVMELLLKTGASIDAVTESGLTPLHVASFMGHLPIVKNLLQRGASPNVSNVKVETPLHMAARAGHTEVAKYLLQNKAKVNAKAKDDQTPLHCAARIGHTNMVKLLLENNANPNLATTAGHTPLHIAAREGHVETVLALLEKEASQACMTKKGFTPLHVAAKYGKVRVAELLLERDAHPNAAGKNGLTPLHVAVHHNNLDIVKLLLPRGGSPHSPAWNGYTPLHIAAKQNQVEVARSLLQYGGSANAESVQGVTPLHLAAQEGHAEMVALLLSKQANGNLGNKSGLTPLHLVAQEGHVPVADVLIKHGVMVDATTRMGYTPLHVASHYGNIKLVKFLLQHQADVNAKTKLGYSPLHQAAQQGHTDIVTLLLKNGASPNEVSSDGTTPLAIAKRLGYISVTDVLKVVTDETSFVLVSDKHRMSFPETVDEILDVSEDEGTAHITIMGEELISFKAERRDSRDVDEEKELLDFVPKLDQVVESPAIPRIPCAMPETVVIRSEEQEQASKEYDEDSLIPSSPATETSDNISPVASPVHTGFLVSFMVDARGGSMRGSRHNGLRVVIPPRTCAAPTRITCRLVKPQKLSTPPPLAEEEGLASRIIALGPTGAQFLSPVIVEIPHFASHGRGDRELVVLRSENGSVWKEHRSRYGESYLDQILNGMDEELGSLEELEKKRVCRIITTDFPLYFVIMSRLCQDYDTIGPEGGSLKSKLVPLVQATFPENAVTKRVKLALQAQPVPDELVTKLLGNQATFSPIVTVEPRRRKFHRPIGLRIPLPPSWTDNPRDSGEGDTTSLRLLCSVIGGTDQAQWEDITGTTKLVYANECANFTTNVSARFWLSDCPRTAEAVNFATLLYKELTAVPYMAKFVIFAKMNDPREGRLRCYCMTDDKVDKTLEQHENFVEVARSRDIEVLEGMSLFAELSGNLVPVKKAAQQRSFHFQSFRENRLAMPVKVRDSSREPGGSLSFLRKAMKYEDTQHILCHLNITMPPCAKGSGAEDRRRTPTPLALRYSILSESTPGSLSGTEQAEMKMAVISEHLGLSWAELARELQFSVEDINRIRVENPNSLLEQSVALLNLWVIREGQNANMENLYTALQSIDRGEIVNMLEGSGRQSRNLKPDRRHTDRDYSLSPSQMNGYSSLQDELLSPASLGCALSSPLRADQYWNEVAVLDAIPLAATEHDTMLEMSDMQVWSAGLTPSLVTAEDSSLECSKAEDSDATGHEWKLEGALSEEPRGPELGSLELVEDDTVDSDATNGLIDLLEQEEGQRSEEKLPGSKRQDDATGAGQDSENEVSLVSGHQRGQARITHSPTVSQVTERSQDRLQDWDADGSIVSYLQDAAQGSWQEEVTQGPHSFQGTSTMTEGLEPGGSQEYEKVLVSVSEHTWTEQPEAESSQADRDRRQQGQEEQVQEAKNTFTQVVQGNEFQNIPGEQVTEEQFTDEQGNIVTKKIIRKVVRQIDLSSADAAQEHEEDHTSTPNP

SEQ ID NO: 834 - protein, 1880 aa, Homo Sapiens
MPYSVGFREADAATSFLRAARSGNLDKALDHLRNGVDINTCNQNGLNGLHLASKEGHVKMVVELLHKEIILETTTKKGNTALHIAALAGQDEVVRELVNYGANVNAQSQKGFTPLYMAAQENHLEVVKFLLENGANQNVATEDGFTPLAVALQQGHENVVAHLINYGTKGKVRLPALHIAARNDDTRTAAVLLQNDPNPDVLSKTGFTPLHIAAHYENLNVAQLLLNRGASVNFTPQNGITPLHIASRRGNVIMVRLLLDRGAQIETKTKDELTPLHCAARNGHVRISEILLDHGAPIQAKTKNGLSPIHMAAQGDHLDCVRLLLQYDAEIDDITLDHLTPLHVAAHCGHHRVAKVLLDKGAKPNSRALNGFTPLHIACKKNHVRVMELLLKTGASIDAVTESGLTPLHVASFMGHLPIVKNLLQRGASPNVSNVKVETPLHMAARAGHTEVAKYLLQNKAKVNAKAKDDQTPLHCAARIGHTNMVKLLLENNANPNLATTAGHTPLHIAAREGHVETVLALLEKEASQACMTKKGFTPLHVAAKYGKVRVAELLLERDAHPNAAGKNGLTPLHVAVHHNNLDIVKLLLPRGGSPHSPAWNGYTPLHIAAKQNQVEVARSLLQYGGSANAESVQGVTPLHLAAQEGHAEMVALLLSKQANGNLGNKSGLTPLHLVAQEGHVPVADVLIKHGVMVDATTRMGYTPLHVASHYGNIKLVKFLLQHQADVNAKTKLGYSPLHQAAQQGHTDIVTLLLKNGASPNEVSSDGTTPLAIAKRLGYISVTDVLKVVTDETSFVLVSDKHRMSFPETVDEILDVSEDEGEELISFKAERRDSRDVDEEKELLDFVPKLDQVVESPAIPRIPCAMPETVVIRSEEQEQASKEYDEDSLIPSSPATETSDNISPVASPVHTGFLVSFMVDARGGSMRGSRHNGLRVVIPPRTCAAPTRITCRLVKPQKLSTPPPLAEEEGLASRIIALGPTGAQFLSPVIVEIPHFASHGRGDRELVVLRSENGSVWKEHRSRYGESYLDQILNGMDEELGSLEELEKKRVCRIITTDFPLYFVIMSRLCQDYDTIGPEGGSLKSKLVPLVQATFPENAVTKRVKLALQAQPVPDELVTKLLGNQATFSPIVTVEPRRRKFHRPIGLRIPLPPSWTDNPRDSGEGDTTSLRLLCSVIGGTDQAQWEDITGTTKLVYANECANFTTNVSARFWLSDCPRTAEAVNFATLLYKELTAVPYMAKFVIFAKMNDPREGRLRCYCMTDDKVDKTLEQHENFVEVARSRDIEVLEGMSLFAELSGNLVPVKKAAQQRSFHFQSFRENRLAMPVKVRDSSREPGGSLSFLRKAMKYEDTQHILCHLNITMPPCAKGSGAEDRRRTPTPLALRYSILSESTPGSLSGTEQAEMKMAVISEHLGLSWAELARELQFSVEDINRIRVENPNSLLEQSVALLNLWVIREGQNANMENLYTALQSIDRGEIVNMLEGSGRQSRNLKPDRRHTDRDYSLSPSQMNGYSSLQDELLSPASLGCALSSPLRADQYWNEVAVLDAIPLAATEHDTMLEMSDMQVWSAGLTPSLVTAEDSSLECSKAEDSDATGHEWKLEGALSEEPRGPELGSLELVEDDTVDSDATNGLIDLLEQEEGQRSEEKLPGSKRQDDATGAGQDSENEVSLVSGHQRGQARITHSPTVSQVTERSQDRLQDWDADGSIVSYLQDAAQGSWQEEVTQGPHSFQGTSTMTEGLEPGGSQEYEKVLVSVSEHTWTEQPEAESSQADRDRRQQGQEEQVQEAKNTFTQVVQGNEFQNIPGEQVTEEQFTDEQGNIVTKKIIRKVVRQIDLSSADAAQEHEEVELRGSGLQPDLIEGRKGAQIVKRASLKRGKQ

SEQ ID NO: 835 - protein, 1881 aa, Homo Sapiens
MPYSVGFREADAATSFLRAARSGNLDKALDHLRNGVDINTCNQNGLNGLHLASKEGHVKMVVELLHKEIILETTTKKGNTALHIAALAGQDEVVRELVNYGANVNAQSQKGFTPLYMAAQENHLEVVKFLLENGANQNVATEDGFTPLAVALQQGHENVVAHLINYGTKGKVRLPALHIAARNDDTRTAAVLLQNDPNPDVLSKTGFTPLHIAAHYENLNVAQLLLNRGASVNFTPQNGITPLHIASRRGNVIMVRLLLDRGAQIETKTKDELTPLHCAARNGHVRISEILLDHGAPIQAKTKNGLSPIHMAAQGDHLDCVRLLLQYDAEIDDITLDHLTPLHVAAHCGHHRVAKVLLDKGAKPNSRALNGFTPLHIACKKNHVRVMELLLKTGASIDAVTESGLTPLHVASFMGHLPIVKNLLQRGASPNVSNVKVETPLHMAARAGHTEVAKYLLQNKAKVNAKAKDDQTPLHCAARIGHTNMVKLLLENNANPNLATTAGHTPLHIAAREGHVETVLALLEKEASQACMTKKGFTPLHVAAKYGKVRVAELLLERDAHPNAAGKNGLTPLHVAVHHNNLDIVKLLLPRGGSPHSPAWNGYTPLHIAAKQNQVEVARSLLQYGGSANAESVQGVTPLHLAAQEGHAEMVALLLSKQANGNLGNKSGLTPLHLVAQEGHVPVADVLIKHGVMVDATTRMGYTPLHVASHYGNIKLVKFLLQHQADVNAKTKLGYSPLHQAAQQGHTDIVTLLLKNGASPNEVSSDGTTPLAIAKRLGYISVTDVLKVVTDETSFVLVSDKHRMSFPETVDEILDVSEDEGEELISFKAERRDSRDVDEEKELLDFVPKLDQVVESPAIPRIPCAMPETVVIRSEEQEQASKEYDEDSLIPSSPATETSDNISPVASPVHTGFLVSFMVDARGGSMRGSRHNGLRVVIPPRTCAAPTRITCRLVKPQKLSTPPPLAEEEGLASRIIALGPTGAQFLSPVIVEIPHFASHGRGDRELVVLRSENGSVWKEHRSRYGESYLDQILNGMDEELGSLEELEKKRVCRIITTDFPLYFVIMSRLCQDYDTIGPEGGSLKSKLVPLVQATFPENAVTKRVKLALQAQPVPDELVTKLLGNQATFSPIVTVEPRRRKFHRPIGLRIPLPPSWTDNPRDSGEGDTTSLRLLCSVIGGTDQAQWEDITGTTKLVYANECANFTTNVSARFWLSDCPRTAEAVNFATLLYKELTAVPYMAKFVIFAKMNDPREGRLRCYCMTDDKVDKTLEQHENFVEVARSRDIEVLEGMSLFAELSGNLVPVKKAAQQRSFHFQSFRENRLAMPVKVRDSSREPGGSLSFLRKAMKYEDTQHILCHLNITMPPCAKGSGAEDRRRTPTPLALRYSILSESTPGSLSGTEQAEMKMAVISEHLGLSWAELARELQFSVEDINRIRVENPNSLLEQSVALLNLWVIREGQNANMENLYTALQSIDRGEIVNMLEGSGRQSRNLKPDRRHTDRDYSLSPSQMNGYSSLQDELLSPASLGCALSSPLRADQYWNEVAVLDAIPLAATEHDTMLEMSDMQVWSAGLTPSLVTAEDSSLECSKAEDSDATGHEWKLEGALSEEPRGPELGSLELVEDDTVDSDATNGLIDLLEQEEGQRSEEKLPGSKRQDDATGAGQDSENEVSLVSGHQRGQARITHSPTVSQVTERSQDRLQDWDADGSIVSYLQDAAQGSWQEEVTQGPHSFQGTSTMTEGLEPGGSQEYEKVLVSVSEHTWTEQPEAESSQADRDRRQQGQEEQVQEAKNTFTQVVQGNEFQNIPGEQVTEEQFTDEQGNIVTKKIIRKVVRQIDLSSADAAQEHEEVTVEGPLEDPSELEVDIDYFMKHSKDHTSTPNP

SEQ ID NO: 836 - protein, 109 aa, Homo Sapiens
MWTFVTQLLVTLVLLSFFLVSCQNVMHIVRGSLCFVLKHIHQELDKELGESEGLSDDEETISTRVVRRRVFLKGNEFQNIPGEQVTEEQFTDEQGNIVTKKDHTSTPNP

SEQ ID NO: 837 - protein, 131 aa, Homo Sapiens
MWTFVTQLLVTLVLLSFFLVSCQNVMHIVRGSLCFVLKHIHQELDKELGESEGLSDDEETISTRVVRRRVFLKGNEFQNIPGEQVTEEQFTDEQGNIVTKKIIRKVVRQIDLSSADAAQEHEEDHTSTPNP

SEQ ID NO: 838 - protein, 155 aa, Homo Sapiens
MWTFVTQLLVTLVLLSFFLVSCQNVMHIVRGSLCFVLKHIHQELDKELGESEGLSDDEETISTRVVRRRVFLKGNEFQNIPGEQVTEEQFTDEQGNIVTKKIIRKVVRQIDLSSADAAQEHEEVELRGSGLQPDLIEGRKGAQIVKRASLKRGKQ

SEQ ID NO: 839 - protein, 156 aa, Homo Sapiens
MWTFVTQLLVTLVLLSFFLVSCQNVMHIVRGSLCFVLKHIHQELDKELGESEGLSDDEETISTRVVRRRVFLKGNEFQNIPGEQVTEEQFTDEQGNIVTKKIIRKVVRQIDLSSADAAQEHEEVTVEGPLEDPSELEVDIDYFMKHSKDHTSTPNP

SEQ ID NO: 840 - protein, 113 aa, Homo Sapiens
MWTFVTQLLVTLVLLSFFLVSCQNVMHIVRGSLCFVLKHIHQELDKELGESEGLSDDEETISTRVVRRRVFLKGNEFQNIPGEQVTEEQFTDEQGNIVTKKVELRGSGLQPDL

SEQ ID NO: 841 - protein, 177 aa, Homo Sapiens
  misc_feature (1)..(1): Xaa can be any naturally occurring amino acid
XEDTQHILCHLNITMPPCAKGSGAEDRRRTPTPLALRYSILSESTPGSLSGTEQAEMKMAVISEHLGLSWAELARELQFSVEDINRIRVENPNSLLEQSVALLNLWVIREGQNANMENLYTALQSIDRGEIVNMLEGSGRQSRNLKPDRRHTDRDYSLSPSQMNGGRSEVRREAARF

SEQ ID NO: 842 - protein, 1040 aa, Homo Sapiens
  misc_feature (1)..(1): Xaa can be any naturally occurring amino acid
XIKHGVMVDATTRMGYTPLHVASHYGNIKLVKFLLQHQADVNAKTKLGYSPLHQAAQQGHTDIVTLLLKNGASPNEVSSDGTTPLAIAKRLGYISVTDVLKVVTDETSFVLVSDKHRMSFPETVDEILDVSEDEGTAHITIMGEELISFKAERRDSRDVDEEKELLDFVPKLDQVVESPAIPRIPCAMPETVVIRSEEQEQASKEYDEDSLIPSSPATETSDNISPVASPVHTGFLVSFMVDARGGSMRGSRHNGLRVVIPPRTCAAPTRITCRLVKPQKLSTPPPLAEEEGLASRIIALGPTGAQFLSPVIVEIPHFASHGRGDRELVVLRSENGSVWKEHRSRYGESYLDQILNGMDEELGSLEELEKKRVCRIITTDFPLYFVIMSRLCQDYDTIGPEGGSLKSKLVPLVQATFPENAVTKRVKLALQAQPVPDELVTKLLGNQATFSPIVTVEPRRRKFHRPIGLRIPLPPSWTDNPRDSGEGDTTSLRLLCSVIGGTDQAQWEDITGTTKLVYANECANFTTNVSARFWLSDCPRTAEAVNFATLLYKELTAVPYMAKFVIFAKMNDPREGRLRCYCMTDDKVDKTLEQHENFVEVARSRDIEVLEGMSLFAELSGNLVPVKKAAQQRSFHFQSFRENRLAMPVKVRDSSREPGGSLSFLRKAMKYEDTQHILCHLNITMPPCAKGSGAEDRRRTPTPLALRYSILSESTPGSLSGTEQAEMKMAVISEHLGLSWAELARELQFSVEDINRIRVENPNSLLEQSVALLNLWVIREGQNANMENLYTALQSIDRGEIVNMLEGSGRQSRNLKPDRRHTDRDYSLSPSQMNGHQRGQARITHSPTVSQVTERSQDRLQDWDADGSIVSYLQDAAQGSWQEEVTQGPHSFQGTSTMTEGLEPGGSQEYEKVLVSVSEHTWTEQPEAESSQADRDRRQQGQEEQVQEAKNTFTQVVQGNEFQNIPGEQVTEEQFTDEQGNIVTKKIIRKVVRQIDLSSADAAQEHEEVELRGSGLQPDLIEGRKGAQIVKRASLKRGKQ

SEQ ID NO: 843 - protein, 553 aa, Homo Sapiens
  misc_feature (1)..(1): Xaa can be any naturally occurring amino acid
XTSLRLLCSVIGGTDQAQWEDITGTTKLVYANECANFTTNVSARFWLSDCPRTAEAVNFATLLYKELTAVPYMAKFVIFAKMNDPREGRLRCYCMTDDKVDKTLEQHENFVEVARSRDIEVLEGMSLFAELSGNLVPVKKAAQQRSFHFQSFRENRLAMPVKVRDSSREPGGSLSFLRKAMKYEDTQHILCHLNITMPPCAKGSGAEDRRRTPTPLALRYSILSESTPGSLSGTEQAEMKMAVISEHLGLSWAELARELQFSVEDINRIRVENPNSLLEQSVALLNLWVIREGQNANMENLYTALQSIDRGEIVNMLEGSGRQSRNLKPDRRHTDRDYSLSPSQMNGHQRGQARITHSPTVSQVTERSQDRLQDWDADGSIVSYLQDAAQGSWQEEVTQGPHSFQGTSTMTEGLEPGGSQEYEKVLVSVSEHTWTEQPEAESSQADRDRRQQGQEEQVQEAKNTFTQVVQGNEFQNIPGEQVTEEQFTDEQGNIVTKKIIRKVVRQIDLSSADAAQEHEEVTVEGPLEDPSELEVDIDYFMKHSKDHTSTPNP

SEQ ID NO: 844 - protein, 133 aa, Homo Sapiens
IGRRVNTRARNHVGRVALHWAAGAGHEQAVRLLLEHEAAVDEEDAVGALTEEGNTALHLAAGRGHMAVLQRLVDIGLDLEEQNAEGLTALHSAAGGSHPDCVQLLLRAGSTVNALTQVARPSQDCGRLLAAEP

SEQ ID NO: 845 - protein, 423 aa, Homo Sapiens
MNALLLSAWFGHLRILQILVNSGAKIHCESKDGLTLLHCAAQKGHVPVLAFIMEDLEDVALDHVDKLGRTAFHRAAEHGQLDALDFLVGSGCDHNVKDKEGNTALHLAAGRGHMAVLQRLVDIGLDLEEQNAEGLTALHSAAGGSHPDCVQLLLRAGSTVNALTQKNLSCLHYAALSGSEDVSRVLIHAGGCANVVDHQGASPLHLAVRHNFPALVRLLINSDSDVNAVDNRQQTPLHLAAEHAWQDIADMLLIAGVDLNLRDKQGKTALAVAVRSNHVSLVDMIIKADRFYRWEKDHPSDPSGKSLSFKQDHRQETQQLRSVLWRLASRYLQPREWKKLAYSWEFTEAHVDAIEQQWTGTRSYQEHGHRMLLIWLHGVATAGENPSKALFEGLVAIGRRDLAENIRKKANAAPSAPRRCTAM

SEQ ID NO: 846 - protein, 399 aa, Homo Sapiens
MNALLLSAWFGHLRILQILVNSGAKIHCESKDGLTLLHCAAQKGHVPVLAFIMEDLEDVALDHVDKLGRTAFHRAAEHGQLDALDFLVGSGCDHNVKDKEGNTALHLAAGRGHMAVLQRLVDIGLDLEEQNAEGLTALHSAAGGSHPDCVQLLLRAGSTVNALTQKNLSCLHYAALSGSEDVSRVLIHAGGCANVVDHQGASPLHLAVRHNFPALVRLLINSDSDVNAVDNRQQTPLHLAAEHAWQDIADMLLIAGVDLNLRDKDHPSDPSGKSLSFKQDHRQETQQLRSVLWRLASRYLQPREWKKLAYSWEFTEAHVDAIEQQWTGTRSYQEHGHRMLLIWLHGVATAGENPSKALFEGLVAIGRRDLAGWSTMARSQLTATSASRVQMILVPQPPE

SEQ ID NO: 847 - protein, 423 aa, Homo Sapiens; identical to SEQ ID NO: 845

SEQ ID NO: 848 - protein, 181 aa, Homo Sapiens
MNALLLSAWFGHLRILQILVNSGAKIHCESKDGLTLLHCAAQKGHVPVLAFIMEDLEDVALDHVDKLGRTAFHRAAEHGQLDALDFLVGSGCDHNVKDKEGNTALHLAAGRGHMAVLQRLVDIGLDLEEQNAEGLTALHSAAGGSHPDCVQLLLRAGSTVNALTQVARPSQDCGRLLAAEP

SEQ ID NO: 849 - protein, 123 aa, Homo Sapiens
MQEELAWETDGLLPLERQLHEAARQNNVGRMQELIGRRVNTRARNHVGRVALHWAAGAGHEQAVRLLLEHEAAVDEEDAFGMNALLLSAWFGHLRILQILVNSGAKIHCESKPKKAMCLCWRS

SEQ ID NO: 850 - protein, 522 aa, Homo Sapiens
MQEELAWETDGLLPLERQLHEAARQNNVGRMQELIGRRVNTRARNHVGRVALHWAAGAGHEQAVRLLLEHEAAVDEEDAVGALTEARLCFGMNALLLSAWFGHLRILQILVNSGAKIHCESKDGLTLLHCAAQKGHVPVLAFIMEDLEDVALDHVDKLGRTAFHRAAEHGQLDALDFLVGSGCDHNVKDKEGNTALHLAAGRGHMAVLQRLVDIGLDLEEQNAEGLTALHSAAGGSHPDCVQLLLRAGSTVNALTQKNLSCLHYAALSGSEDVSRVLIHAGGCANVVDHQGASPLHLAVRHNFPALVRLLINSDSDVNAVDNRQQTPLHLAAEHAWQDIADMLLIAGVDLNLRDKQGKTALAVAVRSNHVSLVDMIIKADRFYRWEKDHPSDPSGKSLSFKQDHRQETQQLRSVLWRLASRYLQPREWKKLAYSWEFTEAHVDAIEQQWTGTRSYQEHGHRMLLIWLHGVATAGENPSKALFEGLVAIGRRDLAGWSTMARSQLTATSASRVQMILVPQPPE

SEQ ID NO: 851 - protein, 217 aa, Homo Sapiens [sequence omitted]

SEQ ID NO: 852 - protein, 300 aa, Homo Sapiens
MAAAAGDADDEPRSGHSSSEGECAVAPEPLTDAEGLFSFADFGSALGGGGAGLSGRASGGAQSPLRYLHVLWQQDAEPRDELRCKIPAGRLRRAARPHRRLGPTGKEVHALKRLRDSANANDVETVQQLLEDGADPCAADDKGRTALHFASCNGNDQIVQLLLDHGADPNQRDGLGNTPLHLAACTNHVPVITTLLRGGARVDALDRAGRTPLHLAKSKLNILQEGHAQCLEAVRLEVKQIIHMLREYLERLGQHEQRERLDDLCTRLQMTSTKEQVDEVTDLLASFTSLSLQMQSMEKR

SEQ ID NO: 853 - protein, 284 aa, Homo Sapiens
MAAAAGDADDEPRSGHSSSEGECAVAPEPLTDAEGLFSFADFGSALGGGGAGLSGRASGGAQSPLRYLHVLWQQDAEPRDELRCKIPAGRLRRAARPHRRLGPTGKEVHVQQLLEDGADPCAADDKGRTALHFASCNGNDQIVQLLLDHGADPNQRDGLGNTPLHLAACTNHVPVITTLLRGGARVDALDRAGRTPLHLAKSKLNILQEGHAQCLEAVRLEVKQIIHMLREYLERLGQHEQRERLDDLCTRLQMTSTKEQVDEVTDLLASFTSLSLQMQSMEKR

SEQ ID NO: 854 - protein, 90 aa, Homo Sapiens
MARIPVQLMTRAAQLYTLPHAMAMTRLLLLDHGADPNQRDGLGNTPLHLAACTNHVPVITTLLRGGARVDALDRAGRTPLHLAKSKLNIL

SEQ ID NO: 855 - protein, 156 aa, Homo Sapiens
MARIPVQLMTRAAQLYTLPHAMAMTRLLLLDHGADPNQRDGLGNTPLHLAACTNHVPVITTLLRGGARVDALDRAGRTPLHLAKSKLNILQEGHAQCLEAVRLEVKQIIHMLREYLERLGQHEQRERLDDLCTRLQMTSTKEQVDEVTDLLASFTS

SEQ ID NO: 856 - protein, 107 aa, Homo Sapiens
MPMMWKQCSCSWTMVLILTSEMGWGTRHCTWRPAPTTFLSSPHCYEEIIHMLREYLERLGQHEQRERLDDLCTRLQMTSTKEQVDEVTDLLASFTSLSLQMQSMEKR

SEQ ID NO: 857 - protein, 180 aa, Homo Sapiens
MPMMWKQQLLEDGADPCAADDKGRTALHFASCNGNDQIVQLLLDHGADPNQRDGLGNTPLHLAACTNHVPVITTLLRGGARVDALDRAGRTPLHLAKSKLNILQEGHAQCLEAVRLEVKQIIHMLREYLERLGQHEQRERLDDLCTRLQMTSTKEQVDEVTDLLASFTSLSLQMQSMEKR

SEQ ID NO: 858 - protein, 208 aa, Homo Sapiens
  misc_feature (1)..(1): Xaa can be any naturally occurring amino acid
XRDELRCKIPAGRLRRAARPHRRLGPTGKEVHALKRLRDSANANDVETVQQLLEDGADPCAADDKGRTALHFASCNGNDQIVQLLLDHGADPNQRDGLGNTPLHLECSPQLVPAGARVDALDRAGRTPLHLAKSKLNILQEGHAQCLEAVRLEVKQIIHMLREYLERLGQHEQRERLDDLCTRLQMTSTKEQVDEVTDLLASFTSLSL

SEQ ID NO: 859 - protein, 178 aa, Homo Sapiens
  misc_feature (1)..(1): Xaa can be any naturally occurring amino acid
XRLRRPGPRGAVAMAAAAGDADDEPRSGHSSSEGECAVAPEPLTDAEGLFSFADFGSALGGGGAGLSGRASGGAQSPLRYLHVLWQQDAEPRDELRCKIPAGRLRRAARPHRRLGPTGKEVHALKRLRDSANANDVETVQQLLEDGADPCAADDKGRTALHFASCNGNDQIAAPGPWC

SEQ ID NO: 860 - protein, 345 aa, Homo Sapiens
MTRGRAWGMRRAAAGAGGARAAGPTGGASRLHPNAGRRSGARAGAQGCGGPRVGSADSRALPAQPLACARGRSQRLVCDPKAASALPDLAPDVFVLRVRLEETGEMFRVANCRGDMTVRELKEELDLMVGIPFNLQRLQYLDEGVLMDDTTLKFHDVVPGGIISLCIWHHDGWTELVLAAVEGDPSKLSCLGLTEDSFYRTANSEHFEGEKWKHWTSQRAFVALYVASHRGHFDAVQYLLEHGASCLSRSPLGRTPLHVAAAMGRSDCIILLLQHGASIHDRDAKGETPISIAHRLNHTLSERQMVLLHRIAKSGIRDLNDLVMKNALQRVKSGFRSEKMTMTPH

SEQ ID NO: 861 - protein, 933 aa, Homo Sapiens
MRMAATAWAGLQGPPLPTLCPAVRTGLYCRDQAHAERWAMTSETSSGSHCARSRMLRRRAQEEDSTVLIDVSPPEAEKRGSYGSTAHASEPGGQQAAACRAGSPAKPRIADFVLVWEEDLKLDRQQDSAARDRTDMHRTWRETFLDNLRAAGLCVDQQDVQDGNTTVHYALLSASWAVLCYYAEDLRLKLPLQELPNQASNWSAGLLAWLGIPNVLLEVVPDVPPEYYSCRFRVNKLPRFLGSDNQDTFFTSTKRHQILFEILAKTPYGHEKKNLLGIHQLLAEGVLSAAFPLHDGPFKTPPEGPQAPRLNQRQVLFQHWARWGKWNKYQPLDHVRRYFGEKVALYFAWLGFYTGWLLPAAVVGTLVFLVGCFLVFSDIPTQELCGSKDSFEMCPLCLDCPFWLLSSACALAQAGRLFDHGGTVFFSLFMALWAVLLLEYWKRKSATLAYRWDCSDYEDTEERPRPQFAASAPMTAPNPITGEDEPYFPERSRARRMLAGSVVIVVMVAVVVMCLVSIILYRAIMAIVVSRSGNTLLAAWASRIASLTGSVVNLVFILILSKIYVSLAHVLTRWEMHRTQTKFEDAFTLKVFIFQFVNFYSSPVYIAFFKGRFVGYPGNYHTLFGVRNEECAAGGCLIELAQELLVIMVGKQVINNMQEVLIPKLKGWWQKFRLRSKKRKAGASAGASQGPWEDDYELVPCEGLFDEYLEMVLQFGFVTIFVAACPLAPLFALLNNWVEIRLDARKFVCEYRRPVAERAQDIGIWFHILAGLTHLAVISNAFLLAFSSDFLPRAYYRWTRAHDLRGFLNFTLARAPSSFAAAHNRTCRYRAFRDDDGHYSQTYWNLLAIRLAFVIVFEHVVFSVGRLLDLLVPDIPESVEIKVKREYYLAKQALAENEVLFGTNGTKDEQPEGSELSSHWTPFTVPKASQLQQ

SEQ ID NO: 862 - protein, 883 aa, Homo Sapiens
MRMAATAWAGLQGPPLPTLCPAVRTGLYCRDQAHAERWAMTSETSSGSHCARSRMLRRRAQEEDSTVLIDVSPPEAEKRGSYGSTAHASEPGGQQAAACRAGSPAKPRIDFVLVWEEDLKLDRQQDSAARDRTDMHRTWRETFLDNLRAAGLCVDQQDVQDGNTTVHYALLSASWAVLCYYAEDLRLKLPLQELPNQASNWSAGLLAWLGIPNVLLEVVPDVPPEYYSCRFRVNKLPRFLGSDNQDTFFTSTKRHQILFEILAKTPYGHEKKNLLGIHQLLAEGVLSAAFPLHDGPFKTPPEGPQAPRLNQRQVLFQHWARWGKWNKYQPLDHVRRYFGEKVALYFAWLGFYTGWLLPAAVVGTLVFLVGCFLVFSDIPTQELCGSKDSFEMCPLCLDCPFWLLSSACALAQAGRLFDHGGTVFFSLFMALWAVLLLEYWKRKSATLAYRWDCSDYEDTEERPRPQFAASAPMTAPNPITGEDEPYFPERSRARRMLAGSVVIVVMVAVVVMCLVSIILYRAIMAIVVSRSGNTLLAAWASRIASLTGSVVNLVFILILSKIYVSLAHVLTRWEMHRTQTKFEDAFTLKVFIFQFVNFYSSPVYIAFFKGRFVGYPGNYHTLFGVRNEECAAGGCLIELAQELLVIMVGKQVINNMQEVLIPKLKGWWQKFRLRSKKRKAGASAGASQGPWEDDYELVPCEGLFDEYLEMVLQFGFVTIFVAACPLAPLFALLNNWVEIRLDARKFVCEYRRPVAERAQDIGIWFHILAGLTHLAVISNAFLLAFSSDFLPRAYYRWTRAHDLRGFLNFTLARAPSSFAAAHNRTCRYRAFRDDDGHYSQTYWNLLAIRLAFVIVFEVAEAPAGSPIHGMRPRPCALPNSSTW

SEQ ID NO: 863 - protein, 179 aa, Homo Sapiens
MRMAATAWAGLQGPPLPTLCPAVRTGLYCRDQAHAERWAMTSETSSGSHCARSRMLRRRAQEEDSTVLIDVSPPEAEKRGSYGSTAHASEPGGQQAAACRAGSPAKPRIDFVLVWEEDLKLDRQQDSAARDRTDMHRTWRETFLDNLRAAGLCVDQVRGGCHGQGPRPCIHSVTHDLAA

SEQ ID NO: 864 - protein, 186 aa, Homo Sapiens
  misc_feature (1)..(1): Xaa can be any naturally occurring amino acid
XAGGAFRGLRADGGGEPGRDPLPAVLQFGFVTIFVAACPLAPLFALLNNWVEIRLDARKFVCEYRRPVAERAQDIGIWFHILAGLTHLAVISNAFLLAFSSDFLPRAYYRWTRAHDLRGFLNFTLARAPSSFAAAHNRTCRYRAFRDDDGHYSQTYWNLLAIRLAFVIVFEHVVFSVGRLLDLLVP

SEQ ID NO: 865 - protein, 680 aa, Homo Sapiens
MVPGVPGAVLTLCLWLAASSGCLAAGPGAAAARRLDESLSAGSVQRARCASRCLSLQITRISAFFQHFQNNGSLVWCQNHKQCSKCLEPCKESGDLRKHQCQSFCEPLFPKKSYECLTSCEFLKYILLVKQGDCPAPEKASGFAAACVESCEVDNECSGVKKCCSNGCGHTCQVPKTLYKGVPLKPRKELRFTELQSGQLEVKWSSKFNISIEPVIYVVQRRWNYGIHPSEDDATHWQTVAQTTDERVQLTDIRPSRWYQFRVAAVNVHGTRGFTAPSKHFRSSKDPSAPPAPANLRLANSTVNSDGSVTVTIVWDLPEEPDIPVHHYKVFWSWMVSSKSLVPTKKKRRKTTDGFQNSVILEKLQPDCDYVVELQAITYWGQTRLKSAKVSLHFTSTHATNNKEQLVKTRKGGIQTQLPFQRRRPTRPLEVGAPFYQDGQLQVKVYWKKTEDPTVNRYHVRWFPEACAHNRTTGSEASSGMTHENYIILQDLSFSCKYKVTVQPIRPKSHSKAEAVFFTTPPCSALKGKSHKPVGCLGEAGHVLSKVLAKPENLSASFIVQDVNITGHFSWKMAKANLYQPMTGFQVTWAEVTTESRQNSLPNSIISQSQILPSDHYVLTVPNLRPSTLYRLEVQVLTPGGEGPATIKTFRTPELPPSSAHRSHLKHRHPHHYKPSPERY

SEQ ID NO: 866 - protein, 564 aa, Homo Sapiens
MATAERRALGIGFQWLSLATLVLICAGQGGRREDGGPACYGGFDLYFILDKSGSVLHHWNEIYYFVEQLAHKFISPQLRMSFIVFSTRGTTLMKLTEDREQIRQGLEELQKVLPGGDTYMHEGFERASEQIYYENRQGYRTASVIIALTDGELHEDLFFYSEREANRSRDLGAIVYCVGVKDFNETQLARIADSKDHVFPVNDGFQALQGIIHSILKKSCIEILAAEPSTICAGESFQVVVRGNGFRHARNVDRVLCSFKINDSVTLNEKPFSVEDTYLLCPAPILKEVGMKAALQVSMNDGLSFISSSVIITTTHCSDGSILAIALLILFLLLALALLWWFWPLCCTVIIKEVPPPPAEESEEEDDDGLPKKKWPTVDASYYGGRGVGGIKRMEVRWGEKGSTEEGAKLEKAKNARVKMPEQEYEFPEPRNLNNNMRRPSSPRKWYSPIKGKLDALWVLLRKGYDRVSVMRPQPGDTGRCINFTRVKNNQPAKYPLNNAYHTSSPPPAPIYTPPPPAPHCPPPPPSAPTPPIPSPPSTLPPPPQAPPPNRAPPPSRPPPRPSV

SEQ ID NO: 867 - protein, 333 aa, Homo Sapiens
MATAERRALGIGFQWLSLATLVLICAGQGGRREDGGPACYGGFDLYFILDKSGSVLHHWNEIYYFVEQLAHKFISPQLRMSFIVFSTRGTTLMKLTEDREQIRQGLEELQKVLPGGDTYMHEGFERASEQIYYENRQGYRTASVIIALTDGELHEDLFFYSEREANRSRDLGAIVYCVGVKDFNETQLARIADSKDHVFPVNDGFQALQGIIHSILKKSCIEILAAEPSTICAGESFQVVVRGNGFRHARNVDRVLCSFKINDSVTLNEKPFSVEDTYLLCPAPILKEVGMKAALQVSMNDGLSFISSSVIITTTHCSLHKIASGPTTAACME

SEQ ID NO: 868 - protein, 368 aa, Homo Sapiens
MATAERRALGIGFQWLSLATLVLICAGQGGRREDGGPACYGGFDLYFILDKSGSVLHHWNEIYYFVEQLAHKFISPQLRMSFIVFSTRGTTLMKLTEDREQIRQGLEELQKVLPGGDTYMHEGFERASEQIYYENRQGYRTASVIIALTDGELHEDLFFYSEREANRSRDLGAIVYCVGVKDFNETQLARIADSKDHVFPVNDGFQALQGIIHSILKKSCIEILAAEPSTICAGESFQVVVRGNGFRHARNVDRVLCSFKINDSVTLNEKPFSVEDTYLLCPAPILKEVGMKAALQVSMNDGLSFISSSVIITTTHCSDGSILAIALLILFLLLALALLWWFWPLCCTVIIKEVPPPPAEESEENKIK

SEQ ID NO: 869 - protein, 179 aa, Homo Sapiens
  misc_feature (1)..(1): Xaa can be any naturally occurring amino acid
XDLGAIVYCVGVKDFNETQLARIADSKDHVFPVNDGFQALQGIIHSILKKSCIEILAAEPSTICAGESFQVVVRGNGFRHARNVDRVLCSFKINDSVTLNEKPFSVEDTYLLCPAPILKEVGMKAALQVSMNDGLSFISSSVIITTTHCDGLWFYIQSLETVKDHRNIRVRNSDLKYCL

SEQ ID NO: 870 - protein, 52 aa, Homo Sapiens
MQSPWKILTVAPLFLLLSLQSSASPANDDQSRPSLSNGHTCVASSAEKPQLS

SEQ ID NO: 871 - protein, 108 aa, Homo Sapiens
MQSPWKILTVAPLFLLLSLQSSASPANDDQSRPSLSNGHTCVEKLFLKTTCYLVIDKFGSDIIKLLSADMNADVVCHTLEFCKQNTGQPLCHLYPLPKETWKFTLQKA

SEQ ID NO: 872 - protein, 543 aa, Homo Sapiens
MQSPWKILTVAPLFLLLSLQSSASPANDDQSRPSLSNGHTCVEKLFLKTTCYLVIDKFGSDIIKLLSADMNADVVCHTLEFCKQNTGQPLCHLYPLPKETWKFTLQKARQIVKKSPILKYSRSGSDICSLPVLAKICQKIKLAMEQSVPFKDVDSDKYSVFPTLRGYHWRGRDCNDSDESVYPGRRPNNWDVHQDSNCNGIWGVDPKDGVPYEKKFCEGSQPRGIILLGDSAGAHFHISPEWITASQMSLNSFINLPTALTNELDWPQLSGATGFLDSTVGIKEKSIYLRLWKRNHCNHRDYQNISRNGASSRNLKKFIESLSRNKVLDYPAIVIYAMIGNDVCSGKSDPVPAMTTPEKLYSNVMQTLKHLNSHLPNGSHVILYGLPDGTFLWDNLHNRYHPLGQLNKDMTYAQLYSFLNCLQVSPCHGWMSSNKTLRTLTSERAEQLSNTLKKIAASEKFTNFNLFYMDFAFHEIIQEWQKRGGQPWQLIEPVDGFHPNEVALLLLADHFWKKVQLQWPQILGKENPFNPQIKQVFGDQGGH

SEQ ID NO: 873 - protein, 688 aa, Homo Sapiens
MQSPWKILTVAPLFLLLSLQSSASPANDDQSRPSLSNGHTCVGCVLVVSVIEQLAQVHNSTVQASMERLCSYLPEKLFLKTTCYLVIDKFGSDIIKLLSADMNADVVCHTLEFCKQNTGQPLCHLYPLPKETWKFTLQKARQIVKKSPILKYSRSGSDICSLPVLAKICQKIKLAMEQSVPFKDVDSDKYSVFPTLRGYHWRGRDCNDSDESVYPGRRPNNWDVHQDSNCNGIWGVDPKDGVPYEKKFCEGSQPRGIILLGDSAGAHFHISPEWITASQMSLNSFINLPTALTNELDWPQLSGATGFLDSTVGIKEKSIYLRLWKRNHCNHRDYQNISRNGASSRNLKKFIESLSRNKVLDYPAIVIYAMIGNDVCSGKSDPVPAMTTPEKLYSNVMQTLKHLNSHLPNGSHVILYGLPDGTFLWDNLHNRYHPLGQLNKDMTYAQLYSFLNCLQVSPCHGWMSSNKTLRTLTSERAEQLSNTLKKIAASEKFTNFNLFYMDFAFHEIIQEWQKRGGQPWQLIEPVDGFHPNERKSILLKGILMTSQTLDNQEWTQLTSWIKGNLTCDSRTREWLCCCWRIISGKRCSSSGPKSWERRIRSTPRLNRCLETKAGTEPLRSMHPWGAQGGRGLGKLIPQTLWGLPRHRPKGLFFSSIFAKCLSLNEEHIWTTVQCCVLPGSVTLPLFLK

SEQ ID NO: 874 - protein, 575 aa, Homo Sapiens
MQSPWKILTVAPLFLLLSLQSSASPANDDQSRPSLSNGHTCVGCVLVVSVIEQLAQVHNSTVQASMERLCSYLPEKLFLKTTCYLVIDKFGSDIIKLLSADMNADVVCHTLEFCKQNTGQPLCHLYPLPKETWKFTLQKARQIVKKSPILKYSRSGSDICSLPVLAKICQKIKLAMEQSVPFKDVDSDKYSVFPTLRGYHWRGRDCNDSDESVYPGRRPNNWDVHQDSNCNGIWGVDPKDGVPYEKKFCEGSQPRGIILLGDSAGAHFHISPEWITASQMSLNSFINLPTALTNELDWPQLSGATGFLDSTVGIKEKSIYLRLWKRNHCNHRDYQNISRNGASSRNLKKFIESLSRNKVLDYPAIVIYAMIGNDVCSGKSDPVPAMTTPEKLYSNVMQTLKHLNSHLPNGSHVILYGLPDGTFLWDNLHNRYHPLGQLNKDMTYAQLYSFLNCLQVSPCHGWMSSNKTLRTLTSERAEQLSNTLKKIAASEKFTNFNLFYMDFAFHEIIQEWQKRGGQPWQLIEPVDGFHPNEVALLLLADHFWKKVQLQWPQILGKENPFNPQIKQVFGDQGGH

SEQ ID NO: 875 - protein, 249 aa, Homo Sapiens
MPALGWAVAAILMLQTAMAEPSPGTLPRKAGVFSDLSNQELKAVHSFLWSKKELRLQPSSTTTMAKNTVFLIEMLLPKKYHVLRFLDKGERHPVREARAVIFFGDQEHPNVTEFAVGPLPGPCYMRALSPRPGYQSSWASRPISTAEYALLYHTLQEATKPLHQFFLNTTGFSFQDCHDRCLAFTDVAPRGVASGQRRSWLIIQRYVEGYFLHPTGLELLVDHGSTDAGHWAVEQVWYNGKFYGSPEEL

SEQ ID NO: 876 - protein, 751 aa, Homo Sapiens
MPALGWAVAAILMLQTAMAEPSPGTLPRKAGVFSDLSNQELKAVHSFLWSKKELRLQPSSTTTMAKNTVFLIEMLLPKKYHVLRFLDKGERHPVREARAVIFFGDQEHPNVTEFAVGPLPGPCYMRALSPRPGYQSSWASRPISTAEYALLYHTLQEATKPLHQFFLNTTGFSFQDCHDRCLAFTDVAPRGVASGQRRSWLIIQRYVEGYFLHPTGLELLVDHGSTDAGHWAVEQVWYNGKFYGSPEELARKYADGEVDVVVLEDPLPGGKGHDSTEEPPLFSSHKPRGDFPSPIHVSGPRLVQPHGPRFRLEGNAVLYGGWSFAFRLRSSSGLQVLNVHFGGERIAYEVSVQEAVALYGGHTPAGMQTKYLDVGWGLGSVTHELAPGIDCPETATFLDTFHYYDADDPVHYPRALCLFEMPTGVPLRRHFNSNFKGGFNFYAGLKGQVLVLRTTSTVYNYDYIWDFIFYPNGVMEAKMHATGYVHATFYTPEGLRHGTRLHTHLIGNIHTHLVHYRVDLDVAGTKNSFQTLQMKLENITNPWSPRHRVVQPTLEQTQYSWERQAAFRFKRKLPKYLLFTSPQENPWGHKRTYRLQIHSMADQVLPPGWQEEQAITWARYPLAVTKYRESELCSSSIYHQNDPWHPPVVFEQFLHNNENIENEDLVAWVTVGFLHIPHSEDIPNTATPGNSVGFLLRPFNFFPEDPSLASRDTVIVWPRDNGPNYVQRWIPEDRDCSMPPPFSYNGTYRPV

SEQ ID NO: 877 - protein, 770 aa, Homo Sapiens
MPALGWAVAAILMLQTAMAEPSPGTLPRKAGVFSDLSNQELKAVHSFLWSKKELRLQPSSTTTMAKNTVFLIEMLLPKKYHVLRFLDKGERHPVREARAVIFFGDQEHPNVTEFAVGPLPGPCYMRALSPRPGYQSSWASRPISTAEYALLYHTLQEATKPLHQFFLNTTGFSFQDCHDRCLAFTDVAPRGVASGQRRSWLIIQRYVEGYFLHPTGLELLVDHGSTDAGHWAVEQVWYNGKFYGSPEELARKYADGEVDVVVLEDPLPGGKGHDSTEEPPLFSSHKPRGDFPSPIHVSGPRLVQPHGPRFRLEGNAVLYGGWSFAFRLRSSSGLQVLNVHFGGERIAYEVSVQEAVALYGGHTPAGMQTKYLDVGWGLGSVTHELAPGIDCPETATFLDTFHYYDADDPVHYPRALCLFEMPTGVPLRRHFNSNFKGGFNFYAGLKGQVLVLRTTSTVYNYDYIWDFIFYPNGVMEAKMHATGYVHATFYTPEGLRHGTRLHTHLIGNIHTHLVHYRVDLDVAGTKNSFQTLQMKLENITNPWSPRHRVVQPTLEQTQYSWERQAAFRFKRKLPKYLLFTSPQENPWGHKRTYRLQIHSMADQVLPPGWQEEQAITWARTEGGQPRALSQAASPVPGRYPLAVTKYRESELCSSSIYHQNDPWHPPVVFEQFLHNNENIENEDLVAWVTVGFLHIPHSEDIPNTATPGNSVGFLLRPFNFFPEDPSLASRDTVIVWPRDNGPNYVQRWIPEDRDCSMPPPFSYNGTYRPV

SEQ ID NO: 878 - protein, 751 aa, Homo Sapiens; identical to SEQ ID NO: 876

SEQ ID NO: 879 - protein, 337 aa, Homo Sapiens
MPALGWAVAAILMLQTAMAEPSPGTLPRKAGVFSDLSNQELKAVHSFLWSKKELRLQPSSTTTMAKNTVFLIEMLLPKKYHVLRFLDKGERHPVREARAVIFFGDQEHPNVTEFAVGPLPGPCYMRALSPRPGYQSSWASRPISTAEYALLYHTLQEATKPLHQFFLNTTGFSFQDCHDRCLAFTDVAPRGVASGQRRSWLIIQRYVEGYFLHPTGLELLVDHGSTDAGHWAVEQVWYNGKFYGSPEELARKYADGEVDVVVLEDPLPGGKGHDSTEEPPLFSSHKPRGDFPSPIHVSGPRLVQPHGPRFRLEGNAVLYGGWSFAFRLRSSSGLQVL

SEQ ID NO: 880 - protein, 751 aa, Homo Sapiens; identical to SEQ ID NO: 876

SEQ ID NO: 881 - protein, 756 aa, Homo Sapiens
MHLKIVLAFLALSLITIFALAYVLLTSPGGSSQPPHCPSVSHRAQPWPHPGQSQLFADLSREELTAVMRFLTQRLGPGLVDAAQAQPSDNCIFSVELQLPPKAAALAHLDRGSPPPAREALAIVLFGGQPQPNVSELVVGPLPHPSYMRDVTVERHGGPLPYHRRPVLRAEFTQMWRHLKEVELPKAPIFLSSTFNYNGSTLAAVHATPRGLRSGDRATWMALYHNISGVGLFLHPVGLELLLDHRALDPAHWTVQQVFYLGHYYADLGQLEREFKSGRLEVVRVPLPPPNGASSLRSRNSPGPLPPLQFSPQGSQYSVQGNLVVSSLWSFTFGHGVFSGLRIFDVRFQGERIAYEVSVQECVSIYGADSPKTMLTRYLDSSFGLGRNSRGLVRGVDCPYQATMVDIHILVGKGAVQLLPGAVCVFEEAQGLPLRRHHNYLQNHFYGGLASSALVVRSVSSVGNYDYIWDFVLYPNGALEGRVHATGYINTAFLKGGEEGLLFGNRVGERVLGTVHTHAFHFKLDLDVAGLKNWVVAEDVVFKPVAAPWNPEHWLQRPQLTRQVLGKEDLTAFSLGSPLPRYLYLASNQTNAWGHQRGYRIQIHSPLGIHIPLESDMERALSWGRYQLVVTQRKEEESQSSSIYHQNDIWTPTVTFADFINNETLLGEDLVAWVTASFLHIPHAEDIPNTVTLGNRVGFLLRPYNFFDEDPSIFSPGSVYFEKGQDAGLCSINPVACLPDLAACVPDLPPFSYHGF

SEQ ID NO: 882 - protein, 729 aa, Homo Sapiens
MHLKIVLAFLALSLITIFALAYVLLTSPGGSSQPPHCPSVSHRAQPWPHPGQSQLFADLSREELTAVMRFLTQRLGPGLVDAAQAQPSDNCIFSVELQLPPKAAALAHLDRGSPPPAREALAIVLFGGQPQPNVSELVVGPLPHPSYMRDVTVERHGGPLPYHRRPVLRAEFTQMWRHLKEVELPKAPIFLSSTFNYNGSTLAAVHATPRGLRSGDRATWMALYHNISGVGLFLHPVGLELLLDHRALDPAHWTVQQVFYLGHYYADLGQLEREFKSGRLEVVRVPLPPPNGASSLRSRNSPGPLPPLQFSPQGSQYSVQGNLVVSSLWSFTFGHGVFSGLRIFDVRFQGERIAYEVSVQECVSIYGADSPKTMLTRYLDSSFGLGRNSRGLVRGVDCPYQATMVDIHILVGKGAVQLLPGAVCVFEEAQGLPLRRHHNYLQNHFYGGLASSALVVRSVSSVGNYDYIWDFVLYPNGALEGRVHATGYINTAFLKGGEEGLLFGNRVGERVLGTVHTHAFHFKLDLDVAGLKNWVVAEDVVFKPVAAPWNPEHWLQRPQLTRQVLGKEDLTAFSLGSPLPRYLYLASNQTNAWGHQRGYQLVVTQRKEEESQSSSIYHQNDIWTPTVTFADFINNETLLGEDLVAWVTASFLHIPHAEDIPNTVTLGNRVGFLLRPYNFFDEDPSIFSPGSVYFEKGQDAGLCSINPVACLPDLAACVPDLPPFSYHGF

SEQ ID NO: 883 - protein, 763 aa, Homo Sapiens
MNQKTILVLLILAVITIFALVCVLLVGRGGDGGEPSQLPHCPSVSPSAQPWTHPGQSQLFADLSREELTAVMRFLTQRLGPGLVDAAQARPSDNCVFSVELQLPPKAAALAHLDRGSPPPAREALAIVFFGRQPQPNVSELVVGPLPHPSYMRDVTVERHGGPLPYHRRPVLFQEYLDIDQMIFNRELPQASGLLHHCCFYKHRGRNLVTMTTAPRGLQSGDRATWFGLYYNISGAGFFLHHVGLELLVNHKALDPARWTIQKVFYQGRYYDSLAQLEAQFEAGLVNVVLIPDNGTGGSWSLKSPVPPGPAPPLQFYPQGPRFSVQGSRVASSLWTFSFGLGAFSGPRIFDVRFQGERLVYEISLQEALAIYGGNSPAAMTTRYVDGGFGMGKYTTPLTRGVDCPYLATYVDWHFLLESQAPKTIRDAFCVFEQNQGLPLRRHHSDLYSHYFGGLAETVLVVRSMSTLLNYDYVWDTVFHPSGAIEIRFYATGYISSAFLFGATGKYGNQVSEHTLGTVHTHSAHFKVDLDVAGLENWVWAEDMVFVPMAVPWSPEHQLQRLQVTRKLLEMEEQAAFLVGSATPRYLYLASNHSNKWGHPRGYRIQMLSFAGEPLPQNSSMARGFSWERYQLAVTQRKEEEPSSSSVFNQNDPWAPTVDFSDFINNETIAGKDLVAWVTAGFLHIPHAEDIPNTVTVGNGVGFFLRPYNFFDEDPSFYSADSIYFRGDQDAGACEVNPLACLPQAAACAPDLPAFSHGGFSHN

SEQ ID NO: 884 - protein, 634 aa, Homo Sapiens
MNQKTILVLLILAVITIFALVCVLLVGRGGDGGEPSQLPHCPSVSPSAQPWTHPGQSQLFADLSREELTAVMRFLTQRLGPGLVDAAQARPSDNCVFSVELQLPPKAAALAHLDRGSPPPAREALAIVFFGRQPQPNVSELVVGPLPHPSYMRDVTVERHGGPLPYHRRPVLFQEYLDIDQMIFNRELPQASGLLHHCCFYKHRGRNLVTMTTAPRGLQSGDRATWFGLYYNISGAGFFLHHVGLELLVNHKALDPARWTIQKVFYQGRYYDSLAQLEAQFEAGLVNVVLIPDNGTGGSWSLKSPVPPGPAPPLQFYPQGPRFSVQGSRVASSLWTFSFGLGAFSGPRIFDVRFQGERLVYEISLQEALAIYGGNSPAAMTTRYVDGGFGMGKYTTPLTRGVDCPYLATYVDWHFLLESQAPKTIRDAFCVFEQNQGLPLRRHHSDLYSHYFGGLAETVLVVRSMSTLLNYDYVWDTVFHPSGAIEIRFYATGYISSAFLFGATGKYGNQVSEHTLGTVHTHSAHFKVDLDVAGLENWVWAEDMVFVPMAVPWSPEHQLQRLQVTRKLLEMEEQAAFLVGSATPRYLYLASNHSNKWGHPRGYRIQMLSFAGEPLPQNSSMARGFSWERIWWPG

SEQ ID NO: 885 - protein, 112 aa, Homo Sapiens
MVFVPMAVPWSPEHQLQRLQVTRKLLEMEEQAAFLVGSATPRYLYLASNHSNKWGHPRGYRIQMLSFAGEPLPQNSSMARGFSWERYQLAVTQRKEEEPSSSSVFNQNDPWA

SEQ ID NO: 886 - protein, 152 aa, Homo Sapiens
MVFVPMAVPWSPEHQLQRLQVTRKLLEMEEQAAFLVGSATPRYLYLASNHSNKWGHPRGYRIQMLSFAGEPLPQNSSMARGFSWERYQLAVTQRKEEEPSSSSVFNQNDPWAPTVDFSDFINNETIAGKDLVAWVTAGFLHIPHAEDIPNTV

SEQ ID NO: 887 - protein, 220 aa, Homo Sapiens
MVFVPMAVPWSPEHQLQRLQVTRKLLEMEEQAAFLVGSATPRYLYLASNHSNKWGHPRGYRIQMLSFAGEPLPQNSSMARGFSWERYQLAVTQRKEEEPSSSSVFNQNDPWAPTVDFSDFINNETIAGKDLVAWVTAGFLHIPHAEDIPNTVTVGNGVGFFLRPYNFFDEDPSFYSADSIYFRGDQDAGACEVNPLACLPQAAACAPDLPAFSHGGFSHN

SEQ ID NO: 888 - protein, 220 aa, Homo Sapiens; identical to SEQ ID NO: 887

SEQ ID NO: 889 - protein, 144 aa, Homo Sapiens
  misc_feature (1)..(1): Xaa can be any naturally occurring amino acid
XYDYVWDTVFHPSGAIEIRFYATGYISSAFLFGATGKYGNQVSEHTLGTVHTHSAHFKVDLDVAGDPEAAGDGGAGRLPRGKRHPSLPVPGQQPQQQVGSPPGLPHPDAQLCWRAAAPKQLHGERLQLGEVPAGCDPAEGGGAQ

SEQ ID NO: 890 - protein, 164 aa, Homo Sapiens
MSVLTPLLLRGLTGSARRLPVPRAKIHSLPPEGKLGIMGKENGIGSRRICNHHRELWEAGKMEPNQCVGWRCGSGAAGLSYRSQVRRPGVPAPATGLEAHSLTTPKGIPLLGLLPRRGNEEGLASGRTAIGNPEAVGSAALFKDGGGGTSAAEAGAAGQRLRRC

SEQ ID NO: 891 - protein, 235 aa, Homo Sapiens
MLKCHVFRCEAPAKNIATSLHEICSKIMAERRNARCLVNGLSLDHSKLVDVPFQVEFPAPKNELVQKFQVYYLGNVPVAKPVGVDVINGALESVLSSSSREQWTPSHVSVAPATLTILHQQTEAVLGECRVRFLSFLAVGRDVHTFAFIMAAGPASFCCHMFWCEPNAASLSEAVQAACMLRYQKCLDARSQASTSCLPAPPAESVARRVGWTVRRGVQSLWGSLKPKRLGAHTP

SEQ ID NO: 892 - protein, 87 aa, Homo Sapiens
MRVQDTSGTYYWHIPTGTTQWEPPGRASPSQGSSPQEESQLTWTGFAHGEGFEDGEFWKDEPSDEAPMELGLKEPEEGTLTFPAQSL

SEQ ID NO: 893 - protein, 262 aa, Homo Sapiens
MRVQDTSGTYYWHIPTGTTQWEPPGRASPSQGSSPQEESQLTWTGFAHGEGFEDGEFWKDEPSDEAPMELGLKEPEEGTLTFPAQSLSPEPLPQEEEKLPPRNTNPGIKCFAVRSLGWVEMTEEELAPGRSSVAVNNCIRQLSYHKNNLHDPMSGGWGEGKDLLLQLEDETLKLVEPQSQALLHAQPIISIRVWGVGRDSGRDFAYVARDKLTQMLKCHVFRCEAPAKNIATSLHEICSKIMAERRNARCLVNGLSLDHSKL

SEQ ID NO: 894 - protein, 451 aa, Homo Sapiens
MRVQDTSGTYYWHIPTGTTQWEPPGRASPSQGSSPQEESQLTWTGFAHGEGFEDGEFWKDEPSDEAPMELGLKEPEEGTLTFPAQSLSPEPLPQEEEKLPPRNTNPGIKCFAVRSLGWVEMTEEELAPGRSSVAVNNCIRQLSYHKNNLHDPMSGGWGEGKDLLLQLEDETLKLVEPQSQALLHAQPIISIRVWGVGRDSGRERDFAYVARDKLTQMLKCHVFRCEAPAKNIATSLHEICSKIMAERRNARCLVNGLSLDHSKLVDVPFQVEFPAPKNELVQKFQVYYLGNVPVAKPVGVDVINGALESVLSSSSREQWTPSHVSVAPATLTILHQQTEAVLGECRVRFLSFLAVGRDVHTFAFIMAAGPASFCCHMFWCEPNAASLSEAVQAACMLRYQKCLDARSQASTSCLPAPPAESVARRVGWTVRRGVQSLWGSLKPKRLGAHTP

SEQ ID NO: 895 - protein, 451 aa, Homo Sapiens; identical to SEQ ID NO: 894

SEQ ID NO: 896 - protein, 451 aa, Homo Sapiens; identical to SEQ ID NO: 894

SEQ ID NO: 897 - protein, 451 aa, Homo Sapiens [sequence omitted]

SEQ ID NO: 898 - protein, 451 aa, Homo Sapiens [sequence omitted]

SEQ ID NO: 899 - protein, 488 aa, Homo Sapiens
MSAMFSQDFFLAIILQDSSADSFWNPNAFETDSDLPAGWMRVQDTSGTYYWHIPTGTTQWEPPGRASPSQGSSPQEESQLTWTGFAHGEGFEDGEFWKDEPSDEAPMELGLKEPEEGTLTFPAQSLSPEPLPQEEEKLPPRNTNPGIKCFAVRSLGWVEMTEEELAPGRSSVAVNNCIRQLSYHKNNLHDPMSGGWGEGKDLLLQLEDETLKLVEPQSQALLHAQPIISIRVWGVGRDSGRDFAYVARDKLTQMLKCHVFRCEAPAKNIATSLHEICSKIMAERRNARCLVNGLSLDHSKLVDVPFQVEFPAPKNELVQKFQVYYLGNVPVAKPVGVDVINGALESVLSSSSREQWTPSHVSVAPATLTILHQQTEAVLGECRVRFLSFLAVGRDVHTFAFIMAAGPASFCCHMFWCEPNAASLSEAVQAACMLRYQKCLDARSQASTSCLPAPPAESVARRVGWTVRRGVQSLWGSLKPKRLGAHTP

SEQ ID NO: 900 - protein, 490 aa, Homo Sapiens
MSAMFSQDFFLAIILQDSSADSFWNPNAFETDSDLPAGWMRVQDTSGTYYWHIPTGTTQWEPPGRASPSQGSSPQEESQLTWTGFAHGEGFEDGEFWKDEPSDEAPMELGLKEPEEGTLTFPAQSLSPEPLPQEEEKLPPRNTNPGIKCFAVRSLGWVEMTEEELAPGRSSVAVNNCIRQLSYHKNNLHDPMSGGWGEGKDLLLQLEDETLKLVEPQSQALLHAQPIISIRVWGVGRDSGRERDFAYVARDKLTQMLKCHVFRCEAPAKNIATSLHEICSKIMAERRNARCLVNGLSLDHSKLVDVPFQVEFPAPKNELVQKFQVYYLGNVPVAKPVGVDVINGALESVLSSSSREQWTPSHVSVAPATLTILHQQTEAVLGECRVRFLSFLAVGRDVHTFAFIMAAGPASFCCHMFWCEPNAASLSEAVQAACMLRYQKCLDARSQASTSCLPAPPAESVARRVGWTVRRGVQSLWGSLKPKRLGAHTP

SEQ ID NO: 901 - protein, 708 aa, Homo Sapiens
MSVPSSLSQSAINANSHGGPALSLPLPLHAAHNQLLNAKLQATAVGPKDLRSAMGEGGGPEPGPANAKWLKEGQNQLRRAATAHRDQNRNVTLTLAEEASQEPEMAPLGPKGLIHLYSELELSAHNAANRGLRGPGLIISTQEQGPDEGEEKAAGEAEEEEEDDDDEEEEEDLSSPPGLPEPLESVEAPPRPQALTDGPREHSKSASLLFGMRNSAASDEDSSWATLSQGSPSYGSPEDTDSFWNPNAFETDSDLPAGWMRVQDTSGTYYWHIPTGTTQWEPPGRASPSQGSSPQEESQLTWTGFAHGEGFEDGEFWKDEPSDEAPMELGLKEPEEGTLTFPAQSLSPEPLPQEEEKLPPRNTNPGIKCFAVRSLGWVEMTEEELAPGRSSVAVNNCIRQLSYHKNNLHDPMSGGWGEGKDLLLQLEDETLKLVEPQSQALLHAQPIISIRVWGVGRDSGRDFAYVARDKLTQMLKCHVFRCEAPAKNIATSLHEICSKIMAERRNARCLVNGLSLDHSKLVDVPFQVEFPAPKNELVQKFQVYYLGNVPVAKPVGVDVINGALESVLSSSSREQWTPSHVSVAPATLTILHQQTEAVLGECRVRFLSFLAVGRDVHTFAFIMAAGPASFCCHMFWCEPNAASLSEAVQAACMLRYQKCLDARSQASTSCLPAPPAESVARRVGWTVRRGVQSLWGSLKPKRLGAHTP

SEQ ID NO: 902 - protein, 708 aa, Homo Sapiens; identical to SEQ ID NO: 901

SEQ ID NO: 903 - protein, 710 aa, Homo Sapiens [sequence omitted]

SEQ ID NO: 904 - protein, 710 aa, Homo Sapiens
MSVPSSLSQSAINANSHGGPALSLPLPLHAAHNQLLNAKLQATAVGPKDLRSAMGEGGGPEPGPANAKWLKEGQNQLRRAATAHRDQNRNVTLTLAEEASQEPEMAPLGPKGLIHLYSELELSAHNAANRGLRGPGLIISTQEQGPDEGEEKAAGEAEEEEEDDDDEEEEEDLSSPPGLPEPLESVEAPPRPQALTDGPREHSKSASLLFGMRNSAASDEDSSWATLSQGSPSYGSPEDTDSFWNPNAFETDSDLPAGWMRVQDTSGTYYWHIPTGTTQWEPPGRASPSQGSSPQEESQLTWTGFAHGEGFEDGEFWKDEPSDEAPMELGLKEPEEGTLTFPAQSLSPEPLPQEEEKLPPRNTNPGIKCFAVRSLGWVEMTEEELAPGRSSVAVNNCIRQLSYHKNNLHDPMSGGWGEGKDLLLQLEDETLKLVEPQSQALLHAQPIISIRVWGVGRDSGRERDFAYVARDKLTQMLKCHVFRCEAPAKNIATSLHEICSKIMAERRNARCLVNGLSLDHSKLVDVPFQVEFPAPKNELVQKFQVYYLGNVPVAKPVGVDVINGALESVLSSSSREQWTPSHVSVAPATLTILHQQTEAVLGECRVRFLSFLAVGRDVHTFAFIMAAGPASFCCHMFWCEPNAASLSEAVQAACMLRYQKCLDARSQASTSCLPAPPAESVARRVGWTVRRGVQSLWGSLKPKRLGAHTP

SEQ ID NO: 905 - protein, 707 aa, Homo Sapiens
MSVPSSLSQSAINANSHGGPALSLPLPLHAAHNQLLNAKLQATAVGPKDLRSAMGEGGGPEPGPANAKWLKEGQNQLRRAATAHRDQNRNVTLTLAEEASQEPEMAPLGPKGLIHLYSELELSAHNAANRGLRGPGLIISTQEQGPDEGEEKAAGEAEEEEEDDDDEEEEEDLSSPPGLPEPLESVEAPPRPQALTDGPREHSKSASLLFGMRNSAASDEDSSWATLSQGSPSYGSPEDTDSFWNPNAFETDSDLPAGWMRVQDTSGTYYWHIPTGTTQWEPPGRASPSQGSSPQEESQLTWTGFAHGEGFEDGEFWKDEPSDEAPMELGLKEPEEGTLTFPAQSLSPEPLPQEEEKLPPRNTNPGIKCFAVRSLGWVEMTEEELAPGRSSVAVNNCIRQLSYHKNNLHDPMSGGWGEGKDLLLQLEDETLKLVEPQSQALLHAQPIISIRVWGVGRDSGRERDFAYVARDKLTQMLKCHVFRCEAPAKNIATSLHEICSKIMAERRNARCLVNGLSLDHSKLVDVPFQVEFPAPKNELVQKFQVYYLGNVPVAKPVGVDVINGALESVLSSSSREQWTPSHVSVAPATLTILHQQTEAVLGECRVRFLSFLAVGRDVHTFAFIMAAGPASFCCHMFWCEPNAASLSEAVQAACMVEQEELVQARPHPPGPSRGRRRKGLVQAWVPSPCSMGTSAVLISLIKSVCTA

SEQ ID NO: 906 - protein, 475 aa, Homo Sapiens
MTQMRDSFWNPNAFETDSDLPAGWMRVQDTSGTYYWHIPTGTTQWEPPGRASPSQGSSPQEESQLTWTGFAHGEGFEDGEFWKDEPSDEAPMELGLKEPEEGTLTFPAQSLSPEPLPQEEEKLPPRNTNPGIKCFAVRSLGWVEMTEEELAPGRSSVAVNNCIRQLSYHKNNLHDPMSGGWGEGKDLLLQLEDETLKLVEPQSQALLHAQPIISIRVWGVGRDSGRERDFAYVARDKLTQMLKCHVFRCEAPAKNIATSLHEICSKIMAERRNARCLVNGLSLDHSKLVDVPFQVEFPAPKNELVQKFQVYYLGNVPVAKPVGVDVINGALESVLSSSSREQWTPSHVSVAPATLTILHQQTEAVLGECRVRFLSFLAVGRDVHTFAFIMAAGPASFCCHMFWCEPNAASLSEAVQAACMLRYQKCLDARSQASTSCLPAPPAESVARRVGWTVRRGVQSLWGSLKPKRLGAHTP

SEQ ID NO: 907 - protein, 475 aa, Homo Sapiens [sequence omitted]

SEQ ID NO: 908 - protein, 22 aa, Homo Sapiens
MSWPRRLLLRYLFPALLLHAVK

SEQ ID NO: 909 - protein, 61 aa, Homo Sapiens
MSWPRRLLLRYLFPALLLHEPRPCLHRLSDHLSVRRAPPSHPAPKGRPDHRPARGVGEPAL

SEQ ID NO: 910 - protein, 184 aa, Homo Sapiens
MSWPRRLLLRYLFPALLLHGLGEGSALLHPDSRSHPRSLEKSAWRAFKESQCHHMLKHLHNGARITVQMPPTIEGHWVSTGCEVRSGPEFITRSYRFYHNNTFKAYQFYYGSNRCTNPTYTLIIRGKIRLRQASWIIRGGTEADYQLHNVQGHGRHRVRVQSESHEGHPHGCGHSLTAQRLQRE

SEQ ID NO: 911 - protein, 514 aa, Homo Sapiens
MSWPRRLLLRYLFPALLLHGLGEGSALLHPDSRSHPRSLEKSAWRAFKESQCHHMLKHLHNGARITVQMPPTIEGHWVSTGCEVRSGPEFITRSYRFYHNNTFKAYQFYYGSNRCTNPTYTLIIRGKIRLRQASWIIRGGTEADYQLHNVQVICHTEAVAEKLGQQVNRTCPGFLADGGPWVQDVAYDLWREENGCECTKAVNFAMHELQLIRVEKQYLHHNLDHLVEELFLGDIHTDATQRMFYRPSSYQPPLQNAKNHDHACIACRIIYRSDEHHPPILPPKADLTIGLHGEWVSQRCEVRPEVLFLTRHFIFHDNNNTWEGHYYHYSDPVCKHPTFSIYARGRYSRGVLSSRVMGGTEFVFKVNHMKVTPMDAATASLLNVFNGNECGAEGSWQVGIQQDVTHTNGCVALGIKLPHTEYEIFKMEQDARGRYLLFNGQRPSDGSSPDRPEKRATSYQMPLVQCASSSPRAEDLAEDSGSSLYGRAPGRHTWSLLLAALACLVPLLHWNIRR

SEQ ID NO: 912 - protein, 94 aa, Homo Sapiens
PEDVLPALQLPAPSAECQVEMGFHHVGQDGLQLPTSSDPPALASQSAGITGVSHRPPGRHLSNDLRTTTMPASPVGSSIGQTSTTLPSCPQRQT

SEQ ID NO: 913 - protein, 227 aa, Homo Sapiens
  misc_feature (1)..(1): Xaa can be any naturally occurring amino acid
XDVAYDLWREENGCECTKAVNFAMHELQLIRVEKQYLHHNLDHLVEELFLGDIHTDATQRMFYRPSSYQPPLQNAKCAAESSGSFQILPQDSSEKEQNGLSHWCLSRPGHQKDWALCAHAGPATAGCPSCLWPPAETGRKAGRTSSKTVHACPGEAGTSSFELFYFPNCWSIETKLKISLNAKLSFKPRASAPLETGHRVKIETLSQLVFLSFIQLCCEVQSPLANK

SEQ ID NO: 914 - protein, 223 aa, Homo Sapiens
MNKPLLWISVLTSLLEAFAHTDLSGKVFVFPRESVTDHVNLITPLEKPLQNFTLCFRAYSDLSRAYSLFSYNTQGRDNELLVYKERVGEYSLYIGRHKVTSKVIEKFPAPVHICVSWESSSGIAEFWINGTPLVKKGLRQGYFVEAQPKIVLGQEQDSYGGKFDRSQSFVGEIGDLYMWDSVLPPENILSAYQGTPLPANILDWQALNYEIRGYVIIKPLVWV

SEQ ID NO: 915 - protein, 54 aa, Homo Sapiens
MRFQQFLFAFFIFIMSLLLISGQRPVNLTMRRKLRKHNCLQRRCMPLHSRVPFP

SEQ ID NO: 916 - protein, 54 aa, Homo Sapiens; identical to SEQ ID NO: 915

SEQ ID NO: 917 - protein, 54 aa, Homo Sapiens; identical to SEQ ID NO: 915

SEQ ID NO: 918 - protein, 77 aa, Homo Sapiens
MNLRLCVQALLLLWLSLTAVCGGSLMPLPDGNGLEDGNVRHLVQPRGSRNGPGPWQGGRRKFRRQRPRLSHKGPMPF

SEQ ID NO: 919 - protein, 158 aa, Homo Sapiens
MAATGTAAAAATGRLLLLLLALAANAGTGFAVAEPQIAMFCGKLNMHVNIQTGKWEPDPTGTKSCFETKEEVLQYCQEMYPELQITNVMEANQRVSIDNWCRRDKKQCKSRFVTPFKCLVGEFVSDVLLVPEKCQFFHKERMEVCENHQHWHTVVKEV

SEQ ID NO: 920 - protein, 35 aa, Homo Sapiens
MAATGTAAAAATGRLLLLLLVGLTAPALALAGYIE

SEQ ID NO: 921 - protein, 116 aa, Homo Sapiens
MAATGTAAAAATGRLLLLLLVGLTAPALALAGYIEALAANAGTGFAVAEPQIAMFCGKLNMHVNIQTGKWEPDPTGTKSCFETKEEVLQYCQEMYPELQITNSGWRCVRITSTGTR

SEQ ID NO: 922 - protein, 763 aa, Homo Sapiens
MAATGTAAAAATGRLLLLLLVGLTAPALALAGYIEALAANAGTGFAVAEPQIAMFCGKLNMHVNIQTGKWEPDPTGTKSCFETKEEVLQYCQEMYPELQITNVMEANQRVSIDNWCRRDKKQCKSRFVTPFKCLVGEFVSDVLLVPEKCQFFHKERMEVCENHQHWHTVVKEACLTQGMTLYSYGMLLPCGVDQFHGTEYVCCPQTKIIGSVSKEEEEEDEEEEEEEDEEEDYDVYKSEFPTEADLEDFTEAAVDEDDEDEEEGEEVVEDRDYYYDTFKGDDYNEENPTEPGSDGTMSDKEITHDVKAVCSQEAMTGPCRAVMPRWYFDLSKGKCVRFIYGGCGGNRNNFESEDYCMAVCKAMIPPTPLPTNDVDVYFETSADDNEHARFQKAKEQLEIRHRNRMDRVKKEWEEAELQAKNLPKAERQTLIQHFQAMVKALEKEAASEKQQLVETHLARVEAMLNDRRRMALENYLAALQSDPPRPHRILQALRRYVRAENKDRLHTIRHYQHVLAVDPEKAAQMKSQVMTHLHVIEERRNQSLSLLYKVPYVAQEIQEEIDELLQEQRADMDQFTASISETPVDVRVSSEESEEIPPFHPFHPFPALPENEDTQPELYHPMKKGSGVGEQDGGLIGAEEKVINSKNKVDENMVIDETLDVKEMIFNAERVGGLEEERESVGPLREDFSLSSSALIGLLVIAVAIATVIVISLVMLRKRQYGTISHGIVEVDPMLTPEERHLNKMQNHGYENPTYKYLEQMQI

SEQ ID NO: 923 - protein, 751 aa, Homo Sapiens
MAATGTAAAAATGRLLLLLLVGLTAPALALAGYIEALAANAGTGFAVAEPQIAMFCGKLNMHVNIQTGKWEPDPTGTKSCFETKEEVLQYCQEMYPELQITNVMEANQRVSIDNWCRRDKKQCKSRFVTPFKCLVGEFVSDVLLVPEKCQFFHKERMEVCENHQHWHTVVKEACLTQGMTLYSYGMLLPCGVDQFHGTEYVCCPQTKIIGSVSKEEEEEDEEEEEEEDEEEDYDVYKSEFPTEADLEDFTEAAVDEDDEDEEEGEEVVEDRDYYYDTFKGDDYNEENPTEPGSDGTMSDKEITHDVKAVCSQEAMTGPCRAVMPRWYFDLSKGKCVRFIYGGCGGNRNNFESEDYCMAVCKAMIPPTPLPTNDVDVYFETSADDNEHARFQKAKEQLEIRHRNRMDRVKKEWEEAELQAKNLPKAERQTLIQHFQAMVKALEKEAASEKQQLVETHLARVEAMLNDRRRMALENYLAALQSDPPRPHRILQALRRYVRAENKDRLHTIRHYQHVLAVDPEKAAQMKSQVMTHLHVIEERRNQSLSLLYKVPYVAQEIQEEIDELLQEQRADMDQFTASISETPVDVRVSSEESEEIPPFHPFHPFPALPENEGSGVGEQDGGLIGAEEKVINSKNKVDENMVIDETLDVKEMIFNAERVGGLEEERESVGPLREDFSLSSSALIGLLVIAVAIATVIVISLVMLRKRQYGTISHGIVEVDPMLTPEERHLNKMQNHGYENPTYKYLEQMQI

SEQ ID NO: 924 - protein, 695 aa, Homo Sapiens
MAATGTAAAAATGRLLLLLLVGLTAPALALAGYIEALAANAGTGFAVAEPQIAMFCGKLNMHVNIQTGKWEPDPTGTKSCFETKEEVLQYCQEMYPELQITNVMEANQRVSIDNWCRRDKKQCKSRFVTPFKCLVGEFVSDVLLVPEKCQFFHKERMEVCENHQHWHTVVKEACLTQGMTLYSYGMLLPCGVDQFHGTEYVCCPQTKIIGSVSKEEEEEDEEEEEEEDEEEDYDVYKSEFPTEADLEDFTEAAVDEDDEDEEEGEEVVEDRDYYYDTFKGDDYNEENPTEPGSDGTMSDKEITHDVKVPPTPLPTNDVDVYFETSADDNEHARFQKAKEQLEIRHRNRMDRVKKEWEEAELQAKNLPKAERQTLIQHFQAMVKALEKEAASEKQQLVETHLARVEAMLNDRRRMALENYLAALQSDPPRPHRILQALRRYVRAENKDRLHTIRHYQHVLAVDPEKAAQMKSQVMTHLHVIEERRNQSLSLLYKVPYVAQEIQEEIDELLQEQRADMDQFTASISETPVDVRVSSEESEEIPPFHPFHPFPALPENEGSGVGEQDGGLIGAEEKVINSKNKVDENMVIDETLDVKEMIFNAERVGGLEEERESVGPLREDFSLSSSALIGLLVIAVAIATVIVISLVMLRKRQYGTISHGIVEVDPMLTPEERHLNKMQNHGYENPTYKYLEQMQI

SEQ ID NO: 925 - protein, 522 aa, Homo Sapiens
MAATGTAAAAATGRLLLLLLVGLTAPALALAGYIEALAANAGTGFAVAEPQIAMFCGKLNMHVNIQTGKWEPDPTGTKSCFETKEEVLQYCQEMYPELQITNVMEANQRVSIDNWCRRDKKQCKSRFVTPFKCLVPPTPLPTNDVDVYFETSADDNEHARFQKAKEQLEIRHRNRMDRVKKEWEEAELQAKNLPKAERQTLIQHFQAMVKALEKEAASEKQQLVETHLARVEAMLNDRRRMALENYLAALQSDPPRPHRILQALRRYVRAENKDRLHTIRHYQHVLAVDPEKAAQMKSQVMTHLHVIEERRNQSLSLLYKVPYVAQEIQEEIDELLQEQRADMDQFTASISETPVDVRVSSEESEEIPPFHPFHPFPALPENEGSGVGEQDGGLIGAEEKVINSKNKVDENMVIDETLDVKEMIFNAERVGGLEEERESVGPLREDFSLSSSALIGLLVIAVAIATVIVISLVMLRKRQYGTISHGIVEVDPMLTPEERHLNKMQNHGYENPTYKYLEQMQI

SEQ ID NO: 926 - protein, 159 aa, Homo Sapiens [sequence omitted]

SEQ ID NO: 927 - protein, 39 aa, Homo Sapiens
MAATGTAAAAATGRLLLLLLVGLTAPALALAGYIEWVNL

SEQ ID NO: 928 - protein, 761 aa, Homo Sapiens
MLRAPGELPRQAARCSLCRLGPGRGRAFFKWRCLPASVDRGNPLWALAANAGTGFAVAEPQIAMFCGKLNMHVNIQTGKWEPDPTGTKSCFETKEEVLQYCQEMYPELQITNVMEANQRVSIDNWCRRDKKQCKSRFVTPFKCLVGEFVSDVLLVPEKCQFFHKERMEVCENHQHWHTVVKEACLTQGMTLYSYGMLLPCGVDQFHGTEYVCCPQTKIIGSVSKEEEEEDEEEEEEEDEEEDYDVYKSEFPTEADLEDFTEAAVDEDDEDEEEGEEVVEDRDYYYDTFKGDDYNEENPTEPGSDGTMSDKEITHDVKAVCSQEAMTGPCRAVMPRWYFDLSKGKCVRFIYGGCGGNRNNFESEDYCMAVCKAMIPPTPLPTNDVDVYFETSADDNEHARFQKAKEQLEIRHRNRMDRVKKEWEEAELQAKNLPKAERQTLIQHFQAMVKALEKEAASEKQQLVETHLARVEAMLNDRRRMALENYLAALQSDPPRPHRILQALRRYVRAENKDRLHTIRHYQHVLAVDPEKAAQMKSQVMTHLHVIEERRNQSLSLLYKVPYVAQEIQEEIDELLQEQRADMDQFTASISETPVDVRVSSEESEEIPPFHPFHPFPALPENEGSGVGEQDGGLIGAEEKVINSKNKVDENMVIDETLDVKEMIFNAERVGGLEEERESVGPLREDFSLSSSALIGLLVIAVAIATVIVISLVMLRKRQYGTISHGIVEVDPMLTPEERHLNKMQNHGYENPTYKYLEQMQI

SEQ ID NO: 929 - protein, 267 aa, Homo Sapiens
MKAAVLTLAVLFLTGSQARHFWQQDEPPQSPWDRVKDLATVYVDVLKDSGRDYVSQFEGSALGKQLNLKLLDNWDSVTSTFSKLREQLGPVTQEFWDNLEKETEGLRQEMSKDLEEVKAKVQPYLDDFQKKWQEEMELYRQKVEPLRAELQEGARQKLHELQEKLSPLGEEMRDRARAHVDALRTHLAPYSDELRQRLAARLEALKENGGARLAEYHAKATEHLSTLSEKAKPALEDLRQGLLPVLESFKVSFLSALEEYTKKLNTQ

SEQ ID NO: 930 - protein, 267 aa, Homo Sapiens; identical to SEQ ID NO: 929

SEQ ID NO: 931 - protein, 267 aa, Homo Sapiens; identical to SEQ ID NO: 929

SEQ ID NO: 932 - protein, 267 aa, Homo Sapiens; identical to SEQ ID NO: 929

SEQ ID NO: 933 - protein, 245 aa, Homo Sapiens
MSGGARGFCMLKAPHSARPFFSSRSPTALQDESCGADLGRALPDGLKLLDNWDSVTSTFSKLREQLGPVTQEFWDNLEKETEGLRQEMSKDLEEVKAKVQPYLDDFQKKWQEEMELYRQKVEPLRAELQEGARQKLHELQEKLSPLGEEMRDRARAHVDALRTHLAPYSDELRQRLAARLEALKENGGARLAEYHAKATEHLSTLSEKAKPALEDLRQGLLPVLESFKVSFLSALEEYTKKLNTQ

SEQ ID NO: 934 - protein, 133 aa, Homo Sapiens
MCEQHPKRPGLQLWRGREPGWNGQQAALPTVTNMKLLAATVLLLTICSLEGALVRRQAKEPCVESLVSQYFQTVTDYGKDLMEKVKSPELQAEAKSYFEKSKEQLTPLIKKAGTELVNFLSYFVELGTQPATQ

SEQ ID NO: 935 - protein, 52 aa, Homo Sapiens
MEKVKSPELQAEAKSYFEKSKEQLTPLIKKAGTELVNFLSYFVELGTQPATQ

SEQ ID NO: 936 - protein, 52 aa, Homo Sapiens; identical to SEQ ID NO: 935

SEQ ID NO: 937 - protein, 66 aa, Homo Sapiens
MKLLAATVLLLTICSLEGALVRRQAKEPCVESLVSQYFQTVTDYGKDLMEKVKSPELQAEAKSYFE

SEQ ID NO: 938 - protein, 95 aa, Homo Sapiens
MKLLAATVLLLTICSLEGALVRRQAKEPCVESLVSQYFQTVTDYGKDLMEKVKSPELQAEAKSYFEKSKEQLTPLIKKAGTELVNFLSYFVELGT

SEQ ID NO: 939 - protein, 100 aa, Homo Sapiens
MKLLAATVLLLTICSLEGALVRRQAKEPCVESLVSQYFQTVTDYGKDLMEKVKSPELQAEAKSYFEKSKEQLTPLIKKAGTELVNFLSYFVELGTQPATQ

SEQ ID NO: 940 - protein, 82 aa, Homo Sapiens
MKLLAATVLLLTICSLEGALVRRQAKEPCVESLVSQYFQTVTDYGKDLMEKVKSPELQAEAKSYFENFLSYFVELGTQPATQ

SEQ ID NO: 941 - protein, 72 aa, Homo Sapiens
MKLLAATVLLLTICSLEGLATKGLKRKIIPSLKPRKPIQRSGWIPFWGGGRELGWVLAEVWQEARIHCCGPS

SEQ ID NO: 942 - protein, 27 aa, Homo Sapiens
MKLLAATVLLLTICSLEGLTLKSQRSS

SEQ ID NO: 943 - protein, 396 aa, Homo Sapiens
MFLKAVVLTLALVAVAGARAEVSADQVATVMWDYFSQLSNNAKEAVEHLQKSELTQQLNALFQDKLGEVNTYAGDLQKKLVPFATELHERLAKDSEKLKEEIGKELEELRARLLPHANEVSQKIGDNLRELQQRLEPYADQLRTQVSTQAEQLRRQLTPYAQRMERVLRENADSLQASLRPHADELKAKIDQNVEELKGRLTPYADEFKVKIDQTVEELRRSLAPYAQDTQEKLNHQLEGLTFQMKKNAEELKARISASAEELRQRLAPLAEDVRGNLRGNTEGLQKSLAELGGHLDQQVEEFRRRVEPYGENFNKALVQQMEQLRQKLGPHAGDVEGHLSFLEKDLRDKVNSFFSTFKEKESQDKTLSLPELEQQQEQQQEQQQEQVQMLAPLES

SEQ ID NO: 944 - protein, 162 aa, Homo Sapiens
MASMAAVLTWALALLSAFSATQARKGFWDYFSQTSGDKGRVEQIHQQKMAREPATLKDSLEQDLNNMNKFLEKLRPLSGSEAPRLPQDPVGMRRQLQEELEEVKARLQPYMAEAHELVGWNLEGLRQQLKPYTMDLMEQVALRVQELQEQLRVVGEDTKAQL

SEQ ID NO: 945 - protein, 366 aa, Homo Sapiens
MASMAAVLTWALALLSAFSATQARKGFWDYFSQTSGDKGRVEQIHQQKMAREPATLKDSLEQDLNNMNKFLEKLRPLSGSEAPRLPQDPVGMRRQLQEELEEVKARLQPYMAEAHELVGWNLEGLRQQLKPYTMDLMEQVALRVQELQEQLRVVGEDTKAQLLGGVDEAWALLQGLQSRVVHHTGRFKELFHPYAESLVSGIGRHVQELHRSVAPHAPASPARLSRCVQVLSRKLTLKAKALHARIQQNLDQLREELSRAFAGTGTEEGAGPDPQMLSEEVRQRLQAFRQDTYLQIAAFTRAIDQETEEVQQQLAPPPPGHSAFAPEFQQTDSGKVLSKLQARLDDLWEDITHSLHDQGHSHLGDP

SEQ ID NO: 946 - protein, 366 aa, Homo Sapiens; identical to SEQ ID NO: 945

SEQ ID NO: 947 - protein, 4563 aa, Homo Sapiens
MDPPRPALLALLALPALLLLLLAGARAEEEMLENVSLVCPKDATRFKHLRKYTYNYEAESSSGVPGTADSRSATRINCKVELEVPQLCSFILKTSQCTLKEVYGFNPEGKALLKKTKNSEEFAAAMSRYELKLAIPEGKQVFLYPEKDEPTYILNIKRGIISALLVPPETEEAKQVLFLDTVYGNCSTHFTVKTRKGNVATEISTERDLGQCDRFKPIRTGISPLALIKGMTRPLSTLISSSQSCQYTLDAKRKHVAEAICKEQHLFLPFSYKNKYGMVAQVTQTLKLEDTPKINSRFFGEGTKKMGLAFESTKSTSPPKQAEAVLKTLQELKKLTISEQNIQRANLFNKLVTELRGLSDEAVTSLLPQLIEVSSPITLQALVQCGQPQCSTHILQWLKRVHANPLLIDVVTYLVALIPEPSAQQLREIFNMARDQRSRATLYALSHAVNNYHKTNPTGTQELLDIANYLMEQIQDDCTGDEDYTYLILRVIGNMGQTMEQLTPELKSSILKCVQSTKPSLMIQKAAIQALRKMEPKDKDQEVLLQTFLDDASPGDKRLAAYLMLMRSPSQADINKIVQILPWEQNEQVKNFVASHIANILNSEELDIQDLKKLVKEALKESQLPTVMDFRKFSRNYQLYKSVSLPSLDPASAKIEGNLIFDPNNYLPKESMLKTTLTAFGFASADLIEIGLEGKGFEPTLEALFGKQGFFPDSVNKALYWVNGQVPDGVSKVLVDHFGYTKDDKHEQDMVNGIMLSVEKLIKDLKSKEVPEARAYLRILGEELGFASLHDLQLLGKLLLMGARTLQGIPQMIGEVIRKGSKNDFFLHYIFMENAFELPTGAGLQLQISSSGVIAPGAKAGVKLEVANMQAELVAKPSVSVEFVTNMGIIIPDFARSGVQMNTNFFHESGLEAHVALKAGKLKFIIPSPKRPVKLLSGGNTLHLVSTTKTEVIPPLIENRQSWSVCKQVFPGLNYCTSGAYSNASSTDSASYYPLTGDTRLELELRPTGEIEQYSVSATYELQREDRALVDTLKFVTQAEGAKQTEATMTFKYNRQSMTLSSEVQIPDFDVDLGTILRVNDESTEGKTSYRLTLDIQNKKITEVALMGHLSCDTKEERKIKGVISIPRLQAEARSEILAHWSPAKLLLQMDSSATAYGSTVSKRVAWHYDEEKIEFEWNTGTNVDTKKMTSNFPVDLSDYPKSLHMYANRLLDHRVPQTDMTFRHVGSKLIVAMSSWLQKASGSLPYTQTLQDHLNSLKEFNLQNMGLPDFHIPENLFLKSDGRVKYTLNKNSLKIEIPLPFGGKSSRDLKMLETVRTPALHFKSVGFHLPSREFQVPTFTIPKLYQLQVPLLGVLDLSTNVYSNLYNWSASYSGGNTSTDHFSLRARYHMKADSVVDLLSYNVQGSGETTYDHKNTFTLSCDGSLRHKFLDSNIKFSHVEKLGNNPVSKGLLIFDASSSWGPQMSASVHLDSKKKQHLFVKEVKIDGQFRVSSFYAKGTYGLSCQRDPNTGRLNGESNLRFNSSYLQGTNQITGRYEDGTLSLTSTSDLQSGIIKNTASLKYENYELTLKSDTNGKYKNFATSNKMDMTFSKQNALLRSEYQADYESLRFFSLLSGSLNSHGLELNADILGTDKINSGAHKATLRIGQDGISTSATTNLKCSLLVLENELNAELGLSGASMKLTTNGRFREHNAKFSLDGKAALTELSLGSAYQAMILGVDSKNIFNFKVSQEGLKLSNDMMGSYAEMKFDHTNSLNIAGLSLDFSSKLDNIYSSDKFYKQTVNLQLQPYSLVTTLNSDLKYNALDLTNNGKLRLEPLKLHVAGNLKGAYQNNEIKHIYAISSAALSASYKADTVAKVQGVEFSHRLNTDIAGLASAIDMSTNYNSDSLHFSNVFRSVMAPFTMTIDAHTNGNGKLALWGEHTGQLYSKFLLKAEPLAFTFSHDYKGSTSHHLVSRKSISAALEHKVSALLTPAEQTGTWKLKTQFNNNEYSQDLDAYNTKDKIGVELTGRTLADLTLLDSPIKVPLLLSEPINIIDALEMRDAVEKPQEFTIVAFVKYDKNQDVHSINLPFFETLQEYFERNRQTIIVVLENVQRNLKHINIDQFVRKYRAALGKLPQQANDYLNSFNWERQVSHAKEKLTALTKKYRITENDIQIALDDAKINFNEKLSQLQTYMIQFDQYIKDSYDLHDLKIAIANIIDEIIEKLKSLDEHYHIRVNLVKTIHDLHLFIENIDFNKSGSSTASWIQNVDTKYQIRIQIQEKLQQLKRHIQNIDIQHLAGKLKQHIEAIDVRVLLDQLGTTISFERINDILEHVKHFVINLIGDFEVAEKINAFRAKVHELIERYEVDQQIQVLMDKLVELAHQYKLKETIQKLSNVLQQVKIKDYFEKLVGFIDDAVKKLNELSFKTFIEDVNKFLDMLIKKLKSFDYHQFVDETNDKIREVTQRLNGEIQALELPQKAEALKLFLEETKATVAVYLESLQDTKITLIINWLQEALSSASLAHMKAKFRETLEDTRDRMYQMDIQQELQRYLSLVGQVYSTLVTYISDWWTLAAKNLTDFAEQYSIQDWAKRMKALVEQGFTVPEIKTILGTMPAFEVSLQALQKATFQTPDFIVPLTDLRIPSVQINFKDLKNIKIPSRFSTPEFTILNTFHIPSFTIDFVEMKVKIIRTIDQMLNSELQWPVPDIYLRDLKVEDIPLARITLPDFRLPEIAIPEFIIPTLNLNDFQVPDLHIPEFQLPHISHTIEVPTFGKLYSILKIQSPLFTLDANADIGNGTTSANEAGIAASITAKGESKLEVLNFDFQANAQLSNPKINPLALKESVKFSSKYLRTEHGSEMLFFGNAIEGKSNTVASLHTEKNTLELSNGVIVKINNQLTLDSNTKYFHKLNIPKLDFSSQADLRNEIKTLLKAGHIAWTSSGKGSWKWACPRFSDEGTHESQISFTIEGPLTSFGLSNKINSKHLRVNQNLVYESGSLNFSKLEIQSQVDSQHVGHSVLTAKGMALFGEGKAEFTGRHDAHLNGKVIGTLKNSLFFSAQPFEITASTNNEGNLKVRFPLRLTGKIDFLNNYALFLSPSAQQASWQVSARFNQYKYNQNFSAGNNENIMEAHVGINGEANLDFLNIPLTIPEMRLPYTIITTPPLKDFSLWEKTGLKEFLKTTKQSFDLSVKAQYKKNKHRHSITNPLAVLCEFISQSIKSFDRHFEKNRNNALDFVTKSYNETKIKFDKYKAEKSHDELPRTFQIPGYTVPVVNVEVSPFTIEMSAFGYVFPKAVSMPSFSILGSDVRVPSYTLILPSLELPVLHVPRNLKLSLPDFKELCTISHIFIPAMGNITYDFSFKSSVITLNTNAELFNQSDIVAHLLSSSSSVIDALQYKLEGTTRLTRKRGLKLATALSLSNKFVEGSHNSTVSLTTKNMEVSVATTTKAQIPILRMNFKQELNGNTKSKPTVSSSMEFKYDFNSSMLYSTAKGAVDHKLSLESLTSYFSIESSTKGDVKGSVLSREYSGTIASEANTYLNSKSTRSSVKLQGTSKIDDIWNLEVKENFAGEATLQRIYSLWEHSTKNHLQLEGLFFTNGEHTSKATLELSPWQMSALVQVHASQPSSFHDFPDLGQEVALNANTKNQKIRWKNEVRIHSGSFQSQVELSNDQEKAHLDIAGSLEGHLRFLKNIILPVYDKSLWDFLKLDVTTSIGRRQHLRVSTAFVYTKNPNGYSFSIPVKVLADKFIIPGLKLNDLNSVLVMPTFHVPFTDLQVPSCKLDFREIQIYKKLRTSSFALNLPTLPEVKFPEVDVLTKYSQPEDSLIPFFEITVPESQLTVSQFTLPKSVSDGIAALDLNAVANKIADFELPTIIVPEQTIEIPSIKFSVPAGIVIPSFQALTARFEVDSPVYNATWSASLKNKADYVETVLDSTCSSTVQFLEYELNVLGTHKIEDGTLASKTKGTFAHRDFSAEYEEDGKYEGLQEWEGKAHLNIKSPAFTDLHLRYQKDKKGISTSAASPAVGTVGMDMDEDDDFSKWNFYYSPQSSPDKKLTIFKTELRVRESDEETQIKVNWEEEAASGLLTSLKDNVPKATGVLYDYVNKYHWEHTGLTLREVSSKLRRNLQNNAEWVYQGAIRQIDDIDVRFQKAASGTTGTYQEWKDKAQNLYQELLTQEGQASFQGLKDNVFDGLVRVTQEFHMKVKHLIDSLIDFLNFPRFQFPGKPGIYTREELCTMFIREVGTVLSQVYSKVHNGSEILFSYFQDLVITLPFELRKHKLIDVISMYRELLKDLSKEAQEVFKAIQSLKTTEVLRNLQDLLQFIFQLIEDNIKQLKEMKFTYLINYIQDEINTIFSDYIPYVFKLLKENLCLNLHKFNEFIQNELQEASQELQQIHQYIMALREEYFDPSIVGWTVKYYELEEKIVSLIKNLLVALKDFHSEYIVSASNFTSQLSSQVEQFLHRNIQEYLSILTDPDGKGKEKIAELSATAQEIIKSQAIATKKIISDYHQQFRYKLQDFSDQLSDYYEKFIAESKRLIDLSIQNYHTFLIYITELLKKLQSTTVMNPYMKLAPGELTIIL

SEQ ID NO: 948 - protein, 828 aa, Homo Sapiens
MDPPRPALLALLALPALLLLLLAGARAEEEMLENVSLVCPKDATRFKHLRKYTYNYEAESSSGVPGTADSRSATRINCKVELEVPQLCSFILKTSQCTLKEVYGFNPEGKALLKKTKNSEEFAAAMSRYELKLAIPEGKQVFLYPEKDEPTYILNIKRGIISALLVPPETEEAKQVLFLDTVYGNCSTHFTVKTRKGNVATEISTERDLGQCDRFKPIRTGISPLALIKGMTRPLSTLISSSQSCQYTLDAKRKHVAEAICKEQHLFLPFSYKNKYGMVAQVTQTLKLEDTPKINSRFFGEGTKKMGLAFESTKSTSPPKQAEAVLKTLQELKKLTISEQNIQRANLFNKLVTELRGLSDEAVTSLLPQLIEVSSPITLQALVQCGQPQCSTHILQWLKRVHANPLLIDVVTYLVALIPEPSAQQLREIFNMARDQRSRATLYALSHAVNNYHKTNPTGTQELLDIANYLMEQIQDDCTGDEDYTYLILRVIGNMGQTMEQLTPELKSSILKCVQSTKPSLMIQKAAIQALRKMEPKDKDQEVLLQTFLDDASPGDKRLAAYLMLMRSPSQADINKIVQILPWEQNEQVKNFVASHIANILNSEELDIQDLKKLVKEALKESQLPTVMDFRKFSRNYQLYKSVSLPSLDPASAKIEGNLIFDPNNYLPKESMLKTTLTAFGFASADLIEIGLEGKGFEPTLEALFGKQGFFPDSVNKALYWVNGQVPDGVSKVLVDHFGYTKDDKHEQDMVNGIMLSVEKLIKDLKSKEVPEARAYLRILGEELGFASLHDLQLLGKLLLMDRPDSLTIPAAQARKDACTFFRDGGLP

SEQ ID NO: 949 - protein, 54 aa, Homo Sapiens
MRLFLSLPVLVVVLSIVLEGPAPAQGTPDVSSALDKLKEFGNTLEDKARELISR

SEQ ID NO: 950 - protein, 83 aa, Homo Sapiens
MRLFLSLPVLVVVLSIVLEGPAPAQGTPDVSSALDKLKEFGNTLEDKARELISRIKQSELSAKMREDDISPCCPGWSRTPDLK

SEQ ID NO: 951 - protein, 77 aa, Homo Sapiens
MRLFLSLPVLVVVLSIVLEGPAPAQGTPDVSSALDKLKEFGNTLEDKARELISRIKQSELSAKMREWFSETFQKVKE

SEQ ID NO: 952 - protein, 83 aa, Homo Sapiens
MRLFLSLPVLVVVLSIVLEGPAPAQGTPDVSSALDKLKEFGNTLEDKARELISRIKQSELSAKMREWFSETFQKVKEKLKIDS

SEQ ID NO: 953 - protein, 83 aa, Homo Sapiens; identical to SEQ ID NO: 952

SEQ ID NO: 954 - protein, 92 aa, Homo Sapiens
MRLFLSLPVLVVVLSIVLEGPAPAQGTPDVSSALDKLKEFGNTLEDKARELISRIKQSELSAKMRLEPFPGHGRAGGVVFRDISESEGETQD

SEQ ID NO: 955 - protein, 129 aa, Homo Sapiens
MRLFLSLPVLVVVLSIVLEGPAPAQGTPDVSSALDKLKEFGNTLEDKARELISRIKQSELSAKMRLEPFPGHGRAGVCFWVEPWQMVQDEQIEKKTSPGEADNIPLVTQLDLKGVVFRDISESEGETQD

SEQ ID NO: 956 - protein, 29 aa, Homo Sapiens
MRLFLSLPVLVVVLSIVLEGSGFQRHFRK

SEQ ID NO: 957 - protein, 39 aa, Homo Sapiens
MRLFLSLPVLVVVLSIVLEGSPRLSPAGAKSAQESTSNR

SEQ ID NO: 958 - protein, 87 aa, Homo Sapiens
MGTRLLPALFLVLLVLGFEVQGTQQPQQDEMPSPTFLTQVKESLSSYWESAKTAAQNLDLYSKSTAAMSTYTGIFTDQVLSVLKGEE

SEQ ID NO: 959 - protein, 72 aa, Homo Sapiens
MGTRLLPALFLVLLVLGFEVQGTQQPQQDEMPSPTFLTQVKESLSSYWESAKTAAQNLYEKTYLPAVDEKLR

SEQ ID NO: 960 - protein, 101 aa, Homo Sapiens
MGTRLLPALFLVLLVLGFEVQGTQQPQQDEMPSPTFLTQVKESLSSYWESAKTAAQNLYEKTYLPAVDEKLRDLYSKSTAAMSTYTGIFTDQVLSVLKGEE

SEQ ID NO: 961 - protein, 101 aa, Homo Sapiens; identical to SEQ ID NO: 960

SEQ ID NO: 962 - protein, 47 aa, Homo Sapiens
MGTRLLPALFLVLLVLGFGEGISLQLLGVSKDSRPEPVREDIPARCR

SEQ ID NO: 963 - protein, 117 aa, Homo Sapiens
MGTWGAPHRTLPCRNRGAMQPRVLLVVALLALLASARASEAEDASLLSFMQGYMKHATKTAKDALSSVQESQVAQQARGWVTDGFSSLKDYWSTVKDKFSEFWDLDPEVRPTSAVAA

SEQ ID NO: 964 - protein, 117 aa, Homo Sapiens; identical to SEQ ID NO: 963

SEQ ID NO: 965 - protein, 55 aa, Homo Sapiens
MQPRVLLVVALLALLASARASEAEDASLLSFMQGYMKHATKTAKDALSSVQESQV

SEQ ID NO: 966 - protein, 99 aa, Homo Sapiens
MQPRVLLVVALLALLASARASEAEDASLLSFMQGYMKHATKTAKDALSSVQESQVAQQARGWVTDGFSSLKDYWSTVKDKFSEFWDLDPEVRPTSAVAA

SEQ ID NO: 967 - protein, 73 aa, Homo Sapiens
MSLLRNRLQALPALCLCVLVLACIGACQPEAQEGTLSPPPKLKMSRWSLVRGRMKELLETVVNRTRDGWQWFW

SEQ ID NO: 968 - protein, 127 aa, Homo Sapiens
MSLLRNRLQALPALCLCVLVLACIGACQPEAQEGTLSPPPKLKMSRWSLVRGRMKELLETVVNRTRDGWQWFWSPSTFRGFMQTYYDDHLRDLGPLTKAWFLESKDSLLKKTHSLCPRLVCGDKDQG

SEQ ID NO: 969 - protein, 178 aa, Homo Sapiens
MSLLRNRLQALPALCLCVLVLACIGACQPEAQEGTLSPPPKLKMSRWSLVRGRMKELLETVVNRTRDGWQWFWSLDTMGTRLLPALFLVLLVLGFEVQGTQQPQQDEMPSPTFLTQVKESLSSYWESAKTAAQNLYEKTYLPAVDEKLRDLYSKSTAAMSTYTGIFTDQVLSVLKGEE

SEQ ID NO: 970 - protein, 127 aa, Homo Sapiens; identical to SEQ ID NO: 968

SEQ ID NO: 971 - protein, 215 aa, Homo Sapiens
MFKQLSCISLPSSCDYSSRSLLQPPSPKMVMLLLLLSALAGLFGAAEGQAFHLGKCPNPPVQENFDVNKYLGRWYEIEKIPTTFENGRCIQANYSLMENGKIKVLNQELRADGTVNQIEGEATPVNLTEPAKLEVKFSWFMPSAPYWILATDYENYALVYSCTCIIQLFHVDFAWILARNPNLPPETVDSLKNILTSNNIDVKKMTVTDQVNCPK

SEQ ID NO: 972 - protein, 108 aa, Homo Sapiens
MVMLLLLLSALAGLFGAAEGQAFHLGKCPNPPVQENFDVNKTESHFVTQGGVQHHHLGSLQPPPPGFKQFSCLSLPSSWDYSISEDGTKLRRSQQPLRMDAASRPTTH

SEQ ID NO: 973 - protein, 149 aa, Homo Sapiens
MVMLLLLLSALAGLFGAAEGQAFHLGKCPNPPVQENFDVNKYLGRWYEIEKIPTTFENGRCIQANYSLMENGKIKVLNQELRADGTVNQIEGEATPVNLTEPAKLEVKFSWFMPSAPYWILATDYENYALVYSCTCIIQLFHVDFAWIL

SEQ ID NO: 974 - protein, 189 aa, Homo Sapiens
MVMLLLLLSALAGLFGAAEGQAFHLGKCPNPPVQENFDVNKYLGRWYEIEKIPTTFENGRCIQANYSLMENGKIKVLNQELRADGTVNQIEGEATPVNLTEPAKLEVKFSWFMPSAPYWILATDYENYALVYSCTCIIQLFHVDFAWILARNPNLPPETVDSLKNILTSNNIDVKKMTVTDQVNCPKLS

SEQ ID NO: 975 - protein, 216 aa, Homo Sapiens
MKVLWAALLVTFLAGCQAKVEQAVETEPEPELRQQTEWQSGQRWELALGRFWDYLRWVQTLSEQVQEELLSSQVTQELRALMDETMKELKAYKSELEEQLTPVAEETRARLSKELQAAQARLGADMEDVCGRLVQYRGEVQAMLGQSTEELRVRLASHLRKLRKRLLRDADDLQKRLAVYQAGAREGAERGLSAIRERLGPLVEQGRVRAATVGSL

SEQ ID NO: 976 - protein, 219 aa, Homo Sapiens
MKVLWAALLVTFLAGCQAKVEQAVETEPEPELRQQTEWQSGQRWELALGRFWDYLRWVQTLSEQVQEELLSSQVTQELRALMDETMKELKAYKSELEEQLTPVAEETRARLSKELQAAQARLGADMEDVCGRLVQYRGEVQAMLGQSTEELRVRLASHLRKLRKRLLRDADDLQKRLAVYQAGAREGAERGLSAIRERLGPLVEQGRVRAATVGSLAGQ

SEQ ID NO: 977 - protein, 317 aa, Homo Sapiens [sequence omitted]

SEQ ID NO: 978 - protein, 269 aa, Homo Sapiens
MSSGASRKSWDPGNPWPPDWPITGRKMKVLWAALLVTFLAGCQAKVEQAVETEPEPELRQQTEWQSGQRWELALGRFWDYLRWVQTLSEQVQEELLSSQVTQELRALMDETMKELKAYKSELEEQLTPVAEETRARLSKELQAAQARLGADMEDVCGRLVQYRGEVQAMLGQSTEELRVRLASHLRKLRKRLLRDADDLQKRLAVYQAGAREGAERGLSAIRERLGPLVEQGRVRAATVGSLAGQPLQERAQAWGERLRARMEEMGSRT

SEQ ID NO: 979 - protein, 326 aa, Homo Sapiens
MTGLCGYSAPDMRGLRLIMIPVELLLCYLLLHPVDATSYGKQTNVLMHFPLSLESQTPSSDPLSCQFLHPKSLPGFSHMAPLPKFLVSLALRNALEEAGCQADVWALQLQLYRQGGVNATQVLIQHLRGLQKGRSTERNVSVEALASALQLLAREQQSTGRVGRSLPTEDCENEKEQAVHNVVQLLPGVGTFYNLGTALYYATQNCLGKARERGRDGAIDLGYDLLMTMAGMSGGPMGLAISAALKPALRSGVQQLIQYYQDQKDANISQPETTKEGLRAISDVSDLEETTTLASFISEVVSSAPYWGWAIIKSYDLDPGAGSLEI

SEQ ID NO: 980 - protein, 181 aa, Homo Sapiens
MISPVLILFSSFLCHVAIAGRTCPKPDDLPFSTVVPLKTFYEPGEEITYSCKPGYVSRGGMRKFICPLTGLWPINTLKCTPRVCPFAGILENGAVRYTTFEYPNTISFSCNTGFYLNGADSAKCTEEGKWSPELPVCAPIICPPPSIPTFATLRVYKPSAGNNSLYRDTAVFECLPQHAMF

SEQ ID NO: 981 - protein, 345 aa, Homo Sapiens
MISPVLILFSSFLCHVAIAGRTCPKPDDLPFSTVVPLKTFYEPGEEITYSCKPGYVSRGGMRKFICPLTGLWPINTLKCTPRVCPFAGILENGAVRYTTFEYPNTISFSCNTGFYLNGADSAKCTEEGKWSPELPVCAPIICPPPSIPTFATLRVYKPSAGNNSLYRDTAVFECLPQHAMFGNDTITCTTHGNWTKLPECREVKCPFPSRPDNGFVNYPAKPTLYYKDKATFGCHDGYSLDGPEEIECTKLGNWSAMPSCKASCKVPVKKATVVYQGERVKIQEKFKNGMLHGDKVSFFCKNKEKKCSYTEDAQCIDGTIEVPKCFKEHSSLAFWKTDASDVKPC

SEQ ID NO: 982 - protein, 200 aa, Homo Sapiens
MRKFICPLTGLWPINTLKCTPRVCPFAGILENGAVRYTTFEYPNTISFSCNTGFYLNGADSAKCTEEGKWSPELPVCAPIICPPPSIPTFATLRVYKPSAGNNSLYRDTAVFECLPQHAMFGNDTITCTTHGNWTKLPECREVKCPFPSRPDNGFVNYPAKPTLYYKDKATFGCHDGYSLDGPEEIECTKLGNWSAMPSC

SEQ ID NO: 983 - protein, 104 aa, Homo Sapiens
  misc_feature (1)..(1): Xaa can be any naturally occurring amino acid
XQHAMFGNDTITCTTHGNWTKLPECREVKCPFPSRPDNGFVNYPAKPTLYYKDKATFGCHDGYSLDGPEEIECTKLGNWSAMPSCKEHSSLAFWKTDASDVKPC

SEQ ID NO: 984 - protein, 160 aa, Homo Sapiens
MEGAALLRVSVLCIWMSALFLGVGVRAEEAGARVQQNVPSGTDTGDPQSKPLGDWAAGTMDPESSIFIEDAIKYFKEKVSTQNLLLLLTDNEAWNGFVAAAELPRNEADELRKALDNLARQMIMKDKNWHDKGQQYRNWFLKEFPRLKSELEDNIRRLRA

SEQ ID NO: 985 - protein, 398 aa, Homo Sapiens
MEGAALLRVSVLCIWMSALFLGVGVRAEEAGARVQQNVPSGTDTGDPQSKPLGDWAAGTMDPESSIFIEDAIKYFKEKVSTQNLLLLLTDNEAWNGFVAAAELPRNEADELRKALDNLARQMIMKDKNWHDKGQQYRNWFLKEFPRLKSELEDNIRRLRALADGVQKVHKGTTIANVVSGSLSISSGILTLVGMGLAPFTEGGSLVLLEPGMELGITAALTGITSSTMDYGKKWWTQAQAHDLVIKSLDKLKEVREFLGENISNFLSLAGNTYQLTRGIGKDIRALRRARANLQSVPHASASRPRVTEPISAESGEQVERVNEPSILEMSRGVKLTDVAPVSFFLVLDVVYLVYESKHLHEGAKSETAEELKKVAQELEEKLNILNNNYKILQADQEL

SEQ ID NO: 986 - protein, 398 aa, Homo Sapiens; identical to SEQ ID NO: 985

SEQ ID NO: 987 - protein, 398 aa, Homo Sapiens; identical to SEQ ID NO: 985

SEQ ID NO: 988 - protein, 141 aa, Homo Sapiens
MEGAALLRVSVLCIWMSALFLGVGVRAEEAGARVQQNVPSGTDTGDPQSKPLGDWAAGTMDPGPAGSRGDSGEPCTLRPACRGQRQHGGASRISAEGPAPMPRRRTPSTAHLRVPKTSRRNLLCMRAVSLLRMPLSISRKK

SEQ ID NO: 989 - protein, 141 aa, Homo Sapiens; identical to SEQ ID NO: 988

SEQ ID NO: 990 - protein, 142 aa, Homo Sapiens
MEGAALLRVSVLCIWMSALFLGVGVRAEEAGARVQQNVPSGTDTGDPQSKPLGDWAAGTMDPGPAGSRGDSGEPCTLRPACRGQRQHGGASRISAEGPAPMPRRRTPSTAHLRVPKTSRRNLLCMVVVLNAVEFETLFLNFK

SEQ ID NO: 991 - protein, 380 aa, Homo Sapiens
MEGAALLRVSVLCIWVQQNVPSGTDTGDPQSKPLGDWAAGTMDPESSIFIEDAIKYFKEKVSTQNLLLLLTDNEAWNGFVAAAELPRNEADELRKALDNLARQMIMKDKNWHDKGQQYRNWFLKEFPRLKSELEDNIRRLRALADGVQKVHKGTTIANVVSGSLSISSGILTLVGMGLAPFTEGGSLVLLEPGMELGITAALTGITSSTMDYGKKWWTQAQAHDLVIKSLDKLKEVREFLGENISNFLSLAGNTYQLTRGIGKDIRALRRARANLQSVPHASASRPRVTEPISAESGEQVERVNEPSILEMSRGVKLTDVAPVSFFLVLDVVYLVYESKHLHEGAKSETAEELKKVAQELEEKLNILNNNYKILQADQEL

SEQ ID NO: 992 - protein, 123 aa, Homo Sapiens
MEGAALLRVSVLCIWVQQNVPSGTDTGDPQSKPLGDWAAGTMDPGPAGSRGDSGEPCTLRPACRGQRQHGGASRISAEGPAPMPRRRTPSTAHLRVPKTSRRNLLCMRAVSLLRMPLSISRKK

SEQ ID NO: 993 - protein, 414 aa, Homo Sapiens
MRFKSHTVELRRPCSDMEGAALLRVSVLCIWMSALFLGVGVRAEEAGARVQQNVPSGTDTGDPQSKPLGDWAAGTMDPESSIFIEDAIKYFKEKVSTQNLLLLLTDNEAWNGFVAAAELPRNEADELRKALDNLARQMIMKDKNWHDKGQQYRNWFLKEFPRLKSELEDNIRRLRALADGVQKVHKGTTIANVVSGSLSISSGILTLVGMGLAPFTEGGSLVLLEPGMELGITAALTGITSSTMDYGKKWWTQAQAHDLVIKSLDKLKEVREFLGENISNFLSLAGNTYQLTRGIGKDIRALRRARANLQSVPHASASRPRVTEPISAESGEQVERVNEPSILEMSRGVKLTDVAPVSFFLVLDVVYLVYESKHLHEGAKSETAEELKKVAQELEEKLNILNNNYKILQADQEL

SEQ ID NO: 994 - protein, 118 aa, Homo Sapiens
MRFKSHTVELRSTLSQPLFSCSRRRPCSDMEGAALLRVSVLCIWMSALFLGVGVRAEEAGARVQQNVPSGTDTGDPQSKPLGDWAAGTMDPESSIFIEDAIKYFKEKVSTQNLLLLLT

SEQ ID NO: 995 - protein, 331 aa, Homo Sapiens
MDSEKKRFTEEATKYFRERVSPVHLQILLTNNEAWKRFVTAAELPRDEADALYEALKKLRTYAAIEDEYVQQKDEQFREWFLKEFPQVKRKIQESIEKLRALANGIEEVHRGCTISNVVSSSTGAASGIMSLAGLVLAPFTAGTSLALTAAGVGLGAASAVTGITTSIVEHSYTSSAEAEASRLTATSIDRLKVFKEVMRDITPNLLSLLNNYYEATQTIGSEIRAIRQARARARLPVTTWRISAGSGGQAERTIAGTTRAVSRGARILSATTSGIFLALDVVNLVYESKHLHEGAKSASAEELRRQAQELEENLMELTQIYQRLNPCHTH

SEQ ID NO: 996 - protein, 402 aa, Homo Sapiens
MGLGQGWGWEASCFACLIRSCCQVVTFTFPFGFQGISQSLENVSGYYADARLEVGSTQLRTAGSCSHSFKRSFLEKKRFTEEATKYFRERVSPVHLQILLTNNEAWKRFVTAAELPRDEADALYEALKKLRTYAAIEDEYVQQKDEQFREWFLKEFPQVKRKIQESIEKLRALANGIEEVHRGCTISNVVSSSTGAASGIMSLAGLVLAPFTAGTSLALTAAGVGLGAASAVTGITTSIVEHSYTSSAEAEASRLTATSIDRLKVFKEVMRDITPNLLSLLNNYYEATQTIGSEIRAIRQARARARLPVTTWRISAGSGGQAERTIAGTTRAVSRGARILSATTSGIFLALDVVNLVYESKHLHEGAKSASAEELRRQAQELEENLMELTQIYQRLNPCHTH

SEQ ID NO: 997 - protein, 97 aa, Homo Sapiens
MGLGQGWGWEASCFACLIRSCCQVVTFTFPFGFQGISQSLENVSGYYADARLEVGSTQLRTAGSCSHSFKRSFLGLRKKTNPSSQVSDWRAPWKVSQ

SEQ ID NO: 998 - protein, 82 aa, Homo Sapiens
MGLGQGWGWEASCFACLIRSCCQVVTFTFPFGFQGISQSLENVSGYYADARLEVGSTQLRTAGSCSHSFKRSFLGQKDPALV

SEQ ID NO: 999 - protein, 82 aa, Homo Sapiens; identical to SEQ ID NO: 998

SEQ ID NO: 1000 - protein, 202 aa, Homo Sapiens
MSLAGLVLAPFTAGTSLALTAAGVGLGAASAVTGITTSIVEHSYTSSAEAEASRLTATSIDRLKVFKEVMRDITPNLLSLLNNYYEATQTIGSEIRAIRQARARARLPVTTWRISAGSGGQAERTIAGTTRAVSRGARILSATTSGIFLALDVVNLVYESKHLHEGAKSASAEELRRQAQELEENLMELTQIYQRLNPCHTH

SEQ ID NO: 1001 - protein, 202 aa, Homo Sapiens; identical to SEQ ID NO: 1000

SEQ ID NO: 1002 - protein, 202 aa, Homo Sapiens; identical to SEQ ID NO: 1000

SEQ ID NO: 1003 - protein, 40 aa, Homo Sapiens
SQSLENVSGYYADARLEVGSTQLRTAGSCSHSFKRSFLGE

SEQ ID NO: 1004 - protein, 39 aa, Homo Sapiens
  misc_feature (1)..(1): Xaa can be any naturally occurring amino acid
XYADARLEVGSTQLRTAGSCSHSFKRSFLAWLPQPPRFL

SEQ ID NO: 1005 - protein, 86 aa, Homo Sapiens
  misc_feature (1)..(1): Xaa can be any naturally occurring amino acid
XYADARLEVGSTQLRTAGSCSHSFKRSFLAWWYVPVGTTTWEVEAEASLAARTYRQKQGGQRVSSTAPVNSPRQTLGHRVQDTDLE

SEQ ID NO: 1006 - protein, 33 aa, Homo Sapiens
  misc_feature (1)..(1): Xaa can be any naturally occurring amino acid
XYADARLEVGSTQLRTAGSCSHSFKRSFLEMSI

SEQ ID NO: 1007 - protein, 52 aa, Homo Sapiens
  misc_feature (1)..(1): Xaa can be any naturally occurring amino acid
XYADARLEVGSTQLRTAGSCSHSFKRSFLGLRKKTNPSSQVSDWRAPWKVSQ

SEQ ID NO: 1008 - protein, 52 aa, Homo Sapiens; identical to SEQ ID NO: 1007
  misc_feature (1)..(1): Xaa can be any naturally occurring amino acid

SEQ ID NO: 1009 - protein, 37 aa, Homo Sapiens
  misc_feature (1)..(1): Xaa can be any naturally occurring amino acid
XYADARLEVGSTQLRTAGSCSHSFKRSFLGQKDPALV

SEQ ID NO: 1010 - protein, 116 aa, Homo Sapiens
MAAGSAPMQLHLRATIRMKDGLCVPRKWIYHLTEGSTDLRTEGRPDMKTELFSSSCPGGIMLNETGQGYQRFLLYNRSPHPPEKCVEEFKSLTSCLDSKAFLLTPRNQEACELSNN

SEQ ID NO: 1011 - protein, 129 aa, Homo Sapiens
MAAGSAPMQLHLRATIRMKDGLCVPRKWIYHLTEGSTDLRTEGRPDMKTELFSSSCPGGIMLNETGQGYQRFLLYNRSPHPPEKCVEEFKSLTSCLDSKAFLLTPRNQGKGLKSHKTGLGLTKSSGVTG

SEQ ID NO: 1012 - protein, 188 aa, Homo Sapiens
MFHQIWAALLYFYGIILNSIYQCPEHSQLTTLGVDGKEFPEVHLGQWYFIAGAAPTKEELATFDPVDNIVFNMAAGSAPMQLHLRATIRMKDGLCVPRKWIYHLTEGSTDLRTEGRPDMKTELFSSSCPGGIMLNETGQGYQRFLLYNRSPHPPEKCVEEFKSLTSCLDSKAFLLTPRNQEACELSNN

SEQ ID NO: 1013 - protein, 268 aa, Homo Sapiens
MAAIRMGKLTTMPAGLIYASVSVHAAKQEESKKQLVKPEQLPIYTAPPLQSKYVEEQPGHLQMGFASIRTATGCYIGWCKGVYVFVKNGIMDTVQFGKDAYVYLKNPPRDFLPKMGVITVSGLAGLVSARKGSKFKKITYPLGLATLGATVCYPVQSVIIAKVTAKKVYATSQQIFGAVKSLWTKSSKEESLPKPKEKTKLGSSSEIEVPAKTTHVLKHSVPLPTELSSEAKTKSESTSGATQFMPDPKLMDHGQSHPEDIDMYSTRS

SEQ ID NO: 1014 - protein, 263 aa, Homo Sapiens [sequence omitted]

SEQ ID NO: 1015 - protein, 268 aa, Homo Sapiens [sequence omitted]

SEQ ID NO: 1016 - protein, 552 aa, Homo Sapiens
MAECNLVAILISSIDNPLDKNLDNGGNSCLDFRPLNSFSQPQVLLAAAVCTKAGKAIVSRQFVEMTRTRIEGLLAAFPKLMNTGKQHTFVETESVRYVYQPMEKLYMVLITTKNSNILEDLETLRLFSRVIPEYCRALEENEISEHCFDLIFAFDEIVALGYRENVNLAQIRTFTEMDSHEEKVFRAVRETQEREAKAEMRRKAKELQQARRDAERQGKKAPGFGGFGSSAVSGGSTAAMITETIIETDKPKVAPAPARPSGPSKALKLGAKGKEVDNFVDKLKSEGETIMSSSMGKRTSEATKMHAPPINMESVHMKIEEKITLTCGRDGGLQNMELHGMIMLRISDDKYGRIRLHVENEDKKGVQLQTHPNVDKKLFTAESLIGLKNPEKSFPVNSDVGVLKWRLQTTEESFIPLTINCWPSESGNGCDVNIEYELQEDNLELNDVVITIPLPSGVGAPVIGEIDGEYRHDSRRNTLEWCLPVIDAKNKSGSLEFSIAGQPNDFFPVQVSFVSKKNYCNIQVTKVTQVDGNSPVRFSTETTFLVDKYEIL

SEQ ID NO: 1017 - protein, 423 aa, Homo Sapiens
MIPEYCRALEENEISEHCFDLIFAFDEIVALGYRENVNLAQIRTFTEMDSHEEKVFRAVRETQEREAKAEMRRKAKELQQARRDAERQGKKAPGFGGFGSSAVSGGSTAAMITETIIETDKPKVAPAPARPSGPSKALKLGAKGKEVDNFVDKLKSEGETIMSSSMGKRTSEATKMHAPPINMESVHMKIEEKITLTCGRDGGLQNMELHGMIMLRISDDKYGRIRLHVENEDKKGVQLQTHPNVDKKLFTAESLIGLKNPEKSFPVNSDVGVLKWRLQTTEESFIPLTINCWPSESGNGCDVNIEYELQEDNLELNDVVITIPLPSGVGAPVIGEIDGEYRHDSRRNTLEWCLPVIDAKNKSGSLEFSIAGQPNDFFPVQVSFVSKKNYCNIQVTKVTQVDGNSPVRFSTETTFLVDKYEIL

SEQ ID NO: 1018 - protein, 83 aa, Homo Sapiens
MVLLAAAVCTKAGKAIVSRQFVEMTRTRIEGLLAAFPKLMNTGKQHTFVETESIRMSSVLFPYQFIPSSLCQVVFLSGPVLPV

SEQ ID NO: 1019 - protein, 189 aa, Homo Sapiens
MVLLAAAVCTKAGKAIVSRQFVEMTRTRIEGLLAAFPKLMNTGKQHTFVETESVRYVYQPMEKLYMVLITTKNSNILEDLETLRLFSRVIPEYCRALEENEISEHCFDLIFAFDEIVALGYRENVNLAQIRTFTEMDSHEEKVFRAVRETQEREAKAEMRRKAKELQQAQSVGITGMSHHAQLLLYFNP

SEQ ID NO: 1020 - protein, 511 aa, Homo Sapiens
MVLLAAAVCTKAGKAIVSRQFVEMTRTRIEGLLAAFPKLMNTGKQHTFVETESVRYVYQPMEKLYMVLITTKNSNILEDLETLRLFSRVIPEYCRALEENEISEHCFDLIFAFDEIVALGYRENVNLAQIRTFTEMDSHEEKVFRAVRETQEREAKAEMRRKAKELQQARRDAERQGKKAPGFGGFGSSAVSGGSTAAMITETIIETDKPKVAPAPARPSGPSKALKLGAKGKEVDNFVDKLKSEGETIMSSSMGKRTSEATKMHAPPINMESVHMKIEEKITLTCGRDGGLQNMELHGMIMLRISDDKYGRIRLHVENEDKKGVQLQTHPNVDKKLFTAESLIGLKNPEKSFPVNSDVGVLKWRLQTTEESFIPLTINCWPSESGNGCDVNIEYELQEDNLELNDVVITIPLPSGVGAPVIGEIDGEYRHDSRRNTLEWCLPVIDAKNKSGSLEFSIAGQPNDFFPVQVSFVSKKNYCNIQVTKVTQVDGNSPVRFSTETTFLVDKYEIL

SEQ ID NO: 1021 - protein, 256 aa, Homo Sapiens
MKPALCLVAMGALVMDSSPQCTKQLLSERFGRGSRTVDLELELQIELLRETKRKYESVLQLGRALTAHLYSLLQTQHALGDAFADLSQKSPELQEEFGYNAETQKLLCKNGETLLGAVNFFVSSINTLVTKTMEDTLMTVKQYEAARLEYDAYRTDLEELSLGPRDAGTRGRLESAQATFQAHRDKYEKLRGDVAIKLKFLEENKIKVMHKQLLLFHNAVSAYFAGNQKQLEQTLQQFNIKLRPPGAEKPSWLEEQ

SEQ ID NO: 1022 - protein, 374 aa, Homo Sapiens
MTDGILGKAATMEIPIHGNGEARQLPEDDGLEQDLQQVMVSGPNLNETSIVSGGYGGSGDGLIPTGKSISCARREVWVGPQRCLVYLREAGVRELDPLGSGRHPSHSTTPSGPGDEVARGIAGEKFDIVKKWGINTYKCTKQLLSERFGRGSRTVDLELELQIELLRETKRKYESVLQLGRALTAHLYSLLQTQHALGDAFADLSQKSPELQEEFGYNAETQKLLCKNGETLLGAVNFFVSSINTLVTKTMEDTLMTVKQYEAARLEYDAYRTDLEELSLGPRDAGTRGRLESAQATFQAHRDKYEKLRGDVAIKLKFLEENKIKVMHKQLLLFHNAVSAYFAGNQKQLEQTLQQFNIKLRPPGAEKPSWLEEQ

SEQ ID NO: 1023 - protein, 159 aa, Homo Sapiens
MTDGILGKAATMEIPIHGNGEARQLPEDDGLEQDLQQVMVSGPNLNETSIVSGGYGGSGDGLIPTGSGRHPSHSTTPSGPGDEVARGIAGEKFDIVKKWGINTYKCTKQLLSERFGRGSRTVDLELELQIELLRETKRKRNLATMQRHRNYYARMGKRC

SEQ ID NO: 1024 - protein, 341 aa, Homo Sapiens
MTDGILGKAATMEIPIHGNGEARQLPEDDGLEQDLQQVMVSGPNLNETSIVSGGYGGSGDGLIPTGSGRHPSHSTTPSGPGDEVARGIAGEKFDIVKKWGINTYKCTKQLLSERFGRGSRTVDLELELQIELLRETKRKYESVLQLGRALTAHLYSLLQTQHALGDAFADLSQKSPELQEEFGYNAETQKLLCKNGETLLGAVNFFVSSINTLVTKTMEDTLMTVKQYEAARLEYDAYRTDLEELSLGPRDAGTRGRLESAQATFQAHRDKYEKLRGDVAIKLKFLEENKIKVMHKQLLLFHNAVSAYFAGNQKQLEQTLQQFNIKLRPPGAEKPSWLEEQ

SEQ ID NO: 1025 - protein, 341 aa, Homo Sapiens; identical to SEQ ID NO: 1024

SEQ ID NO: 1026 - protein, 202 aa, Homo Sapiens
MTDGILGKAATMEIPIHGNGEARQLPEDDGLEQDLQQVMVSGPNLNETSIVSGGYGGSGDGLIPTGSGRHPSHSTTPSGPGDEVARGIAGEKFDIVKKWGINTYKCTKQLLSERFGRGSRTVDLELELQIELLRETKRKYESVLQLGRALTAHLYSLLQTQHALGDAFADLSQKSPELQPTGRTPSGWAQPYPQQHSPVEAA

SEQ ID NO: 1027 - protein, 303 aa, Homo Sapiens
MVSGPNLNETSIVSGGYGGSGDGLIPTGSGRHPSHSTTPSGPGDEVARGIAGEKFDIVKKWGINTYKCTKQLLSERFGRGSRTVDLELELQIELLRETKRKYESVLQLGRALTAHLYSLLQTQHALGDAFADLSQKSPELQEEFGYNAETQKLLCKNGETLLGAVNFFVSSINTLVTKTMEDTLMTVKQYEAARLEYDAYRTDLEELSLGPRDAGTRGRLESAQATFQAHRDKYEKLRGDVAIKLKFLEENKIKVMHKQLLLFHNAVSAYFAGNQKQLEQTLQQFNIKLRPPGAEKPSWLEEQ

SEQ ID NO: 1028 - protein, 535 aa, Homo Sapiens
MAWILDCLFASAFEPRPRRVSVLGGAPGHNPDRRTKMVSIHSLSELERLKLQETAYHELVARHFLSEFKPDRALPIDRPNTLDKWFLILRGQQRAVSHKTFGISLEEVLVNEFTRRKHLELTATMQVEEATGQAAGRRRGNVVRRVFGRIRRFFSRRRNEPTLPREFTRRGRRGAVSVDSLAELEDGALLLQTLQLSKISFPIGQRLLGSKRKMSLNPIAKQIPQVVEACCQFIEKHGLSAVGIFTLEYSVQRVRQLREEFDQGLDVVLDDNQNVHDVAALLKEFFRDMKDSLLPDDLYMSFLLTATLKPQDQLSALQLLVYLMPPCHSDTLERLLKALHKITENCEDSIGIDGQLVPGNRMTSTNLALVFGSALLKKGKFGKRESRKTKLGIDHYVASVNVVRAMIDNWDVLFQVPPHIQRQVAKRVWKSSPEALDFIRRRNLRKIQSARIKMEEDALLSDPVETSAEARAAVLAQSKPSDEGSSEEPAVPSGTARSHDDEEGAGNPPIPEQDRPLLRVPREKEAKTGVSYFFP

SEQ ID NO: 1029 - protein, 547 aa, Homo Sapiens
MGGCIPFLKAARALCPRIMPPLLLLSAFIFLVSVLGGAPGHNPDRRTKMVSIHSLSELERLKLQETAYHELVARHFLSEFKPDRALPIDRPNTLDKWFLILRGQQRAVSHKTFGISLEEVLVNEFTRRKHLELTATMQVEEATGQAAGRRRGNVVRRVFGRIRRFFSRRRNEPTLPREFTRRGRRGAVSVDSLAELEDGALLLQTLQLSKISFPIGQRLLGSKRKMSLNPIAKQIPQVVEACCQFIEKHGLSAVGIFTLEYSVQRVRQLREEFDQGLDVVLDDNQNVHDVAALLKEFFRDMKDSLLPDDLYMSFLLTATLKPQDQLSALQLLVYLMPPCHSDTLERLLKALHKITENCEDSIGIDGQLVPGNRMTSTNLALVFGSALLKKGKFGKRESRKTKLGIDHYVASVNVVRAMIDNWDVLFQVPPHIQRQVAKRVWKSSPEALDFIRRRNLRKIQSARIKMEEDALLSDPVETSAEARAAVLAQSKPSDEGSSEEPAVPSGTARSHDDEEGAGNPPIPEQDRPLLRVPREKEAKTGVSYFFP

SEQ ID NO: 1030 - protein, 411 aa, Homo Sapiens
MQVEEATGQAAGRRRGNVVRRVFGRIRRFFSRRRNEPTLPREFTRRGRRGAVSVDSLAELEDGALLLQTLQLSKISFPIGQRLLGSKRKMSLNPIAKQIPQVVEACCQFIEKHGLSAVGIFTLEYSVQRVRQLREEFDQGLDVVLDDNQNVHDVAALLKEFFRDMKDSLLPDDLYMSFLLTATLKPQDQLSALQLLVYLMPPCHSDTLERLLKALHKITENCEDSIGIDGQLVPGNRMTSTNLALVFGSALLKKGKFGKRESRKTKLGIDHYVASVNVVRAMIDNWDVLFQVPPHIQRQVAKRVWKSSPEALDFIRRRNLRKIQSARIKMEEDALLSDPVETSAEARAAVLAQSKPSDEGSSEEPAVPSGTARSHDDEEGAGNPPIPEQDRPLLRVPREKEAKTGVSYFFP

SEQ ID NO: 1031 - protein, 411 aa, Homo Sapiens; identical to SEQ ID NO: 1030

SEQ ID NO: 1032 - protein, 516 aa, Homo Sapiens
MSVLGGAPGHNPDRRTKMVSIHSLSELERLKLQETAYHELVARHFLSEFKPDRALPIDRPNTLDKWFLILRGQQRAVSHKTFGISLEEVLVNEFTRRKHLELTATMQVEEATGQAAGRRRGNVVRRVFGRIRRFFSRRRNEPTLPREFTRRGRRGAVSVDSLAELEDGALLLQTLQLSKISFPIGQRLLGSKRKMSLNPIAKQIPQVVEACCQFIEKHGLSAVGIFTLEYSVQRVRQLREEFDQGLDVVLDDNQNVHDVAALLKEFFRDMKDSLLPDDLYMSFLLTATLKPQDQLSALQLLVYLMPPCHSDTLERLLKALHKITENCEDSIGIDGQLVPGNRMTSTNLALVFGSALLKKGKFGKRESRKTKLGIDHYVASVNVVRAMIDNWDVLFQVPPHIQRQVAKRVWKSSPEALDFIRRRNLRKIQSARIKMEEDALLSDPVETSAEARAAVLAQSKPSDEGSSEEPAVPSGTARSHDDEEGAGNPPIPEQDRPLLRVPREKEAKTGVSYFFP

SEQ ID NO: 1033 - protein, 218 aa, Homo Sapiens
MVSIHSLSELERLKLQETAYHELVARHFLSEFKPDRALPIDRPNTLDKWFLILRGQQRAVSHKTFGISLEEVLVNEFTRRKHLELTATMQVEEATGQAAGRRRGNVVRRVFGRIRRFFSRRRNEPTLPREFTRRGRRGAVSVDSLAELEDGALLLQTLQLSKISFPIGQRLLGSKRKMSLNPIAKQIPQVVEACCQFIEKHGLSAVGIFTLEYSVQRV

SEQ ID NO: 1034 - protein, 78 aa, Homo Sapiens
GRQDGSESEAVAVALAGRLRELLRDLPPENRASLQYLLRHLRRPASSRLSSSTTAWSSRRSRRRPPGARTSHPTSELR

SEQ ID NO: 1035 - protein, 1019 aa, Homo Sapiens
MCICGTAHPVLDEGPVRCRAGPRDLLEARRPRAHECLGEALRVMHQIISKYPLLNTVETLTAAGTLIAKVKAFHYESNNDLEKQEFEKALETIAVAFSSTVSEFLMGEVDSSTLLAVPPGDSSQSMESLYGPGSEGTPPSLEDCDAGCLPAEEVDVLLQRCEGGVDAALLYAKNMAKYMKDLISYLEKRTTLEMEFAKGLQKIAHNCRQSVMQEPHMPLLSIYSLALEQDLEFGHSMVQAVGTLQTQTFMQPLTLRRLEHEKRRKEIKEAWHRAQRKLQEAESNLRKAKQGYVQRCEDHDKARFLVAKAEEEQAGSAPGAGSTATKTLDKRRRLEEEAKNKAEEAMATYRTCVADAKTQKQELEDTKVTALRQIQEVIRQSDQTIKSATISYYQMMHMQTAPLPVHFQMLCESSKLYDPGQQYASHVRQLQRDQEPDVHYDFEPHVSANAWSPVMRARKSSFNVSDVARPEAAGSPPEEGGCTEGTPAKDHRAGRGHQVHKSWPLSISDSDSGLDPGPGAGDFKKFERTSSSGTMSSTEELVDPDGGAGASAFEQADLNGMTPELPVAVPSGPFRHEGLSKAARTHRLRKLRTPAKCRECNSYVYFQGAECEECCLACHKKCLETLAIQCGHKKLQGRLQLFGQDFSHAARSAPDGVPFIVKKCVCEIERRALRTKGIYRVNGVKTRVEKLCQAFENGKELVELSQASPHDISNVLKLYLRQLPEPLISFRLYHELVGLAKDSLKAEAEAKAASRGRQDGSESEAVAVALAGRLRELLRDLPPENRASLQYLLRHLRRIVEVEQDNKMTPGNLGIVFGPTLLRPRPTEATVSLSSLVDYPHQARVIETLIVHYGLVFEEEPEETPGGQDESSNQRAEVVVQVPYLEAGEAVVYPLQEAAADGCRESRVVSNDSDSDLEEASELLSSSEASALGHLSFLEQQQSEASLEVASGSHSGSEEQLEATAREDGDGDEDGPAQQLSGFNTNQSNNVLQAPLPPMRLRGGRMTLGSCRERQPEFV

SEQ ID NO: 1036 - protein, 1136 aa, Homo Sapiens
MFSRKKRELMKTPSISKKNRAGSPSPQPSGELPRKDGADAVFPGPSLEPPAGSSGVKATGTLKRPTSLSRHASAAGFPLSGAASWTLGRSHRSPLTAASPGELPTEGAGPDVVEDISHLLADVARFAEGLEKLKECVLRDDLLEARRPRAHECLGEALRVMHQIISKYPLLNTVETLTAAGTLIAKVKAFHYESNNDLEKQEFEKALETIAVAFSSTVSEFLMGEVDSSTLLAVPPGDSSQSMESLYGPGSEGTPPSLEDCDAGCLPAEEVDVLLQRCEGGVDAALLYAKNMAKYMKDLISYLEKRTTLEMEFAKGLQKIAHNCRQSVMQEPHMPLLSIYSLALEQDLEFGHSMVQAVGTLQTQTFMQPLTLRRLEHEKRRKEIKEAWHRAQRKLQEAESNLRKAKQGYVQRCEDHDKARFLVAKAEEEQAGSAPGAGSTATKTLDKRRRLEEEAKNKAEEAMATYRTCVADAKTQKQELEDTKVTALRQIQEVIRQSDQTIKSATISYYQMMHMQTAPLPVHFQMLCESSKLYDPGQQYASHVRQLQRDQEPDVHYDFEPHVSANAWSPVMRARKSSFNVSDVARPEAAGSPPEEGGCTEGTPAKDHRAGRGHQVHKSWPLSISDSDSGLDPGPGAGDFKKFERTSSSGTMSSTEELVDPDGGAGASAFEQADLNGMTPELPVAVPSGPFRHEGLSKAARTHRLRKLRTPAKCRECNSYVYFQGAECEECCLACHKKCLETLAIQCGHKKLQGRLQLFGQDFSHAARSAPDGVPFIVKKCVCEIERRALRTKGIYRVNGVKTRVEKLCQAFENGKELVELSQASPHDISNVLKLYLRQLPEPLISFRLYHELVGLAKDSLKAEAEAKAASRGRQDGSESEAVAVALAGRLRELLRDLPPENRASLQYLLRHLRRIVEVEQDNKMTPGNLGIVFGPTLLRPRPTEATVSLSSLVDYPHQARVIETLIVHYGLVFEEEPEETPGGQDESSNQRAEVVVQVPYLEAGEAVVYPLQEAAADGCRESRVVSNDSDSDLEEASELLSSSEASALGHLSFLEQQQSEASLEVASGSHSGSEEQLEATAREDGDGDEDGPAQQLSGFNTNQSNNVLQAPLPPMRLRGGRMTLGSCRERQPEFV

SEQ ID NO: 1037 - protein, 1163 aa, Homo Sapiens
MFSRKKRELMKTPSISKKNRAGSPSPQPSGPHFISGETEAVSRPENPFNELPSDLPKELPRKDGADAVFPGPSLEPPAGSSGVKATGTLKRPTSLSRHASAAGFPLSGAASWTLGRSHRSPLTAASPGELPTEGAGPDVVEDISHLLADVARFAEGLEKLKECVLRDDLLEARRPRAHECLGEALRVMHQIISKYPLLNTVETLTAAGTLIAKVKAFHYESNNDLEKQEFEKALETIAVAFSSTVSEFLMGEVDSSTLLAVPPGDSSQSMESLYGPGSEGTPPSLEDCDAGCLPAEEVDVLLQRCEGGVDAALLYAKNMAKYMKDLISYLEKRTTLEMEFAKGLQKIAHNCRQSVMQEPHMPLLSIYSLALEQDLEFGHSMVQAVGTLQTQTFMQPLTLRRLEHEKRRKEIKEAWHRAQRKLQEAESNLRKAKQGYVQRCEDHDKARFLVAKAEEEQAGSAPGAGSTATKTLDKRRRLEEEAKNKAEEAMATYRTCVADAKTQKQELEDTKVTALRQIQEVIRQSDQTIKSATISYYQMMHMQTAPLPVHFQMLCESSKLYDPGQQYASHVRQLQRDQEPDVHYDFEPHVSANAWSPVMRARKSSFNVSDVARPEAAGSPPEEGGCTEGTPAKDHRAGRGHQVHKSWPLSISDSDSGLDPGPGAGDFKKFERTSSSGTMSSTEELVDPDGGAGASAFEQADLNGMTPELPVAVPSGPFRHEGLSKAARTHRLRKLRTPAKCRECNSYVYFQGAECEECCLACHKKCLETLAIQCGHKKLQGRLQLFGQDFSHAARSAPDGVPFIVKKCVCEIERRALRTKGIYRVNGVKTRVEKLCQAFENGKELVELSQASPHDISNVLKLYLRQLPEPLISFRLYHELVGLAKDSLKAEAEAKAASRGRQDGSESEAVAVALAGRLRELLRDLPPENRASLQYLLRHLRRIVEVEQDNKMTPGNLGIVFGPTLLRPRPTEATVSLSSLVDYPHQARVIETLIVHYGLVFEEEPEETPGGQDESSNQRAEVVVQVPYLEAGEAVVYPLQEAAADGCRESRVVSNDSDSDLEEASELLSSSEASALGHLSFLEQQQSEASLEVASGSHSGSEEQLEATAREDGDGDEDGPAQQLSGFNTNQSNNVLQAPLPPMRLRGGRMTLGSCRERQPEFV

SEQ ID NO: 1038 - protein, 60 aa, Homo Sapiens
MFSRKKRELMKTPSISKKNRAGSPSPQPSGTSLRPAARGPTSAWVRLCVSCIRSSPSTRC

SEQ ID NO: 1039 - protein, 771 aa, Homo Sapiens
MGVGRKGGAGETESHPRIGLELASWLPHPQQEAESNLRKAKQGYVQRCEDHDKARFLVAKAEEEQAGSAPGAGSTATKTLDKRRRLEEEAKNKAEEAMATYRTCVADAKTQKQELEDTKVTALRQIQEVIRQSDQTIKSATISYYQMMHMQTAPLPVHFQMLCESSKLYDPGQQYASHVRQLQRDQEPDVHYDFEPHVSANAWSPVMRARKSSFNVSDVARPEAAGSPPEEGGCTEGTPAKDHRAGRGHQVHKSWPLSISDSDSGLDPGPGAGDFKKFERTSSSGTMSSTEELVDPDGGAGASAFEQADLNGMTPELPVAVPSGPFRHEGLSKAARTHRLRKLRTPAKCRECNSYVYFQGAECEECCLACHKKCLETLAIQCGHKKLQGRLQLFGQDFSHAARSAPDGVPFIVKKCVCEIERRALRTKGIYRVNGVKTRVEKLCQAFENGKELVELSQASPHDISNVLKLYLRQLPEPLISFRLYHELVGLAKDSLKAEAEAKAASRGRQDGSESEAVAVALAGRLRELLRDLPPENRASLQYLLRHLRRIVEVEQDNKMTPGNLGIVFGPTLLRPRPTEATVSLSSLVDYPHQARVIETLIVHYGLVFEEEPEETPGGQDESSNQRAEVVVQVPYLEAGEAVVYPLQEAAADGCRESRVVSNDSDSDLEEASELLSSSEASALGHLSFLEQQQSEASLEVASGSHSGSEEQLEATAREDGDGDEDGPAQQLSGFNTNQSNNVLQAPLPPMRLRGGRMTLGSCRERQPEFV

SEQ ID NO: 1040 - protein, 1140 aa, Homo Sapiens
MLGRRLGARASYSPYRAGRQGPQQRGRDPGIQLTELPRKDGADAVFPGPSLEPPAGSSGVKATGTLKRPTSLSRHASAAGFPLSGAASWTLGRSHRSPLTAASPGELPTEGAGPDVVEDISHLLADVARFAEGLEKLKECVLRDDLLEARRPRAHECLGEALRVMHQIISKYPLLNTVETLTAAGTLIAKVKAFHYESNNDLEKQEFEKALETIAVAFSSTVSEFLMGEVDSSTLLAVPPGDSSQSMESLYGPGSEGTPPSLEDCDAGCLPAEEVDVLLQRCEGGVDAALLYAKNMAKYMKDLISYLEKRTTLEMEFAKGLQKIAHNCRQSVMQEPHMPLLSIYSLALEQDLEFGHSMVQAVGTLQTQTFMQPLTLRRLEHEKRRKEIKEAWHRAQRKLQEAESNLRKAKQGYVQRCEDHDKARFLVAKAEEEQAGSAPGAGSTATKTLDKRRRLEEEAKNKAEEAMATYRTCVADAKTQKQELEDTKVTALRQIQEVIRQSDQTIKSATISYYQMMHMQTAPLPVHFQMLCESSKLYDPGQQYASHVRQLQRDQEPDVHYDFEPHVSANAWSPVMRARKSSFNVSDVARPEAAGSPPEEGGCTEGTPAKDHRAGRGHQVHKSWPLSISDSDSGLDPGPGAGDFKKFERTSSSGTMSSTEELVDPDGGAGASAFEQADLNGMTPELPVAVPSGPFRHEGLSKAARTHRLRKLRTPAKCRECNSYVYFQGAECEECCLACHKKCLETLAIQCGHKKLQGRLQLFGQDFSHAARSAPDGVPFIVKKCVCEIERRALRTKGIYRVNGVKTRVEKLCQAFENGKELVELSQASPHDISNVLKLYLRQLPEPLISFRLYHELVGLAKDSLKAEAEAKAASRGRQDGSESEAVAVALAGRLRELLRDLPPENRASLQYLLRHLRRIVEVEQDNKMTPGNLGIVFGPTLLRPRPTEATVSLSSLVDYPHQARVIETLIVHYGLVFEEEPEETPGGQDESSNQRAEVVVQVPYLEAGEAVVYPLQEAAADGCRESRVVSNDSDSDLEEASELLSSSEASALGHLSFLEQQQSEASLEVASGSHSGSEEQLEATAREDGDGDEDGPAQQLSGFNTNQSNNVLQAPLPPMRLRGGRMTLGSCRERQPEFV

SEQ ID NO: 1041 - protein, 1152 aa, Homo Sapiens
MSRGQRVLKGLLGWVCTWTWAWRARLGARGCGLHVLCPRDLPLPPEELPRKDGADAVFPGPSLEPPAGSSGVKATGTLKRPTSLSRHASAAGFPLSGAASWTLGRSHRSPLTAASPGELPTEGAGPDVVEDISHLLADVARFAEGLEKLKECVLRDDLLEARRPRAHECLGEALRVMHQIISKYPLLNTVETLTAAGTLIAKVKAFHYESNNDLEKQEFEKALETIAVAFSSTVSEFLMGEVDSSTLLAVPPGDSSQSMESLYGPGSEGTPPSLEDCDAGCLPAEEVDVLLQRCEGGVDAALLYAKNMAKYMKDLISYLEKRTTLEMEFAKGLQKIAHNCRQSVMQEPHMPLLSIYSLALEQDLEFGHSMVQAVGTLQTQTFMQPLTLRRLEHEKRRKEIKEAWHRAQRKLQEAESNLRKAKQGYVQRCEDHDKARFLVAKAEEEQAGSAPGAGSTATKTLDKRRRLEEEAKNKAEEAMATYRTCVADAKTQKQELEDTKVTALRQIQEVIRQSDQTIKSATISYYQMMHMQTAPLPVHFQMLCESSKLYDPGQQYASHVRQLQRDQEPDVHYDFEPHVSANAWSPVMRARKSSFNVSDVARPEAAGSPPEEGGCTEGTPAKDHRAGRGHQVHKSWPLSISDSDSGLDPGPGAGDFKKFERTSSSGTMSSTEELVDPDGGAGASAFEQADLNGMTPELPVAVPSGPFRHEGLSKAARTHRLRKLRTPAKCRECNSYVYFQGAECEECCLACHKKCLETLAIQCGHKKLQGRLQLFGQDFSHAARSAPDGVPFIVKKCVCEIERRALRTKGIYRVNGVKTRVEKLCQAFENGKELVELSQASPHDISNVLKLYLRQLPEPLISFRLYHELVGLAKDSLKAEAEAKAASRGRQDGSESEAVAVALAGRLRELLRDLPPENRASLQYLLRHLRRIVEVEQDNKMTPGNLGIVFGPTLLRPRPTEATVSLSSLVDYPHQARVIETLIVHYGLVFEEEPEETPGGQDESSNQRAEVVVQVPYLEAGEAVVYPLQEAAADGCRESRVVSNDSDSDLEEASELLSSSEASALGHLSFLEQQQSEASLEVASGSHSGSEEQLEATAREDGDGDEDGPAQQLSGFNTNQSNNVLQAPLPPMRLRGGRMTLGSCRERQPEFV

SEQ ID NO: 1042 - protein, 170 aa, Homo Sapiens
MVGSTPHFGDPCAGSPGPGGRGDPDGRGDPDGQGPELPRKDGADAVFPGPSLEPPAGSSGVKATGTLKRPTSLSRHASAAGFPLSGAASWTLGRSHRSPLTAASPGELPTEGAGPDVVEDISHLLADVARFAEGLEKLKECVLRDDLLEARRPRAHECLGEALRVMHQII

SEQ ID NO: 1043 - protein, 601 aa, Homo Sapiens
LELYDLQILGTKPPMNSDTHRNFDPTATLRNQGDFTWNSMSGRSVRLRSVPIQSLSELERARLQEVAFYQLQQDCDLSCQITIPKDGQKRKKSLRKKLDSLGKEKNKDKEFIPQAFGMPLSQVIANDRAYKLKQDLQRDEQKDASDFVASLLPFGNKRQNKELSSSNSSLSSTSETPNESTSPNTPEPAPRARRRGAMSVDSITDLDDNQSRLLEALQLSLPAEAQSKKEKARDKKLSLNPIYRQVPRLVDSCCQHLEKHGLQTVGIFRVGSSKKRVRQLREEFDRGIDVSLEEEHSVHDVAALLKEFLRDMPDPLLTRELYTAFINTLLLEPEEQLGTLQLLIYLLPPCNCDTLHRLLQFLSIVARHADDNISKDGQEVTGNKMTSLNLATIFGPNLLHKQKSSDKEFSVQSSARAEESTAIIAVVQKMIENYEALFMVPPDLQNEVLISLLETDPDVVDYLLRRKASQSSSPDMLQSEVSFSVGGRHSSTDSNKASSGDISPYDNNSPVLSERSLLAMQEDAAPGGSEKLYRVPGQFMLVGHLSSSKSRESSPGPRLGKGNWSLASRRWPKQATLLLLHVAWCGALRTFSSSLPYLMFL

SEQ ID NO: 1044 - protein, 974 aa, Homo Sapiens
MSAQSLLHSVFSCSSPASSSAASAKGFSKRKLRQTRSLDPALIGGCGSDEAGAEGSARGATAGRLYSPSLPAESLGPRLASSSRGPPPRATRLPPPGPLCSSFSTPSTPQEKSPSGSFHFDYEVPLGRGGLKKSMAWDLPSVLAGPASSRSASSILCSSGGGPNGIFASPRRWLQQRKFQSPPDSRGHPYVVWKSEGDFTWNSMSGRSVRLRSVPIQSLSELERARLQEVAFYQLQQDCDLSCQITIPKDGQKRKKSLRKKLDSLGKEKNKDKEFIPQAFGMPLSQVIANDRAYKLKQDLQRDEQKDASDFVASLLPFGNKRQNKELSSSNSSLSSTSETPNESTSPNTPEPAPRARRRGAMSVDSITDLDDNQSRLLEALQLSLPAEAQSKKEKARDKKLSLNPIYRQVPRLVDSCCQHLEKHGLQTVGIFRVGSSKKRVRQLREEFDRGIDVSLEEEHSVHDVAALLKEFLRDMPDPLLTRELYTAFINTLLLEPEEQLGTLQLLIYLLPPCNCDTLHRLLQFLSIVARHADDNISKDGQEVTGNKMTSLNLATIFGPNLLHKQKSSDKEFSVQSSARAEESTAIIAVVQKMIENYEALFMVPPDLQNEVLISLLETDPDVVDYLLRRKASQSSSPDMLQSEVSFSVGGRHSSTDSNKASSGDISPYDNNSPVLSERSLLAMQEDAAPGGSEKLYRVPGQFMLVGHLSSSKSRESSPGPRLGKDLSEEPFDIWGTWHSTLKSGSKDPGMTGSSGDIFESSSLRAGPCSLSQGNLSPNWPRWQGSPAELDSDTQGARRTQAAAPATEGRAHPAVSRACSTPHVQVAGKAERPTARSEQYLTLSGAHDLSESELDVAGLQSRATPQCQRPHGSGRDDKRPPPPYPGPGKPAAAAAWIQGPPEGVETPTDQGGQAAEREQQVTQKKLSSANSLPAGEQDSPRLGDAGWLDWQRERWQIWELLSTDNPDALPETLV

SEQ ID NO: 1045 - protein, 765 aa, Homo Sapiens
MSAQSLLHSVFSCSSPASSSAASAKGFSKRKLRQTRSLDPALIGGCGSDEAGAEGSARGATAGRLYSPSLPAESLGPRLASSSRGPPPRATRLPPPGPLCSSFSTPSTPQEKSPSGSFHFDYEVPLGRGGLKKSMAWDLPSVLAGPASSRSASSILCSSGGGPNGIFASPRRWLQQRKFQSPPDSRGHPYVVWKSEGDFTWNSMSGRSVRLRSVPIQSLSELERARLQEVAFYQLQQDCDLSCQITIPKDGQKRKKSLRKKLDSLGKEKNKDKEFIPQAFGMPLSQVIANDRAYKLKQDLQRDEQKDASDFVASLLPFGNKRQNKELSSSNSSLSSTSETPNESTSPNTPEPAPRARRRGAMSVDSITDLDDNQSRLLEALQLSLPAEAQSKKEKARDKKLSLNPIYRQVPRLVDSCCQHLEKHGLQTVGIFRVGSSKKRVRQLREEFDRGIDVSLEEEHSVHDVAALLKEFLRDMPDPLLTRELYTAFINTLLLEPEEQLGTLQLLIYLLPPCNCDTLHRLLQFLSIVARHADDNISKDGQEVTGNKMTSLNLATIFGPNLLHKQKSSDKEFSVQSSARAEESTAIIAVVQKMIENYEALFMVPPDLQNEVLISLLETDPDVVDYLLRRKASQSSSPDMLQSEVSFSVGGRHSSTDSNKASSGDISPYDNNSPVLSERSLLAMQEDAAPGGSEKLYRVPGQFMLVGHLSSSKSRESSPGPRLGKGNWSLASRRWPKQATLLLLHVAWCGALRTFSSSLPYLMFL

SEQ ID NO: 1046 - protein, 690 aa, Homo Sapiens
MSAQSLLHSVFSCSSPASSSAASAKGFSKRKLRQTRSLDPALIGGCGSDEAGAEGSARGATAGRLYSPSLPAESLGPRLASSSRGPPPRATRLPPPGPLCSSFSTPSTPQEKSPSGSFHFDYEVPLGRGGLKKSMAWDLPSVLAGPASSRSASSILCSSGGGPNGIFASPRRWLQQRKFQSPPDSRGHPYVVWKSELELYDLQILGTKPPMNSDTHRNFDPTATLRNQGDFTWNSMSGRSVRLRSVPIQSLSELERARLQEVAFYQLQQDCDLSCQITIPKDGQKRKKSLRKKLDSLGKEKNKDKEFIPQAFGMPLSQVIANDRAYKLKQDLQRDEQKDASDFVASLLPFGNKRQNKELSSSNSSLSSTSETPNESTSPNTPEPAPRARRRGAMSVDSITDLDDNQSRLLEALQLSLPAEAQSKKEKARDKKLSLNPIYRQVPRLVDSCCQHLEKHGLQTVGIFRVGSSKKRVRQLREEFDRGIDVSLEEEHSVHDVAALLKEFLRDMPDPLLTRELYTAFINTLLLEPEEQLGTLQLLIYLLPPCNCDTLHRLLQFLSIVARHADDNISKDGQEVTGNKMTSLNLATIFGPNLLHKQKSSDKEFSVQSSARAEESTAIIAVVQKMIENYEALFMVPPDLQNEVLISLLETDPDVVDYLLRRKASQSSTSSVLPAAVQACPQYPASMFTP

SEQ ID NO: 1047 - protein, 771 aa, Homo Sapiens
MSGRSVRLRSVPIQSLSELERARLQEVAFYQLQQDCDLSCQITIPKDGQKRKKSLRKKLDSLGKEKNKDKEFIPQAFGMPLSQVIANDRAYKLKQDLQRDEQKDASDFVASLLPFGNKRQNKELSSSNSSLSSTSETPNESTSPNTPEPAPRARRRGAMSVDSITDLDDNQSRLLEALQLSLPAEAQSKKEKARDKKLSLNPIYRQVPRLVDSCCQHLEKHGLQTVGIFRVGSSKKRVRQLREEFDRGIDVSLEEEHSVHDVAALLKEFLRDMPDPLLTRELYTAFINTLLLEPEEQLGTLQLLIYLLPPCNCDTLHRLLQFLSIVARHADDNISKDGQEVTGNKMTSLNLATIFGPNLLHKQKSSDKEFSVQSSARAEESTAIIAVVQKMIENYEALFMVPPDLQNEVLISLLETDPDVVDYLLRRKASQSSSPDMLQSEVSFSVGGRHSSTDSNKASSGDISPYDNNSPVLSERSLLAMQEDAAPGGSEKLYRVPGQFMLVGHLSSSKSRESSPGPRLGKDLSEEPFDIWGTWHSTLKSGSKDPGMTGSSGDIFESSSLRAGPCSLSQGNLSPNWPRWQGSPAELDSDTQGARRTQAAAPATEGRAHPAVSRACSTPHVQVAGKAERPTARSEQYLTLSGAHDLSESELDVAGLQSRATPQCQRPHGSGRDDKRPPPPYPGPGKPAAAAAWIQGPPEGVETPTDQGGQAAEREQQVTQKKLSSANSLPAGEQDSPRLGDAGWLDWQRERWQIWELLSTDNPDALPETLV

SEQ ID NO: 1048 - protein, 771 aa, Homo Sapiens; identical to SEQ ID NO: 1047

SEQ ID NO: 1049 - protein, 1816 aa, Homo Sapiens
MLSVVHFLRSFFKTPEPGAHLPGEGEIEDNQLPTSPAEQVEQGWNQQTDRDDSETLSQQSESGSDTKTDPFESASDTESLSGYLPRGVFHPLRGTPVDIEAPWEYPDVSATGPPQEQHLTSVPGLHAKEELDLSPSLEDDSCKNGWRAFATVAGEQEAGHLWDCATSLERESLLAGVPRHTGCCLQRATDSSGPEPVQGVAVQDLRGLSSVSLQKSRSESYLGIPVVWPFLLWCCELGRSWPHIHNRARALVLPSRGPLDNTAPLGTRTKKESTLGPAGDTELLWSQPHSDVPCQPPLRTSCLLRTNRHHSAPETTGDKNRASPRLNCGHMRALVRAHSIAGFSPECPEDPVGQNVVKSGTHVKEGAKNERDPRIQNIPSPAPTQLSGPIPAFQSGAPHLQGPCKPGGFRLQRASQDTPSAGLLGENQLRQDSRSCLVASCLTSELVKLSAEEVPEPAECKSEQSPESRTQEPQGTQLAPRAADERETQKHLWGISVQAGNQTSNYTSKYVLSEESKSPTRAKFPRQPSSEGTQVWSGDLMGCLEVSDSSDAPETTQKSSAIDTSKAAEEAMVLDPNYREQALQGLSEFKAATVSHCGPGAEEGEQGPGGAGGRQLEPKAGGEASRGRGALIIVAVEQKGLQASRSNAGPVPETLPRDFPKERPESPLSTGETPCESPTRGKTPAGNECELPAAPIQGAGDGALQRVAQAAELGRVLVPQAASEETPSTEEPPGERLRGESRSSGSGERGPEEAPEGGAAAARGQRPRVPALEPPQPPRGLRKGAQEPGKRPTFSKVTSFRKGRPLATESPGGVPAPTTEGRRWGSSGPEGLPRENPPAAAGRDAPPLHHGDASAWPEFVPQAAGDRTAGPAGAGHTGTSGDLGSRGPSSESCNAKRLKTTEKKLRARLALAHKTFSNFIESIVLEKENTHERSPSSPKGEKEKSRLRQGSWRAFLKSKDAGSPKKPTLVSLPLGPEVLSPAETDSHCEERAEDKEGYVFSDHWAPPLASTPLSSSLVSPEHRRKSEPTIKCTATQEGGRYLPSGIFPEKSWLASPGSPRAQQAGIAHTLPSSSACCLAYENPGTPCRPTSPKPLSPRPSAQRMGLHYPGRGSAISMVSLGSYSYVDSSSGDPERPKIPKGQTSFLLSLQTLNQDEQKEESREGGQGPRGLGTVPWLRDLPGSENHMPWEEPAGEKPSCSHSQKAFHMEPAQKPCFTTDMVTWALLCISAETVRGEAPSQPRGIPHRSPVSVDDLWLEKTQRKKLQKQAHVERRLHIGAVHKDGVKCWRKTIITSPESLNLPRRSHPLSQSAPTGLNHMGWPEHTPGTAMPDGALDTAVCADEVGSEEDLYDDLHSSSHHYSHPGGGGEQLAINELISDGSVVCAEALWDHVTMDDQELGFKAGDVIEVMDATNREWWWGRVADGEGWFPASFVRLRVNQDEPADDDAPLAGNSGAEDGGAEAQSSKDQMRTNVINEILSTERDYIKHLRDICEQADFQIYSEYCNNHPNACVELSRLTKLSKYVYFFEACRLLQKMIDISLDGFLLTPVQKICKYPLQLAELLKYTHPQHRDFKDVEAALHAMKNVAQLINERKRRLENIDKIAQWQSSIEDWEGEDLLVRSSELIYSGELTRVTQPQAKSQQRMFFLFDHQLIYCKKDLLRRDVLYYKGRLDMDGLEVVDLEDGKDRDLHVSIKNAFRLHRGATGDSHLLCTRKPEQKQRWLKAFAREREQVQLDQETGFSITELQRKQAMLNASKQQVTGKPKAVGRPCYLTRQKHPALPSNRPQQQVLVLAEPRRKPSTFWHSISRLAPFRK

SEQ ID NO: 1050 - protein, 690 aa, Homo Sapiens
MPWEEPAGEKPSCSHSQKAFHMEPAQKPCFTTDMVTWALLCISAETVRGEAPSQPRGIPHRSPVSVDDLWLEKTQRKKLQKQAHVERRLHIGAVHKDGVKCWRKTIITSPESLNLPRRSHPLSQSAPTGLNHMGWPEHTPGTAMPDGALDTAVCADEVGSEEDLYDDLHSSSHHYSHPGGGGEQLAINELISDGSVVCAEALWDHVTMDDQELGFKAGDVIEVMDATNREWWWGRVADGEGWFPASFVRLRVNQDEPADDDAPLAGNSGAEDGGAEAQSSKDQMRTNVINEILSTERDYIKHLRDICEGYVRQCRKRADMFSEEQLRTIFGNIEDIYRCQKAFVKALEQRFNRERPHLSELGACFLEHQADFQIYSEYCNNHPNACVELSRLTKLSKYVYFFEACRLLQKMIDISLDGFLLTPVQKICKYPLQLAELLKYTHPQHRDFKDVEAALHAMKNVAQLINERKRRLENIDKIAQWQSSIEDWEGEDLLVRSSELIYSGELTRVTQPQAKSQQRMFFLFDHQLIYCKKDLLRRDVLYYKGRLDMDGLEVVDLEDGKDRDLHVSIKNAFRLHRGATGDSHLLCTRKPEQKQRWLKAFAREREQVQLDQETGFSITELQRKQAMLNASKQQVTGKPKAVGRPCYLTRQKHPALPSNRPQQQVLVLAEPRRKPSTFWHSISRLAPFRK

SEQ ID NO: 1051 - protein, 670 aa, Homo Sapiens
MPWEEPAGEKPSCSHSQKAFHMEPAQKPCFTTDMVTWALLCISAETVRGEAPSQPRGIPHRSPVSVDDLWLEKTQRKKLQKQAHVERRLHIGAVHKDGVKCWRKTIITSPESLNLPRRSHPLSQSAPTGLNHMGWPEHTPGTAMPDGALDTAVCADEVGSEEDLYDDLHSSSHHYSHPGGGGEQLAINELISDGSVVCAEALWDHVTMDDQELGFKAGDVIEVMDATNREWWWGRVADGEGWFPASFVRLRVNQDEPADDDAPLAGNSGAEDGGAEAQSSKDQMRTNVINEILSTERDYIKHLRDICEGYVRQCRKRADMFSEEQLRTIFGNIEDIYRCQKAFVKALEQRFNRERPHLSELGACFLEHQADFQIYSEYCNNHPNACVELSRLTKLSKYVYFFEACRLLQKMIDISLDGFLLTPVQKICKYPLQLAELLKYTHPQHRDFKDVEAALHAMKNVAQLINERKRRLENIDKIAQWQSSIEDWEGEDLLVRSSELIYSGELTRVTQPQAKSQQRMFFLFDHQLIYCKKDLLRRDVLYYKGRLDMDGLEVVDLEDGKDRDLHVSIKNAFRLHRGATGDSHLLCTRKPEQKQRWLKAFAREREQVQLDQETGFSITELQRKQAMLNASKQQVTGKPKGRRTAAPPPRLPGPYPADIIPFSEPQSQAS

SEQ ID NO: 1052 - protein, 630 aa, Homo Sapiens
MPWEEPAGEKPSCSHSQKAFHMEPAQKPCFTTDMVTWALLCISAETVRGEAPSQPRGIPHRSPVSVDDLWLEKTQRKKLQKQAHVERRLHIGAVHKDGVKCWRKTIITSPESLNLPRRSHPLSQSAPTGLNHMGWPEHTPGTAMPDGALDTAVCADEVGSEEDLYDDLHSSSHHYSHPGGGGEQLAINELISDGSVVCAEALWDHVTMDDQELGFKAGDVIEVMDATNREWWWGRVADGEGWFPASFVRLRVNQDEPADDDAPLAGNSGAEDGGAEAQSSKDQMRTNVINEILSTERDYIKHLRDICEQADFQIYSEYCNNHPNACVELSRLTKLSKYVYFFEACRLLQKMIDISLDGFLLTPVQKICKYPLQLAELLKYTHPQHRDFKDVEAALHAMKNVAQLINERKRRLENIDKIAQWQSSIEDWEGEDLLVRSSELIYSGELTRVTQPQAKSQQRMFFLFDHQLIYCKKDLLRRDVLYYKGRLDMDGLEVVDLEDGKDRDLHVSIKNAFRLHRGATGDSHLLCTRKPEQKQRWLKAFAREREQVQLDQETGFSITELQRKQAMLNASKQQVTGKPKAVGRPCYLTRQKHPALPSNRPQQQVLVLAEPRRKPSTFWHSISRLAPFRK

SEQ ID NO: 1053 - protein, 192 aa, Homo Sapiens
MPWEEPAGEKPSCSHSQKAFHMEPAQKPCFTTDMVTWALLCISAETVRGEAPSQPRGIPHRSPVSVDDLWLEKTQRKKLQKQAHVERRLHIGAVHKDGVKCWRKTIITSPESLNLPRRSHPLSQSAPTGLNHMGWPEHTPGTAVGRPCYLTRQKHPALPSNRPQQQVLVLAEPRRKPSTFWHSISRLAPFRK

SEQ ID NO: 1054 - protein, 517 aa, Homo Sapiens
MRGAVSRSWSLESLRSATAAMPDGALDTAVCADEVGSEEDLYDDLHSSSHHYSHPGGGGEQLAINELISDGSVVCAEALWDHVTMDDQELGFKAGDVIEVMDATNREWWWGRVADGEGWFPASFVRLRVNQDEPADDDAPLAGNSGAEDGGAEAQSSKDQMRTNVINEILSTERDYIKHLRDICEGYVRQCRKRADMFSEEQLRTIFGNIEDIYRCQKAFVKALEQRFNRERPHLSELGACFLEHQADFQIYSEYCNNHPNACVELSRLTKLSKYVYFFEACRLLQKMIDISLDGFLLTPVQKICKYPLQLAELLKYTHPQHRDFKDVEAALHAMKNVAQLINERKRRLENIDKIAQWQSSIEDWEGEDLLVRSSELIYSGELTRVTQPQAKSQQRMFFLFDHQLIYCKKDLLRRDVLYYKGRLDMDGLEVVDLEDGKDRDLHVSIKNAFRLHRGATGDSHLLCTRKPEQKQRWLKAFAREREQVQLDQETGFSITELQRKQAMLNASKQQVTGKPK

SEQ ID NO: 1055 - protein, 619 aa, Homo Sapiens
MRPDGQQALDAVVRSFDCHSEAALRQRNDVIYCSLPRTAQGIVQREDQLEVLVSLREVWGRRRGRDGTCTGAMPDGALDTAVCADEVGSEEDLYDDLHSSSHHYSHPGGGGEQLAINELISDGSVVCAEALWDHVTMDDQELGFKAGDVIEVMDATNREWWWGRVADGEGWFPASFVRLRVNQDEPADDDAPLAGNSGAEDGGAEAQSSKDQMRTNVINEILSTERDYIKHLRDICEGYVRQCRKRADMFSEEQLRTIFGNIEDIYRCQKAFVKALEQRFNRERPHLSELGACFLEHQADFQIYSEYCNNHPNACVELSRLTKLSKYVYFFEACRLLQKMIDISLDGFLLTPVQKICKYPLQLAELLKYTHPQHRDFKDVEAALHAMKNVAQLINERKRRLENIDKIAQWQSSIEDWEGEDLLVRSSELIYSGELTRVTQPQAKSQQRMFFLFDHQLIYCKKDLLRRDVLYYKGRLDMDGLEVVDLEDGKDRDLHVSIKNAFRLHRGATGDSHLLCTRKPEQKQRWLKAFAREREQVQLDQETGFSITELQRKQAMLNASKQQVTGKPKAVGRPCYLTRQKHPALPSNRPQQQVLVLAEPRRKPSTFWHSISRLAPFRK

SEQ ID NO: 1056 - protein, 372 aa, Homo Sapiens
PLASTPLSSSLVSPEHRRKSEPTIKCTATQEGGRYLPSGIFPEKSWLASPGSPRAQQAGIAHTLPSSSACCLAYENPGTPCRPTSPKPLSPRPSAQRMGLHYPGRGSAISMVSLGSYSYVDSSSGDPERPKIPKGQTSFLLSLQTLNQDEQKEESREGGQGPRGLGTVPWLRDLPGSENHMPWEEPAGEKPSCSHSQKAFHMEPAQKPCFTTDMVTWALLCISAETVRGEAPSQPRGIPHRSPVSVDDLWLEKTQRKKLQKQAHVERRLHIGAVHKDGVKCWRKTIITSPESLNLPRRSHPLSQSAPTGLNHMGWPEHTPGTAVGRPCYLTRQKHPALPSNRPQQQVLVLAEPRRKPSTFWHSISRLAPFRK

SEQ ID NO: 1057 - protein, 287 aa, Homo Sapiens
  misc_feature (1)..(1): Xaa can be any naturally occurring amino acid
XACVELSRLTKLSKYVYFFEACRLLQKMIDISLDGFLLTPVQKICKYPLQLAELLKYTHPQHRDFKDVEAALHAMKNVAQLINERKRRLENIDKIAQWQSSIEDWEGEDLLVRSSELIYSGELTRVTQPQAKSQQRMFFLFDHQLIYCKKDLLRRDVLYYKGRLDMDGLEVVDLEDGKDRDLHVSIKNAFRLHRGATGDSHLLCTRKPEQKQRWLKAFAREREQVQLDQETGFSITELQRKQAMLNASKQQVTGKPKGRRTAAPPPRLPGPYPADIIPFSEPQSQAS

SEQ ID NO: 1058 - protein, 695 aa, Homo Sapiens
  misc_feature (1)..(1): Xaa can be any naturally occurring amino acid
XEGGQGPRGLGTVPWLRDLPGSENHMPWEEPAGEKPSCSHSQKAFHMEPAQKPCFTTDMVTWALLCISAETVRGEAPSQPRGIPHRSPVSVDDLWLEKTQRKKLQKQAHVERRLHIGAVHKDGVKCWRKTIITSPESLNLPRRSHPLSQSAPTGLNHMGWPEHTPGTAMPDGALDTAVCADEVGSEEDLYDDLHSSSHHYSHPGGGGEQLAINELISDGSVVCAEALWDHVTMDDQELGFKAGDVIEVMDATNREWWWGRVADGEGWFPASFVRLRVNQDEPADDDAPLAGNSGAEDGGAEAQSSKDQMRTNVINEILSTERDYIKHLRDICEGYVRQCRKRADMFSEEQLRTIFGNIEDIYRCQKAFVKALEQRFNRERPHLSELGACFLEHQADFQIYSEYCNNHPNACVELSRLTKLSKYVYFFEACRLLQKMIDISLDGFLLTPVQKICKYPLQLAELLKYTHPQHRDFKDVEAALHAMKNVAQLINERKRRLENIDKIAQWQSSIEDWEGEDLLVRSSELIYSGELTRVTQPQAKSQQRMFFLFDHQLIYCKKDLLRRDVLYYKGRLDMDGLEVVDLEDGKDRDLHVSIKNAFRLHRGATGDSHLLCTRKPEQKQRWLKAFAREREQVQLDQETGFSITELQRKQAMLNASKQQVTGKPKGRRTAAPPPRLPGPYPADIIPFSEPQSQAS

SEQ ID NO: 1059 - protein, 142 aa, Homo Sapiens
  misc_feature (1)..(1): Xaa can be any naturally occurring amino acid
XKKLRARLALAHKTFSNFIESIVLEKENTHERSPSSPKGEKEKSRLRQGSWRAFLKSKDAGSPKKPTLVSLPLGPEVLSPAETDSHCEERAEDKEGYVFSDHWAPPLASTPLSSSLVSPEHRRKSEPTIKCTATQEGDAKPR

SEQ ID NO: 1060 - protein, 173 aa, Homo Sapiens
MCLLLGATGVGKTLLVKRLQEVSSRDGKGDLGEPPPTRPTVGTNLTDIVAQRKITIRELGGCMGPIWSSYYGNCRSLLFVMDASDPTQLSASCVQLLGLLSAEQLAEASVLILFNKIDLPCYMSTEEMKSLIRLPDIIACAKQNITTAEISAREGTGLAGVLAWLQATHRAND

SEQ ID NO: 1061 - protein, 93 aa, Homo Sapiens
MDASDPTQLSASCVQLLGLLSAEQLAEASVLILFNKIDLPCYMSTEEMKSLIRLPDIIACAKQNITTAEISAREGTGLAGVLAWLQATHRAND

SEQ ID NO: 1062 - protein, 93 aa, Homo Sapiens; identical to SEQ ID NO: 1061

SEQ ID NO: 1063 - protein, 93 aa, Homo Sapiens; identical to SEQ ID NO: 1061

SEQ ID NO: 1064 - protein, 111 aa, Homo Sapiens
MGPIWSSYYGNCRSLLFVMDASDPTQLSASCVQLLGLLSAEQLAEASVLILFNKIDLPCYMSTEEMKSLIRLPDIIACAKQNITTAEISAREGTGLAGVLAWLQATHRAND

SEQ ID NO: 1065 - protein, 111 aa, Homo Sapiens; identical to SEQ ID NO: 1064

SEQ ID NO: 1066 - protein, 197 aa, Homo Sapiens
MRVAGGRALSRGAELRVPGGAKHGMCLLLGATGVGKTLLVKRLQEVSSRDGKGDLGEPPPTRPTVGTNLTDIVAQRKITIRELGGCMGPIWSSYYGNCRSLLFVMDASDPTQLSASCVQLLGLLSAEQLAEASVLILFNKIDLPCYMSTEEMKSLIRLPDIIACAKQNITTAEISAREGTGLAGVLAWLQATHRAND

SEQ ID NO: 1067 - protein, 197 aa, Homo Sapiens; identical to SEQ ID NO: 1066

SEQ ID NO: 1068 - protein, 48 aa, Homo Sapiens
VGTNLTDIVAQRKITIRELGGCMGPIWSSYYGNCRSLLACAADTSMEN

SEQ ID NO: 1069 - protein, 935 aa, Homo Sapiens
MAAAKPTLTDSLSFCLAQLAAAAGEALGGEKDPATNETPLSRALLALRTRHIKAAGGIERFRARGGLRPLLALLRRAAAAGSAPSQAGPGSAPSSAASGASSPAPASGPAPSAVSSSSPTPPVRLRKTLDLALSILADCCTEGACRTEVRRLGGILPLVTILQCMKTDSIQNRTARALGNLAMEPESCGDIHCAGAVPLLVESLTACQDSQCLQSVVRALRNLADSPQHRLALAQQGAVRPLAELLATAPDAALTLALVRALLELSRGCSRACAEQLSLGGGLGPLVSLASHPKRAVREGTILILANLCAQGLIRPALGNAGGVEVLVDELRQRRDPNGASPTSQQPLVRAVCLLCREAINRARLRDAGGLDLLMGLLRDPRASAWHPRIVAALVGFLYDTGALGRLQALGLVPLLAGQLCGEAGEEEEEGREAASWDFPEERTPERAQGGSFRSLRSWLISEGYATGPDDISPDWSPEQCPPEPMEPASPAPTPTSLRAPRTQRTPGRSPAAAIEEPWGREGPALLLLSRFSQAPDPSGALVTGPALYGLLTYVTGAPGPPSPRALRILSRLTCNPACLEAFVRSYGAALLRAWLVLGVAPDDWPAPRARPTLHSRHRELGERLLQNLTVQAESPFGVGALTHLLLSGSPEDRVACALTLPFICRKPSLWRRLLLEQGGLRLLLAALTRPAPHPLFLFFAADSLSCLQDLVSPTVSPAVPQAVPMDLDSPSPCLYEPLLGPAPVPAPDLHFLLDSGLQLPAQRAASATASPFFRALLSGSFAEAQMDLVPLRGLSPGAAWPVLHHLHGCRGCGAALGPVPPPGQPLLGSEAEEALEAAGRFLLPGLEEELEEAVGRIHLGPQGGPESVGEVFRLGRPRLAAHCARWTLGSEQCPRKRGLALVGLVEAAGEEAGPLTEALLAVVMGIELGARVPA

SEQ ID NO: 1070 - protein, 935 aa, Homo Sapiens; identical to SEQ ID NO: 1069

SEQ ID NO: 1071 - protein, 725 aa, Homo Sapiens
MAAAKPTLTDSLSFCLAQLAAAAGEALGGEKDPATNETPLSRALLALRTRHIKAAGGIERFRARGGLRPLLALLRRAAAAGSAPSQAGPGSAPSSAASGASSPAPASGPAPSAVSSSSPTPPVRLRKTLDLALSILADCCTEGACRTEVRRLGGILPLVTILQCMKTDSIQNRTARALGNLAMEPESCGDIHCAGAVPLLVESLTACQDSQCLQSVVRALRNLADSPQHRLALAQQGAVRPLAELLATAPDAALTLALVRALLELSRGCSRACAEQLSLGGGLGPLVSLASHPKRAVREGTILILANLCAQGLIRPALGNAGGVEVLVDELRQRRDPNGASPTSQQPLVRAVCLLCREAINRARLRDAGGLDLLMGLLRDPRASAWHPRIVAALVGFLYDTGALGRLQALGLVPLLAGQLCGEAGEEEEEGREAASWDFPEERTPERAQGGSFRSLRSWLISEGYATGPDDISPDWSPEQCPPEPMEPASPAPTPTSLRAPRTQRTPGRSPAAAIEEPWGREGPALLLLSRFSQAPDPSGALVTGPALYGLLTYVTGAPGPPSPRALRILSRLTCNPACLEAFVRSYGAALLRAWLVLGVAPDDWPAPRARPTLHSRHRELGEFPYPPVSLPPCESPSSPMASMGPEPHLPTHLSSPARPPDNLSPEWGGEQGVPVPPWAHRQSSAVSSALALGPRYPNSRCSPAPRIWAGLCFFPGSAIGSALS

SEQ ID NO: 1072 - protein, 771 aa, Homo Sapiens
MKTDSIQNRTARALGNLAMEPESCGDIHCAGAVPLLVESLTACQDSQCLQSVVRALRNLADSPQHRLALAQQGAVRPLAELLATAPDAALTLALVRALLELSRGCSRACAEQLSLGGGLGPLVSLASHPKRAVREGTILILANLCAQGLIRPALGNAGGVEVLVDELRQRRDPNGASPTSQQPLVRAVCLLCREAINRARLRDAGGLDLLMGLLRDPRASAWHPRIVAALVGFLYDTGALGRLQALGLVPLLAGQLCGEAGEEEEEGREAASWDFPEERTPERAQGGSFRSLRSWLISEGYATGPDDISPDWSPEQCPPEPMEPASPAPTPTSLRAPRTQRTPGRSPAAAIEEPWGREGPALLLLSRFSQAPDPSGALVTGPALYGLLTYVTGAPGPPSPRALRILSRLTCNPACLEAFVRSYGAALLRAWLVLGVAPDDWPAPRARPTLHSRHRELGERLLQNLTVQAESPFGVGALTHLLLSGSPEDRVACALTLPFICRKPSLWRRLLLEQGGLRLLLAALTRPAPHPLFLFFAADSLSCLQDLVSPTVSPAVPQAVPMDLDSPSPCLYEPLLGPAPVPAPDLHFLLDSGLQLPAQRAASATASPFFRALLSGSFAEAQMDLVPLRGLSPGAAWPVLHHLHGCRGCGAALGPVPPPGQPLLGSEAEEALEAAGRFLLPGLEEELEEAVGRIHLGPQGGPESVGEVFRLGRPRLAAHCARWTLGSEQCPRKRGLALVGLVEAAGEEAGPLTEALLAVVMGIELGARVPA

SEQ ID NO: 1073 - protein, 1030 aa, Homo Sapiens
MVTLGAGVRLFTGVYPVVLNQIRATSEASAITRTTMPAPELTSTSRAEDTRDTGVQLRKRKIPQARHSRKRQRTFSFRSLGSAARSGAESEARAKMAAAKPTLTDSLSFCLAQLAAAAGEALGGEKDPATNETPLSRALLALRTRHIKAAGGIERFRARGGLRPLLALLRRAAAAGSAPSQAGPGSAPSSAASGASSPAPASGPAPSAVSSSSPTPPVRLRKTLDLALSILADCCTEGACRTEVRRLGGILPLVTILQCMKTDSIQNRTARALGNLAMEPESCGDIHCAGAVPLLVESLTACQDSQCLQSVVRALRNLADSPQHRLALAQQGAVRPLAELLATAPDAALTLALVRALLELSRGCSRACAEQLSLGGGLGPLVSLASHPKRAVREGTILILANLCAQGLIRPALGNAGGVEVLVDELRQRRDPNGASPTSQQPLVRAVCLLCREAINRARLRDAGGLDLLMGLLRDPRASAWHPRIVAALVGFLYDTGALGRLQALGLVPLLAGQLCGEAGEEEEEGREAASWDFPEERTPERAQGGSFRSLRSWLISEGYATGPDDISPDWSPEQCPPEPMEPASPAPTPTSLRAPRTQRTPGRSPAAAIEEPWGREGPALLLLSRFSQAPDPSGALVTGPALYGLLTYVTGAPGPPSPRALRILSRLTCNPACLEAFVRSYGAALLRAWLVLGVAPDDWPAPRARPTLHSRHRELGERLLQNLTVQAESPFGVGALTHLLLSGSPEDRVACALTLPFICRKPSLWRRLLLEQGGLRLLLAALTRPAPHPLFLFFAADSLSCLQDLVSPTVSPAVPQAVPMDLDSPSPCLYEPLLGPAPVPAPDLHFLLDSGLQLPAQRAASATASPFFRALLSGSFAEAQMDLVPLRGLSPGAAWPVLHHLHGCRGCGAALGPVPPPGQPLLGSEAEEALEAAGRFLLPGLEEELEEAVGRIHLGPQGGPESVGEVFRLGRPRLAAHCARWTLGSEQCPRKRGLALVGLVEAAGEEAGPLTEALLAVVMGIELGARVPA

SEQ ID NO: 1074 - protein, 10 aa, Homo Sapiens
  misc_feature (1)..(1): Xaa can be any naturally occurring amino acid
XLGKCSAPVS

SEQ ID NO: 1075 - protein, 598 aa, Homo Sapiens
  misc_feature (1)..(1): Xaa can be any naturally occurring amino acid
XTEVRRLGGILPLVTILQCMKTDSIQNRTARALGNLAMEPESCGDIHCAGAVPLLVESLTACQDSQCLQSVALGLVPLLAGQLCGEAGEEEEEGREAASWDFPEERTPERAQGGSFRSLRSWLISEGYATGPDDISPDWSPEQCPPEPMEPASPAPTPTSLRAPRTQRTPGRSPAAAIEEPWGREGPALLLLSRFSQAPDPSGALVTGPALYGLLTYVTGAPGPPSPRALRILSRLTCNPACLEAFVRSYGAALLRAWLVLGVAPDDWPAPRARPTLHSRHRELGERLLQNLTVQAESPFGVGALTHLLLSGSPEDRVACALTLPFICRKPSLWRRLLLEQGGLRLLLAALTRPAPHPLFLFFAADSLSCLQDLVSPTVSPAVPQAVPMDLDSPSPCLYEPLLGPAPVPAPDLHFLLDSGLQLPAQRAASATASPFFRALLSGSFAEAQMDLVPLRGLSPGAAWPVLHHLHGCRGCGAALGPVPPPGQPLLGSEAEEALEAAGRFLLPGLEEELEEAVGRIHLGPQGGPESVGEVFRLGRPRLAAHCARWTLGSEQCPRKRGLALVGLVEAAGEEAGPLTEALLAVVMGIELGARVPA

SEQ ID NO: 1076 - protein, 23 aa, Homo Sapiens
MADQRMDISSTISDFMSPGPTDL

SEQ ID NO: 1077 - protein, 59 aa, Homo Sapiens
MADQRMDISSTISDFMSPGPTDLLSSSLGTSGVDCNRKRKGSSTDYQESMDTDKDDPHG

SEQ ID NO: 1078 - protein, 76 aa, Homo Sapiens
MADQRMDISSTISDFMSPGPTDLLSSSLGTSGVDCNRKRKGSSTDYQESMDTDKDDPHGRLEYTEHQGRIKNAREA

SEQ ID NO: 1079 - protein, 101 aa, Homo Sapiens
MADQRMDISSTISDFMSPGPTDLLSSSLGTSGVDCNRKRKGSSTDYQESMDTDKDDPHGRLEYTEHQGRIKNAREAHSQIEKRRRDKMNSFIDELASLVPT

SEQ ID NO: 1080 - protein, 135 aa, Homo Sapiens
MADQRMDISSTISDFMSPGPTDLLSSSLGTSGVDCNRKRKGSSTDYQESMDTDKDDPHGRLEYTEHQGRIKNAREAHSQIEKRRRDKMNSFIDELASLVPTCNAMSRKLDKLTVLRMAVQHMKTLRGATNPYTEA

SEQ ID NO: 1081 - protein, 626 aa, Homo Sapiens
MADQRMDISSTISDFMSPGPTDLLSSSLGTSGVDCNRKRKGSSTDYQESMDTDKDDPHGRLEYTEHQGRIKNAREAHSQIEKRRRDKMNSFIDELASLVPTCNAMSRKLDKLTVLRMAVQHMKTLRGATNPYTEANYKPTFLSDDELKHLILRAADGFLFVVGCDRGKILFVSESVFKILNYSQNDLIGQSLFDYLHPKDIAKVKEQLSSSDTAPRERLIDAKTGLPVKTDITPGPSRLCSGARRSFFCRMKCNRPSVKVEDKDFPSTCSKKKADRKSFCTIHSTGYLKSWPPTKMGLDEDNEPDNEGCNLSCLVAIGRLHSHVVPQPVNGEIRVKSMEYVSRHAIDGKFVFVDQRATAILAYLPQELLGTSCYEYFHQDDIGHLAECHRQVLQTREKITTNCYKFKIKDGSFITLRSRWFSFMNPWTKEVEYIVSTNTVVLANVLEGGDPTFPQLTASPHSMDSMLPSGEGGPKRTHPTVPGIPGGTRAGAGKIGRMIAEEIMEIHRIRGSSPSSCGSSPLNITSTPPPDASSPGGKKILNGGTPDIPSSGLLSGQAQENPGYPYSDSSSILGENPHIGIDMIDNDQGSSSPSNDEAAMAVIMSLLEADAGLGGPVDFSDLPWPL

SEQ ID NO: 1082 - protein, 625 aa, Homo Sapiens
MADQRMDISSTISDFMSPGPTDLLSSSLGTSGVDCNRKRKGSSTDYQESMDTDKDDPHGRLEYTEHQGRIKNAREAHSQIEKRRRDKMNSFIDELASLVPTCNAMSRKLDKLTVLRMAVQHMKTLRGATNPYTEANYKPTFLSDDELKHLILRAADGFLFVVGCDRGKILFVSESVFKILNYSQNDLIGQSLFDYLHPKDIAKVKEQLSSSDTAPRERLIDAKTGLPVKTDITPGPSRLCSGARRSFFCRMKCNRPSVKVEDKDFPSTCSKKKDRKSFCTIHSTGYLKSWPPTKMGLDEDNEPDNEGCNLSCLVAIGRLHSHVVPQPVNGEIRVKSMEYVSRHAIDGKFVFVDQRATAILAYLPQELLGTSCYEYFHQDDIGHLAECHRQVLQTREKITTNCYKFKIKDGSFITLRSRWFSFMNPWTKEVEYIVSTNTVVLANVLEGGDPTFPQLTASPHSMDSMLPSGEGGPKRTHPTVPGIPGGTRAGAGKIGRMIAEEIMEIHRIRGSSPSSCGSSPLNITSTPPPDASSPGGKKILNGGTPDIPSSGLLSGQAQENPGYPYSDSSSILGENPHIGIDMIDNDQGSSSPSNDEAAMAVIMSLLEADAGLGGPVDFSDLPWPL

SEQ ID NO: 1083 - protein, 60 aa, Homo Sapiens
MADQRMDISSTISDFMSPGPTDLLSSSLGTSGVDCNRKRKGSSTDYQLEYTEHQGRIKNA

SEQ ID NO: 1084 - protein, 46 aa, Homo Sapiens
MINIESMDTDKDDPHGRLEYTEHQGRIKNAREAHSQIEKRRRDKMN

SEQ ID NO: 1085 - protein, 72 aa, Homo Sapiens
MINIESMDTDKDDPHGRLEYTEHQGRIKNAREAHSQIEKRRRDKMNSFIDELASLVPTCNAMSRKLDKLTVL

SEQ ID NO: 1086 - protein, 141 aa, Homo Sapiens
MINIESMDTDKDDPHGRLEYTEHQGRIKNAREAHSQIEKRRRDKMNSFIDELASLVPTCNAMSRKLDKLTVLRMAVQHMKTLRGATNPYTEANYKPTFLSDDELKHLILRAADGFLFVVGCDRGKILFVSESVFKILNYSQ

SEQ ID NO: 1087 - protein, 583 aa, Homo Sapiens
MINIESMDTDKDDPHGRLEYTEHQGRIKNAREAHSQIEKRRRDKMNSFIDELASLVPTCNAMSRKLDKLTVLRMAVQHMKTLRGATNPYTEANYKPTFLSDDELKHLILRAADGFLFVVGCDRGKILFVSESVFKILNYSQNDLIGQSLFDYLHPKDIAKVKEQLSSSDTAPRERLIDAKTGLPVKTDITPGPSRLCSGARRSFFCRMKCNRPSVKVEDKDFPSTCSKKKADRKSFCTIHSTGYLKSWPPTKMGLDEDNEPDNEGCNLSCLVAIGRLHSHVVPQPVNGEIRVKSMEYVSRHAIDGKFVFVDQRATAILAYLPQELLGTSCYEYFHQDDIGHLAECHRQVLQTREKITTNCYKFKIKDGSFITLRSRWFSFMNPWTKEVEYIVSTNTVVLANVLEGGDPTFPQLTASPHSMDSMLPSGEGGPKRTHPTVPGIPGGTRAGAGKIGRMIAEEIMEIHRIRGSSPSSCGSSPLNITSTPPPDASSPGGKKILNGGTPDIPSSGLLSGQAQENPGYPYSDSSSILGENPHIGIDMIDNDQGSSSPSNDEAAMAVIMSLLEADAGLGGPVDFSDLPWPL

SEQ ID NO: 1088 - protein, 582 aa, Homo Sapiens
MINIESMDTDKDDPHGRLEYTEHQGRIKNAREAHSQIEKRRRDKMNSFIDELASLVPTCNAMSRKLDKLTVLRMAVQHMKTLRGATNPYTEANYKPTFLSDDELKHLILRAADGFLFVVGCDRGKILFVSESVFKILNYSQNDLIGQSLFDYLHPKDIAKVKEQLSSSDTAPRERLIDAKTGLPVKTDITPGPSRLCSGARRSFFCRMKCNRPSVKVEDKDFPSTCSKKKDRKSFCTIHSTGYLKSWPPTKMGLDEDNEPDNEGCNLSCLVAIGRLHSHVVPQPVNGEIRVKSMEYVSRHAIDGKFVFVDQRATAILAYLPQELLGTSCYEYFHQDDIGHLAECHRQVLQTREKITTNCYKFKIKDGSFITLRSRWFSFMNPWTKEVEYIVSTNTVVLANVLEGGDPTFPQLTASPHSMDSMLPSGEGGPKRTHPTVPGIPGGTRAGAGKIGRMIAEEIMEIHRIRGSSPSSCGSSPLNITSTPPPDASSPGGKKILNGGTPDIPSSGLLSGQAQENPGYPYSDSSSILGENPHIGIDMIDNDQGSSSPSNDEAAMAVIMSLLEADAGLGGPVDFSDLPWPL

SEQ ID NO: 1089 - protein, 624 aa, Homo Sapiens
MSKEAVSLWALTVSLQPPVPLCVCREMTGSGRRKQQCVTLPFISRELCFYLLLFPPPRLEYTEHQGRIKNAREAHSQIEKRRRDKMNSFIDELASLVPTCNAMSRKLDKLTVLRMAVQHMKTLRGATNPYTEANYKPTFLSDDELKHLILRAADGFLFVVGCDRGKILFVSESVFKILNYSQNDLIGQSLFDYLHPKDIAKVKEQLSSSDTAPRERLIDAKTGLPVKTDITPGPSRLCSGARRSFFCRMKCNRPSVKVEDKDFPSTCSKKKADRKSFCTIHSTGYLKSWPPTKMGLDEDNEPDNEGCNLSCLVAIGRLHSHVVPQPVNGEIRVKSMEYVSRHAIDGKFVFVDQRATAILAYLPQELLGTSCYEYFHQDDIGHLAECHRQVLQTREKITTNCYKFKIKDGSFITLRSRWFSFMNPWTKEVEYIVSTNTVVLANVLEGGDPTFPQLTASPHSMDSMLPSGEGGPKRTHPTVPGIPGGTRAGAGKIGRMIAEEIMEIHRIRGSSPSSCGSSPLNITSTPPPDASSPGGKKILNGGTPDIPSSGLLSGQAQENPGYPYSDSSSILGENPHIGIDMIDNDQGSSSPSNDEAAMAVIMSLLEADAGLGGPVDFSDLPWPL

SEQ ID NO: 1090 - protein, 171 aa, Homo Sapiens
RATAILAYLPQELLGTSCYEYFHQDDIGHLAECHRQVLQTREKITTNCYKFKIKDGSFITLRSRWFSFMNPWTKEVEYIVSTNTVVLSRVDTGHLGQVEWCTVLSRPDSRFLIAGMFTEPTSWKAGTQPSHSSQHPPTAWTACCPLEKVAQRGPTPLFQGFQGEPGLGQEK

SEQ ID NO: 1091 - protein, 423 aa, Homo Sapiens
MGMYPGVLVPSSRGGLPLEEVTVAEVLAARGYLTGMAGKWHLGVGPEGAFLPPHQGFHRFLGIPYSHDQGPCQNLTCFPPATPCDGGCDQGLVPIPLLANLSVEAQPPWLPGLEARYMAFAHDLMADAQRQDRPFFLYYASHHTHYPQFSGQSFAERSGRGPFGDSLMELDAAVGTLMTAIGDLGLLEETLVIFTADNGPETMRMSRGGCSGLLRCGKGTTYEGGVREPALAFWPGHIAPGVTHELASSLDLLPTLAALAGAPLPNVTLDGFDLSPLLLGTGKSPRQSLFFYPSYPDEVRGVFAVRTGKYKAHFFTQGSAHSDTTADPACHASSSLTAHEPPLLYDLSKDPGENYNLLGGVAGATPEVLQALKQLQLLKAQLDAAVTFGPSQVARGEDPALQICCHPGCTPRPACCHCPDPHA

SEQ ID NO: 1092 - protein, 509 aa, Homo Sapiens
MSMGAPRSLLLALAAGLAVARPPNIVLIFADDLGYGDLGCYGHPSSTTPNLDQLAAGGLRFTDFYVPVSLCTPSRAALLTGRLPVRMGMYPGVLVPSSRGGLPLEEVTVAEVLAARGYLTGMAGKWHLGVGPEGAFLPPHQGFHRFLGIPYSHDQGPCQNLTCFPPATPCDGGCDQGLVPIPLLANLSVEAQPPWLPGLEARYMAFAHDLMADAQRQDRPFFLYYASHHTHYPQFSGQSFAERSGRGPFGDSLMELDAAVGTLMTAIGDLGLLEETLVIFTADNGPETMRMSRGGCSGLLRCGKGTTYEGGVREPALAFWPGHIAPGVTHELASSLDLLPTLAALAGAPLPNVTLDGFDLSPLLLGTGKSPRQSLFFYPSYPDEVRGVFAVRTGKYKAHFFTQGSAHSDTTADPACHASSSLTAHEPPLLYDLSKDPGENYNLLGGVAGATPEVLQALKQLQLLKAQLDAAVTFGPSQVARGEDPALQICCHPGCTPRPACCHCPDPHA

SEQ ID NO: 1093 - protein, 509 aa, Homo Sapiens; identical to SEQ ID NO: 1092

SEQ ID NO: 1094 - protein, 509 aa, Homo Sapiens; identical to SEQ ID NO: 1092

SEQ ID NO: 1095 - protein, 509 aa, Homo Sapiens; identical to SEQ ID NO: 1092

SEQ ID NO: 1096 - protein, 69 aa, Homo Sapiens
  misc_feature (1)..(1): Xaa can be any naturally occurring amino acid
XPSYPDEVRGVFAVRTGKYKAHFFTQGSAHSDTTADPACHASSSLTAHEPPLLYDLSKDPDGVSLCRPG

SEQ ID NO: 1097 - protein, 45 aa, Homo Sapiens
MGPRGAASLPRGPGPRRLLLPVVLPLLLLLLLAPPGSGAGASRPP

SEQ ID NO: 1098 - protein, 533 aa, Homo Sapiens
MGPRGAASLPRGPGPRRLLLPVVLPLLLLLLLAPPGSGAGASRPPHLVFLLADDLGWNDVGFHGSRIRTPHLDALAAGGVLLDNYYTQPLCTPSRSQLLTGRYQIRTGLQHQIIWPCQPSCVPLDEKLLPQLLKEAGYTTHMVGKWHLGMYRKECLPTRRGFDTYFGYLLGSEDYYSHERCTLIDALNVTRCALDFRDGEEVATGYKNMYSTNIFTKRAIALITNHPPEKPLFLYLALQSVHEPLQVPEEYLKPYDFIQDKNRHHYAGMVSLMDEAVGNVTAALKSSGLWNNTVFIFSTDNGGQTLAGGNNWPLRGRKWSLWEGGVRGVGFVASPLLKQKGVKNRELIHISDWLPTLVKLARGHTNGTKPLDGFDVWKTISEGSPSPRIELLHNIDPNFVDSSPCPRNSMAPAKDDSSLPEYSAFNTSVHAAIRHGNWKLLTGYPGCGYWFPPPSQYNVSEIPSSDPPTKTLWLFDIDRDPEERHDLSREYPHIVTKLLSRLQFYHKHSVPVYFPAQDPRCDPKATGVWGPWM

SEQ ID NO: 1099 - protein, 413 aa, Homo Sapiens
MGPRGAASLPRGPGPRRLLLPVVLPLLLLLLLAPPGSGAGASRPPHLVFLLADDLGWNDVGFHGSRIRTPHLDALAAGGVLLDNYYTQPLCTPSRSQLLTGRYQIRTGLQHQIIWPCQPSCVPLDEKLLPQLLKEAGYTTHMVGKWHLGMYRKECLPTRRGFDTYFGYLLGSEDYYSHERCTLIDALNVTRCALDFRDGEEVATGYKNMYSTNIFTKRAIALITNHPPEKPLFLYLALQSVHEPLQVPEEYLKPYDFIQDKNRHHYAGMVSLMDEAVGNVTAALKSSGLWNNTVFIFSTDNGGQTLAGGNNWPLRGRKWSLWEGGVRGVGFVASPLLKQKGVKNRELIHISDWLPTLVKLARGHTNGTKPLDGFDVWKTISEGSPSPRIELLHNIDPNFVDSSPYWPECSLLL

SEQ ID NO: 1100 - protein, 398 aa, Homo Sapiens
MGPRGAASLPRGPGPRRLLLPVVLPLLLLLLLAPPGSGAGASRPPHLVFLLADDLGWNDVGFHGSRIRTPHLDALAAGGVLLDNYYTQPLCTPSRSQLLTGRYQIRTGLQHQIIWPCQPSCVPLDEKLLPQLLKEAGYTTHMVGKWHLGMYRKECLPTRRGFDTYFGYLLGSEDYYSHERCTLIDALNVTRCALDFRDGEEVATGYKNMYSTNIFTKRAIALITNHPPEKPLFLYLALQSVHEPLQVPEEYLKPYDFIQDKNRHHYAGMVSLMDEAVGNVTAALKSSGLWNNTVFIFSTDNGGQTLAGGNNWPLRGRKWSLWEGGVRGVGFVASPLLKQKGVKNRELIHISDWLPTLVKLARGHTNGTKPLDGFDVWKTIRYLHPALFPPRTETPRAA

SEQ ID NO: 1101 - protein, 178 aa, Homo Sapiens
MLHLHHSCLCFRSWLPAMLAVLLSLAPSASSDISASRPNILLLMADDLGIGDIGCYGNNTMRTPNIDRLAEDGVKLTQHISAASLCTPSRAAFLTGRYPVRSGMVSSIGYRVLQWTGASGGLPTNETTFAKILKEKGYATGLIGKWHLGLNCESASDHCHHPLHHGFDHFYGMPFSLM

SEQ ID NO: 1102 - protein, 589 aa, Homo Sapiens
MLHLHHSCLCFRSWLPAMLAVLLSLAPSASSDISASRPNILLLMADDLGIGDIGCYGNNTMRTPNIDRLAEDGVKLTQHISAASLCTPSRAAFLTGRYPVRSGMVSSIGYRVLQWTGASGGLPTNETTFAKILKEKGYATGLIGKWHLGLNCESASDHCHHPLHHGFDHFYGMPFSLMGDCARWELSEKRVNLEQKLNFLFQVLALVALTLVAGKLTHLIPVSWMPVIWSALSAVLLLASSYFVGALIVHADCFLMRNHTITEQPMCFQRTTPLILQEVASFLKRNKHGPFLLFVSFLHVHIPLITMENFLGKSLHGLYGDNVEEMDWMVGRILDTLDVEGLSNSTLIYFTSDHGGSLENQLGNTQYGGWNGIYKGGKGMGGWEGGIRVPGIFRWPGVLPAGRVIGEPTSLMDVFPTVVRLAGGEVPQDRVIDGQDLLPLLLGTAQHSDHEFLMHYCERFLHAARWHQRDRGTMWKVHFVTPVFQPEGAGACYGRKVCPCFGEKVVHHDPPLLFDLSRDPSETHILTPASEPVFYQVMERVQQAVWEHQRTLSPVPLQLDRLGNIWRPWLQPCCGPFPLCWCLREDDPQ

SEQ ID NO: 1103 - protein, 614 aa, Homo Sapiens
MRPVINRCAPGSLDLMLPQAASEGIVFHSLQISLCFRSWLPAMLAVLLSLAPSASSDISASRPNILLLMADDLGIGDIGCYGNNTMRTPNIDRLAEDGVKLTQHISAASLCTPSRAAFLTGRYPVRSGMVSSIGYRVLQWTGASGGLPTNETTFAKILKEKGYATGLIGKWHLGLNCESASDHCHHPLHHGFDHFYGMPFSLMGDCARWELSEKRVNLEQKLNFLFQVLALVALTLVAGKLTHLIPVSWMPVIWSALSAVLLLASSYFVGALIVHADCFLMRNHTITEQPMCFQRTTPLILQEVASFLKRNKHGPFLLFVSFLHVHIPLITMENFLGKSLHGLYGDNVEEMDWMVGRILDTLDVEGLSNSTLIYFTSDHGGSLENQLGNTQYGGWNGIYKGGKGMGGWEGGIRVPGIFRWPGVLPAGRVIGEPTSLMDVFPTVVRLAGGEVPQDRVIDGQDLLPLLLGTAQHSDHEFLMHYCERFLHAARWHQRDRGTMWKVHFVTPVFQPEGAGACYGRKVCPCFGEKVVHHDPPLLFDLSRDPSETHILTPASEPVFYQVMERVQQAVWEHQRTLSPVPLQLDRLGNIWRPWLQPCCGPFPLCWCLREDDPQ

SEQ ID NO: 1104 - protein, 544 aa, Homo Sapiens
MSGSRERDNMLHLHHSWTPNIDRLAEDGVKLTQHISAASLCTPSRAAFLTGRYPVRSGMVSSIGYRVLQWTGASGGLPTNETTFAKILKEKGYATGLIGKWHLGLNCESASDHCHHPLHHGFDHFYGMPFSLMGDCARWELSEKRVNLEQKLNFLFQVLALVALTLVAGKLTHLIPVSWMPVIWSALSAVLLLASSYFVGALIVHADCFLMRNHTITEQPMCFQRTTPLILQEVASFLKRNKHGPFLLFVSFLHVHIPLITMENFLGKSLHGLYGDNVEEMDWMVGRILDTLDVEGLSNSTLIYFTSDHGGSLENQLGNTQYGGWNGIYKGGKGMGGWEGGIRVPGIFRWPGVLPAGRVIGEPTSLMDVFPTVVRLAGGEVPQDRVIDGQDLLPLLLGTAQHSDHEFLMHYCERFLHAARWHQRDRGTMWKVHFVTPVFQPEGAGACYGRKVCPCFGEKVVHHDPPLLFDLSRDPSETHILTPASEPVFYQVMERVQQAVWEHQRTLSPVPLQLDRLGNIWRPWLQPCCGPFPLCWCLREDDPQ

SEQ ID NO: 1105 - protein, 361 aa, Homo Sapiens
MGCTDTPGYNHPPCPACPQGDGPSRNLQRDCYTDVALPLYENLNIVEQPVNLSSLAQKYAEKATQFIQRASTSGRPFLLYVALAHMHVPLPVTQLPAAPRGRSLYGAGLWEMDSLVGQIKDKVDHTVKENTFLWFTGDNGPWAQKCELAGSVGPFTGFWQTRQGGSPAKQTTWEGGHRVPALAYWPGRVPVNVTSTALLSVLDIFPTVVALAQASLPQGRRFDGVDVSEVLFGRSQPGHRVLFHPNSGAAGEFGALQTVRLERYKAFYITGGARACDGSTGPELQHKFPLIFNLEDDTAEAVPLERGGAEYQAVLPEVRKVLADVLQDIANDNISSADYTQDPSVTPCCNPYQIACRCQAA

SEQ ID NO: 1106 - protein, 29 aa, Homo Sapiens
MGWLFLKVLLAGVSFSGFLYPLVDFCISG

SEQ ID NO: 1107 - protein, 525 aa, Homo Sapiens
MGWLFLKVLLAGVSFSGFLYPLVDFCISGKTRGQKPNFVIILADDMGWGDLGANWAETKDTANLDKMASEGMRFVDFHAAASTCSPSRASLLTGRLGLRNGVTRNFAVTSVGGLPLNETTLAEVLQQAGYVTGIIGKWHLGHHGSYHPNFRGFDYYFGIPYSHDMGCTDTPGYNHPPCPACPQGDGPSRNLQRDCYTDVALPLYENLNIVEQPVNLSSLAQKYAEKATQFIQRASTSGRPFLLYVALAHMHVPLPVTQLPAAPRGRSLYGAGLWEMDSLVGQIKDKVDHTVKENTFLWFTGDNGPWAQKCELAGSVGPFTGFWQTRQGGSPAKQTTWEGGHRVPALAYWPGRVPVNVTSTALLSVLDIFPTVVALAQASLPQGRRFDGVDVSEVLFGRSQPGHRVLFHPNSGAAGEFGALQTVRLERYKAFYITGGARACDGSTGPELQHKFPLIFNLEDDTAEAVPLERGGAEYQAVLPEVRKVLADVLQDIANDNISSADYTQDPSVTPCCNPYQIACRCQAA

SEQ ID NO: 1108 - protein, 525 aa, Homo Sapiens; identical to SEQ ID NO: 1107

SEQ ID NO: 1109 - protein, 569 aa, Homo Sapiens
MHTLTGFSLVSLLSFGYLSWDWAKPSFVADGPGEAGEQPSAAPPQPPHIIFILTDDQGYHDVGYHGSDIETPTLDRLAAKGVKLENYYIQPICTPSRSQLLTGRYQIHTGLQHSIIRPQQPNCLPLDQVTLPQKLQEAGYSTHMVGKWHLGFYRKECLPTRRGFDTFLGSLTGNVDYYTYDNCDGPGVCGFDLHEGENVAWGLSGQYSTMLYAQRASHILASHSPQRPLFLYVAFQAVHTPLQSPREYLYRYRTMGNVARRKYAAMVTCMDEAVRNITWALKRYGFYNNSVIIFSSDNGGQTFSGGSNWPLRGRKGTYWEGGVRGLGFVHSPLLKRKQRTSRALMHITDWYPTLVGLAGGTTSAADGLDGYDVWPAISEGRASPRTEILHNIDPLYNHAQHGSLEGGFGIWNTAVQAAIRVGEWKLLTGDPGYGDWIPPQTLATFPGSWWNLERMASVRQAVWLFNISADPYEREDLAGQRPDVVRTLLARLAEYNRTAIPVRYPAENPRAHPDFNGGAWGPWASDEEEEEEEGRARSFSRGRRKKKCKICKLRSFFRKLNTRLMSQRI

SEQ ID NO: 1110 - protein, 86 aa, Homo Sapiens
MVGKWHLGFYRKECLPTRRGFDTFLGSLTGNVDYYTYDNCDGPGVCGFDLHEGENVAWGLSGQYSTMLYAQRASHILASHSPQRPL

SEQ ID NO: 1111 - protein, 426 aa, Homo Sapiens
MVGKWHLGFYRKECLPTRRGFDTFLGSLTGNVDYYTYDNCDGPGVCGFDLHEGENVAWGLSGQYSTMLYAQRASHILASHSPQRPLFLYVAFQAVHTPLQSPREYLYRYRTMGNVARRKYAAMVTCMDEAVRNITWALKRYGFYNNSVIIFSSDNGGQTFSGGSNWPLRGRKGTYWEGGVRGLGFVHSPLLKRKQRTSRALMHITDWYPTLVGLAGGTTSAADGLDGYDVWPAISEGRASPRTEILHNIDPLYNHAQHGSLEGGFGIWNTAVQAAIRVGEWKLLTGDPGYGDWIPPQTLATFPGSWWNLERMASVRQAVWLFNISADPYEREDLAGQRPDVVRTLLARLAEYNRTAIPVRYPAENPRAHPDFNGGAWGPWASDEEEEEEEGRARSFSRGRRKKKCKICKLRSFFRKLNTRLMSQRI

SEQ ID NO: 1112 - protein, 153 aa, Homo Sapiens
MLLLWVSVVAALALAVLAPGAGEQRRRAAKAPNVVLVVSDSFDGRLTFHPGSQVVKLPFINFMKTRGTSFLNAYTNSPICCPSRAAMWSGLFTHLTESWNNFKGLDPNYTTWMDVMERHGYRTQKFGKLDYTSGHHSIRHSERGSTNQRSEKV

SEQ ID NO: 1113 - protein, 536 aa, Homo Sapiens
MLLLWVSVVAALALAVLAPGAGEQRRRAAKAPNVVLVVSDSFDGRLTFHPGSQVVKLPFINFMKTRGTSFLNAYTNSPICCPSRAAMWSGLFTHLTESWNNFKGLDPNYTTWMDVMERHGYRTQKFGKLDYTSGHHSISNRVEAWTRDVAFLLRQEGRPMVNLIRNRTKVRVMERDWQNTDKAVNWLRKEAINYTEPFVIYLGLNLPHPYPSPSSGENFGSSTFHTSLYWLEKVSHDAIKIPKWSPLSEMHPVDYYSSYTKNCTGRFTKKEIKNIRAFYYAMCAETDAMLGEIILALHQLDLLQKTIVIYSSDHGELAMEHRQFYKMSMYEASAHVPLLMMGPGIKAGLQVSNVVSLVDIYPTMLDIAGIPLPQNLSGYSLLPLSSETFKNEHKVKNLHPPWILSEFHGCNVNASTYMLRTNHWKYIAYSDGASILPQLFDLSSDPDELTNVAVKFPEITYSLDQKLHSIINYPKVSASVHQYNKEQFIKWKQSIGQNYSNVIANLRWHQDWQKEPRKYENAIDQWLKTHMNPRAV

SEQ ID NO: 1114 - protein, 395 aa, Homo Sapiens
MLLLWVSVVAALALAVLAPGAGEQRRRAAKAPNVVLVVSDSFDGRLTFHPGSQVVKLPFINFMKTRGTSFLNAYTNSPICCPSRAAMWSGLFTHLTESWNNFKGLDPNYTTWMDVMERHGYRTQKFGKLDYTSGHHSISNRVEAWTRDVAFLLRQEGRPMVNLIRNRTKVRVMERDWQNTDKAVNWLRKEAINYTEPFVIYLGLNLPHPYPSPSSGENFGSSTFHTSLYWLEKVSHDAIKIPKWSPLSEMHPVDYYSSYTKNCTGRFTKKEIKNIRAFYYAMCAETDAMLGEIILALHQLDLLQKTIVIYSSDHGELAMEHRQFYKMSMYEASAHVPLLMMGPGIKAGLQVSNVVSLVDIYPTMLDEKTEVEISKLLAEVHMASGILLEFLCLRT

SEQ ID NO: 1115 - protein, 46 aa, Homo Sapiens
MLLLWVSVVAALALAVLAPGAGEQRRRAAKAPNVVLVVSDSFIPDD

SEQ ID NO: 1116 - protein, 92 aa, Homo Sapiens
RAAKAPNVVLVVSDSFDGRLTFHPGSQVVKLPFINFMKTRGTSFLNAYTNSPICCPSRAVIVWKRGQEMLLSYSDKKAGPWLILSVTGLKSE

SEQ ID NO: 1117 - protein, 117 aa, Homo Sapiens
KTCSHYECAFLGGLKTENCIENLEYFQPIYVYNPGEKNQKLEDHSEKNWKLEDHGEKNQKLEDHGVKILEPTQIPGMKIPEPFPLPGIKMIQLNEKPEDKSQGNINNPTPGPVPVPG

SEQ ID NO: 1118 - protein, 107 aa, Homo Sapiens
MKTGHFEIVTMLLATMILVDIFQVKAEVLDMADNAFDDEYLKCTDRMEIKYVPQLLKEEKASHQQLDTVWENAKAKWAARKTQIFLPMNFKDNHGIALMAYISEAQE

SEQ ID NO: 1119 - protein, 129 aa, Homo Sapiens
MKTGHFEIVTMLLATMILVDIFQVKAEVLDMADNAFDDEYLKCTDRMEIKYVPQLLKEEKASHQQLDTVWENAKAKWAARKTQIFLPMNFKDNHGIALMAYISEAQEQTPFYHLFSEAVKMAGQSREDY

SEQ ID NO: 1120 - protein, 175 aa, Homo Sapiens
MKTGHFEIVTMLLATMILVDIFQVKAEVLDMADNAFDDEYLKCTDRMEIKYVPQLLKEEKASHQQLDTVWENAKAKWAARKTQIFLPMNFKDNHGIALMAYISEAQEQTPFYHLFSEAVKMAGQSREDYIYGFQFKAFHFYLTRALQLLRKPCEASSKTVVYRTSQGTSFTFGGL

SEQ ID NO: 1121 - protein, 202 aa, Homo Sapiens
MKTGHFEIVTMLLATMILVDIFQVKAEVLDMADNAFDDEYLKCTDRMEIKYVPQLLKEEKASHQQLDTVWENAKAKWAARKTQIFLPMNFKDNHGIALMAYISEAQEQTPFYHLFSEAVKMAGQSREDYIYGFQFKAFHFYLTRALQLLRKPCEASSKTVVYRTSQGTSFTFGGLNQARFGHFTLAYSAKPQAANDQLTVLS

SEQ ID NO: 1122 - protein, 389 aa, Homo Sapiens
MKTGHFEIVTMLLATMILVDIFQVKAEVLDMADNAFDDEYLKCTDRMEIKYVPQLLKEEKASHQQLDTVWENAKAKWAARKTQIFLPMNFKDNHGIALMAYISEAQEQTPFYHLFSEAVKMAGQSREDYIYGFQFKAFHFYLTRALQLLRKPCEASSKTVVYRTSQGTSFTFGGLNQARFGHFTLAYSAKPQAANDQLTVLSIYTCLGVDIENFLDKESERITLIPLNEVFQVSQEGAGNNLILQSINKTCSHYECAFLGGLKTENCIENLEYFQPIYVYNPGEKNQKLEDHSEKNWKLEDHGEKNQKLEDHGVKILEPTQIPGMKIPEPFPLPEDKSQGNINNPTPGPVPVPGPKSHPSASSGKLLLPQFGMVIILISVSAINLFVAL

SEQ ID NO: 1123 - protein, 378 aa, Homo Sapiens
MKTGHFEIVTMLLATMILVDIFQVKAEVLDMADNAFDDEYLKCTDRMEIKYVPQLLKEEKASHQQLDTVWENAKAKWAARKTQIFLPMNFKDNHGIALMAYISEAQEQTPFYHLFSEAVKMAGQSREDYIYGFQFKAFHFYLTRALQLLRKPCEASSKTVVYRTSQGTSFTFGGLNQARFGHFTLAYSAKPQAANDQLTVLSIYTCLGVDIENFLDKESERITLIPLNEVFQVSQEGAGNNLILQSINKTCSHYECAFLGGLKTENCIENLEYFQPIYVYNPGEKNQKLEDHSEKNWKLEDHGEKNQKLEDHGVKILEPTQIPEDKSQGNINNPTPGPVPVPGPKSHPSASSGKLLLPQFGMVIILISVSAINLFVAL

SEQ ID NO: 1124 - protein, 367 aa, Homo Sapiens
MKTGHFEIVTMLLATMILVDIFQVKAEVLDMADNAFDDEYLKCTDRMEIKYVPQLLKEEKASHQQLDTVWENAKAKWAARKTQIFLPMNFKDNHGIALMAYISEAQEQTPFYHLFSEAVKMAGQSREDYIYGFQFKAFHFYLTRALQLLRKPCEASSKTVVYRTSQGTSFTFGGLNQARFGHFTLAYSAKPQAANDQLTVLSIYTCLGVDIENFLDKESERITLIPLNEVFQVSQEGAGNNLILQSINKTCSHYECAFLGGLKTENCIENLEYFQPIYVYNPGEKNQKLEDHSEKNWKLEDHGEKNQKLEDHGVKILEPTQIPAPGPVPVPGPKSHPSASSGKLLLPQFGMVIILISVSAINLFVAL

SEQ ID NO: 1125 - protein, 314 aa, Homo Sapiens
MGPLINRCKKILLPTTVPPATMRIWLLGGLLPFLLLLSGLQRPTEGSEVAIKIDFDFAPGSFDDQYQGCSKQVMEKLTQGDYFTKDIEAQKNYFRMWQKAHLAWLNQGKVLPQNMTTTHAVAILFYTLNSNVHSDFTRAMASVARTPQQYERSFHFKYLHYYLTSAIQLLRKDSIMENGTLCYEVHYRTKDVHFNAYTGATIRFGQFLSTSLLKEEAQEFGNQTLFTIFTCLGAPVQYFSLKKEVLIPPYELFKVINMSYHPRGDWLQLRSTGNLSTYNCQLLKASSKKCIPDPIAIASLSFLTSVIIFSKSRV

SEQ ID NO: 1126 - protein, 41 aa, Homo Sapiens
PPATMRIWLLGGLLPFLLLLSGLQRPTEGSELPARNASLIL

SEQ ID NO: 1127 - protein, 65 aa, Homo Sapiens
PPATMRIWLLGGLLPFLLLLSGLQRPTEGSEVAIKIDFDFAPGSFDDQYQGCSKQLPARNASLIL

SEQ ID NO: 1128 - protein, 273 aa, Homo Sapiens
PPATMRIWLLGGLLPFLLLLSGLQRPTEGSEVAIKIDFDFAPGSFDDQYQGCSKQVMEKLTQGDYFTKDIEAQKNYFRMWQKAHLAWLNQGKVLPQNMTTTHAVAILFYTLNSNVHSDFTRAMASVARTPQQYERSFHFKYLHYYLTSAIQLLRKDSIMENGTLCYEVHYRTKDVHFNAYTGATIRFGQFLSTSLLKEEAQEFGNQTLFTIFTCLGAPVQYFSLKKEVLIPPYELFKVINMSYHPRGDWLQLRSTGNLSTYNCQLLKGILYLN

SEQ ID NO: 1129 - protein, 152 aa, Homo Sapiens
AVPILPLGLAPDTFDDTYVGCAEEMEEKAAPLLKEEMAHHALLRESWEAAQETWEDKRRGLTLPPGFKAQNGIAIMVYTNSSNTLYWELNQAAFSVFPKEREVLIPPHEVFLVTRFSQDGAQSLVTLWSYNQTCSHFNCAYLGGEKRRGCVS

SEQ ID NO: 1130 - protein, 239 aa, Homo Sapiens
MALAALMIALGSLGLHTWQAQAVPILPLGLAPDTFDDTYVGCAEEMEEKAAPLLKEEMAHHALLRESWEAAQETWEDKRRGLTLPPGFKAQNGIAIMVYTNSSNTLYWELNQAVRTGGGSRELYMRHFPFKALHFYLIRALQLLRGSGGCSRGPGEVVFRGVGSLRFEPKRLGDSVRLGQFASSSLDKAVAHRFGEKRRGCVSAPGVQLGSQSEGASSLPPWKTLLLAPGEFQLSGVGP

SEQ ID NO: 1131 - protein, 291 aa, Homo Sapiens
MALAALMIALGSLGLHTWQAQAVPILPLGLAPDTFDDTYVGCAEEMEEKAAPLLKEEMAHHALLRESWEAAQETWEDKRRGLTLPPGFKAQNGIAIMVYTNSSNTLYWELNQAVRTGGGSRELYMRHFPFKALHFYLIRALQLLRGSGGCSRGPGEVVFRGVGSLRFEPKRLGDSVRLGQFASSSLDKAVAHRFGNATLFSLTTCFGAPIQAFSVFPKEREVLIPPHEVFLVTRFSQDGAQSLVTLWSYNQTCSHFNCAYLGGEKRRGCVSAPGALGTGDLHMTKRHLQQP

SEQ ID NO: 1132 - protein, 291 aa, Homo Sapiens; identical to SEQ ID NO: 1131

SEQ ID NO: 1133 - protein, 264 aa, Homo Sapiens
  misc_feature (1)..(1): Xaa can be any naturally occurring amino acid
XEMEEKAAPLLKEEMAHHALLRESWEAAQETWEDKRRGLTLPPGFKAQNGIAIMVYTNSSNTLYWELNQAVRTGGGSRELYMRHFPFKALHFYLIRALQLLRGSGGCSRGPGEVVFRGVGSLRFEPKRLGDSVRLGQFASSSLDKAVAHRFGNATLFSLTTCFGAPIQAFSVFPKEREVLIPPHEVFLVTRFSQDGAQSLVTLWSYNQTCSHFNCAYLGGEKRRGCVSAPGVQLGSQSEGASSLPPWKTLLLAPGEFQLSGVGP

SEQ ID NO: 1134 - protein, 89 aa, Homo Sapiens
MELGLGGLSTLSHCPWPRQQAPLGLSAQPALWPTLAALALLSSVAEASLGSAPRSPAPREGPPPVLASPAGHLPGGRTARWCSGRARRP

SEQ ID NO: 1135 - protein, 89 aa, Homo Sapiens; identical to SEQ ID NO: 1134

SEQ ID NO: 1136 - protein, 228 aa, Homo Sapiens
MELGLGGLSTLSHCPWPRQQAPLGLSAQPALWPTLAALALLSSVAEASLGSAPRSPAPREGPPPVLASPAGHLPGGRTARWCSGRARRPPPQPSRPAPPPPAPPSALPRGGRAARAGGPGSRARAAGARGCRLRSQLVPVRALGLGHRSDELVRFRFCSGSCRRARSPHDLSLASLLGAGALRPPPGSRPVSQPCCRPTRYEAVSFMDVNSTWRTVDRLSATACGCLG

SEQ ID NO: 1137 - protein, 228 aa, Homo Sapiens; identical to SEQ ID NO: 1136

SEQ ID NO: 1138 - protein, 76 aa, Homo Sapiens
MELGLGGLSTLSHCPWPRQQAPLGLSAQPALWPTLAALALLSSVAEASLGSAPRSPAPREGPPPVLASPAGHLPGR

SEQ ID NO: 1139 - protein, 76 aa, Homo Sapiens; identical to SEQ ID NO: 1138

SEQ ID NO: 1140 - protein, 66 aa, Homo Sapiens
MELGLGGLSTLSHCPWPRQQPALWPTLAALALLSSVAEASLGSAPRSPAPREGPPPVLASPAGHLP

SEQ ID NO: 1141 - protein, 66 aa, Homo Sapiens; identical to SEQ ID NO: 1140

SEQ ID NO: 1142 - protein, 220 aa, Homo Sapiens
MELGLGGLSTLSHCPWPRQQPALWPTLAALALLSSVAEASLGSAPRSPAPREGPPPVLASPAGHLPGGRTARWCSGRARRPPPQPSRPAPPPPAPPSALPRGGRAARAGGPGSRARAAGARGCRLRSQLVPVRALGLGHRSDELVRFRFCSGSCRRARSPHDLSLASLLGAGALRPPPGSRPVSQPCCRPTRYEAVSFMDVNSTWRTVDRLSATACGCLG

SEQ ID NO: 1143 - protein, 220 aa, Homo Sapiens; identical to SEQ ID NO: 1142

SEQ ID NO: 1144 - protein, 237 aa, Homo Sapiens
MPGLISARGQPLLEVLPPQAHLGALFLPEAPLGLSAQPALWPTLAALALLSSVAEASLGSAPRSPAPREGPPPVLASPAGHLPGGRTARWCSGRARRPPPQPSRPAPPPPAPPSALPRGGRAARAGGPGSRARAAGARGCRLRSQLVPVRALGLGHRSDELVRFRFCSGSCRRARSPHDLSLASLLGAGALRPPPGSRPVSQPCCRPTRYEAVSFMDVNSTWRTVDRLSATACGCLG

SEQ ID NO: 1145 - protein, 31 aa, Homo Sapiens
GRAVDRGLQKINLSSFRTNVQRCSSMVHHKS

SEQ ID NO: 1146 - protein, 125 aa, Homo Sapiens
MLDKAPVLKVIVNSLKNMINTFVPSGKIMQVVDEKLPGLLGNFPGPFEEEMKGIAAVTDIPLGEIISFNIFYELFTICTSIVAEDKKGHLIHGRNMDFGVFLGWNINNDTWVITEQLKPLTVNLD

SEQ ID NO: 1147 - protein, 151 aa, Homo Sapiens
MLDKAPVLKVIVNSLKNMINTFVPSGKIMQVVDEKLPGLLGNFPGPFEEEMKGIAAVTDIPLGEIISFNIFYELFTICTSIVAEDKKGHLIHGRNMDFGVFLGWNINNDTWVITEQLKPLTVNLDFQRNNKTVFKASSFAGYVGMLTGFKP

SEQ ID NO: 1148 - protein, 330 aa, Homo Sapiens
MLDKAPVLKVIVNSLKNMINTFVPSGKIMQVVDEKLPGLLGNFPGPFEEEMKGIAAVTDIPLGEIISFNIFYELFTICTSIVAEDKKGHLIHGRNMDFGVFLGWNINNDTWVITEQLKPLTVNLDFQRNNKTVFKASSFAGYVGMLTGFKPGLFSLTLNERFSINGGYLGILEWILGKKDVMWIGFLTRTVLENSTSYEEAKNLLTKTKILAPAYFILGGNQSGEGCVITRDRKESLDVYELDAKQGRWYVVQTNYDRWKHPFFLDDRRTPAKMCLNRTSQENISFETMYDVLSTKPVLNKLTVYTTLIDVTKGQFETYLRDCPDPCIGW

SEQ ID NO: 1149 - protein, 330 aa, Homo Sapiens; identical to SEQ ID NO: 1148

SEQ ID NO: 1150 - protein, 110 aa, Homo Sapiens
MLDKAPVLKVIVNSLKNMINTFVPSGKIMQVVDEKLPGLLGNFPGPFEEEMKGIAAVTDIPLGKVHLEALKKKVIKFFYKFPLRCDIHTAQVLYVLDIQHRCTGLRYTAQ

SEQ ID NO: 1151 - protein, 110 aa, Homo Sapiens; identical to SEQ ID NO: 1150

SEQ ID NO: 1152 - protein, 187 aa, Homo Sapiens
MNCCIGLGEKARGSHRASYPSLSALFTEASILGFGSFAVKAQVAWKALSLSLRHPFRGTEKPRPLLPVPPPPSVPPTAWNGAVPGRGSRGGGGVACPRPSRLFFASAGVRGVALAARAMPGRSCVALVLLAAAVSCAVAQHAPPWTEDCRKSTYPPSGPTYRGAVPWYTINLDLPPYKRWHELMLDK

SEQ ID NO: 1153 - protein, 72 aa, Homo Sapiens
MNCCIGLGEKARGSHRASYPSLSALFTEASILGFGSFAVKAQVGNQQLGGPEWIRFSLTPRPLNCSLSLTPR

SEQ ID NO: 1154 - protein, 97 aa, Homo Sapiens
MNCCIGLGEKARGSHRASYPSLSALFTEASILGFGSFAVKAQVGNQQLGGPEWIRFSLTPRPLNCSLSLTPRGQRTAENQPILLQDQRTEVQFHGTP

SEQ ID NO: 1155 - protein, 74 aa, Homo Sapiens
MNCCIGLGEKARGSHRASYPSLSALFTEASILGFGSFAVKAQVGNQQLGGPEWIRFSLTPRPLNCSLSLTPRWG

SEQ ID NO: 1156 - protein, 74 aa, Homo Sapiens; identical to SEQ ID NO: 1155

SEQ ID NO: 1157 - protein, 74 aa, Homo Sapiens; identical to SEQ ID NO: 1155

SEQ ID NO: 1158 - protein, 74 aa, Homo Sapiens; identical to SEQ ID NO: 1155

SEQ ID NO: 1159 - protein, 74 aa, Homo Sapiens; identical to SEQ ID NO: 1155

SEQ ID NO: 1160 - protein, 71 aa, Homo Sapiens
MNCCIGLGEKARGSHRASYPSLSALFTEASILGFGSFAVKAQVVDRGLQKINLSSFRTNVQRCSSMVHHKS

SEQ ID NO: 1161 - protein, 58 aa, Homo Sapiens
MNCCIGLGEKARGSHRASYPSLSALFTEASILGFGSFAVKAQWTEDCRKSTYPPSGPT

SEQ ID NO: 1162 - protein, 59 aa, Homo Sapiens
MNCCIGLGEKARGSHRASYPSLSALFTEASILGFGSFAVKAQWTEDCRKSTYPPSGPTL

SEQ ID NO: 1163 - protein, 389 aa, Homo Sapiens
MNCCIGLGEKARGSHRASYPSLSALFTEASILGFGSFAVKAQWTEDCRKSTYPPSGPTVFPAVIRYRGAVPWYTINLDLPPYKRWHELMLDKAPVPGLLGNFPGPFEEEMKGIAAVTDIPLGEIISFNIFYELFTICTSIVAEDKKGHLIHGRNMDFGVFLGWNINNDTWVITEQLKPLTVNLDFQRNNKTVFKASSFAGYVGMLTGFKPGLFSLTLNERFSINGGYLGILEWILGKKDVMWIGFLTRTVLENSTSYEEAKNLLTKTKILAPAYFILGGNQSGEGCVITRDRKESLDVYELDAKQGRWYVVQTNYDRWKHPFFLDDRRTPAKMCLNRTSQENISFETMYDVLSTKPVLNKLTVYTTLIDVTKGQFETYLRDCPDPCIGW

SEQ ID NO: 1164 - protein, 411 aa, Homo Sapiens
MNCCIGLGEKARGSHRASYPSLSALFTEASILGFGSFAVKAQWTEDCRKSTYPPSGPTYRGAVPWYTINLDLPPYKRWHELMLDKAPVLKVIVNSLKNMINTFVPSGKIMQVVDEKLPGLLGNFPGPFEEEMKGIAAVTDIPLGEIISFNIFYELFTICTSIVAEDKKGHLIHGRNMDFGVFLGWNINNDTWVITEQLKPLTVNLDFQRNNKTVFKASSFAGYVGMLTGFKPGLFSLTLNERFSINGGYLGILEWILGKKDVMWIGFLTRTVLENSTSYEEAKNLLTKTKILAPAYFILGGNQSGEGCVITRDRKESLDVYELDAKQGRWYVVQTNYDRWKHPFFLDDRRTPAKMCLNRTSQENISFETMYDVLSTKPVLNKLTVYTTLIDVTKGQFETYLRDCPDPCIGW

SEQ ID NO: 1165 - protein, 341 aa, Homo Sapiens
MNCCIGLGEKARGSHRASYPSLSALFTEASILGFGSFAVKAQWTEDCRKSTYPPSGPTYRGAVPWYTINLDLPPYKRWHELMLDKAPVLKVIVNSLKNMINTFVPSGKIMQVVDEKLPGLLGNFPGPFEEEMKGIAAVTDIPLGEIISFNIFYELFTICTSIVAEDKKGHLIHGRNMDFGVFLGWNINNDTWVITEQLKPLTVNLDFQRNNKTVFKASSFAGYVGMLTGFKPGLFSLTLNERFSINGGYLGILEWILGKKDVMWIGFLTRTVLENSTSYEEAKNLLTKTKILAPAYFILGGNQSGEGCVITRDRKESLDVYEISHLKPCMMSCQQNLSSTS

SEQ ID NO: 1166 - protein, 386 aa, Homo Sapiens
MNCCIGLGEKARGSHRASYPSLSALFTEASILGFGSFAVKAQWTEDCRKSTYPPSGPTYRGAVPWYTINLDLPPYKRWHELMLDKAPVLKVIVNSLKNMINTFVPSGKIMQVVDEKLPGLLGNFPGPFEEEMKGIAAVTDIPLGHLIHGRNMDFGVFLGWNINNDTWVITEQLKPLTVNLDFQRNNKTVFKASSFAGYVGMLTGFKPGLFSLTLNERFSINGGYLGILEWILGKKDVMWIGFLTRTVLENSTSYEEAKNLLTKTKILAPAYFILGGNQSGEGCVITRDRKESLDVYELDAKQGRWYVVQTNYDRWKHPFFLDDRRTPAKMCLNRTSQENISFETMYDVLSTKPVLNKLTVYTTLIDVTKGQFETYLRDCPDPCIGW

SEQ ID NO: 1167 - protein, 191 aa, Homo Sapiens
MNCCIGLGEKARGSHRASYPSLSALFTEASILGFGSFAVKAQWTEDCRKSTYPPSGPTYRGAVPWYTINLDLPPYKRWHELMLDKAPVLKVIVNSLKNMINTFVPSGKIMQVVDEKLPGLLGNFPGPFEEEMKGIAAVTDIPLGKVHLEALKKKVIKFFYKFPLRCDIHTAQVLYVLDIQHRCTGLRYTAQ

SEQ ID NO: 1168 - protein, 140 aa, Homo Sapiens
MNCCIGLGEKARGSHRASYPSLSALFTEASILGFGSFAVKAQWTEDCRKSTYPPSGPTYRGAVPWYTINLDLPPYKRWHELMLDKAPVVIVNSLKNMINTFVPSGKIMQVVDEKLPGLLGNFPGPFEEEMKGIAAVTDIP

SEQ ID NO: 1169 - protein, 49 aa, Homo Sapiens
MPGRSCVALVLLAAAVSCAVAQHAPPRTAENQPILLQDQRTEVQFHGTP

SEQ ID NO: 1170 - protein, 81 aa, Homo Sapiens
MPGRSCVALVLLAAAVSCAVAQHAPPVSELEPRRREGRAGAGADGGAGVAARAVDRGLQKINLSSFRTNVQRCSSMVHHKS

SEQ ID NO: 1171 - protein, 75 aa, Homo Sapiens
MPGRSCVALVLLAAAVSCAVAQHAPPVSELEPRRREGRAGAGADGGAVDRGLQKINLSSFRTNVQRCSSMVHHKS

SEQ ID NO: 1172 - protein, 75 aa, Homo Sapiens; identical to SEQ ID NO: 1171

SEQ ID NO: 1173 - protein, 67 aa, Homo Sapiens
MPGRSCVALVLLAAAVSCAVAQHAPPVSELEPRRREGRAVDRGLQKINLSSFRTNVQRCSSMVHHKS

SEQ ID NO: 1174 - protein, 42 aa, Homo Sapiens
MPGRSCVALVLLAAAVSCAVAQHAPPWTEDCRKSTYPPSGPT

SEQ ID NO: 1175 - protein, 42 aa, Homo Sapiens; identical to SEQ ID NO: 1174

SEQ ID NO: 1176 - protein, 42 aa, Homo Sapiens; identical to SEQ ID NO: 1174

SEQ ID NO: 1177 - protein, 56 aa, Homo Sapiens
MPGRSCVALVLLAAAVSCAVAQHAPPWTEDCRKSTYPPSGPTLAYLATFLALLKRK

SEQ ID NO: 1178 - protein, 184 aa, Homo Sapiens
MPGRSCVALVLLAAAVSCAVAQHAPPWTEDCRKSTYPPSGPTVFPAVIRYRGAVPWYTINLDLPPYKRWHELMLDKAPVLKVIVNSLKNMINTFVPSGKIMQVVDEKLPGLLGNFPGPFEEEMKGIAAVTDIPLGEIISFNIFYELFTICTSIVAEDKKGHLIHGRNMDFGVFLGWNINNDTWV

SEQ ID NO: 1179 - protein, 62 aa, Homo Sapiens
MPGRSCVALVLLAAAVSCAVAQHAPPWTEDCRKSTYPPSGPTYRGAVPWYTINLDLPPYKRC

SEQ ID NO: 1180 - protein, 185 aa, Homo Sapiens
MPGRSCVALVLLAAAVSCAVAQHAPPWTEDCRKSTYPPSGPTYRGAVPWYTINLDLPPYKRWHELMLDKAPVLKVIVNSLKNMINTFVPSGKIMQVVDEKLPGLLGNFPGPFEEEMKGEIISFNIFYELFTICTSIVAEDKKGHLIHGRNMDFGVFLGWNINNDTWVITEQLKPLTVNLDFQRNN

SEQ ID NO: 1181 - protein, 375 aa, Homo Sapiens
MPGRSCVALVLLAAAVSCAVAQHAPPWTEDCRKSTYPPSGPTYRGAVPWYTINLDLPPYKRWHELMLDKAPVLKVIVNSLKNMINTFVPSGKIMQVVDEKLPGLLGNFPGPFEEEMKGIAAVTDIPLAEDKKGHLIHGRNMDFGVFLGWNINNDTWVITEQLKPLTVNLDFQRNNKTVFKASSFAGYVGMLTGFKPGLFSLTLNERFSINGGYLGILEWILGKKDVMWIGFLTRTVLENSTSYEEAKNLLTKTKILAPAYFILGGNQSGEGCVITRDRKESLDVYELDAKQGRWYVVQTNYDRWKHPFFLDDRRTPAKMCLNRTSQENISFETMYDVLSTKPVLNKLTVYTTLIDVTKGQFETYLRDCPDPCIGW

SEQ ID NO: 1182 - protein, 374 aa, Homo Sapiens
MPGRSCVALVLLAAAVSCAVAQHAPPWTEDCRKSTYPPSGPTYRGAVPWYTINLDLPPYKRWHELMLDKAPVLKVIVNSLKNMINTFVPSGKIMQVVDEKLPGLLGNFPGPFEEEMKGIAAVTDIPLEDKKGHLIHGRNMDFGVFLGWNINNDTWVITEQLKPLTVNLDFQRNNKTVFKASSFAGYVGMLTGFKPGLFSLTLNERFSINGGYLGILEWILGKKDVMWIGFLTRTVLENSTSYEEAKNLLTKTKILAPAYFILGGNQSGEGCVITRDRKESLDVYELDAKQGRWYVVQTNYDRWKHPFFLDDRRTPAKMCLNRTSQENISFETMYDVLSTKPVLNKLTVYTTLIDVTKGQFETYLRDCPDPCIGW

SEQ ID NO: 1183 - protein, 395 aa, Homo Sapiens
MPGRSCVALVLLAAAVSCAVAQHAPPWTEDCRKSTYPPSGPTYRGAVPWYTINLDLPPYKRWHELMLDKAPVLKVIVNSLKNMINTFVPSGKIMQVVDEKLPGLLGNFPGPFEEEMKGIAAVTDIPLGEIISFNIFYELFTICTSIVAEDKKGHLIHGRNMDFGVFLGWNINNDTWVITEQLKPLTVNLDFQRNNKTVFKASSFAGYVGMLTGFKPGLFSLTLNERFSINGGYLGILEWILGKKDVMWIGFLTRTVLENSTSYEEAKNLLTKTKILAPAYFILGGNQSGEGCVITRDRKESLDVYELDAKQGRWYVVQTNYDRWKHPFFLDDRRTPAKMCLNRTSQENISFETMYDVLSTKPVLNKLTVYTTLIDVTKGQFETYLRDCPDPCIGW

SEQ ID NO: 1184 - protein, 395 aa, Homo Sapiens; identical to SEQ ID NO: 1183

SEQ ID NO: 1185 - protein, 395 aa, Homo Sapiens; identical to SEQ ID NO: 1183

SEQ ID NO: 1186 - protein, 173 aa, Homo Sapiens
MPGRSCVALVLLAAAVSCAVAQHAPPWTEDCRKSTYPPSGPTYRGAVPWYTINLDLPPYKRWHELMLDKAPVLKVIVNSLKNMINTFVPSGKIMQVVDEKLPGLLGNFPGPFEEEMKGIAAVTDIPLGEIISFNIFYELFTICTSIVAEDKKGNCALREGGQHEALHKEKSSK

SEQ ID NO: 1187 - protein, 370 aa, Homo Sapiens
MPGRSCVALVLLAAAVSCAVAQHAPPWTEDCRKSTYPPSGPTYRGAVPWYTINLDLPPYKRWHELMLDKAPVLKVIVNSLKNMINTFVPSGKIMQVVDEKLPGLLGNFPGPFEEEMKGIAAVTDIPLGHLIHGRNMDFGVFLGWNINNDTWVITEQLKPLTVNLDFQRNNKTVFKASSFAGYVGMLTGFKPGLFSLTLNERFSINGGYLGILEWILGKKDVMWIGFLTRTVLENSTSYEEAKNLLTKTKILAPAYFILGGNQSGEGCVITRDRKESLDVYELDAKQGRWYVVQTNYDRWKHPFFLDDRRTPAKMCLNRTSQENISFETMYDVLSTKPVLNKLTVYTTLIDVTKGQFETYLRDCPDPCIGW

SEQ ID NO: 1188 - protein, 288 aa, Homo Sapiens
MPGRSCVALVLLAAAVSCAVAQHAPPWTEDCRKSTYPPSGPTYRGAVPWYTINLDLPPYKRWHELMLDKAPVLKVIVNSLKNMINTFVPSGKIMQVVDEKLPGLLGNFPGPFEEEMKGIAAVTDIPLGILEWILGKKDVMWIGFLTRTVLENSTSYEEAKNLLTKTKILAPAYFILGGNQSGEGCVITRDRKESLDVYELDAKQGRWYVVQTNYDRWKHPFFLDDRRTPAKMCLNRTSQENISFETMYDVLSTKPVLNKLTVYTTLIDVTKGQFETYLRDCPDPCIGW

SEQ ID NO: 1189 - protein, 175 aa, Homo Sapiens
MPGRSCVALVLLAAAVSCAVAQHAPPWTEDCRKSTYPPSGPTYRGAVPWYTINLDLPPYKRWHELMLDKAPVLKVIVNSLKNMINTFVPSGKIMQVVDEKLPGLLGNFPGPFEEEMKGIAAVTDIPLGKVHLEALKKKVIKFFYKFPLRCDIHTAQVLYVLDIQHRCTGLRYTAQ

SEQ ID NO: 1190 - protein, 376 aa, Homo Sapiens
MPGRSCVALVLLAAAVSCAVAQHAPPWTEDCRKSTYPPSGPTYRGAVPWYTINLDLPPYKRWHELMLDKAPVLKVIVNSLKNMINTFVPSGKIMQVVDEKLPGLLGNFPGPFEEEMKGIAAVTDIPLVAEDKKGHLIHGRNMDFGVFLGWNINNDTWVITEQLKPLTVNLDFQRNNKTVFKASSFAGYVGMLTGFKPGLFSLTLNERFSINGGYLGILEWILGKKDVMWIGFLTRTVLENSTSYEEAKNLLTKTKILAPAYFILGGNQSGEGCVITRDRKESLDVYELDAKQGRWYVVQTNYDRWKHPFFLDDRRTPAKMCLNRTSQENISFETMYDVLSTKPVLNKLTVYTTLIDVTKGQFETYLRDCPDPCIGW

SEQ ID NO: 1191 - protein, 246 aa, Homo Sapiens
MPGRSCVALVLLAAAVSCAVAQHAPPWTEDCRKSTYPPSGPTYRGAVPWYTINLDLPPYKRWHELMLDKAPVLKVIVNSLKNMINTFVPSGKIMQVVDEKLPGLLGNFPGPFEEEMKGIAAVTDIPLVNLDFQRNNKTVFKASSFAGYVGMLTGFKPGLFSLTLNERFSINGGYLGILEWILGKKDVMWIGFLTRTVLENSTSYEEAKNLLTKTKILAPAYFILGGNQSGEGCVITRDRKESLDVY

SEQ ID NO: 1192 - protein, 366 aa, Homo Sapiens
MPGRSCVALVLLAAAVSCAVAQHAPPWTEDCRKSTYPPSGPTYRGAVPWYTINLDLPPYKRWHELMLDKAPVPGLLGNFPGPFEEEMKGIAAVTDIPLGEIISFNIFYELFTICTSIVAEDKKGHLIHGRNMDFGVFLGWNINNDTWVITEQLKPLTVNLDFQRNNKTVFKASSFAGYVGMLTGFKPGLFSLTLNERFSINGGYLGILEWILGKKDVMWIGFLTRTVLENSTSYEEAKNLLTKTKILAPAYFILGGNQSGEGCVITRDRKESLDVYELDAKQGRWYVVQTNYDRWKHPFFLDDRRTPAKMCLNRTSQENISFETMYDVLSTKPVLNKLTVYTTLIDVTKGQFETYLRDCPDPCIGW

SEQ ID NO: 1193 - protein, 393 aa, Homo Sapiens
MPGRSCVALVLLAAAVSCAVAQHAPPWTEDCRKSTYPPSGPTYRGAVPWYTINLDLPPYKRWHELMLDKAPVVIVNSLKNMINTFVPSGKIMQVVDEKLPGLLGNFPGPFEEEMKGIAAVTDIPLGEIISFNIFYELFTICTSIVAEDKKGHLIHGRNMDFGVFLGWNINNDTWVITEQLKPLTVNLDFQRNNKTVFKASSFAGYVGMLTGFKPGLFSLTLNERFSINGGYLGILEWILGKKDVMWIGFLTRTVLENSTSYEEAKNLLTKTKILAPAYFILGGNQSGEGCVITRDRKESLDVYELDAKQGRWYVVQTNYDRWKHPFFLDDRRTPAKMCLNRTSQENISFETMYDVLSTKPVLNKLTVYTTLIDVTKGQFETYLRDCPDPCIGW

SEQ ID NO: 1194 - protein, 368 aa, Homo Sapiens
  misc_feature (1)..(1): Xaa can be any naturally occurring amino acid
XLAAAVSCAVAQHAPPVSELEPRRREGRAVDRGLQKINLSSFRTNLKVIVNSLKNMINTFVPSGKIMQVVDEKLPGLLGNFPGPFEEEMKGIAAVTDIPLGEIISFNIFYELFTICTSIVAEDKKGHLIHGRNMDFGVFLGWNINNDTWVITEQLKPLTVNLDFQRNNKTVFKASSFAGYVGMLTGFKPGLFSLTLNERFSINGGYLGILEWILGKKDVMWIGFLTRTVLENSTSYEEAKNLLTKTKILAPAYFILGGNQSGEGCVITRDRKESLDVYELDAKQGRWYVVQTNYDRWKHPFFLDDRRTPAKMCLNRTSQENISFETMYDVLSTKPVLNKLTVYTTLIDVTKGQFETYLRDCPDPCIGW

SEQ ID NO: 1195 - protein, 200 aa, Homo Sapiens
  misc_feature (1)..(1): Xaa can be any naturally occurring amino acid
XNNKTVFKASSFAGYVGMLTGFKPGLFSLTLNERFSINGGYLEWILGKKDVMWIGFLTRTVLENSTSYEEAKNLLTKTKILAPAYFILGGNQSGEGCVITRDRKESLDVYELDAKQGRWYVVQTNYDRWKHPFFLDDRRTPAKMCLNRTSQENISFETMYDVLSTKPVLNKLTVYTTLIDVTKGQFETYLRDCPDPCIGW

SEQ ID NO: 1196 - protein, 51 aa, Homo Sapiens
AQRYEAASTIYGPHTLSAYIQLFRNLAKAIATELHLWKSSLWMQLFMKLQL

SEQ ID NO: 1197 - protein, 144 aa, Homo Sapiens
AQRYEAASTIYGPHTLSAYIQLFRNLAKAIATGEVAEVIFVGANPKNSVQNQTHQTFLTVEKYEATSTSWQIVCNDASWETRFYWHKGLLGLSNATVEWHIPDTAQPGIYRIRYFGHNRKQDILKPAVILSFEGTSPAFEVVTI

SEQ ID NO: 1198 - protein, 780 aa, Homo Sapiens
MAKRTFSNLETFLIFLLVMMSAITVALLSLLFITSGTIENHKDLGGHFFSTTQSPPATQGSTAAQRSTATQHSTATQSSTATQTSPVPLTPESPLFQNFSGYHIGVGRADCTGQVADINLMGYGKSGQNAQGILTRLYSRAFIMAEPDGSNRTVFVSIDIGMVSQRLRLEVLNRLQSKYGSLYRRDNVILSGTHTHSGPAGYFQYTVFVIASEGFSNQTFQHMVTGILKSIDIAHTNMKPGKIFINKGNVDGVQINRSPYSYLQNPQSERARYSSNTDKEMIVLKMVDLNGDDLGLISWFAIHPVSMNNSNHLVNSDNVGYASYLLEQEKNKGYLPGQGPFVAAFASSNLGDVSPNILGPRCINTGESCDNANSTCPIGGPSMCIAKGPGQDMFDSTQIIGRAMYQRAKELYASASQEVTGPLASAHQWVDMTDVTVWLNSTHASKTCKPALGYSFAAGTIDGVGGLNFTQGKTEGDPFWDTIRDQILGKPSEEIKECHKPKPILLHTGELSKPHPWHPDIVDVQIITLGSLAITAIPGEFTTMSGRRLREAVQAEFASHGMQNMTVVISGLCNVYTHYITTYEEYQAQRYEAASTIYGPHTLSAYIQLFRNLAKAIATDTVANLSRGPEPPFFKQLIVPLIPSIVDRAPKGRTFGDVLQPAKPEYRVGEVAEVIFVGANPKNSVQNQTHQTFLTVEKYEATSTSWQIVCNDASWETRFYWHKGLLGLSNATVEWHIPDTAQPGIYRIRYFGHNRKQDILKPAVILSFEGTSPAFEVVTI

SEQ ID NO: 1199 - protein, 745 aa, Homo Sapiens
MAKRTFSNLETFLIFLLVMMSAITVALLSLLFITSGTIENHKDLGGHFFSTTQSPPATQGSTAAQRSTATQHSTATQSSTATQTSPVPLTPESPLFQNFSGYHIGVGRADCTGQVADINLMGYGKSGQNAQGILTRLYSRAFIMAEPDGSNRTVFVSIDIGMVSQRLRLEVLNRLQSKYGSLYRRDNVILSGTHTHSGPAGYFQYTVFVIASEGFSNQTFQHMVTGILKSIDIAHTNMKPGKIFINKGNVDGVQINRSPYSYLQNPQSERARYSSNTDKEMIVLKMVDLNGDDLGLISWFAIHPVSMNNSNHLVNSDNVGYASYLLEQEKNKGYLPGQGPFVAAFASSNLGDVSPNILGPRCINTGESCDNANSTCPIGGPSMCIAKGPGQDMFDSTQIIGRAMYQRAKSKTCKPALGYSFAAGTIDGVGGLNFTQGKTEGDPFWDTIRDQILGKPSEEIKECHKPKPILLHTGELSKPHPWHPDIVDVQIITLGSLAITAIPGEFTTMSGRRLREAVQAEFASHGMQNMTVVISGLCNVYTHYITTYEEYQAQRYEAASTIYGPHTLSAYIQLFRNLAKAIATDTVANLSRGPEPPFFKQLIVPLIPSIVDRAPKGRTFGDVLQPAKPEYRVGEVAEVIFVGANPKNSVQNQTHQTFLTVEKYEATSTSWQIVCNDASWETRFYWHKGLLGLSNATVEWHIPDTAQPGIYRIRYFGHNRKQDILKPAVILSFEGTSPAFEVVTI

SEQ ID NO: 1200 - protein, 622 aa, Homo Sapiens
MDSEKSSEWRSDVLNRLQSKYGSLYRRDNVILSGTHTHSGPAGYFQYTVFVIASEGFSNQTFQHMVTGILKSIDIAHTNMKPGKIFINKGNVDGVQINRSPYSYLQNPQSERARYSSNTDKEMIVLKMVDLNGDDLGLISWFAIHPVSMNNSNHLVNSDNVGYASYLLEQEKNKGYLPGQGPFVAAFASSNLGDVSPNILGPRCINTGESCDNANSTCPIGGPSMCIAKGPGQDMFDSTQIIGRAMYQRAKELYASASQEVTGPLASAHQWVDMTDVTVWLNSTHASKTCKPALGYSFAAGTIDGVGGLNFTQGKTEGDPFWDTIRDQILGKPSEEIKECHKPKPILLHTGELSKPHPWHPDIVDVQIITLGSLAITAIPGEFTTMSGRRLREAVQAEFASHGMQNMTVVISGLCNVYTHYITTYEEYQAQRYEAASTIYGPHTLSAYIQLFRNLAKAIATDTVANLSRGPEPPFFKQLIVPLIPSIVDRAPKGRTFGDVLQPAKPEYRVGEVAEVIFVGANPKNSVQNQTHQTFLTVEKYEATSTSWQIVCNDASWETRFYWHKGLLGLSNATVEWHIPDTAQPGIYRIRYFGHNRKQDILKPAVILSFEGTSPAFEVVTI

SEQ ID NO: 1201 - protein, 726 aa, Homo Sapiens
MSAITVALLSLLFITSGTIENHKDLGGHFFSTTQSPPATQGSTAAQRSTATQHSTATQSSTATQTSPVPLTPESPLFQNFSGYHIGVGRADCTGQVADINLMGYGKSGQNAQGILTRLYSRAFIMAEPDGSNRTVFVSIDIGMVSQRLRLEVLNRLQSKYGSLYRRDNVILSGTHTHSGPAGYFQYTVFVIASEGFSNQTFQHMVTGILKSIDIAHTNMKPGKIFINKGNVDGVQINRSPYSYLQNPQSERARYSSNTDKEMIVLKMVDLNGDDLGLISWFAIHPVSMNNSNHLVNSDNVGYASYLLEQEKNKGYLPGQGPFVAAFASSNLGDVSPNILGPRCINTGESCDNANSTCPIGGPSMCIAKGPGQDMFDSTQIIGRAMYQRAKSKTCKPALGYSFAAGTIDGVGGLNFTQGKTEGDPFWDTIRDQILGKPSEEIKECHKPKPILLHTGELSKPHPWHPDIVDVQIITLGSLAITAIPGEFTTMSGRRLREAVQAEFASHGMQNMTVVISGLCNVYTHYITTYEEYQAQRYEAASTIYGPHTLSAYIQLFRNLAKAIATDTVANLSRGPEPPFFKQLIVPLIPSIVDRAPKGRTFGDVLQPAKPEYRVGEVAEVIFVGANPKNSVQNQTHQTFLTVEKYEATSTSWQIVCNDASWETRFYWHKGLLGLSNATVEWHIPDTAQPGIYRIRYFGHNRKQDILKPAVILSFEGTSPAFEVVTI

SEQ ID NO: 1202 - protein, 236 aa, Homo Sapiens
MESSAKMESGGAGQQPQPQPQQPFLPPAACFFATAAAAAAAAAAAAAQSAQQQQQQQQQQQQAPQLRPAADGQPSGGGHKSAPKQVKRQRSSSPELMRCKRRLNFSGFGYSLPQQQPAAVARRNERERNRVKLVNLGFATLREHVPNGAANKKMSKVETLRSAVEYIRALQQLLDEHDAVSAAFQAGVLSPTISPNYSNDLNSMAGSPVSSYSSDEGSYDPLSPEEQELLDFTNWF

SEQ ID NO: 1203 - protein, 132 aa, Homo Sapiens
MDVTRLLLATLLVFLCFFTANSHLPPEEKLRDDRSLRSNSSVNLLDVPSVSIVALNKKSKQIGRKAAEKKRSSKKEASMKKVVRPRTPLSAPCVATRNSCKPPAPACCDPCASCQCRFFRSACSCRVLSLNC

SEQ ID NO: 1204 - protein, 132 aa, Homo Sapiens; identical to SEQ ID NO: 1203

SEQ ID NO: 1205 - protein, 243 aa, Homo Sapiens
MKEYVLLLFLALCSAKPFFSPSHIALKNMMLKDMEDTDDDDDDDDDDDDDDEDNSLFPTREPRSHFFPFDLFPMCPFGCQCYSRVVHCSDLGLTSVPTNIPFDTRMLDLQNNKIKEIKENDFKGLTSLYGLILNNNKLTKIHPKAFLTTKKLRRLYLSHNQLSEIPLNLPKSLAELRIHENKVKKIQKDTFKGMNALHVLEMSANPLDNNGIEPGAFEGVTVFHIRIAEAKLTSVPKDNLPSF

SEQ ID NO: 1206 - protein, 380 aa, Homo Sapiens
MKEYVLLLFLALCSAKPFFSPSHIALKNMMLKDMEDTDDDDDDDDDDDDDDEDNSLFPTREPRSHFFPFDLFPMCPFGCQCYSRVVHCSDLGLTSVPTNIPFDTRMLDLQNNKIKEIKENDFKGLTSLYGLILNNNKLTKIHPKAFLTTKKLRRLYLSHNQLSEIPLNLPKSLAELRIHENKVKKIQKDTFKGMNALHVLEMSANPLDNNGIEPGAFEGVTVFHIRIAEAKLTSVPKGLPPTLLELHLDYNKISTVELEDFKRYKELQRLGLGNNKITDIENGSLANIPRVREIHLENNKLKKIPSGLPELKYLQIIFLHSNSIARVGVNDFCPTVPKMKKSLYSAISLFNNPVKYWEMQPATFRCVLSRMSVQLGNFGM

SEQ ID NO: 1207 - protein, 431 aa, Homo Sapiens
MEGVGGLWPWVLGLLSLPGVILGAPLASSCAGACGTSFPDGLTPEGTQASGDKDIPAINQGLILEETPESSFLIEGDIIRPSPFRLLSATSNKWPMGGSGVVEVPFLLSSKYDEPSRQVILEALAEFERSTCIRFVTYQDQRDFISIIPMYGCFSSVGRSGGMQVVSLAPTCLQKGRGIVLHELMHVLGFWHEHTRADRDRYIRVNWNEILPGFEINFIKSQSSNMLTPYDYSSVMHYGRLAFSRRGLPTITPLWAPSVHIGQRWNLSASDITRVLKLYGCSPSGPRPRGRGSHAHSTGRSPAPASLSLQRLLEALSAESRSPDPSGSSAGGQPVPAGPGESPHGWESPALKKLSAEASARQPQTLASSPRSRPGAGAPGVAQEQSWLAGVSTKPTVPSSEAGIQPVPVQGSPALPGGCVPRNHFKGMSED

SEQ ID NO: 1208 - protein, 1844 aa, Homo Sapiens
MVGVLAMAAAAAPPPVKDCEIEPCKKRKKDDDTSTCKTITKYLSPLGKTRDRVFAPPKPSNILDYFRKTSPTNEKTQLGKECKIKSPESVPVDSNKDCTTPLEMFSNVEFKKKRKRVNLSHQLNNIKTENEAPIEISSDDSKEDYSLNNDFVESSTSVLRYKKQVEVLAENIQDTKSQPNTMTSLQNSKKVNPKQGTTKNDFKKLRKRKCRDVVDLSESLPLAEELNLLKKDGKDTKQMENTTSHANSRDNVTEAAQLNDSIITVSYEEFLKSHKENKVEEIPDSTMSICVPSETVDEIVKSGYISESENSEISQQVRFKTVTVLAQVHPIPPKKTGKIPRIFLKQKQFEMENSLSDPENEQTVQKRKSNVVIQEEELELAVLEAGSSEAVKPKCTLEERQQFMKAFRQPASDALKNGVKKSSDKQKDLNEKCLYEVGRDDNSKKIMENSGIQMVSKNGNLQLHTDKGSFLKEKNKKLKKKNKKTLDTGAIPGKNREGNTQKKETTFFLKEKQYQNRMSLRQRKTEFFKSSTLFNNESLVYEDIANDDLLKVSSLCNNNKLSRKTSIPVKDIKLTQSKAESEASLLNVSTPKSTRRSGRISSTPTTETIRGIDSDDVQDNSQLKASTQKAANLSEKHSLYTAELITVPFDSESPIRMKFTRISTPKKSKKKSNKRSEKSEATDGGFTSQIRKASNTSKNISKAKQLIEKAKALHISRSKVTEEIAIPLRRSSRHQTLPERKKLSETEDSVIIIDSSPTALKHPEKNQKKLQCLNDVLGKKLNTSTKNVPGKMKVAPLFLVRKAQKAADPVPSFDESSQDTSEKSQDCDVQCKAKRDFLMSGLPDLLKRQIAKKAAALDVYNAVSTSFQRVVHVQQKDDGCCLWHLKPPSCPLLTKFKELNTKVIDLSKCGIALGEFSTLNSKLKSGNSAAVFMRTRKEFTEEVRNLLLEEIRWSNPEFSLKKYFPLLLKKQIEHQVLSSECHSKQELEADVSHKETKRKLVEAENSKSKRKKPNEYSKNLEKTNRKSEELSKRNNSSGIKLDSSKDSGTEDMLWTEKYQPQTASELIGNELAIKKLHSWLKDWKRRAELEERQNLKGKRDEKHEDFSGGIDFKGSSDDEEESRLCNTVLITGPTGVGKTAAVYACAQELGFKIFEVNASSQRSGRQILSQLKEATQSHQVDKQGVNSQKPCFFNSYYIGKSPKKISSPKKVVTSPRKVPPPSPKSSGPKRALPPKTLANYFKVSPKPKNNEEIGMLLENNKGIKNSFEQKQITQTKSTNATNSNVKDVGAEEPSRKNATSLILFEEVDVIFDEDAGFLNAIKTFMATTKRPVILTTSDPTFSLMFDGCFEEIKFSTPSLLNVASYLQMICLTENFRTDVKDFVTLLTANTCDIRKSILYLQFWIRSGGGVLEERPLTLYRGNSRNVQLVCSEHGLDNKIYPKNTKKKRVDLPKCDSGCAETLFGLKNIFSPSEDLFSFLKHKITMKEEWHKFIQLLTEFQMRNVDFLYSNLEFILPLPVDTIPETKNFCGPSVTVDASAATKSMNCLARKHSEREQPLKKSQKKKQKKTLVILDDSDLFDTDLDFPDQSISLSSVSSSSNAEESKTGDEESKARDKGNNPETKKSIPCPPKTTAGKKCSALVSHCLNSLSEFMDNMSFLDALLTDVREQNKYGRNDFSWTNGKVTSGLCDEFSLESNDGWTSQSSGELKAAAEALSFTKCSSAISKALETLNSCKKLGRDPTNDLTFYVSQKRNNVYFSQSAANLDNAWKRISVIKSVFSSRSLLYVGNRQASIIEYLPTLRNICKTEKLKEQGKSKRRFLHYFEGIHLDIPKETVNTLAADFP

SEQ ID NO: 1209 - protein, 1224 aa, Homo Sapiens
MVGVLAMAAAAAPPPVKDCEIEPCKKRKKDDDTSTCKTITKYLSPLGKTRDRVFAPPKPSNILDYFRKTSPTNEKTQLGKECKIKSPESVPVDSNKDCTTPLEMFSNVEFKKKRKRVNLSHQLNNIKTENEAPIEISSDDSKEDYSLNNDFVESSTSVLRYKKQVEVLAENIQDTKSQPNTMTSLQNSKKVNPKQGTTKNDFKKLRKRKCRDVVDLSESLPLAEELNLLKKDGKDTKQMENTTSHANSRDNVTEAAQLNDSIITVSYEEFLKSHKENKVEEIPDSTMSICVPSETVDEIVKSGYISESENSEISQQVRFKTVTVLAQVHPIPPKKTGKIPRIFLKQKQFEMENSLSDPENEQTVQKRKSNVVIQEEELELAVLEAGSSEAVKPKCTLEERQQFMKAFRQPASDALKNGVKKSSDKQKDLNEKCLYEVGRDDNSKKIMENSGIQMVSKNGNLQLHTDKGSFLKEKNKKLKKKNKKTLDTGAIPGKNREGNTQKKETTFFLKEKQYQNRMSLRQRKTEFFKSSTLFNNESLVYEDIANDDLLKVSSLCNNNKLSRKTSIPVKDIKLTQSKAESEASLLNVSTPKSTRRSGRISSTPTTETIRGIDSDDVQDNSQLKASTQKAANLSEKHSLYTAELITVPFDSESPIRMKFTRISTPKKSKKKSNKRSEKSEATDGGFTSQIRKASNTSKNISKAKQLIEKAKALHISRSKVTEEIAIPLRRSSRHQTLPERKKLSETEDSVIIIDSSPTALKHPEKNQKKLQCLNDVLGKKLNTSTKNVPGKMKVAPLFLVRKAQKAADPVPSFDESSQDTSEKSQDCDVQCKAKRDFLMSGLPDLLKRQIAKKAAALDVYNAVSTSFQRVVHVQQKDDGCCLWHLKPPSCPLLTKFKELNTKVIDLSKCGIALGEFSTLNSKLKSGNSAAVFMRTRKEFTEEVRNLLLEEIRWSNPEFSLKKYFPLLLKKQIEHQVLSSECHSKQELEADVSHKETKRKLVEAENSKSKRKKPNEYSKNLEKTNRKSEELSKRNNSSGIKLDSSKDSGTEDMLWTEKYQPQTASELIGNELAIKKLHSWLKDWKRRAELEERQNLKGKRDEKHEDFSGGIDFKGSSDDEEESRLCNTVLITGPTGVGKTAAVYACAQELGFKIFEVNASSQRSGRQILSQLKEATQSHQVDKQGVNSQKPCFFNSYYIGKSPKKISSPKKVVTSPRKVPPPSPK

SEQ ID NO: 1210 - protein, 310 aa, Homo Sapiens
MEFPFDVDALFPERITVLDQHLRPPARRPGTTTPARVDLQQQIMTIIDELGKASAKAQNLSAPITSASRMQSNRHVVYILKDSSARPAGKGAIIGFIKVGYKKLFVLDDREAHNEVEPLCILDFYIHESVQRHGHGRELFQYMLQKERVEPHQLAIDRPSQKLLKFLNKHYNLETTVPQVNNFVIFEGFFAHQHPPARKLPPKRAEGDIKPYSSSDREFLKVAVEPPWPLNRAPRRATPPAHPPPRSSSLGNSPERGPLRPFVPEQELLRSLRLCPPHPTARLLLAADPGGSPAQRRRTSSLPRSEESRY

SEQ ID NO: 1211 - protein, 300 aa, Homo Sapiens
MEFPFDVDALFPERITVLDQHLRPPARRPGTTTPARVDLQQQIMTIIDELGKASAKAQNLSAPITSASRMQSNRHVVYILKDSSARPAGKGAIIGFIKVGYKKLFVLDDREAHNEVEPLCILDFYIHESVQRHGHGRELFQYMLQKERVEPHQLAIDRPSQKLLKFLNKHYNLETTVPQVNNFVIFEGFFAHQHPPARKLPPKRAEGDIKPYSSSDREFLKVAVEPPWPLNRAPRRATPPAHPPPRSSSLGNSPERGPLRPFVPEQELLRSLRLCPPHPTARLLLAADPGGSPAQRRRTR

SEQ ID NO: 1212 - protein, 333 aa, Homo Sapiens
MEFPFDVDALFPERITVLDQHLRPPARRPGTTTPARVDLQQQIMTIIDELGKASAKAQNLSAPITSASRMQSNRHVVYILKDSSARPAGKGAIIGFIKVGYKKLFVLDDREAHNEVEPLCILDFYIHESVQRHGHGRELFQYMLQKERVEPHQLAIDRPSQKLLKFLNKHYNLETTVPQVNNFVIFEGFFAHQHRPPAPSLRATRHSRAAAVDPTPAAPARKLPPKRAEGDIKPYSSSDREFLKVAVEPPWPLNRAPRRATPPAHPPPRSSSLGNSPERGPLRPFVPEQELLRSLRLCPPHPTARLLLAADPGGSPAQRRRTSSLPRSEESRY

SEQ ID NO: 1213 - protein, 421 aa, Homo Sapiens
MEFPFDVDALFPERITVLDQHLRPPARRPGTTTPARVDLQQQIMTIIDELGKASAKAQNLSAPITSASRMQSNRHVVYILKDSSARPAGKGAIIGFIKVGYKKLFVLDDREAHNEVEPLCILDFYIHESVQRHGHGRELFQYMLQKERVEPHQLAIDRPSQKLLKFLNKHYNLETTVPQVNNFVIFEGFFAHQHRPPAPSLRATRHSRAAAVDPTPAAPARKLPPKRAEGDIKPYSSSDREFLKVAVEPPWPLNRAPRRATPPAHPPPRSSSLGNSPERGPLRPFVPEQELLRSLRLCPPHPTARLLLAADPGGSPAQRRRTRGTPPGLVAQSCCYSRHGGVNSSSPNTGNQDSKQGEQETKNRSASEEQALSQDGSGEKPMHTAPPQAPAPPAQSWTVGGDILNARFIRNLQERRSTRPW

SEQ ID NO: 1214 - protein, 323 aa, Homo Sapiens
MEFPFDVDALFPERITVLDQHLRPPARRPGTTTPARVDLQQQIMTIIDELGKASAKAQNLSAPITSASRMQSNRHVVYILKDSSARPAGKGAIIGFIKVGYKKLFVLDDREAHNEVEPLCILDFYIHESVQRHGHGRELFQYMLQKERVEPHQLAIDRPSQKLLKFLNKHYNLETTVPQVNNFVIFEGFFAHQHRPPAPSLRATRHSRAAAVDPTPAAPARKLPPKRAEGDIKPYSSSDREFLKVAVEPPWPLNRAPRRATPPAHPPPRSSSLGNSPERGPLRPFVPEQELLRSLRLCPPHPTARLLLAADPGGSPAQRRRTR

SEQ ID NO: 1215 - protein, 409 aa, Homo Sapiens
MWLTWPFCFLTITLREEGVCHLESVDLQQQIMTIIDELGKASAKAQNLSAPITSASRMQSNRHVVYILKDSSARPAGKGAIIGFIKVGYKKLFVLDDREAHNEVEPLCILDFYIHESVQRHGHGRELFQYMLQKERVEPHQLAIDRPSQKLLKFLNKHYNLETTVPQVNNFVIFEGFFAHQHRPPAPSLRATRHSRAAAVDPTPAAPARKLPPKRAEGDIKPYSSSDREFLKVAVEPPWPLNRAPRRATPPAHPPPRSSSLGNSPERGPLRPFVPEQELLRSLRLCPPHPTARLLLAADPGGSPAQRRRTRGTPPGLVAQSCCYSRHGGVNSSSPNTGNQDSKQGEQETKNRSASEEQALSQDGSGEKPMHTAPPQAPAPPAQSWTVGGDILNARFIRNLQERRSTRPW

SEQ ID NO: 1216 - protein, 331 aa, Homo Sapiens
MAVAMVKLCERAGLPLLAAPLLRSLLPRAPQPGPAQPRSVQGQRCPARHPPGNLVCERGAGVNGVTAGAGGRLRGLHRGGRALGCSAHRPLHSARVRPPAHLAAPPGSSARGCRLTELGYALNEWLQDIRKNQLPGLLGGVGPMHSVVQLFQGFRDLLWLPIEQYRKDGRLMRGLQRGAASFGSSTASAALELSNRLVQAIQATAETVYDILSPAAPVSRSLQDKRSARRLRRGQQPADLREGVAKAYDTVREGILDTAQTICDVASRGHEQKGLTGAVGGVIRQLPPTVVKPLILATEATSSLLGGMRNQIVPDAHKDHALKWRSDSAQD

SEQ ID NO: 1217 - protein, 1938 aa, Homo Sapiens
MSRWLWPWSNCVKERVCRYLLHHYLGHFFQEHLSLDQLSLDLYKGSVALRDIHLEIWSVNEVLESMESPLELVEGFVGSIEVAVPWAALLTDHCTVRVSGLQLTLQPRRGPAPGAADSQSWASCMTTSLQLAQECLRDGLPEPSEPPQPLEGLEMFAQTIETVLRRIKVTFLDTVVRVEHSPGDGERGVAVEVRVQRLEYCDEAVRDPSQAPPVDVHQPPAFLHKLLQLAGVRLHYEELPAQEEPPEPPLQIGSCSGYMELMVKLKQNEAFPGPKLEVAGQLGSLHLLLTPRQLQQLQELLSAVSLTDHEGLADKLNKSRPLGAEDLWLIEQDLNQQLQAGAVAEPLSPDPLTNPLLNLDNTDLFFSMAGLTSSVASALSELSLSDVDLASSVRSDMASRRLSAQAHPAGKMAPNPLLDTMRPDSLLKMTLGGVTLTLLQTSAPSSGPPDLATHFFTEFDATKDGPFGSRDFHHLRPRFQRACPCSHVRLTGTAVQLSWELRTGSRGRRTTSMEVHFGQLEVLECLWPRGTSEPEYTEILTFPGTLGSQASARPCAHLRHTQILRRVPKSRPRRSVACHCHSELALDLANFQADVELGALDRLAALLRLATVPAEPPAGLLTEPLPAMEQQTVFRLSAPRATLRLRFPIADLRPEPDPWAGQAVRAEQLRLELSEPQFRSELSSGPGPPVPTHLELTCSDLHGIYEDGGKPPVPCLRVSKALDPKSTGRKYFLPQVVVTVNPQSSSTQWEVAPEKGEELELSVESPCELREPEPSPFSSKRTMYETEEMVIPGDPEEMRTFQSRTLALSRCSLEVILPSVHIFLPSKEVYESIYNRINNDLLMWEPADLLPTPDPAAQPSGFPGPSGFWHDSFKMCKSAFKLANCFDLTPDSDSDDEDAHFFSVGASGGPQAAAPEAPSLHLQSTFSTLVTVLKGRITALCETKDEGGKRLEAVHGELVLDMEHGTLFSVSQYCGQPGLGYFCLEAEKATLYHRAAVDDYPLPSHLDLPSFAPPAQLAPTIYPSEEGVTERGASGRKGQGRGPHMLSTAVRIHLDPHKNVKEFLVTLRLHKATLRHYMALPEQSWHSQLLEFLDVLDDPVLGYLPPTVITILHTHLFSCSVDYRPLYLPVRVLITAETFTLSSNIIMDTSTFLLRFILDDSALYLSDKCEVETLDLRRDYVCVLDVDLLELVIKTWKGSTEGKLSQPLFELRCSNNVVHVHSCADSCALLVNLLQYVMSTGDLHPPPRPPSPTEIAGQKLSESPASLPSCPPVETALINQRDLADALLDTERSLRELAQPSGGHLPQASPISVYLFPGERSGAPPPSPPVGGPAGSLGSCSEEKEDEREEEGDGDTLDSDEFCILDAPGLGIPPRDGEPVVTQLHPGPIVVRDGYFSRPIGSTDLLRAPAHFPVPSTRVVLREVSLVWHLYGGRDFGPHPGHRARTGLSGPRSSPSRCSGPNRPQNSWRTQGGSGRQHHVLMEIQLSKVSFQHEVYPAEPATGPAAPSQELEERPLSRQVFIVQELEVRDRLASSQINKFLYLHTSERMPRRAHSNMLTIKALHVAPTTNLGGPECCLRVSLMPLRLNVDQDALFFLKDFFTSLVAGINPVVPGETSAEARPETRAQPSSPLEGQAEGVETTGSQEAPGGGHSPSPPDQQPIYFREFRFTSEVPIWLDYHGKHVTMDQVGTFAGLLIGLAQLNCSELKLKRLCCRHGLLGVDKVLGYALNEWLQDIRKNQLPGLLGGVGPMHSVVQLFQGFRDLLWLPIEQYRKDGRLMRGLQRGAASFGSSTASAALELSNRLVQAIQATAETVYDILSPAAPVSRSLQDKRSARRLRRGQQPADLREGVAKAYDTVREGILDTAQTICDVASRGHEQKGLTGAVGGVIRQLPPTVVKPLILATEATSSLLGGMRNQIVPDAHKDHALKWRSDSAQD

SEQ ID NO: 1218 - protein, 1742 aa, Homo Sapiens
  misc_feature (1)..(1): Xaa can be any naturally occurring amino acid
XYCDEAVRDPSQAPPVDVHQPPAFLHKLLQLAGVRLHYEELPAQEEPPEPPLQIGSCSGYMELMVKLKQNEAFPGPKLEVAGQLGSLHLLLTPRQLQQLQELLSAVSLTDHEGLADKLNKSRPLGAEDLWLIEQDLNQQLQAGAVAEPLSPDPLTNPLLNLDNTDLFFSMAGLTSSVASALSELSLSDVDLASSVRSDMASRRLSAQAHPAGKMAPNPLLDTMRPDSLLKMTLGGVTLTLLQTSAPSSGPPDLATHFFTEFDATKDGPFGSRDFHHLRPRFQRACPCSHVRLTGTAVQLSWELRTGSRGRRTTSMEVHFGQLEVLECLWPRGTSEPEYTEILTFPGTLGSQASARPCAHLRHTQILRRVPKSRPRRSVACHCHSELALDLANFQADVELGALDRLAALLRLATVPAEPPAGLLTEPLPAMEQQTVFRLSAPRATLRLRFPIADLRPEPDPWAGQAVRAEQLRLELSEPQFRSELSSGPGPPVPTHLELTCSDLHGIYEDGGKPPVPCLRVSKALDPKSTGRKYFLPQVVVTVNPQSSSTQWEVAPEKGEELELSVESPCELREPEPSPFSSKRTMYETEEMVIPGDPEEMRTFQSRTLALSRCSLEVILPSVHIFLPSKEVYESIYNRINNDLLMWEPADLLPTPDPAAQPSGFPGPSGFWHDSFKMCKSAFKLANCFDLTPDSDSDDEDAHFFSVGASGGPQAAAPEAPSLHLQSTFSTLVTVLKGRITALCETKDEGGKRLEAVHGELVLDMEHGTLFSVSQYCGQPGLGYFCLEAEKATLYHRAAVDDYPLPSHLDLPSFAPPAQLAPTIYPSEEGVTERGASGRKGQGRGPHMLSTAVRIHLDPHKNVKEFLVTLRLHKATLRHYMALPEQSWHSQLLEFLDVLDDPVLGYLPPTVITILHTHLFSCSVDYRPLYLPVRVLITAETFTLSSNIIMDTSTFLLRFILDDSALYLSDKCEVETLDLRRDYVCVLDVDLLELVIKTWKGSTEGKLSQPLFELRCSNNVVHVHSCADSCALLVNLLQYVMSTGDLHPPPRPPSPTEIAGQKVQLSESPASLPSCPPVETALINQRDLADALLDTERSLRELAQPSGGHLPQASPISVYLFPGERSGAPPPSPPVGGPAGSLGSCSEEKEDEREEEGDGDTLDSDEFCILDAPGLGIPPRDGEPVVTQLHPGPIVVRDGYFSRPIGSTDLLRAPAHFPVPSTRVVLREVSLVWHLYGGRDFGPHPGHRARTGLSGPRSSPSRCSGPNRPQNSWRTQGGSGRQHHVLMEIQLSKVSFQHEVYPAEPATGPAAPSQELEERPLSRQVFIVQELEVRDRLASSQINKFLYLHTSERMPRRAHSNMLTIKALHVAPTTNLGGPECCLRVSLMPLRLNVDQDALFFLKDFFTSLVAGINPVVPGETSAEARPETRAQPSSPLEGQAEGVETTGSQEAPGGGHSPSPPDQQPIYFREFRFTSEVPIWLDYHGKHVTMDQVGTFAGLLIGLAQLNCSELKLKRLCCRHGLLGVDKVLGYALNEWLQDIRKNQLPGLLGGVGPMHSVVQLFQGFRDLLWLPIEQYRKDGRLMRGLQRGAASFGSSTASAALELSNRLVQAIQATAETVYDILSPAAPVSRSLQDKRSARRLRRGQQPADLREGVAKAYDTVREGILDTAQTICDVASRGHEQKGLTGAVGGVIRQLPPTVVKPLILATEATSSLLGGMRNQIVPDAHKDHALKWRSDSAQD

SEQ ID NO: 1219 - protein, 153 aa, Homo Sapiens
MHYPIGLLFDLLASSSALPWNITVHFKSFPEKDLLHCPSKDAIEAHFMSCMKEADALKHKSQVINEMQKKDHKQLWMGLQNDRFDQFWAINRKLMEYPAEENGFRYIPFRIYQTTTERPFIQKLFRPVAADGQLHTLGDLLKEVCPSAIDPED

SEQ ID NO: 1220 - protein, 197 aa, Homo Sapiens
MHYPIGLLFDLLASSSALPWNITVHFKSFPEKDLLHCPSKDAIEAHFMSCMKEADALKHKSQVINEMQKKDHKQLWMGLQNDRFDQFWAINRKLMEYPAEENGFRYIPFRIYQTTTERPFIQKLFRPVAADGQLHTLGDLLKEVCPSAIDPEDGEKKNQVMIHGIEPMLETPLQWLSEHLSYPDNFLHISIIPQPTD

SEQ ID NO: 1221 - protein, 159 aa, Homo Sapiens
MHYPIGLLFDLLASSSALPWNITVHFKSFPEKDLLHCPSKDAIEAHFMSCMKEADALKHKSQVINEMQKKDHKQLWMGLQNDRFDQFWAINRKLMEYPAEENGFRYIPFRIYQTTTERPFIQKLFRPVAADGQLHTLGDLLKEVCPSAIDPEEIPPGED

SEQ ID NO: 1222 - protein, 44 aa, Homo Sapiens
MTDDKDVLRDVWFGRIPTCFTLYQDEITEREAEPYYALSNWFAI

SEQ ID NO: 1223 - protein, 162 aa, Homo Sapiens
MTDDKDVLRDVWFGRIPTCFTLYQDEITEREAEPYYLLLPRVSYLTLVTDKVKKHFQKVMRQEDISEIWFEYEGTPLKWHYPIGLLFDLLASSSALPWNITVHFKSFPEKDLLHCPSKDAIEAHFMSCMKEADALKHKSQVINEMQKKDHKQLWMGLQNDND

SEQ ID NO: 1224 - protein, 275 aa, Homo Sapiens
MTDDKDVLRDVWFGRIPTCFTLYQDEITEREAEPYYLLLPRVSYLTLVTDKVKKHFQKVMRQEDISEIWFEYEGTPLKWHYPIGLLFDLLASSSALPWNITVHFKSFPEKDLLHCPSKDAIEAHFMSCMKEADALKHKSQVINEMQKKDHKQLWMGLQNDRFDQFWAINRKLMEYPAEENGFRYIPFRIYQTTTERPFIQKLFRPVAADGQLHTLGDLLKEVCPSAIDPEDGEKKNQVMIHGIEPMLETPLQWLSEHLSYPDNFLHISIIPQPTD

SEQ ID NO: 1225 - protein, 275 aa, Homo Sapiens; identical to SEQ ID NO: 1224

SEQ ID NO: 1226 - protein, 233 aa, Homo Sapiens
MTDDKDVLRDVWFGRIPTCFTLYQDEITEREAEPYYLLLPRVSYLTLVTDKVKKHFQKVMRQEDISEIWFEYEGTPLKWHYPIGLLFDLLASSSALPWNITVHFKSFPEKDLLHCPSKDAIEAHFMSCMKEADALKHKSQVINEMQKKDHKQLWMGLQNDRFDQFWAINRKLMEYPAEENGFRYIPFRIYQVTAVWVGIQRFQASEEESEDEEFLATLTGGERSGKARKQWTQ

SEQ ID NO: 1227 - protein, 91 aa, Homo Sapiens
MTDDKDVLRDVWFGRIPTCFTLYQDEITEREAEPYYTDLTSFGPSIGNSWNILQKKMDFVISPLEYIRQRLKDLSFRSCFVLWLQMDSCTH

SEQ ID NO: 1228 - protein, 823 aa, Homo Sapiens
MAASEAAAAAGSAALAAGARAVPAATTGAAAAASGPWVPPGPRLRGSRPRPAGATQQPAVPAPPAGELIQPSVSELSRAVRTNILCTVRGCGKILPNSPALNMHLVKSHRLQDGIVNPTIRKDLKTGPKFYCCPIEGCPRGPERPFSQFSLVKQHFMKMHAEKKHKCSKCSNSYGTEWDLKRHAEDCGKTFRCTCGCPYASRTALQSHIYRTGHEIPAEHRDPPSKKRKMENCAQNQKLSNKTIESLNNQPIPRPDTQELEASEIKLEPSFEDSCGSNTDKQTLTTPPRYPQKLLLPKPKVALVKLPVMQFSVMPVFVPTADSSAQPVVLGVDQGSATGAVHLMPLSVGTLILGLDSEACSLKESLPLFKIANPIAGEPISTGVQVNFGKSPSNPLQELGNTCQKNSISSINVQTDLSYASQNFIPSAQWATADSSVSSCSQTDLSFDSQVSLPISVHTQTFLPSSKVTSSIAAQTDAFMDTCFQSGGVSRETQTSGIESPTDDHVQMDQAGMCGDIFESVHSSYNVATGNIISNSLVAETVTHSLLPQNEPKTLNQDIEKSAPIINFSAQNSMLPSQNMTDNQTQTIDLLSDLENILSSNLPAQTLDHRSLLSDTNPGPDTQLPSGPAQNPGIDFDIEEFFSASNIQTQTEESELSTMTTEPVLESLDIETQTDFLLADTSAQSYGCRGNSNFLGLEMFDTQTQTDLNFFLDSSPHLPLGSILKHSSFSVSTDSSDTETQTEGVSTAKNIPALESKVQLNSTETQTMSSGFETLGSLFFTSNETQTAMDDFLLADLAWNTMESQFSSVETQTSAEPHTVSNF

SEQ ID NO: 1229 - protein, 55 aa, Homo Sapiens
MKMHAEKKHKCSKCSNSYGTEWDLKRHAEDCGKTFRCTCGCPYASRTALQSHIYR

SEQ ID NO: 1230 - protein, 667 aa, Homo Sapiens
MKMHAEKKHKCSKCSNSYGTEWDLKRHAEDCGKTFRCTCGCPYASRTALQSHIYRTGHEIPAEHRDPPSKKRKMENCAQNQKLSNKTIESLNNQPIPRPDTQELEASEIKLEPSFEDSCGSNTDKQTLTTPPRYPQKLLLPKPKVALVKLPVMQFSVMPVFVPTADSSAQPVVLGVDQGSATGAVHLMPLSVGTLILGLDSEACSLKESLPLFKIANPIAGEPISTGVQVNFGKSPSNPLQELGNTCQKNSISSINVQTDLSYASQNFIPSAQWATADSSVSSCSQTDLSFDSQVSLPISVHTQTFLPSSKVTSSIAAQTDAFMDTCFQSGGVSRETQTSGIESPTDDHVQMDQAGMCGDIFESVHSSYNVATGNIISNSLVAETVTHSLLPQNEPKTLNQDIEKSAPIINFSAQNSMLPSQNMTDNQTQTIDLLSDLENILSSNLPAQTLDHRSLLSDTNPGPDTQLPSGPAQNPGIDFDIEEFFSASNIQTQTEESELSTMTTEPVLESLDIETQTDFLLADTSAQSYGCRGNSNFLGLEMFDTQTQTDLNFFLDSSPHLPLGSILKHSSFSVSTDSSDTETQTEGVSTAKNIPALESKVQLNSTETQTMSSGFETLGSLFFTSNETQTAMDDFLLADLAWNTMESQFSSVETQTSAEPHTVSNF

SEQ ID NO: 1231 - protein, 667 aa, Homo Sapiens; identical to SEQ ID NO: 1230

SEQ ID NO: 1232 - protein, 1204 aa, Homo Sapiens
MAAAAAVGNAVPCGARPCGVRPDGQPKPGPQPRALLAAGPALIANGDELVAAVWPYRRLALLRRLTVLPFAGLLYPAWLGAAAAGCWGWGSSWVQIPEAALLVLATICLAHALTVLSGHWSVHAHCALTCTPEYDPSKATFVKVVPTPNNGSTELVALHRNEGEDGLEVLSFEFQKIKYSYDALEKKQFLPVAFPVGNAFSYYQSNRGFQEDSEIRAAEKKFGSNKAEMVVPDFSELFKERATAPFFVFQVFCVGLWCLDEYWYYSVFTLSMLVAFEASLVQQQMRNMSEIRKMGNKPHMIQVYRSRKWRPIASDEIVPGDIVSIGRSPQENLVPCDVLLLRGRCIVDEAMLTGESVPQMKEPIEDLSPDRVLDLQADSRLHVIFGGTKVVQHIPPQKATTGLKPVDSGCVAYVLRTGFNTSQGKLLRTILFGVKRVTANNLETFIFILFLLVFAIAAAAYVWIEGTKDPSRNRYKLFLECTLILTSVVPPELPIELSLAVNTSLIALAKLYMYCTEPFRIPFAGKVEVCCFDKTGTLTSDSLVVRGVAGLRDGKEVTPVSSIPVETHRALASCHSLMQLDDGTLVGDPLEKAMLTAVDWTLTKDEKVFPRSIKTQGLKIHQRFHFASALKRMSVLASYEKLGSTDLCYIAAVKGAPETLHSMFSQCPPDYHHIHTEISREGARVLALGYKELGHLTHQQAREVKREALECSLKFVGFIVVSCPLKADSKAVIREIQNASHRVVMITGDNPLTACHVAQELHFIEKAHTLILQPPSEKGRQCEWRSIDGSIVLPLARGSPKALALEYALCLTGDGLAHLQATDPQQLLRLIPHVQVFARVAPKQKEFVITSLKELGYVTLMCGDGTNDVGALKHADVGVALLANAPERVVERRRRPRDSPTLSNSGIRATSRTAKQRSGLPPSEEQPTSQRDRLSQVLRDLEDESTPIVKLGDASIAAPFTSKLSSIQCICHVIKQGRCTLVTTLQMFKILALNALILAYSQSVLYLEGVKFSDFQATLQGLLLAGCFLFISRSKPLKTLSRERPLPNIFNLYTILTVMLQFFVHFLSLVYLYREAQARSPEKQEQFVDLYKEFEPSLVNSTVYIMAMAMQMATFAINYKGPPFMESLPENKPLVWSLAVSLLAIIGLLLGSSPDFNSQFGLVDIPVEFKLVIAQVLLLDFCLALLADRVLQFFLGTPKLKVPS

SEQ ID NO: 1233 - protein, 1086 aa, Homo Sapiens
MEKWEELNSHQPGEEYDPSKATFVKVVPTPNNGSTELVALHRNEGEDGLEVLSFEFQKIKYSYDALEKKQFLPVAFPVGNAFSYYQSNRGFQEDSEIRAAEKKFGSNKAEMVVPDFSELFKERATAPFFVFQVFCVGLWCLDEYWYYSVFTLSMLVAFEASLVQQQMRNMSEIRKMGNKPHMIQVYRSRKWRPIASDEIVPGDIVSIGRSPQENLVPCDVLLLRGRCIVDEAMLTGESVPQMKEPIEDLSPDRVLDLQADSRLHVIFGGTKVVQHIPPQKATTGLKPVDSGCVAYVLRTGFNTSQGKLLRTILFGVKRVTANNLETFIFILFLLVFAIAAAAYVWIEGTKDPSRNRYKLFLECTLILTSVVPPELPIELSLAVNTSLIALAKLYMYCTEPFRIPFAGKVEVCCFDKTGTLTSDSLVVRGVAGLRDGKEVTPVSSIPVETHRALASCHSLMQLDDGTLVGDPLEKAMLTAVDWTLTKDEKVFPRSIKTQGLKIHQRFHFASALKRMSVLASYEKLGSTDLCYIAAVKGAPETLHSMFSQCPPDYHHIHTEISREGARVLALGYKELGHLTHQQAREVKREALECSLKFVGFIVVSCPLKADSKAVIREIQNASHRVVMITGDNPLTACHVAQELHFIEKAHTLILQPPSEKGRQCEWRSIDGSIVLPLARGSPKALALEYALCLTGDGLAHLQATDPQQLLRLIPHVQVFARVAPKQKEFVITSLKELGYVTLMCGDGTNDVGALKHADVGVALLANAPERVVERRRRPRDSPTLSNSGIRATSRTAKQRSGLPPSEEQPTSQRDRLSQVLRDLEDESTPIVKLGDASIAAPFTSKLSSIQCICHVIKQGRCTLVTTLQMFKILALNALILAYSQSVLYLEGVKFSDFQATLQGLLLAGCFLFISRSKPLKTLSRERPLPNIFNLYTILTVMLQFFVHFLSLVYLYREAQARSPEKQEQFVDLYKEFEPSLVNSTVYIMAMAMQMATFAINYKGPPFMESLPENKPLVWSLAVSLLAIIGLLLGSSPDFNSQFGLVDIPVEFKLVIAQVLLLDFCLALLADRVLQFFLGTPKLKVPS

SEQ ID NO: 1234 - protein, 185 aa, Homo Sapiens
  misc_feature (1)..(1): Xaa can be any naturally occurring amino acid
XASPWVPAAAFLSVTIATWATHLPGLDSQGHPLHFGAGLIMTPLLTCCACLEYDPSKATFVKVVPTPNNGSTELVALHRNEGEDGLEVLSFEFQKIKYSYDALEKKQFLPVAFPVGNAFSYYQSNRGFQEDSEIRAAEKKFGSNKAEMVVPDFSELFKERATAPFFVFQVFCVGLWCLDEYWYYS

SEQ ID NO: 1235 - protein, 256 aa, Homo Sapiens
MLSRVVLSAAATAAPSLKNAAFLGPGVLQATRTFHTGQPHLVPVPPLPEYGGKVRYGLIPEEFFQFLYPKTGVTGPYVLGTGLILYALSKEIYVISAETFTALSVLGVMVYGIKKYGPFVADFADKLNEQKLAQLEEAKQASIQHIQNAIDTEKSQQALVQKRHYLFDVQRNNIAMALEVTYRERLYRVYKEVKNRLDYHISVQNMMRRKEQEHMINWVEKHVVQSISTQQEKETIAKCIADLKLLAKKAQAQPVM

SEQ ID NO: 1236 - protein, 195 aa, Homo Sapiens
MLSRVVLSAAATAGPYVLGTGLILYALSKEIYVISAETFTALSVLGVMVYGIKKYGPFVADFADKLNEQKLAQLEEAKQASIQHIQNAIDTEKSQQALVQKRHYLFDVQRNNIAMALEVTYRERLYRVYKEVKNRLDYHISVQNMMRRKEQEHMINWVEKHVVQSISTQQEKETIAKCIADLKLLAKKAQAQPVM

SEQ ID NO: 1237 - protein, 128 aa, Homo Sapiens
AQALWRMPWLPVFLSLAAAAAAAAAEQQVPLVLWSSDRDLWAPAADTHEGHITSDLQLSTYLDPALELGPRNVLLFLQDKLSIEDFTAYGGVFGNKQDSAFSNLEHTQVRRCPIHSGPHSGPPFQGGP

SEQ ID NO: 1238 - protein, 281 aa, Homo Sapiens
MAPREVLTGNDEVIGQVLSTLKSEDVPYTAALTAVRPSRVARDVAVVAGGLGRQLLQKQPVSPVIHPPVSYNDTAPRILFWAQNFSVAYKDQWEDLTPLTFGVQELNLTGSFWNDSFARLSLTYERLFGTTVTFKFILANRLYPVSARHWFTMERLEVHSNGSVAYFNASQVTGPSIYSFHCEYVSSLSKKGSLLVARTQPSPWQMMLQDFQIQAFNVMGEQFSYASDCASFFSPGIWMGLLTSLFMLFIFTYGLHMILSLKTMDRFDDHKGPTISLTQIV

SEQ ID NO: 1239 - protein, 273 aa, Homo Sapiens
MMAAMATARVRMGPRCAQALWRMPWLPVFLSLAAAAAAAAAEQQVPLVLWSSDRDLWAPAADTHEGHITSDLQLSTYLDPALELGPRNVLLFLQDKLSIEDFTAYGGVFGNKQDSAFSNLENALDLAPSSLVLPAVDWYAVSTLTTYLQEKLGASPLHVARDVAVVAGGLGRQLLQKQPVSPVIHPPVSYNDTAPRILFWAQNFSVAYKDQWEDLTPLTFGVQELNLTGSFWNDSFARFILANRLYPVSARHWFTMERLEVHSNGSVAYFNAS

SEQ ID NO: 1240 - protein, 230 aa, Homo Sapiens
MMAAMATARVRMGPRCAQALWRMPWLPVFLSLAAAAAAAAAEQQVPLVLWSSDRDLWAPAADTHEGHITSDLQLSTYLDPALELGPRNVLLFLQDKLSIEDFTAYGGVFGNKQDSAFSNLENALDLAPSSLVLPAVDWYAVSTLTTYLQEKLGASPLHVDLATLRELKLNASLPALLLIRLPYTASSGLMAPREVLTDEVIGQVLSTLKSEDVPYTAALTAVRPSRVARD

SEQ ID NO: 1241 - protein, 470 aa, Homo Sapiens
MMAAMATARVRMGPRCAQALWRMPWLPVFLSLAAAAAAAAAEQQVPLVLWSSDRDLWAPAADTHEGHITSDLQLSTYLDPALELGPRNVLLFLQDKLSIEDFTAYGGVFGNKQDSAFSNLENALDLAPSSLVLPAVDWYAVSTLTTYLQEKLGASPLHVDLATLRELKLNASLPALLLIRLPYTASSGLMAPREVLTGNDEVIGQVLSTLKSEDVPYTAALTAVRPSRVARDVAVVAGGLGRQLLQKQPVSPVIHPPVSYNDTAPRILFWAQNFSVAYKDQWEDLTPLTFGVQELNLTGSFWNDSFARLSLTYERLFGTTVTFKFILANRLYPVSARHWFTMERLEVHSNGSVAYFNASQVTGPSIYSFHCEYVSSLSKKGSLLVARTQPSPWQMMLQDFQIQAFNVMGEQFSYASDCASFFSPGIWMGLLTSLFMLFIFTYGLHMILSLKTMDRFDDHKGPTISLTQIV

SEQ ID NO: 1242 - protein, 134 aa, Homo Sapiens
MMAAMATARVRMGPRCAQALWRMPWLPVFLSLAAAAAAAAAEQQVPLVLWSSDRDLWAPAADTHEGHITSDLQLSTYLDPALELGPRNVLLFLQDKVRPPQPTLPRSSGGSQAPSPHDTDAHSPREASVTLSQL

SEQ ID NO: 1243 - protein, 134 aa, Homo Sapiens; identical to SEQ ID NO: 1242

SEQ ID NO: 1244 - protein, 133 aa, Homo Sapiens
  misc_feature (1)..(1): Xaa can be any naturally occurring amino acid
XAAMATARVRMGPRCAQALWRMPWLPVFLSLAAAAAAAAAEQQVPLVLWSSDRDLWAPAADTHEGHITSDLQLSTYLDPALELGPRNVLLFLQDKVRPPQPTLPRSSGGSQAPSPHDTDAHSPREASVTLSQL

SEQ ID NO: 1245 - protein, 186 aa, Homo Sapiens
FHRPRATVMVMVKGVNKLALPPGSVISYPLENLSRHKHLAKDHSPDLYSLELAGLDEIGKRYGEDSEQFRDASKILVDALQKFADDMYSLYGGNAVVELVTVKSFDTSLIRKTRTILEAKQAKNPASPYNLAYKYNFEYSVVFNMVLWIMIALALAVIITSYNIWNMDPGYDSIIYRMTNQKIRMD

SEQ ID NO: 1246 - protein, 186 aa, Homo Sapiens
MAVFVVLLALVAGVLGNEFSILKSPGSVVFRNGNWPIPGERIPDVAALSMGFSVKEDLSWPGLAVGNLFHRPRATVMVMVKGVNKLALPPGSVISYPLENAVPFSLDSVANSIHSLFSEETPVVLQLAPSEERVYMVGKANSVFEDLSVTLRQLRNRLFQENSVLSSLPLNSLSRNNENALFFWAL

SEQ ID NO: 1247 - protein, 209 aa, Homo Sapiens
MAVFVVLLALVAGVLGNEFSILKSPGSVVFRNGNWPIPGERIPDVAALSMGFSVKEDLSWPGLAVGNLFHRPRATVMVMVKGVNKLALPPGSVISYPLENAVPFSLDSVANSIHSLFSEETPVVLQLAPSEERVYMVGKANSVFEDLSVTLRQLRNRLFQENSVLSSLPLNSLSRNNEVDLLFLSELQVLHDISSLGETTYLPRTQAWA

SEQ ID NO: 1248 - protein, 345 aa, Homo Sapiens
MAVFVVLLALVAGVLGNEFSILKSPGSVVFRNGNWPIPGERIPDVAALSMGFSVKEDLSWPGLAVGNLFHRPRATVMVMVKGVNKLALPPGSVISYPLENAVPFSLDSVANSIHSLFSEETPVVLQLAPSEERVYMVGKANSVFEDLSVTLRQLRNRLFQENSVLSSLPLNSLSRNNEVDLLFLSELQVLHDISSLHLAKDHSPDLYSLELAGLDEIGKRYGEDSEQFRDASKILVDALQKFADDMYSLYGGNAVVELVTVKSFDTSLIRKTRTILEAKQAKNPASPYNLAYKYNFEYSVVFNMVLWIMIALALAVIITSYNIWNMDPGYDSIIYRMTNQKIRMD

SEQ ID NO: 1249 - protein, 331 aa, Homo Sapiens
MAVFVVLLALVAGVLGNEFSILKSPGSVVFRNGNWPIPGERIPDVAALSMGFSVKEDLSWPGLAVGNLFHRPRATVMVMVKGVNKLALPPGSVISYPLENAVPFSLDSVANSIHSLFSEETPVVLQLAPSEERVYMVGKANSVFEDLSVTLRQLRNRLFQENSVLSSLPLNSLSRNNEVDLLFLSELQVLHDISSLLAGLDEIGKRYGEDSEQFRDASKILVDALQKFADDMYSLYGGNAVVELVTVKSFDTSLIRKTRTILEAKQAKNPASPYNLAYKYNFEYSVVFNMVLWIMIALALAVIITSYNIWNMDPGYDSIIYRMTNQKIRMD

SEQ ID NO: 1250 - protein, 349 aa, Homo Sapiens
MAVFVVLLALVAGVLGNEFSILKSPGSVVFRNGNWPIPGERIPDVAALSMGFSVKEDLSWPGLAVGNLFHRPRATVMVMVKGVNKLALPPGSVISYPLENAVPFSLDSVANSIHSLFSEETPVVLQLAPSEERVYMVGKANSVFEDLSVTLRQLRNRLFQENSVLSSLPLNSLSRNNEVDLLFLSELQVLHDISSLLSRHKHLAKDHSPDLYSLELAGLDEIGKRYGEDSEQFRDASKILVDALQKFADDMYSLYGGNAVVELVTVKSFDTSLIRKTRTILEAKQANPASPYNLAYKYNFEYSVVFNMVLWIMIALALAVIITSYNIWNMDPGYDSIIYRMTNQKIRMD

SEQ ID NO: 1251 - protein, 350 aa, Homo Sapiens
MAVFVVLLALVAGVLGNEFSILKSPGSVVFRNGNWPIPGERIPDVAALSMGFSVKEDLSWPGLAVGNLFHRPRATVMVMVKGVNKLALPPGSVISYPLENAVPFSLDSVANSIHSLFSEETPVVLQLAPSEERVYMVGKANSVFEDLSVTLRQLRNRLFQENSVLSSLPLNSLSRNNEVDLLFLSELQVLHDISSLLSRHKHLAKDHSPDLYSLELAGLDEIGKRYGEDSEQFRDASKILVDALQKFADDMYSLYGGNAVVELVTVKSFDTSLIRKTRTILEAKQAKNPASPYNLAYKYNFEYSVVFNMVLWIMIALALAVIITSYNIWNMDPGYDSIIYRMTNQKIRMD

SEQ ID NO: 1252 - protein, 258 aa, Homo Sapiens
MAVFVVLLALVAGVLGNEFSILKSPGSVVFRNGNWPIPGERIPDVAALSMGFSVKEDLSWPGLAVGNLFHRPRATVMVMVKGVNKLALPPGSVISYPLENAVPFSLDSVANSIHSLFSEETPVVLQLAPSEERVYMVGKANSVFEDLSVTLRQLRNRLFQENSVLSSLPLNSLSRNNEVDLLFLSELQVLHDISSLLSRHKHLAKDHSPDLYSLELAGLDEIGKRYGEDSEQFRDASKILVDALQKMTCTVFMVGMQW

SEQ ID NO: 1253 - protein, 262 aa, Homo Sapiens
MAVFVVLLALVAGVLGNEFSILKSPGSVVFRNGNWPIPGERIPDVAALSMGFSVKEDLSWPGLAVGNLFHRPRATVMVMVKGVNKLALPPGSVISYPLENAVPFSLDSVANSIHSLFSEETPVVLQLAPSEERVYMVGKANSVFEDLSVTLRQLRNRLFQENSVLSSLPLNSLSRNNEVDLLFLSELQVLHDISSLLSRHKHLAKDHSPDLYSLELAGLDEIGKRYGEDSEQFRDASKILVDALQKSLWWECSGRVSHCQVI

SEQ ID NO: 1254 - protein, 143 aa, Homo Sapiens
MAVFVVLLALVAGVLGNEFSILKSPGSVVFRNGNWPIPGERIPDVAALSMGFSVKEDLSWPGLAVGNLFHRPRATVMVMVKGVNKLALPPGSVISYPLENAVPFSLDSVANSIHSLFSEETPVVLQLAPSEESVYGREGKLSV

SEQ ID NO: 1255 - protein, 318 aa, Homo Sapiens
MAVFVVLLALVAGVLGNEFSILKSPGSVVFRNGNWPIPGERIPDVAALSMGFSVKEDLSWPGLAVGNLFHRPRATVMVMVKGVNKLALPPGSVISYPLENRVYMVGKANSVFEDLSVTLRQLRNRLFQENSVLSSLPLNSLSRNNEVDLLFLSELQVLHDISSLLSRHKHLAKDHSPDLYSLELAGLDEIGKRYGEDSEQFRDASKILVDALQKFADDMYSLYGGNAVVELVTVKSFDTSLIRKTRTILEAKQAKNPASPYNLAYKYNFEYSVVFNMVLWIMIALALAVIITSYNIWNMDPGYDSIIYRMTNQKIRMD

SEQ ID NO: 1256 - protein, 317 aa, Homo Sapiens
MAVFVVLLALVAGVLGNEFSILKSPGSVVFRNGNWPIPGERIPDVAALSMGFSVKEDLSWPGLAVGNLFHRPRATVMVMVKGVNKLALPPGSVISYPLENRVYMVGKANSVFEDLSVTLRQLRNRLFQENSVLSSLPLNSLSRNNEVDLLFLSELQVLHDISSLLSRHKHLAKDHSPDLYSLELAGLDEIGKRYGEDSEQFRDASKILVDALQKFADDMYSLYGGNAVVELVTVKSFDTSLIRKTRTILEAKQANPASPYNLAYKYNFEYSVVFNMVLWIMIALALAVIITSYNIWNMDPGYDSIIYRMTNQKIRMD

SEQ ID NO: 1257 - protein, 272 aa, Homo Sapiens
MAVFVVLLALVAGVLGNEFSILKSPGSVVFRNGNWPIPGERIPDVAALSMGFSVKEDLSWPGLAVGNLFHRPRATVMVMVKGVNKLALPPGSVISYPLENVDLLFLSELQVLHDISSLLSRHKHLAKDHSPDLYSLELAGLDEIGKRYGEDSEQFRDASKILVDALQKFADDMYSLYGGNAVVELVTVKSFDTSLIRKTRTILEAKQAKNPASPYNLAYKYNFEYSVVFNMVLWIMIALALAVIITSYNIWNMDPGYDSIIYRMTNQKIRMD

SEQ ID NO: 1258 - protein, 128 aa, Homo Sapiens
MGFSVKEDLSWPGLAVGNLFHRPRATVMVMVKGVNKLALPPGSVISYPLENAVPFSLDSVANSIHSLFSEETPVVLQLAPSEERVYMVGKANSVFEDLSVTLRQLRNRLFQENSVLSSLPLNSLSRNN

SEQ ID NO: 1259 - protein, 301 aa, Homo Sapiens
MGFSVKEDLSWPGLAVGNLFHRPRATVMVMVKGVNKLALPPGSVISYPLENAVPFSLDSVANSIHSLFSEETPVVLQLAPSEERVYMVGKANSVFEDLSVTLRQLRNRLFQENSVLSSLPLNSLSRNNEVDLLFLSELQVLHDISSLLSRHKHLAKDHSPDLYSLELAGLDEIGKRYGEDSEQFRDASKILVDALQKFADDMYSLYGGNAVVELVTVKSFDTSLIRKTRTILEAKQAKNPASPYNLAYKYNFEYSVVFNMVLWIMIALALAVIITSYNIWNMDPGYDSIIYRMTNQKIRMD

SEQ ID NO: 1260 - protein, 274 aa, Homo Sapiens
MVMVKGVNKLALPPGSVISYPLENAVPFSLDSVANSIHSLFSEETPVVLQLAPSEERVYMVGKANSVFEDLSVTLRQLRNRLFQENSVLSSLPLNSLSRNNEVDLLFLSELQVLHDISSLLSRHKHLAKDHSPDLYSLELAGLDEIGKRYGEDSEQFRDASKILVDALQKFADDMYSLYGGNAVVELVTVKSFDTSLIRKTRTILEAKQAKNPASPYNLAYKYNFEYSVVFNMVLWIMIALALAVIITSYNIWNMDPGYDSIIYRMTNQKIRMD

SEQ ID NO: 1261 - protein, 273 aa, Homo Sapiens
MVMVKGVNKLALPPGSVISYPLENAVPFSLDSVANSIHSLFSEETPVVLQLAPSEERVYMVGKANSVFEDLSVTLRQLRNRLFQENSVLSSLPLNSLSRNNEVDLLFLSELQVLHDISSLLSRHKHLAKDHSPDLYSLELAGLDEIGKRYGEDSEQFRDASKILVDALQKFADDMYSLYGGNAVVELVTVKSFDTSLIRKTRTILEAKQANPASPYNLAYKYNFEYSVVFNMVLWIMIALALAVIITSYNIWNMDPGYDSIIYRMTNQKIRMD

SEQ ID NO: 1262 - protein, 59 aa, Homo Sapiens
MVMVKGVNKLALPPGSVISYPLENFLLVLTVLQIPFTPYFLRKLLLFCSWLPVRKECIW

SEQ ID NO: 1263 - protein, 101 aa, Homo Sapiens
MVMVKGVNKLALPPGSVISYPLENRVYMVGKANSVFEDLSVTLRQLRNRLFQENSVLSSLPLNSLSRNNEVDLLFLSELQVLHDISSLGETTYLPRTQAWA

SEQ ID NO: 1264 - protein, 242 aa, Homo Sapiens
MVMVKGVNKLALPPGSVISYPLENRVYMVGKANSVFEDLSVTLRQLRNRLFQENSVLSSLPLNSLSRNNEVDLLFLSELQVLHDISSLLSRHKHLAKDHSPDLYSLELAGLDEIGKRYGEDSEQFRDASKILVDALQKFADDMYSLYGGNAVVELVTVKSFDTSLIRKTRTILEAKQAKNPASPYNLAYKYNFEYSVVFNMVLWIMIALALAVIITSYNIWNMDPGYDSIIYRMTNQKIRMD

SEQ ID NO: 1265 - protein, 196 aa, Homo Sapiens
MVMVKGVNKLALPPGSVISYPLENVDLLFLSELQVLHDISSLLSRHKHLAKDHSPDLYSLELAGLDEIGKRYGEDSEQFRDASKILVDALQKFADDMYSLYGGNAVVELVTVKSFDTSLIRKTRTILEAKQAKNPASPYNLAYKYNFEYSVVFNMVLWIMIALALAVIITSYNIWNMDPGYDSIIYRMTNQKIRMD

SEQ ID NO: 1266 - protein, 294 aa, Homo Sapiens
  misc_feature (1)..(1): Xaa can be any naturally occurring amino acid
XEFSILKSPGSVVFRNGNWPIPGERIPDVAALSMGFSVKEDLSWPGLAVGNLFHRPRATVMVMVKGVNKLALPPGSVISYPLENAVPFSLDSVANSIHSLFSEETPVVLQLAPSEERVYMVGKANSVFEDLSVTLRQLRNRLFQENSVLSSLPLNSLSRNNEVDLLFLSELQVLHDISSLLSRHKHLAKDHSPDLYSLELAGLDEIGKRYGEDSEQFRDASKILVDALQKKNPASPYNLAYKYNFEYSVVFNMVLWIMIALALAVIITSYNIWNMDPGYDSIIYRMTNQKIRMD

SEQ ID NO: 1267 - protein, 76 aa, Homo Sapiens
  misc_feature (1)..(1): Xaa can be any naturally occurring amino acid
XSLYGGNAVVELVTVKSFDTSLIRKTRTILEAKQAEKEHVYQKKKKERNKEVFMGVKSFNVCLSSELPAEEPSKSL

SEQ ID NO: 1268 - protein, 113 aa, Homo Sapiens
FLCALPRREGYEFFVGQWTGTELHFTALINIQTRGEAAASQLILYHYPELKEEKGIVLMTAEMDSTFLNVAEAQCIANQVQLFYATDRKETYGWAQLLAIHSTLIHLHQRVRK

SEQ ID NO: 1269 - protein, 174 aa, Homo Sapiens
LIRSDPAAFESRLEKRSEFRKQPVGHSRQGDFIKCVEQKTDALGKQSVNRGFTKDKTLSSIFNIEMVKEKTAEEIKQIWQQYFAAKDTVYAVIPAEKFDLIWNRAQSCPTNVAEAQCIANQVQLFYATDRKETYGLVETFNLRPNEFKYMSVIAELEQSGLGAELKCAQNQNKT

SEQ ID NO: 1270 - protein, 328 aa, Homo Sapiens
MAAVVVAAAGGAGPAVLQVAGLYRGLCAVRSRALGLGLVSPAQLRVFPVRPGSGRPEGGADSSGVGAEAELQANPFYDRYRDKIQLLRRSDPAAFESRLEKRSEFRKQPVGHSRQGDFIKCVEQKTDALGKQSVNRGFTKDKTLSSIFNIEMVKEKTAEEIKQIWQQYFAAKDTVYAVIPAEKFDLIWNRAQSCPTFLCALPRREGYEFFVGQWTGTELHFTALINIQTRGEAAASQLILYHYPELKEEKGIVLMTAEMDSTFLNVAEAQCIANQVQLFYATDRKETYGLVETFNLRPNEFKYMSVIAELEQSGLGAELKCAQNQNKT

SEQ ID NO: 1271 - protein, 351 aa, Homo Sapiens
MERARGPRAEADAPEEEEEAGAAMAAVVVAAAGGAGPAVLQVAGLYRGLCAVRSRALGLGLVSPAQLRVFPVRPGSGRPEGGADSSGVGAEAELQANPFYDRYRDKIQLLRRSDPAAFESRLEKRSEFRKQPVGHSRQGDFIKCVEQKTDALGKQSVNRGFTKDKTLSSIFNIEMVKEKTAEEIKQIWQQYFAAKDTVYAVIPAEKFDLIWNRAQSCPTFLCALPRREGYEFFVGQWTGTELHFTALINIQTRGEAAASQLILYHYPELKEEKGIVLMTAEMDSTFLNVAEAQCIANQVQLFYATDRKETYGLVETFNLRPNEFKYMSVIAELEQSGLGAELKCAQNQNKT

SEQ ID NO: 1272 - protein, 351 aa, Homo Sapiens; identical to SEQ ID NO: 1271

SEQ ID NO: 1273 - protein, 283 aa, Homo Sapiens
MERARGPRAEADAPEEEEEAGAAMAAVVVAAAGGAGPAVLQVAGLYRGLCAVRSRALGLGLVSPAQLRVFPVRPGSGRPEGGADSSGVGAEAELQANPFYDRYRDKIQLLRRSDPAAFESRLEKRSEFRKQPVGHSRQGDFIKCVEQKTDALGKQSVNRGFTKDKTLSSIFNIEMVKEKTAEEIKQIWQQYFAAKDTVYAVIPAEKFDLIWNRAQSCPTNVAEAQCIANQVQLFYATDRKETYGLVETFNLRPNEFKYMSVIAELEQSGLGAELKCAQNQNKT

SEQ ID NO: 1274 - protein, 45 aa, Homo Sapiens
MSDPAAFESRLEKRSEFRKQPVGHSRQGDFIKCVEQKDGAQNKLV

SEQ ID NO: 1275 - protein, 240 aa, Homo Sapiens
MSDPAAFESRLEKRSEFRKQPVGHSRQGDFIKCVEQKTDALGKQSVNRGFTKDKTLSSIFNIEMVKEKTAEEIKQIWQQYFAAKDTVYAVIPAEKFDLIWNRAQSCPTFLCALPRREGYEFFVGQWTGTELHFTALINIQTRGEAAASQLILYHYPELKEEKGIVLMTAEMDSTFLNVAEAQCIANQVQLFYATDRKETYGLVETFNLRPNEFKYMSVIAELEQSGLGAELKCAQNQNKT

SEQ ID NO: 1276 - protein, 177 aa, Homo Sapiens
MVKEKTAEEIKQIWQQYFAAKDTVYAVIPAEKFDLIWNRAQSCPTFLCALPRREGYEFFVGQWTGTELHFTALINIQTRGEAAASQLILYHYPELKEEKGIVLMTAEMDSTFLNVAEAQCIANQVQLFYATDRKETYGLVETFNLRPNEFKYMSVIAELEQSGLGAELKCAQNQNKT

SEQ ID NO: 1277 - protein, 183 aa, Homo Sapiens
  misc_feature (1)..(1): Xaa can be any naturally occurring amino acid
XGKQSVNRGFTKDKTLSSIFNIEMVKEKTAEEIKQAEKFDLIWNRAQSCPTFLCALPRREGYEFFVGQWTGTELHFTALINIQTRGEAAASQLILYHYPELKEEKGIVLMTAEMDSTFLNVAEAQCIANQVQLFYATDRKETYGLVETFNLRPNEFKYMSVIAELEQSGLGAELKCAQNQNKT

SEQ ID NO: 1278 - protein, 86 aa, Homo Sapiens
  misc_feature (1)..(1): Xaa can be any naturally occurring amino acid
XVRPGSGRPEGGADSSGVGAEAELQANPFYDRYRDKIQLLRRSDPAAFESRLEKRSEFRKQPVGHSRQGDFIKCVEQKDGAQNKLV

SEQ ID NO: 1279 - protein, 310 aa, Homo Sapiens
MAAAVAAAPGALGSLHAGGARLVAACSAWLCPGLRLPGSLAGRRAGPAIWAQGWVPAAGGPAPKRGYSSEMKTEDELRVRHLEEENRGIVVLGINRAYGKNSLSKNLIKMLSKAVDALKSDKKVRTIIIRSEVPGIFCAANLPVPTIAAIDGLALGGGLELALACDIRVAASSAKMGLVETKLAIIPGGGGTQRLPRAIGMSLAKELIFSARVLDGKEAKAVGLISHVLEQNQEGDAAYRKALDLAREFLPQGPVAMRVAKLAINQGMEVDLVTGLAIEEACYAQTIPTKDRLEGLLAFKEKRPPRYKGE

SEQ ID NO: 1280 - protein, 339 aa, Homo Sapiens
MAAAVAAAPGALGSLHAGGARLVAACSAWLCPGLRLPGSLAGRRAGPAIWAQGWVPAAGGPAPKRGYSSEMKTEDELRVRHLEEENRGIVVLGINRAYGKNSLSKNLIKMLSKAVDALKSDKKVRTIIIRSEVPGIFCAGADLKERAKMSSSEVGPFVSKIRAVINDIANLPVPTIAAIDGLALGGGLELALACDIRVAASSAKMGLVETKLAIIPGGGGTQRLPRAIGMSLAKELIFSARVLDGKEAKAVGLISHVLEQNQEGDAAYRKALDLAREFLPQGPVAMRVAKLAINQGMEVDLVTGLAIEEACYAQTIPTKDRLEGLLAFKEKRPPRYKGE

SEQ ID NO: 1281 - protein, 164 aa, Homo Sapiens
MPDTMLPACFLGLLAFSSACYFQNCPRGGKRAMSDLELRQCLPCGPGGKGRCFGPSICCADELGCFVGTAEALRCQEENYLPSPCQSGQKACGSGGRCAAFGVCCNDESCVTEPECREGFHRRARASDRSNATQLDGPAGALLLRLVQLAGAPEPFEPAQPDAY

SEQ ID NO: 1282 - protein, 151 aa, Homo Sapiens
MSSAMLVTCLPDPSSSFREDAPRPPVPGEEGETPPCQPGVGKGQVTKPMPVSSNTRRNEDGLGEPEGRASPDSPLTRWTKSLHSLLGDQDGAYLFRTFLEREKCVDTLDFWFACNGFRQMNLKDTKTLRVAKAIYKRYIENNSIVSKQLKP

SEQ ID NO: 1283 - protein, 192 aa, Homo Sapiens
MSSAMLVTCLPDPSSSFREDAPRPPVPGEEGETPPCQPGVGKGQVTKPMPVSSNTRRNEDGLGEPEGRASPDSPLTRWTKSLHSLLGDQDGAYLFRTFLEREKCVDTLDFWFACNGFRQMNLKDTKTLRVAKAIYKRYIENNSIVSKQLKPATKTYIRDGIKKQQIDSIMFDQAQTEIQSVMEENAYQMFLT

SEQ ID NO: 1284 - protein, 192 aa, Homo Sapiens; identical to SEQ ID NO: 1283

SEQ ID NO: 1285 - protein, 843 aa, Homo Sapiens
MSSAMLVTCLPDPSSSFREDAPRPPVPGEEGETPPCQPGVGKGQVTKPMPVSSNTRRNEDGLGEPEGRASPDSPLTRWTKSLHSLLGDQDGAYLFRTFLEREKCVDTLDFWFACNGFRQMNLKDTKTLRVAKAIYKRYIENNSIVSKQLKPATKTYIRDGIKKQQIDSIMFDQAQTEIQSVMEENAYQMFLTSDIYLEYVRSGGENTAYMSNGGLGSLKVVCGYLPTLNEEEEWTCADFKCKLSPTVVGLSSKTLRATASVRSTETVDSGYRSFKRSDPVNPYHIGSGYVFAPATSANDSEISSDALTDDSMSMTDSSVDGIPPYRVGSKKQLQREMHRSVKANGQVSLPHFPRTHRLPKEMTPVEPATFAAELISRLEKLKLELESRHSLEERLQQIREDEEREGSELTLNSREGAPTQHPLSLLPSGSYEEDPQTILDDHLSRVLKTPGCQSPGVGRYSPRSRSPDHHHHHHSQYHSLLPPGGKLPPAAASPGACPLLGGKGFVTKQTTKHVHHHYIHHHAVPKTKEEIEAEATQRVHCFCPGGSEYYCYSKCKSHSKAPETMPSEQFGGSRGSTLPKRNGKGTEPGLALPAREGGAPGGAGALQLPREEGDRSQDVWQWMLESERQSKPKPHSAQSTKKAYPLESARSSPGERASRHHLWGGNSGHPRTTPRAHLFTQDPAMPPLTPPNTLAQLEEACRRLAEVSKPPKQRCCVASQQRDRNHSATVQTGATPFSNPSLAPEDHKEPKKLAGVHALQASELVVTYFFCGEEIPYRRMLKAQSLTLGHFKEQLSKKGNYRYYFKKASDEFACGAVFEEIWEDETVLPMYEGRILGKVERID

SEQ ID NO: 1286 - protein, 778 aa, Homo Sapiens
MSSAMLVTCLPDPSSSFREDAPRPPVPGEEGETPPCQPGVGKGQVTKPMPVSSNTRRNEDGLGEPEGRASPDSPLTRWTKSLHSLLGDQDGAYLFRTFLEREKCVDTLDFWFACNGFRQMNLKDTKTLRVAKAIYKRYIENNSIVSKQLKPATKTYIRDGIKKQQIDSIMFDQAQTEIQSVMEENAYQMFLTSDIYLEYVRSGGENTAYMSNGGLGSLKVVCGYLPTLNEEEEWTCADFKCKLSPTVVGLSSKTLRATASVRSTETVDSGYRSFKRSDPVNPYHIGSGYVFAPATSANDSEISSDALTDDSMSMTDSSVDGIPPYRVGSKKQLQREMHRSVKANGQVSLPHFPRTHRLPKEMTPVEPATFAAELISRLEKLKLELESRHSLEERLQQIREDEEREGSELTLNSREGAPTQHPLSLLPSGSYEEDPQTILDDHLSRVLKTPGCQSPGVGRYSPRSRSPDHHHHHHSQYHSLLPPGGKLPPAAASPGACPLLGGKGFVTKQTTKHVHHHYIHHHAVPKTKEEIEAEATQRVHCFCPGGSEYYCYSKCKSHSKAPETMPSEQFGAQSTKKAYPLESARSSPGERASRHHLWGGNSGHPRTTPRAHLFTQDPAMPPLTPPNTLAQLEEACRRLAEVSKPPKQRCCVASQQRDRNHSATVQTGATPFSNPSLAPEDHKEPKKLAGVHALQASELVVTYFFCGEEIPYRRMLKAQSLTLGHFKEQLSKKGNYRYYFKKASDEFACGAVFEEIWEDETVLPMYEGRILGKVERID

SEQ ID NO: 1287 - protein, 271 aa, Homo Sapiens
MSSAMLVTCLPDPSSSFREDAPRPPVPGEEGETPPCQPGVGKGQVTKPMPVSSNTRRNEDGLGEPEGRASPDSPLTRWTKSLHSLLGDQDGAYLFRTFLEREKCVDTLDFWFACNGFRQMNLKDTKTLRVAKAIYKRYIENNSIVSKQLKPATKTYIRDGIKKQQIDSIMFDQAQTEIQSVMEENAYQMFLTSDIYLEYVRSGGENTAYMSNGGLGSLKVVCGYLPTLNEEEEWTCADFKCKLSPTVVGLSSKTLRATASVRSTETVDSGY

SEQ ID NO: 1288 - protein, 778 aa, Homo Sapiens; identical to SEQ ID NO: 1286

SEQ ID NO: 1289 - protein, 160 aa, Homo Sapiens
MSSAMLVTCLPDPSSSFREDAPRPPVPGEEGETPPCQPGVGKGQVTKPMPVSSNTRRNEDGLGEPEGRASPDSPLTRWTKSLHSLLGDQDGAYLFRTFLEREKCVDTLDFWFACNGFRQMNLKDTKTLRVAKDFCHDILFYLYCKLCIIKSSFKENYLVQ

SEQ ID NO: 1290 - protein, 227 aa, Homo Sapiens
MVPVLLSLLLLLGPAVPQENQDGRYSLTYIYTGLSKHVEDVPAFQALGSLNDLQFFRYNSKDRKSQPMGLWRQVEGMEDWKQDSQLQKAREDIFMETLKDIVEYYNDSNGSHVLQGRFGCEIENNRSSGAFWKYYYDGKDYIEFNKEIPAWVPFDPAAQITKQKWEAEPVYVQRAKAYLEEECPATLRKYLKYSKNILDRQGTHCFLLPSTEPRIKDDLRLGAQATS

SEQ ID NO: 1291 - protein, 298 aa, Homo Sapiens
MVRMVPVLLSLLLLLGPAVPQENQDGRYSLTYIYTGLSKHVEDVPAFQALGSLNDLQFFRYNSKDRKSQPMGLWRQVEGMEDWKQDSQLQKAREDIFMETLKDIVEYYNDSNGSHVLQGRFGCEIENNRSSGAFWKYYYDGKDYIEFNKEIPAWVPFDPAAQITKQKWEAEPVYVQRAKAYLEEECPATLRKYLKYSKNILDRQDPPSVVVTSHQAPGEKKKLKCLAYDFYPGKIDVHWTRAGEVQEPELRGDVLHNGNGTYQSWVVVAVPPQDTAPYSCHVQHSSLAQPLVVPWEAS

SEQ ID NO: 1292 - protein, 85 aa, Homo Sapiens
  misc_feature (1)..(1): Xaa can be any naturally occurring amino acid
XTYIYTGLSKHVEDVPAFQALGSLNDLQFFRYNSKDRKSQPMGLWRQQKYPGPARSSLCGGHQPPGPRRKEETEVPGLRLLPREN

SEQ ID NO: 1293 - protein, 150 aa, Homo Sapiens
MTAASCFQSQNPGVSTVVLGAYDLRRRERQSRQTFSISSMSENGYDPQQNLNDLMLLQLDREANLTSSVTILPLPLQNATVEAGTRCQVAGWGSQRSGGRLSRFPRFVNVTVTPEDQCRPNNVCTGVLTRRGGICNVSAPCGGRRGPERY

SEQ ID NO: 1294 - protein, 251 aa, Homo Sapiens
MTRLTVLALLAGLLASSRAGSSPLLDIVGGRKARPRQFPFLASIQNQGRHFCGGALIHARFVMTAASCFQSQNPGVSTVVLGAYDLRRRERQSRQTFSISSMSENGYDPQQNLNDLMLLQLDREANLTSSVTILPLPLQNATVEAGTRCQVAGWGSQRSGGRLSRFPRFVNVTVTPEDQCRPNNVCTGVLTRRGGICNGDGGTPLVCEGLAHGVASFSLGPCGRGPDFFTRVALFRDWIDGVLNNPGPGPA

SEQ ID NO: 1295 - protein, 71 aa, Homo Sapiens
GFHPSDIEVDLLKNGERIEKVEHSDLSFSKDWSFYLLYYTEFTPTEKDEYACRVNHVTLSQPKIVKWDRDM

SEQ ID NO: 1296 - protein, 51 aa, Homo Sapiens
MSRSVALAVLALLSLSGLEAIQHSGLLTSSSREWKVKFPELLCVWVSSIRH

SEQ ID NO: 1297 - protein, 101 aa, Homo Sapiens
MSRSVALAVLALLSLSGLEAIQRTPKIQVYSRHPADIEVDLLKNGERIEKVEHSDLSFSKDWSFYLLYYTEFTPTEKDEYACRVNHVTLSQPKIVKWDRDM

SEQ ID NO: 1298 - protein, 119 aa, Homo Sapiens
MSRSVALAVLALLSLSGLEAIQRTPKIQVYSRHPAENGKSNFLNCYVSGFHPSDIEVDLLKNGERIEKVEHSDLSFSKDWSFYLLYYTEFTPTEKDEYACRVNHVTLSQPKIVKWDRDM

SEQ ID NO: 1299 - protein, 119 aa, Homo Sapiens; identical to SEQ ID NO: 1298

SEQ ID NO: 1300 - protein, 119 aa, Homo Sapiens; identical to SEQ ID NO: 1298

SEQ ID NO: 1301 - protein, 57 aa, Homo Sapiens
MSRSVALAVLALLSLSGLERELKKWSIQTCLSARTGLSISCTTLNSPPLKKMSMPAV

SEQ ID NO: 1302 - protein, 41 aa, Homo Sapiens
MASALWTVLPSRMSLRSLKWSLLLLSLLSFFVMWYLSLPHY

SEQ ID NO: 1303 - protein, 46 aa, Homo Sapiens
MASALWTVLPSRMSLRSLKWSLLLLSLLSFFVMWYLSLPHYNVIER

SEQ ID NO: 1304 - protein, 54 aa, Homo Sapiens
MASALWTVLPSRMSLRSLKWSLLLLSLLSFFVMWYLSLPHYNVIERVNWMYFYE

SEQ ID NO: 1305 - protein, 91 aa, Homo Sapiens
MASALWTVLPSRMSLRSLKWSLLLLSLLSFFVMWYLSLPHYNVIERVNWMYFYEIHLDVCQLRRVIAAHGFSSKEIITFWQVMLRNTTCHY

SEQ ID NO: 1306 - protein, 58 aa, Homo Sapiens
MASALWTVLPSRMSLRSLKWSLLLLSLLSFFVMWYLSLPHYNVIERVNWMYFYEYEPI

SEQ ID NO: 1307 - protein, 65 aa, Homo Sapiens
MASALWTVLPSRMSLRSLKWSLLLLSLLSFFVMWYLSLPHYNVIERVNWMYFYEYEPIYRQDFHF

SEQ ID NO: 1308 - protein, 111 aa, Homo Sapiens
MASALWTVLPSRMSLRSLKWSLLLLSLLSFFVMWYLSLPHYNVIERVNWMYFYEYEPIYRQDFHFTLREHSNCSHQNPFLVILVTSHPSDVKARQAIRVTWGEKKSWWGYE

SEQ ID NO: 1309 - protein, 331 aa, Homo Sapiens
MASALWTVLPSRMSLRSLKWSLLLLSLLSFFVMWYLSLPHYNVIERVNWMYFYEYEPIYRQDFHFTLREHSNCSHQNPFLVILVTSHPSDVKARQAIRVTWGEKKSWWGYEVLTFFLLGQEAEKEDKMLALSLEDEHLLYGDIIRQDFLDTYNNLTLKTIMAFRWVTEFCPNAKYVMKTDTDVFINTGNLVKYLLNLNHSEKFFTGYPLIDNYSYRGFYQKTHISYQEYPFKVFPPYCSGLGYIMSRDLVPRIYEMMGHVKPIKFEDVYVGICLNLLKVNIHIPEDTNLFFLYRIHLDVCQLRRVIAAHGFSSKEIITFWQVMLRNTTCHY

SEQ ID NO: 1310 - protein, 331 aa, Homo Sapiens; identical to SEQ ID NO: 1309

SEQ ID NO: 1311 - protein, 331 aa, Homo Sapiens; identical to SEQ ID NO: 1309

SEQ ID NO: 1312 - protein, 331 aa, Homo Sapiens; identical to SEQ ID NO: 1309

SEQ ID NO: 1313 - protein, 331 aa, Homo Sapiens; identical to SEQ ID NO: 1309

SEQ ID NO: 1314 - protein, 150 aa, Homo Sapiens
MSFFLFSEFTTDLSVLIKHGIQKTTKNLSFNFIWNSTVFLAPWTRLTCWLFPLAALSRGALRLLTPSVKSCCSVAQAGVQWQDLSSLQSPSLRFKQFSCLSLPSRWDYRTFGSRASELLWMASALWTVLPSRMSLRSLKWSLLLLSLLSF

SEQ ID NO: 1315 - protein, 92 aa, Homo Sapiens
MRNWLVLLCPCVLGAALHLWLRLRSPPPACASGAGPADQLALFPQWKSTHYDVVVGVLSARNNHELRNVIRSTWMRHLLQHPTLSQRFESGN

SEQ ID NO: 1316 - protein, 500 aa, Homo Sapiens
MRNWLVLLCPCVLGAALHLWLRLRSPPPACASGAGPADQLALFPQWKSTHYDVVVGVLSARNNHELRNVIRSTWMRHLLQHPTLSQRVLVKFIIGAHGCEVPVEDREDPYSCKLLNITNPVLNQEIEAFSLSEDTSSGLPEDRVVSVSFRVLYPIVITSLGVFYDANDVGFQRNITVKLYQAEQEEALFIARFSPPSCGVQVNKLWYKPVEQFILPESFEGTIVWESQDLHGLVSRNLHKVTVNDGGGVLRVITAGEGALPHEFLEGVEGVAGGFIYTIQEGDALLHNLHSRPQRLIDHIRNLHEEDALLKEESSIYDDIVFVDVVDTYRNVPAKLLNFYRWTVETTSFNLLLKTDDDCYIDLEAVFNRIVQKNLDGPNFWWGNFRLNWAVDRTGKWQELEYPSPAYPAFACGSGYVISKDIVKWLASNSGRLKTYQGEDVSMGIWMAAIGPKRYQDSLWLCEKTCETGMLSSPQYSPWELTELWKLKERCGDPCRCQAR

SEQ ID NO: 1317 - protein, 326 aa, Homo Sapiens
MRNWLVLLCPCVLGAALHLWLRLRSPPPACASGAGPAGGVSLLLPRLECNGAVSAHPNLHLPGSRDSPASASQVAGITDQLALFPQWKSTHYDVVVGVLSARNNHELRNVIRSTWMRHLLQHPTLSQRVLVKFIIGAHGCEVPVEDREDPYSCKLLNITNPVLNQEIEAFSLSEDTSSGLPEDRVVSVSFRVLYPIVITSLGVFYDANDVGFQRNITVKLYQAEQEEALFIARFSPPSCGVQVNKLWYKPVEQFILPESFEGTIVWESQDLHGLVSRNLHKVTVNDGGGVLRVITAGEGALPHEFLEGVEGVAGGFIYTIQGKFAS

SEQ ID NO: 1318 - protein, 326 aa, Homo Sapiens
MASKVSCLYVLTVVCWASALWYLSITRPTSSYTGSKPFSHLTVARKNFTFGNIRTRPINPHSFEFLINEPNKCEKNIPFLVILISTTHKEFDARQAIRETWGDENNFKGIKIATLFLLGKNADPVLNQMVEQESQIFHDIIVEDFIDSYHNLTLKTLMGMRWVATFCSKAKYVMKTDSDIFVNMDNLIYKLLKPSTKPRRRYFTGYVINGGPIRDVRSKWYMPRDLYPDSNYPPFCSGTGYIFSADVAELIYKTSLHTRLLHLEDVYVGLCLRKLGIHPFQNSGFNHWKMAYSLCRYRRVITVHQISPEEMHRIWNDMSSKKHLRC

SEQ ID NO: 1319 - protein, 378 aa, Homo Sapiens
MQLRLFRRLLLAALLLVIVWTLFGPSGLGEELLSLSLASLLPAPASPGPPLALPRLLIPNQEACSGPGAPPFLLILVCTAPENLNQRNAIRASWGGLREARGLRVQTLFLLGEPNAQHPVWGSQGSDLASESAAQGDILQAAFQDSYRNLTLKTLSGLNWAEKHCPMARYVLKTDDDVYVNVPELVSELVLRGGRWGQWERSTEPQREAEQEGGQVLHSEEVPLLYLGRVHWRVNPSRTPGGRHRVSEEQWPHTWGPFPPYASGTGYVLSASAVQLILKVASRAPLLPLEDVFVGVSARRGGLAPTQCVKLAGATHYPLDRCCYGKFLLTSHRLDPWKMQEAWKLVGGSDGERTAPFCSWFQGVLGILRCRAIAWLQS

SEQ ID NO: 1320 - protein, 310 aa, Homo Sapiens
MAFPKMRLMYICLLVLGALCLYFSMYSLNPFKEQSFVYKKDGNFLKLPDTDCRQTPPFLVLLVTSSHKQLAERMAIRQTWGKERMVKGKQLKTFFLLGTTSSAAETKEVDQESQRHGDIIQKDFLDVYYNLTLKTMMGIEWVHRFCPQAAFVMKTDSDMFINVDYLTELLLKKNRTTRFFTGFLKLNEFPIRQPFSKWFVSKSEYPWDRYPPFCSGTGYVFSGDVASQVYNVSKSVPYIKLEDVFVGLCLERLNIRLEELHSQPTFFPGGLRFSVCLFRRIVACHFIKPRTLLDYWQALENSRGEDCPPV

SEQ ID NO: 1321 - protein, 310 aa, Homo Sapiens; identical to SEQ ID NO: 1320

SEQ ID NO: 1322 - protein, 310 aa, Homo Sapiens; identical to SEQ ID NO: 1320

SEQ ID NO: 1323 - protein, 310 aa, Homo Sapiens; identical to SEQ ID NO: 1320

SEQ ID NO: 1324 - protein, 314 aa, Homo Sapiens
MCLEMAFPKMRLMYICLLVLGALCLYFSMYSLNPFKEQSFVYKKDGNFLKLPDTDCRQTPPFLVLLVTSSHKQLAERMAIRQTWGKERMVKGKQLKTFFLLGTTSSAAETKEVDQESQRHGDIIQKDFLDVYYNLTLKTMMGIEWVHRFCPQAAFVMKTDSDMFINVDYLTELLLKKNRTTRFFTGFLKLNEFPIRQPFSKWFVSKSEYPWDRYPPFCSGTGYVFSGDVASQVYNVSKSVPYIKLEDVFVGLCLERLNIRLEELHSQPTFFPGGLRFSVCLFRRIVACHFIKPRTLLDYWQALENSRGEDCPPV

SEQ ID NO: 1325 - protein, 329 aa, Homo Sapiens
MKLLRRAWRRRAALGLGTLALCGAALLYLARCAAEPGDPRAMSGRSPPPPAPARAAAFLAVLVASAPRAAERRSVIRSTWLARRGAPGDVWARFAVGTAGLGAEERRALEREQARHGDLLLLPALRDAYENLTAKVLAMLAWLDEHVAFEFVLKADDDSFARLDALLAELRAREPARRRRLYWGFFSGRGRVKPGGRWREAAWQLCDYYLPYALGGGYVLSADLVHYLRLSRDYLRAWHSEDVSLGAWLAPVDVQREHDPRFDTEYRSRGCSNQYLVTHKQSLEDMLEKHATLAREGRLCKREVQLRLSYVYDWSAPPSQCCQRREGIP

SEQ ID NO: 1326 - protein, 223 aa, Homo Sapiens
MKLKLKNVFLAYFLVSIAGLLYALVQLAKGMDRTLPLMQRFRDSATALSSGQPCDCLPPLRAAAEQLRQKDLRISQLQAELRRPPPAPAQPPEPEALPTIYVVTPTYARLVQKAELVRLSQTLSLVPRLHWLLVEDAEGPTPLVSGLLAASGLLFTHLVVLTPKAQRLREGEPGWVHPRGVEQRNKALDWLRGRGGAVGGEKDPPPPGTQGVVYFADDDNTYS

SEQ ID NO: 1327 - protein, 335 aa, Homo Sapiens
MKLKLKNVFLAYFLVSIAGLLYALVQLGQPCDCLPPLRAAAEQLRQKDLRISQLQAELRRPPPAPAQPPEPEALPTIYVVTPTYARLVQKAELVRLSQTLSLVPRLHWLLVEDAEGPTPLVSGLLAASGLLFTHLVVLTPKAQRLREGEPGWVHPRGVEQRNKALDWLRGRGGAVGGEKDPPPPGTQGVVYFADDDNTYSRELFEEMRWTRGVSVWPVGLVGGLRFEGPQVQDGRVVGFHTAWEPSRPFPVDMAGFAVALPLLLDKPNAQFDSTAPRGHLESSLLSHLVDPKDLEPRAANCTRVLVWHTRTEKPKMKQEEQLQRQGRGSDPAIEV

SEQ ID NO: 1328 - protein, 319 aa, Homo Sapiens
MKLKLKNVFLAYFLVSIAGLLYALVQLGQPCDCLPPLRAAAEQLRQKDLRISQLQAELRRPPPAPAQPPEPEALPTIYVVTPTYARLVQKAELVRLSQTLSLVPRLHWLLVEDAEGPTPLVSGLLAASGLLFTHLVVLTPKAQRLREGEPGWVHPRGVEQRNKALDWLRGRGGAVGGEKDPPPPGTQGVVYFADDDNTYSRELFEEMRWTRGVSVWPVGLVGGLRFEGPQVQDGRVVGFHTAWEPSRPFPVDMAGFAVALPLLLDKPNAQFDSTAPRGHLESSLLSHLVDPKDLEPRAANCTRSLAVSPRLECSSAILA

SEQ ID NO: 1329 - protein, 315 aa, Homo Sapiens
MKLKLKNVFLAYFLVSIAGLLYALVQLGQPCDCLPPLRAAAEQLRQKDLRISQLQAELRRPPPAPAQPPEPEALPTIYVVTPTYARLVQKAELVRLSQTLSLVPRLHWLLVEDAEGPTPLVSGLLAASGLLFTHLVVLTPKAQRLREGEPGWVHPRGVEQRNKALDWLRGRGGAVGGEKDPPPPGTQGVVYFADDDNTYSRELFEEMRWTRGVSVWPVGLVGGLRFEGPQVQDGRVVGFHTAWEPSRPFPVDMAGFAVALPLLLDKPNAQFDSTAPRGHLESSLLSHLVDPKDLEPRAANCTRTESRCVTQAGVQ

SEQ ID NO: 1330 - protein, 38 aa, Homo Sapiens
MKLKLKNVFLAYFLVSIAGLLYALVQLVSASSTKQKAR

SEQ ID NO: 1331 - protein, 498 aa, Homo Sapiens
MRPPACWWLLAPPALLALLTCSLAFGLASEDTKKEVKQSQDLEKSGISRKNDIDLKGIVFVIQSQSNSFHAKRAEQLKKSILKQAADLTQELPSVLLLHQLAKQEGAWTILPLLPHFSVTYSRNSSWIFFCEEETRIQIPKLLETLRRYDPSKEWFLGKALHDEEATIIHHYAFSENPTVFKYPDFAAGWALSIPLVNKLTKRLKSESLKSDFTIDLKHEIALYIWDKGGGPPLTPVPEFCTNDVDFYCATTFHSFLPLCRKPVKKKDIFVAVKTCKKFHGDRIPIVKQTWESQASLIEYYSDYTENSIPTVDLGIPNTDRGHCGKTFAILERFLNRSQDKTAWLVIVDDDTLISISRLQHLLSCYDSGEPVFLGERYGYGLGTGGYSYITGGGGMVFSREAVRRLLASKCRCYSNDAPDDMVLGMCFSGLGIPVTHSPLFHQARPVDYPKDYLSHQVPISFHKHWNIDPVKVYFTWLAPSDEDKARQETQKGFREEL

SEQ ID NO: 1332 - protein, 127 aa, Homo Sapiens
MKYLRHRRPNATLILAIGAFTLLLFSLLVSPPTCKVQEQPPAIPEALAWPTPPTRPAPAPCHANTSMVTHPDFATQPQHVQNFLLYRHCRHFPLLQDVPPSKCAQPVFLLLVIKSSPSNYVRRELLR

SEQ ID NO: 1333 - protein, 250 aa, Homo Sapiens
MKYLRHRRPNATLILAIGAFTLLLFSLLVSPPTCKVQEQPPAIPEALAWPTPPTRPAPAPCHANTSMVTHPDFATQPQHVQNFLLYRHCRHFPLLQDVPPSKCAQPVFLLLVIKSSPSNYVRRELLRRTWGRERKVRGLQLRLLFLVGTASNPHEARKVNRLLELEAQTHGDILQWDFHDSFFNLTLKQVLFLQWQETRCANASFVLNGDDDVFAHTDNMVFYLQDHDPGRHLFVGQLIQNVGPIRAFWS

SEQ ID NO: 1334 - protein, 372 aa, Homo Sapiens
MKYLRHRRPNATLILAIGAFTLLLFSLLVSPPTCKVQEQPPAIPEALAWPTPPTRPAPAPCHANTSMVTHPDFATQPQHVQNFLLYRHCRHFPLLQDVPPSKCAQPVFLLLVIKSSPSNYVRRELLRRTWGRERKVRGLQLRLLFLVGTASNPHEARKVNRLLELEAQTHGDILQWDFHDSFFNLTLKQVLFLQWQETRCANASFVLNGDDDVFAHTDNMVFYLQDHDPGRHLFVGQLIQNVGPIRAFWSKYYVPEVVTQNERYPPYCGGGGFLLSRFTAAALRRAAHVLDIFPIDDVFLGMCLELEGLKPASHSGIRTSGVRAPSQRLSSFDPCFYRDLLLVHRFLPYEMLLMWDALNQPNLTCGNQTQIY

SEQ ID NO: 1335 - protein, 372 aa, Homo Sapiens; identical to SEQ ID NO: 1334

SEQ ID NO: 1336 - protein, 353 aa, Homo Sapiens
MLCRLCWLVSYSLAVLLLGCLLFLRKAAKPAGDPTAHQPFWAPPTPRHSRCPPNHTVSSASLSLPSRHRLFLTYRHCRNFSILLEPSGCSKDTFLLLAIKSQPGHVERRAAIRSTWGRVGGWARGRQLKLVFLLGVAGSAPPAQLLAYESREFDDILQWDFTEDFFNLTLKELHLQRWVVAACPQAHFMLKGDDDVFVHVPNVLEFLDGWDPAQDLLVGDVIRQALPNRNTKVKYFIPPSMYRATHYPPYAGGGGYVMSRATVRRLQAIMEDAELFPIDDVFVGMCLRRLGLSPMHHAGFKTFGIRRPLDPLDPCLYRGLLLVHRLSPLEMWTMWALVTDEGLKCAAGPIPQR

SEQ ID NO: 1337 - protein, 353 aa, Homo Sapiens; identical to SEQ ID NO: 1336

SEQ ID NO: 1338 - protein, 378 aa, Homo Sapiens
MLPPQPSAAHQGRGGRSGLLPKGPAMLCRLCWLVSYSLAVLLLGCLLFLRKAAKPAGDPTAHQPFWAPPTPRHSRCPPNHTVSSASLSLPSRHRLFLTYRHCRNFSILLEPSGCSKDTFLLLAIKSQPGHVERRAAIRSTWGRVGGWARGRQLKLVFLLGVAGSAPPAQLLAYESREFDDILQWDFTEDFFNLTLKELHLQRWVVAACPQAHFMLKGDDDVFVHVPNVLEFLDGWDPAQDLLVGDVIRQALPNRNTKVKYFIPPSMYRATHYPPYAGGGGYVMSRATVRRLQAIMEDAELFPIDDVFVGMCLRRLGLSPMHHAGFKTFGIRRPLDPLDPCLYRGLLLVHRLSPLEMWTMWALVTDEGLKCAAGPIPQR

SEQ ID NO: 1339 - protein, 55 aa, Homo Sapiens
MLPPQPSAAHQGRGGRSGLLPKGWQDPLPQPSCWPMRVGSLMTSSSGTSLRTSST

SEQ ID NO: 1340 - protein, 121 aa, Homo Sapiens
MAFPCRRSLTAKTLACLLVGVSFLALQQWFLQAPRSPREERSPQEETPEGPTDAPAADEPPSELVPGPPCVANASANATADFEQLPARIQDFLRYRHCRHFPLLWDAPAKCAGGRGVFLLL

SEQ ID NO: 1341 - protein, 384 aa, Homo Sapiens
MAFPCRRSLTAKTLACLLVGVSFLALQQWFLQAPRSPREERSPQEETPEGPTDAPAADEPPSELVPGPPCVANASANATADFEQLPARIQDFLRYRHCRHFPLLWDAPAKCAGGRGVFLLLAVKSAPEHYERRELIRRTWGQERSYGGRPVRRLFLLGTPGPEDEARAERLAELVALEAREHGDVLQWAFADTFLNLTLKHLHLLDWLAARCPHARFLLSGDDDVFVHTANVVRFLQAQPPGRHLFSGQLMEGSVPIRDSWSKYFVPPQLFPGSAYPVYCSGGGFLLSGPTARALRAAARHTPLFPIDDAYMGMCLERAGLAPSGHEGIRPFGVQLPGAQQSSFDPCMYRELLLVHRFAPYEMLLMWKALHSPALSCDRGHRVS

SEQ ID NO: 1342 - protein, 401 aa, Homo Sapiens
MSLWKKTVYRSLCLALALLVAVTVFQRSLTPGQFLQEPPPPTLEPQKAQKPNGQLVNPNNFWKNPKDVAAPTPMASQGPQAWDVTTTNCSANINLTHQPWFQVLEPQFRQFLFYRHCRYFPMLLNHPEKCRGDVYLLVVVKSVITQHDRREAIRQTWGRERQSAGGGRGAVRTLFLLGTASKQEERTHYQQLLAYEDRLYGDILQWGFLDTFFNLTLKEIHFLKWLDIYCPHVPFIFKGDDDVFVNPTNLLEFLADRQPQENLFVGDVLQHARPIRRKDNKYYIPGALYGKASYPPYAGGGGFLMAGSLARRLHHACDTLELYPIDDVFLGMCLEVLGVQPTAHEGFKTFGISRNRNSRMNKEPCFFRAMLVVHKLLPPELLAMWGLVHSNLTCSRKLQVL

SEQ ID NO: 1343 - protein, 397 aa, Homo Sapiens
MRCPKCLLCLSALLTLLGLKVYIEWTSESRLSKAYPSPRGTPPSPTPANPEPTLPANLSTRLGQTIPLPFAYWNQQQWRLGSLPSGDSTETGGCQAWGAAAATEIPDFASYPKDLRRFLLSAACRSFPQWLPGGGGSQVSSCSDTDVPYLLLAVKSEPGRFAERQAVRETWGSPAPGIRLLFLLGSPVGEAGPDLDSLVAWESRRYSDLLLWDFLDVPFNQTLKDLLLLAWLGRHCPTVSFVLRAQDDAFVHTPALLAHLRALPPASARSLYLGEVFTQAMPLRKPGGPFYVPESFFEGGYPAYASGGGYVIAGRLAPWLLRAAARVAPFPFEDVYTGLCIRALGLVPQAHPGFLTAWPADRTADHCAFRNLLLVRPLGPQASIRLWKQLQDPRLQC

SEQ ID NO: 1344 - protein, 402 aa, Homo Sapiens
MRRRLRLRRDALLTLLLGASLGLLLYAQRDGAAPTASAPRGRGRAAPRPTPGPRAFQLPDAGAAPPAYEGDTPAPPTPTGPFDFARYLRAKDQRRFPLLINQPHKCRGDGAPGGRPDLLIAVKSVAEDFERRQAVRQTWGAEGRVQGALVRRVFLLGVPRGAGSGGADEVGEGARTHWRALLRAESLAYADILLWAFDDTFFNLTLKEIHFLAWASAFCPDVRFVFKGDADVFVNVGNLLEFLAPRDPAQDLLAGDVIVHARPIRTRASKYYIPEAVYGLPAYPAYAGGGGFVLSGATLHRLAGACAQVELFPIDDVFLGMCLQRLRLTPEPHPAFRTFGIPQPSAAPHLSTFDPCFYRELVVVHGLSAADIWLMWRLLHGPHGPACAHPQPVAAGPFQWDS

SEQ ID NO: 1345 - protein, 96 aa, Homo Sapiens
MWLGRRALCALVLLLACASLGLLYASTRDAPGLRLPLAPWAPPQSPRRPELPDLAPEPRYAHIPVRIKEQVVGAEGCLCHKRAGVPGLSVEEPVPS

SEQ ID NO: 1346 - protein, 81 aa, Homo Sapiens
MWLGRRALCALVLLLACASLGLLYASTRDAPGLRLPLAPWAPPQSPRRPELPDLAPEPRYAHIPVRIKEQVVGLLAWNNCS

SEQ ID NO: 1347 - protein, 120 aa, Homo Sapiens
MWLGRRALCALVLLLACASLGLLYASTRDAPGLRLPLAPWAPPQSPRRPELPDLAPEPRYAHIPVRIKEQVVGLLAWNNCSCESSGGGLPLPFQKQVRAIDLTKAFDPAELRAASATREQ

SEQ ID NO: 1348 - protein, 231 aa, Homo Sapiens
MWLGRRALCALVLLLACASLGLLYASTRDAPGLRLPLAPWAPPQSPRRPELPDLAPEPRYAHIPVRIKEQVVGLLAWNNCSCESSGGGLPLPFQKQVRAIDLTKAFDPAELRAASATREQEFQAFLSRSQSPADQLLIAPANSPLQYPLQGVEVQPLRSILVPGEPDCLPRHLGRGRGSDWSYSHWRGSGRSHPCQPRAGPTQQATTTGHLQQPKLPDQHSRHSPVLHRGT

SEQ ID NO: 1349 - protein, 237 aa, Homo Sapiens
MWLGRRALCALVLLLACASLGLLYASTRDAPGLRLPLAPWAPPQSPRRPELPDLAPEPRYAHIPVRIKEQVVGLLAWNNCSCESSGGGLPLPFQKQVRAIDLTKAFDPAELRAASATREQEFQAFLSRSQSPADQLLIAPANSPLQYPLQGVEVQPLRSILVPGLSLQAASGQEVYQVNLTASLGTWDVAGEVTGVTLTGEGQADLTLVSPGLDQLNRQLQLVTYSSRSYQTNTADT

SEQ ID NO: 1350 - protein, 304 aa, Homo Sapiens
MWLGRRALCALVLLLACASLGLLYASTRDAPGLRLPLAPWAPPQSPRRPELPDLAPEPRYAHIPVRIKEQVVGLLAWNNCSCESSGGGLPLPFQKQVRAIDLTKAFDPAELRAASATREQEFQAFLSRSQSPADQLLIAPANSPLQYPLQGVEVQPLRSILVPGLSLQAASGQEVYQVNLTASLGTWDVAGEVTGVTLTGEGQADLTLVSPGLDQLNRQLQLVTYSSRSYQTNTADTAQYNISALVTIATKTFLRYDRLRALITSIRRFYPTVTVVIADDSDKPERVSGPYVEHYLMPFGKVCS

SEQ ID NO: 1351 - protein, 328 aa, Homo Sapiens
MWLGRRALCALVLLLACASLGLLYASTRDAPGLRLPLAPWAPPQSPRRPELPDLAPEPRYAHIPVRIKEQVVGLLAWNNCSCESSGGGLPLPFQKQVRAIDLTKAFDPAELRAASATREQEFQAFLSRSQSPADQLLIAPANSPLQYPLQGVEVQPLRSILVPGLSLQAASGQEVYQVNLTASLGTWDVAGEVTGVTLTGEGQADLTLVSPGLDQLNRQLQLVTYSSRSYQTNTADTGARPGWRDGQAGQTEKNQKGWSGQMAEGMGGIWAMARAVQPHNGCFNWTSRARGRKGAFVHLGLEQARGKPEPWVCLPFRPTVGGPRKRLV

SEQ ID NO: 1352 - protein, 328 aa, Homo Sapiens; identical to SEQ ID NO: 1351

SEQ ID NO: 1353 - protein, 533 aa, Homo Sapiens
MWLGRRALCALVLLLACASLGLLYASTRDAPGLRLPLAPWAPPQSPRRPELPDLAPEPRYAHIPVRIKEQVVGLLAWNNCSCESSGGGLPLPFQKQVRAIDLTKAFDPAELRAASATREQEFQAFLSRSQSPADQLLIAPANSPLQYPLQGVEVQPLRSILVPGLSLQAASGQEVYQVNLTASLGTWDVAGEVTGVTLTGEGQADLTLVSPGLDQLNRQLQLVTYSSRSYQTNTADTVRFSTEGHEAAFTIRIRHPPNPRLYPPGSLPQGAQYNISALVTIATKTFLRYDRLRALITSIRRFYPTVTVVIADDSDKPERVSGPYVEHYLMPFGKGWFAGRNLAVSQVTTKYVLWVDDDFVFTARTRLERLVDVLERTPLDLVGGAVREISGFATTYRQLLSVEPGAPGLGNCLRQRRGFHHELVGFPGCVVTDGVVNFFLARTDKVREVGFDPRLSRVAHLEFFLDGLGSLRVGSCSDVVVDHASKLKLPWTSRDAGAETYARYRYPGSLDESQMAKHRLLFFKHRLQCMTSQ

SEQ ID NO: 1354 - protein, 478 aa, Homo Sapiens
MWLGRRALCALVLLLACASLGLLYASTRDAPGLRLPLAPWAPPQSPRRPELPDLAPEPRYAHIPVRIKEQVVGSQSPADQLLIAPANSPLQYPLQGVEVQPLRSILVPGLSLQAASGQEVYQVNLTASLGTWDVAGEVTGVTLTGEGQADLTLVSPGLDQLNRQLQLVTYSSRSYQTNTADTVRFSTEGHEAAFTIRIRHPPNPRLYPPGSLPQGAQYNISALVTIATKTFLRYDRLRALITSIRRFYPTVTVVIADDSDKPERVSGPYVEHYLMPFGKGWFAGRNLAVSQVTTKYVLWVDDDFVFTARTRLERLVDVLERTPLDLVGGAVREISGFATTYRQLLSVEPGAPGLGNCLRQRRGFHHELVGFPGCVVTDGVVNFFLARTDKVREVGFDPRLSRVAHLEFFLDGLGSLRVGSCSDVVVDHASKLKLPWTSRDAGAETYARYRYPGSLDESQMAKHRLLFFKHRLQCMTSQ

SEQ ID NO: 1355 - protein, 151 aa, Homo Sapiens
  misc_feature (1)..(1): Xaa can be any naturally occurring amino acid
XMPFGKGWFAGRNLAVSQVTTKYVLWVDDDFVFTARTRLERLVDVLERTPLDLARLEATSLSLQVGGAVREISGFATTYRQLLSVEPGAPGLGNCLRQRRGFHHELVGFPGCVVTDGVVNFFLARTDKVREVGFDPRLSRVAHLEFFLDGL

SEQ ID NO: 1356 - protein, 127 aa, Homo Sapiens
  misc_feature (1)..(1): Xaa can be any naturally occurring amino acid
XSQSPADQLLIAPANSPLQYPLQGVEVQPLRSILVPGLSLQAASGQEVYQVNLTASLGTWDVAGEVTGVTLTGEGQADLTLVSPGLDQLNRQLQLVTYSSRSYQTNTADTGSNAMSFLPSPVLHRGT

SEQ ID NO: 1357 - protein, 637 aa, Homo Sapiens [sequence omitted]

SEQ ID NO: 1358 - protein, 998 aa, Homo Sapiens [sequence omitted]

SEQ ID NO: 1359 - protein, 53 aa, Homo Sapiens
DASSIVFLCDLHIHFPPNILDGIRKHCVEGRLAFAPVVMRLSCGSSPRDPHGS

SEQ ID NO: 1360 - protein, 26 aa, Homo Sapiens
DVERALRAARLPRDRACDSPSPGTST

SEQ ID NO: 1361 - protein, 1039 aa, Homo Sapiens
MPRLPVKKIRKQMKLLLLLLLLSCAAWLTYVHLGLVRQGRALRQRLGYGRDGEKLTSETDGRGVHAAPSTQRAEDSSESREEEQAPEGRDLDMLFPGGAGRLPLNFTHQTPPWREEYKGQVNLHVFEDWCGGAVGHLRRNLHFPLFPHTRTTVKKLAVSPKWKNYGLRIFGFIHPARDGDVQFSVASDDNSEFWLSLDESPAAAQLVAFVGKTGSEWTAPGEFTKFSSQVSKPRRLMASRRYYFELLHKQDDRGSDHVEVGWRAFLPGLKFEVISSAHISLYTDESALKMDHVAHVPQSPASHVGGRPPQEETSADMLRPDPRDTFFLTPRMESSSLENVLEPCAYAPTYVVKDFPIARYQGLQFVYLSFVYPNDYTRLTHMETDNKCFYRESPLYLERFGFYKYMKMDKEEGDEDEEDEVQRRAFLFLNPDDFLDDEDEGELLDSLEPTEAAPPRSGPQSPAPAAPAQPGATLAPPTPPRPRDGGTPRHSRALSWAARAARPLPLFLGRAPPPRPAVEQPPPKVYVTRVRPGQRASPRAPAPRAPWPPFPGVFLHPRPLPRVQLRAPPRPPRPHGRRTGGPQATQPRPPARAQATQGGREGQARTLGPAAPTVDSNLSSEARPVTSFLSLSQVSGPQLPGEGEEEEEGEDDGAPGDEAASEDSEEAAGPALGRWREDAIDWQRTFSVGAVDFELLRSDWNDLRCNVSGNLQLPEAEAVDVTAQYMERLNARHGGRFALLRIVNVEKRRDSARGSRFLLELELQERGGGRLRLSEYVFLRLPGARVGDADGESPEPAPAASVRPDGRPELCRPLRLAWRQDVMVHFIVPVKNQARWVAQFLADMAALHARTGDSRFSVVLVDFESEDMDVERALRAARLPRYQYLRRTGNFERSAGLQAGVDAVEDASSIVFLCDLHIHFPPNILDGIRKHCVEGRLAFAPVVMRLSCGSSPRDPHGYWEVNGFGLFGIYKSDFDRVGGMNTEEFRDQWGGEDWELLDRVLQAGLEVERLRLRNFYHHYHSKRGMWSVRSRKGSRTGAS

SEQ ID NO: 1362 - protein, 62 aa, Homo Sapiens
MANFHKTLILGKGKTLTNEASTKKVELDNCPSVSPYLRGQSKLIFKPDLTLEEVQEIRLLNV

SEQ ID NO: 1363 - protein, 6 aa, Homo Sapiens
MGFNLT

SEQ ID NO: 1364 - protein, 21 aa, Homo Sapiens
MGFNLTFHLSYKFRLLLLLTL

SEQ ID NO: 1365 - protein, 42 aa, Homo Sapiens
MGFNLTFHLSYKFRLLLLLTLCLTVVGWATSNYFVGAIQEIP

SEQ ID NO: 1366 - protein, 55 aa, Homo Sapiens
MGFNLTFHLSYKFRLLLLLTLCLTVVGWATSNYFVGAIQEIPKAKEFMANFHKTL

SEQ ID NO: 1367 - protein, 118 aa, Homo Sapiens
MGFNLTFHLSYKFRLLLLLTLCLTVVGWATSNYFVGAIQEIPKAKEFMANFHKTLILGKGKTLTNEASTKKVELDNCPSVSPYLRGQSKLIFKPDLTLEEVQAENPKVSRGRYRPQEC

SEQ ID NO: 1368 - protein, 136 aa, Homo Sapiens
MGFNLTFHLSYKFRLLLLLTLCLTVVGWATSNYFVGAIQEIPKAKEFMANFHKTLILGKGKTLTNEASTKKVELDNCPSVSPYLRGQSKLIFKPDLTLEEVQAENPKVSRGRYRPQECKALQRVAILVPHRNREKH

SEQ ID NO: 1369 - protein, 246 aa, Homo Sapiens
MGFNLTFHLSYKFRLLLLLTLCLTVVGWATSNYFVGAIQEIPKAKEFMANFHKTLILGKGKTLTNEASTKKVELDNCPSVSPYLRGQSKLIFKPDLTLEEVQAENPKVSRGRYRPQECKALQRVAILVPHRNREKHLMYLLEHLHPFLQRQQLDYGIYVIHQAEGKKFNRAKLLNVGYLEALKEENWDCFIFHDVDLVPENDFNLYKCEEHPKHLVVGRNSTGYRLRYSGYFGGVTALSREQFFKG

SEQ ID NO: 1370 - protein, 344 aa, Homo Sapiens
MGFNLTFHLSYKFRLLLLLTLCLTVVGWATSNYFVGAIQEIPKAKEFMANFHKTLILGKGKTLTNEASTKKVELDNCPSVSPYLRGQSKLIFKPDLTLEEVQAENPKVSRGRYRPQECKALQRVAILVPHRNREKHLMYLLEHLHPFLQRQQLDYGIYVIHQAEGKKFNRAKLLNVGYLEALKEENWDCFIFHDVDLVPENDFNLYKCEEHPKHLVVGRNSTGYRLRYSGYFGGVTALSREQFFKVNGFSNNYWGWGGEDDDLRLRVELQRMKISRPLPEVGKYTMVFHTRDKGNEVNAERMKLLHQVSRVWRTDGLSSCSYKLVSVEHNPLYINITVDFWFGA

SEQ ID NO: 1371 - protein, 344 aa, Homo Sapiens; identical to SEQ ID NO: 1370

SEQ ID NO: 1372 - protein, 344 aa, Homo Sapiens; identical to SEQ ID NO: 1370

SEQ ID NO: 1373 - protein, 301 aa, Homo Sapiens
MGFNLTFHLSYKFRLLLLLTLCLTVVGWATSNYFVGAIQEIPKAKEFMANFHKTLILGKGKTLTNEASTKKVELDNCPSVSPYLRGQSKLIFKPDLTLEEVQAENPKVSRGRYRPQECKALQRVAILVPHRNREKHLMYLLEHLHPFLQRQQLDYGIYVIHQAEGKKFNRAKLLNVGYLEALKEENWDCFIFHDVDLVPENDFNLYKCEEHPKHLVVGRNSTGYRLRYSGYFGGVTALSREQFFKVNGFSNNYWGWGGEDDDLRLRVELQRMKISRPLPEVGKYTMVFHTRDKGNEVNAER

SEQ ID NO: 1374 - protein, 25 aa, Homo Sapiens
MYLLEHLHPFLQRQQLDYGIYVIHQ

SEQ ID NO: 1375 - protein, 388 aa, Homo Sapiens
MRARRGLLRLPRRSLLAALFFFSLSSSLLYFVYVAPGIVNTYLFMMQAQGILIRDNVRTIGAQVYEQVLRSAYAKRNSSVNDSDYPLDLNHSETFLQTTTFLPEDFTYFANHTCPERLPSMKGPIDINMSEIGMDYIHELFSKDPTIKLGGHWKPSDCMPRWKVAILIPFRNRHEHLPVLFRHLLPMLQRQRLQFAFYVVEQVGTQPFNRAMLFNVGFQEAMKDLDWDCLIFHDVDHIPESDRNYYGCGQMPRHFATKLDKYMYLLPYTEFFGGVSGLTVEQFRKINGFPNAFWGWGGEDDDLWNRVQNAGYSVSRPEGDTGKYKSIPHHHRGEVQFLGRYALLRKSKERQGLDGLNNLNYFANITYDALYKNITVNLTPELAQVNEY

SEQ ID NO: 1376 - protein, 343 aa, Homo Sapiens
MSVLRRMMRVSNRSLLAFIFFFSLSSSCLYFIYVAPGIANTYLFMVQARGIMLRENVKTIGHMIRLYTNKNSTLNGTDYPEGNNSSDYLVQTTTYLPENFTYSPYLPCPEKLPYMRGFLNVNVSEVSFDEIHQLFSKDLDIEPGGHWRPKDCKPRWKTGTQPFNRAMLFNVGFKEAMKDSVWDCVIFHDVDHLPENDRNYYGCGEMPRHFAAKLDKYMYILPYKEFFGGVSGLTVEQFRKINGFPNAFWGWGGEDDDLWNRVHYAGYNVTRPEGDLGKYKSIPHHHRGEVQFLGRYKLLRYSKERQYIDGLNNLIYRPKILVDRLYTNISVNLMPELAPIEDY

SEQ ID NO: 1377 - protein, 382 aa, Homo Sapiens
MSVLRRMMRVSNRSLLAFIFFFSLSSSCLYFIYVAPGIANTYLFMVQARGIMLRENVKTIGHMIRLYTNKNSTLNGTDYPEGNNSSDYLVQTTTYLPENFTYSPYLPCPEKLPYMRGFLNVNVSEVSFDEIHQLFSKDLDIEPGGHWRPKDCKPRWKVAVLIPFRNRHEHLPIFFLHLIPMLQKQRLEFAFYVIEQTGTQPFNRAMLFNVGFKEAMKDSVWDCVIFHDVDHLPENDRNYYGCGEMPRHFAAKLDKYMYILPYKEFFGGVSGLTVEQFRKINGFPNAFWGWGGEDDDLWNRVHYAGYNVTRPEGDLGKYKSIPHHHRGEVQFLGRYKLLRYSKERQYIDGLNNLIYRPKILVDRLYTNISVNLMPELAPIEDY

SEQ ID NO: 1378 - protein, 343 aa, Homo Sapiens
MSVLRRMMRVSNRSLLAFIFFFSLSSSCLYFIYVAPGIDYPEGNNSSDYLVQTTTYLPENFTYSPYLPCPEKLPYMRGFLNVNVSEVSFDEIHQLFSKDLDIEPGGHWRPKDCKPRWKVAVLIPFRNRHEHLPIFFLHLIPMLQKQRLEFAFYVIEQTGTQPFNRAMLFNVGFKEAMKDSVWDCVIFHDVDHLPENDRNYYGCGEMPRHFAAKLDKYMYILPYKEFFGGVSGLTVEQFRKINGFPNAFWGWGGEDDDLWNRVHYAGYNVTRPEGDLGKYKSIPHHHRGEVQFLGRYKLLRYSKERQYIDGLNNLIYRPKILVDRLYTNISVNLMPELAPIEDY

SEQ ID NO: 1379 - protein, 72 aa, Homo Sapiens
MVQARGIMLRENVKTIGHMIRLYTNKNSTLNGTDYPEGNNSSDYLVQTTTYLPENFTYSPYLPCPEKLPYMR

SEQ ID NO: 1380 - protein, 415 aa, Homo Sapiens
MQMSYAIRCAFYQLLLAALMLVAMLQLLYLSLLSGLHGQEEQDQYFEFFPPSPRSVDQVKAQLRTALASGGVLDASGDYRVYRGLLKTTMDPNDVILATHASVDNLLHLSGLLERWEGPLSVSVFAATKEEAQLATVLAYALSSHCPDMRARVAMHLVCPSRYEAAVPDPREPGEFALLRSCQEVFDKLARVAQPGINYALGTNVSYPNNLLRNLAREGANYALVIDVDMVPSEGLWRGLREMLDQSNQWGGTALVVPAFEIRRARRMPMNKNELVQLYQVGEVRPFYYGLCTPCQAPTNYSRWVNLPEESLLRPAYVVPWQDPWEPFYVAGGKVPTFDERFRQYGFNRISQACELHVAGFDFEVLNEGFLVHKGFKEALKFHPQKEAENQHNKILYRQFKQELKAKYPNSPRRC

SEQ ID NO: 1381 - protein, 92 aa, Homo Sapiens
IDVTFKSTNPYGWPQIVLSVYGPDVFGNDVVRGYGAVHVPFSPGRHKRTIPMFVPESTSKLQKFTSWFMGRRPEYTDPKVVAQGEGREAQPG

SEQ ID NO: 1382 - protein, 133 aa, Homo Sapiens
LLMVNGQVESAQFPEYDDLYCKYCFVYGQDWAPTAGLEEGISQITSKSQDVRQALVWNFPIDVTFKSTNPYGWPQIVLSVYGPDVFGNDVVRGYGAVHVPFSPGRHKRTIPMFVPESTSKLQKFTRSASCSTH

SEQ ID NO: 1383 - protein, 135 aa, Homo Sapiens
MATASPSVFLLMVNGQVESAQFPEYDDLYCKYCFVYGQDWAPTAGLEEGISQITSKSQDVRQALVWNFPIDVTFKSTNPYGWPQIVLSVYGPDVFGNDVVRGYGAVHVPFSPGRHKRTIPMFVPESTSKLQKFTR

SEQ ID NO: 1384 - protein, 153 aa, Homo Sapiens
MATASPSVFLLMVNGQVESAQFPEYDDLYCKYCFVYGQDWAPTAGLEEGISQITSKSQDVRQALVWNFPIDVTFKSTNPYGWPQIVLSVYGPDVFGNDVVRGYGAVHVPFSPGRHKRTIPMFVPESTSKLQKFTSLCLVASSDLQAAPPTEDK

SEQ ID NO: 1385 - protein, 186 aa, Homo Sapiens
MATASPSVFLLMVNGQVESAQFPEYDDLYCKYCFVYGQDWAPTAGLEEGISQITSKSQDVRQALVWNFPIDVTFKSTNPYGWPQIVLSVYGPDVFGNDVVRGYGAVHVPFSPGRHKRTIPMFVPESTSKLQKFTSWFMGRRPEYTDPKVVAQGEGREAITAPRKAVFSVHGLTSPRALALVHIKGT

SEQ ID NO: 1386 - protein, 161 aa, Homo Sapiens
MATASPSVFLLMVNGQVESAQFPEYDDLYCKYCFVYGQDWAPTAGLEEGISQITSKSQDVRQALVWNFPIDVTFKSTNPYGWPQIVLSVYGPDVFGNDVVRGYGAVHVPFSPGRHKRTIPMFVPESTSKLQKFTSWFMGRRPEYTDPKVVAQGEGREAQPG

SEQ ID NO: 1387 - protein, 187 aa, Homo Sapiens
MATASPSVFLLMVNGQVESAQFPEYDDLYCKYCFVYGQDWAPTAGLEEGISQITSKSQDVRQALVWNFPIDVTFKSTNPYGWPQIVLSVYGPDVFGNDVVRGYGAVHVPFSPGRHKRTIPMFVPESTSKLQKFTSWFMGRRPEYTDPKVVAQGEGREDENAEAEIPRSTWVSLCPSPAWLMLPFCPQ

SEQ ID NO: 1388 - protein, 183 aa, Homo Sapiens
MATASPSVFLLMVNGQVESAQFPEYDDLYCKYCFVYGQDWAPTAGLEEGISQITSKSQDVRQALVWNFPIDVTFKSTNPYGWPQIVLSVYGPDVFGNDVVRGYGAVHVPFSPGRHKRTIPMFVPESTSKLQKFTSWFMGRRPEYTDPKVVAQGEGREGKAPSPLLPPSPIQVTAWEWVGPGLG

SEQ ID NO: 1389 - protein, 204 aa, Homo Sapiens
MATASPSVFLLMVNGQVESAQFPEYDDLYCKYCFVYGQDWAPTAGLEEGISQITSKSQDVRQALVWNFPIDVTFKSTNPYGWPQIVLSVYGPDVFGNDVVRGYGAVHVPFSPGRHKRTIPMFVPESTSKLQKFTSWFMGRRPEYTDPKVVAQGEGREVTRVRSQGFVTLLFNVVTKDMRKLGYDTGPSDTQGVLGPSPPQSFPQ

SEQ ID NO: 1390 - protein, 125 aa, Homo Sapiens
MATASPSVFLLMVNGQVESAQFPEYDDLYCKYCFVYGQDWAPTAGLEEGISQITSKSQDVRQALVWNFPIDVTFKSTNPYGYRAQRVWTRCVRERCGSRLWGRARALLTWPAQKDHPHVCPRIYV

SEQ ID NO: 1391 - protein, 19 aa, Homo Sapiens
MMTSTASTALCTARTGPPQ

SEQ ID NO: 1392 - protein, 106 aa, Homo Sapiens
MMTSTASTALCTARTGPPQRVWRRGSHRSHPRAKMCGKHWCGTSPLMSPLKAPTPTAGHRSCSACMDQMCSGTMWFEAMGPCTCPSHLAGTKGPSPCLSQNLRLNC

SEQ ID NO: 1393 - protein, 133 aa, Homo Sapiens
MMTSTASTALCTARTGPPQRVWRRGSHRSHPRAKMCGKHWCGTSPLMSPLKAPTPTAGHRSCSACMDQMCSGTMWFEAMGPCTCPSHLAGTKGPSPCLSQNLRLNCRSLQAGSWGGGPSTQTPRWWLRVKAGK

SEQ ID NO: 1394 - protein, 147 aa, Homo Sapiens
MMTSTASTALCTARTGPPQRVWRRGSHRSHPRAKMCGKHWCGTSPLMSPLKAPTPTAGHRSCSACMDQMCSGTMWFEAMGPCTCPSHLAGTKGPSPCLSQNLRLNCRSLQAGSWGGGPSTQTPRWWLRVKAGKPPSGLSVKDSSVSR

SEQ ID NO: 1395 - protein, 153 aa, Homo Sapiens
MMTSTASTALCTARTGPPQRVWRRGSHRSHPRAKMCGKHWCGTSPLMSPLKAPTPTAGHRSCSACMDQMCSGTMWFEAMGPCTCPSHLAGTKGPSPCLSQNLRLNCRSLQAGSWGGGPSTQTPRWWLRVKAGKVKLPPLSYPHPPYRLQPGSG

SEQ ID NO: 1396 - protein, 213 aa, Homo Sapiens
MMTSTASTALCTARTGPPQRVWRRGSHRSHPRAKMCGKHWCGTSPLMSPLKAPTPTAGHRSCSACMDQMCSGTMWFEAMGPCTCPSHLAGTKGPSPCLSQNLRLNCRSLQAGSWGGGPSTQTPRWWLRVKAGKVKLPPLSYPHPPYRLQPGSGWAQGWGECRGPARHIGASPQMFPDEGLVGAQRVCHVCLSRQPLYLPVRGLGQALLSPFYR

SEQ ID NO: 1397 - protein, 112 aa, Homo Sapiens
SNRARPRWVPPAPPDLPWRPRVLASFYSWSTGRWRAPSFQSMMTSTASTALCTARTGPPQRVWRRGSHRSHPRAKMCGKHWCGTSPLMSPLKAPTPTAAVQLAFWKFRVHQG

SEQ ID NO: 1398 - protein, 396 aa, Homo Sapiens
MGALARALLLPLLAQWLLRAAPELAPAPFTLPLRVAAATNRVVAPTPGPGTPAERHADGLALALEPALASPAGAANFLAMVDNLQGDSGRGYYLEMLIGTPPQKLQILVDTGSSNFAVAGTPHSYIDTYFDTERSSTYRSKGFDVTVKYTQGSWTGFVGEDLVTIPKGFNTSFLVNIATIFESENFFLPGIKWNGILGLAYATLAKPSSSLETFFDSLVTQANIPNVFSMQMCGAGLPVAGSGTNGGSLVLGGIEPSLYKGDIWYTPIKEEWYYQIEILKLEIGGQSLNLDCREYNADKAIVDSGTTLLRLPQKVFDAVVEAVARASLIPEFSDGFWTGSQLACWTNSETPWSYFPKISIYLRDENSSRSFRITILPQKLQVLQCLKFPGLSQQRM

SEQ ID NO: 1399 - protein, 518 aa, Homo Sapiens
MGALARALLLPLLAQWLLRAAPELAPAPFTLPLRVAAATNRVVAPTPGPGTPAERHADGLALALEPALASPAGAANFLAMVDNLQGDSGRGYYLEMLIGTPPQKLQILVDTGSSNFAVAGTPHSYIDTYFDTERSSTYRSKGFDVTVKYTQGSWTGFVGEDLVTIPKGFNTSFLVNIATIFESENFFLPGIKWNGILGLAYATLAKPSSSLETFFDSLVTQANIPNVFSMQMCGAGLPVAGSGTNGGSLVLGGIEPSLYKGDIWYTPIKEEWYYQIEILKLEIGGQSLNLDCREYNADKAIVDSGTTLLRLPQKVFDAVVEAVARASLIPEFSDGFWTGSQLACWTNSETPWSYFPKISIYLRDENSSRSFRITILPQLYIQPMMGAGLNYECYRFGISPSTNALVIGATVMEGFYVIFDRAQKRVGFAASPCAEIAGAAVSEISGPFSTEDVASNCVPAQSLSEPILWIVSYALMSVCGAILLVLIVLLLLPFRCQRRPRDPEVVNDESSLVRHRWK

SEQ ID NO: 1400 - protein, 468 aa, Homo Sapiens
MGALARALLLPLLAQWLLRAAPELAPAPFTLPLRVAAATNRVVAPTPGPGTPAERHADGLALALEPALASPAGAANFLAMVDNLQGDSGRGYYLEMLIGTPPQKLQILVDTGSSNFAVAGTPHSYIDTYFDTERSSTYRSKGFDVTVKYTQGSWTGFVGEDLVTIPKGFNTSFLVNIATIFESENFFLPGIKWNGILGLAYATLAKPSSSLETFFDSLVTQANIPNVFSMQMCGAGLPVAGSGTNGGSLVLGGIEPSLYKGDIWYTPIKEEWYYQIEILKLEIGGQSLNLDCREYNADKAIVDSGTTLLRLPQKVFDAVVEAVARASLLYIQPMMGAGLNYECYRFGISPSTNALVIGATVMEGFYVIFDRAQKRVGFAASPCAEIAGAAVSEISGPFSTEDVASNCVPAQSLSEPILWIVSYALMSVCGAILLVLIVLLLLPFRCQRRPRDPEVVNDESSLVRHRWK

SEQ ID NO: 1401 - protein, 43 aa, Homo Sapiens
MAAGAVFLALSAQLLQARLMKEESPVVSWRLEPEDGTALCFIF

SEQ ID NO: 1402 - protein, 628 aa, Homo Sapiens
MEPPDAPAQARGAPRLLLLAVLLAAHPDAQAEVRLSVPPLVEVMRGKSVILDCTPTGTHDHYMLEWFLTDRSGARPRLASAEMQGSELQVTMHDTRGRSPPYQLDSQGRLVLAEAQVGDERDYVCVVRAGAAGTAEATARLNVFAKPEATEVSPNKGTLSVMEDSAQEIATCNSRNGNPAPKITWYRNGQRLEVPVEMNPEGYMTSRTVREASGLLSLTSTLYLRLRKDDRDASFHCAAHYSLPEGRHGRLDSPTFHLTLHYPTEHVQFWVGSPSTPAGWVREGDTVQLLCRGDGSPSPEYTLFRLQDEQEEVLNVNLEGNLTLEGVTRGQSGTYGCRVEDYDAADDVQLSKTLELRVAYLDPLELSEGKVLSLPLNSSAVVNCSVHGLPTPALRWTKDSTPLGDGPMLSLSSITFDSNGTYVCEASLPTVPVLSRTQNFTLLVQGSPELKTAEIEPKADGSWREGDEVTLICSARGHPDPKLSWSQLGGSPAEPIPGRQGWVSSSLTLKVTSALSRDGISCEASNPHGNKRHVFHFGTVSPQTSQAGVAVMAVAVSVGLLLLVVAVFYCVRRKGGPCCRQRREKGAPPPGEPGLSHSGSEQPEQTGLLMGGASGGARGGSGGFGDEC

SEQ ID NO: 1403 - protein, 588 aa, Homo Sapiens
MEPPDAPAQARGAPRLLLLAVLLAAHPDAQAEVRLSVPPLVEVMRGKSVILDCTPTGTHDHYMLEWFLTDRSGARPRLASAEMQGSELQVTMHDTRGRSPPYQLDSQGRLVLAEAQVGDERDYVCVVRAGAAGTAEATARLNVFAKPEATEVSPNKGTLSVMEDSAQEIATCNSRNGNPAPKITWYRNGQRLEVPVEMNPEGYMTSRTVREASGLLSLTSTLYLRLRKDDRDASFHCAAHYSLPEGRHGRLDSPTFHLTLHYPTEHVQFWVGSPSTPAGWVREGDTVQLLCRGDGSPSPEYTLFRLQDEQEEVLNVNLEGNLTLEGVTRGQSGTYGCRVEDYDAADDVQLSKTLELRVAYLDPLELSEGKVLSLPLNSSAVVNCSVHGLPTPALRWTKDSTPLGDGPMLSLSSITFDSNGTYVCEASLPTVPVLSRTQNFTLLVQGSPELKTAEIEPKADGSWREGDEVTLICSARGHPDPKLSWSQLGGSPAEPIPGRQGWVSSSLTLKVTSALSRDGISCEASNPHGNKRHVFHFGTVSPQTSQAGVAVMAVAVSVGLLLLVVAVFYCVRRKGGPCCRQRREKGAP

SEQ ID NO: 1404 - protein, 286 aa, Homo Sapiens
MEPPDAPAQARGAPRLLLLAVLLAAHPDAQAEVRLSVPPLVEVMRGKSVILDCTPTGTHDHYMLEWFLVTMHDTRGRSPPYQLDSQGRLVLAEAQVGDERDYVCVVRAGAAGTAEATARLNVFAKPEATEVSPNKGTLSVMEDSAQEIATCNSRNGNPAPKITWYRNGQRLEVPVEMNPEGYMTSRTVREASGLLSLTSTLYLRLRKDDRDASFHCAAHYSLPEGRHGRLDSPTFHLTLHYPTEHVQFWVGSPSTPAGWVREGDTVQLLCRGDGSPSPEYTLFRLQ

SEQ ID NO: 1405 - protein, 61 aa, Homo Sapiens
  misc_feature (1)..(1): Xaa can be any naturally occurring amino acid
XGYMTSRTVREASGLLSLTSTLYLRLRKDDRDASFHCAAHYSLPEGRHGRLDSPTFHLTLH

SEQ ID NO: 1406 - protein, 145 aa, Homo Sapiens
MAQLFLPLLAALVLAQAPAALADVLEGDSSEDRAFRVRIAGDAPLQGVLGGALTIPCHVHYLRPPPSRRAVLGSPRVKWTFLSRGREAEVLVARGVRVKVNEAYRFRVALPAYPASLTDVSLALSELRPNDSGIYRCEVQHGIDD

SEQ ID NO: 1407 - protein, 196 aa, Homo Sapiens
MAQLFLPLLAALVLAQAPAALADVLEGDSSEDRAFRVRIAGDAPLQGVLGGALTIPCHVHYLRPPPSRRAVLGSPRVKWTFLSRGREAEVLVARGVRVKVNEAYRFRVALPAYPASLTDVSLALSELRPNDSGIYRCEVQHGIDDSSDAVEVKVKGIPSRPHERPVTETWMASPGSGTMVWWTRMTSMMCTVMLKT

SEQ ID NO: 1408 - protein, 213 aa, Homo Sapiens
MAQLFLPLLAALVLAQAPAALADVLEGDSSEDRAFRVRIAGDAPLQGVLGGALTIPCHVHYLRPPPSRRAVLGSPRVKWTFLSRGREAEVLVARGVRVKVNEAYRFRVALPAYPASLTDVSLALSELRPNDSGIYRCEVQHGIDDSSDAVEVKVKGVVFLYREGSARYAFSFSGAQEACARIGAHIATPEQLYAAYLGGYEQCDAGWLSDQTV

SEQ ID NO: 1409 - protein, 911 aa, Homo Sapiens
MAQLFLPLLAALVLAQAPAALADVLEGDSSEDRAFRVRIAGDAPLQGVLGGALTIPCHVHYLRPPPSRRAVLGSPRVKWTFLSRGREAEVLVARGVRVKVNEAYRFRVALPAYPASLTDVSLALSELRPNDSGIYRCEVQHGIDDSSDAVEVKVKGVVFLYREGSARYAFSFSGAQEACARIGAHIATPEQLYAAYLGGYEQCDAGWLSDQTVRYPIQTPREACYGDMDGFPGVRNYGVVDPDDLYDVYCYAEDLNGELFLGDPPEKLTLEEARAYCQERGAEIATTGQLYAAWDGGLDHCSPGWLADGSVRYPIVTPSQRCGGGLPGVKTLFLFPNQTGFPNKHSRFNVYCFRDSAQPSAIPEASNPASNPASDGLEAIVTVTETLEELQLPQEATESESRGAIYSIPIMEDGGGGSSTPEDPAEAPRTLLEFETQSMVPPTGFSEEEGKALEEEEKYEDEEEKEEEEEEEEVEDEALWAWPSELSSPGPEASLPTEPAAQEESLSQAPARAVLQPGASPLPDGESEASRPPRVHGPPTETLPTPRERNLASPSPSTLVEAREVGEATGGPELSGVPRGESEETGSSEGAPSLLPATRAPEGTRELEAPSEDNSGRTAPAGTSVQAQPVLPTDSASRGGVAVVPASGDCVPSPCHNGGTCLEEEEGVRCLCLPGYGGDLCDVGLRFCNPGWDAFQGACYKHFSTRRSWEEAETQCRMYGAHLASISTPEEQDFINNRYREYQWIGLNDRTIEGDFLWSDGVPLLYENWNPGQPDSYFLSGENCVVMVWHDQGQWSDVPCNYHLSYTCKMGLVSCGPPPELPLAQVFGRPRLRYEVDTVLRYRCREGLAQRNLPLIRCQENGRWEAPQISCVPRRPARALHPEEDPEGRQGRLLGRWKALLIPPSSPMPGP

SEQ ID NO: 1410 - protein, 671 aa, Homo Sapiens
MAQLFLPLLAALVLAQAPAALADVLEGDSSEDRAFRVRIAGDAPLQGVLGGALTIPCHVHYLRPPPSRRAVLGSPRVKWTFLSRGREAEVLVARGVRVKVNEAYRFRVALPAYPASLTDVSLALSELRPNDSGIYRCEVQHGIDDSSDAVEVKVKGVVFLYREGSARYAFSFSGAQEACARIGAHIATPEQLYAAYLGGYEQCDAGWLSDQTVRYPIQTPREACYGDMDGFPGVRNYGVVDPDDLYDVYCYAEDLNGELFLGDPPEKLTLEEARAYCQERGAEIATTGQLYAAWDGGLDHCSPGWLADGSVRYPIVTPSQRCGGGLPGVKTLFLFPNQTGFPNKHSRFNVYCFRDSAQPSAIPEASNPASNPASDGLEAIVTVTETLEELQLPQEATESESRGAIYSIPIMEDGGGGSSTPEDPAEAPRTLLEFETQSMVPPTGFSEEEGKALEEEEKYEDEEEKEEEEEEEEVEDEALWAWPSELSSPGPEASLPTEPAAQEESLSQAPARAVLQPGASPLPDGESEASRPPRVHGPPTETLPTPRERNLASPSPSTLVEAREVGEATGGPELSGVPRGESEETGSSEGAPSLLPATRAPEGTRELEAPSEDNSGRTAPAGTSVQAQPVLPTDSASRGGVAVVPASGNSAQGSTALSILLLFFPLQLWVT

SEQ ID NO: 1411 - protein, 231 aa, Homo Sapiens
MAQLFLPLLAALVLAQAPAALADVLEGDSSGIYRCEVQHGIDDSSDAVEVKVKGVVFLYREGSARYAFSFSGAQEACARIGAHIATPEQLYAAYLGGYEQCDAGWLSDQTVRYPIQTPREACYGDMDGFPGVRNYGVVDPDDLYDVYCYAEDLNGELFLGDPPEKLTLEEARAYCQERGAEIATTGQLYAAWDGGLDHCSPGWLADGSVRYPIVTPSQRCGGGLPGVKTLF

SEQ ID NO: 1412 - protein, 26 aa, Homo Sapiens
  misc_feature (1)..(1): Xaa can be any naturally occurring amino acid
XHGIDDSSDAVEVKVKGGGHSTHNLT

SEQ ID NO: 1413 - protein, 294 aa, Homo Sapiens
IATFWNKAFLTIIILLIVLFLDAVREVRKYSSVHTIEKSSTSRPDAYEHTQMKLFRSQRNLYISGFSLFFWLVLRRLVTLITQLAKELSNKGVLKTQAENTNKAAKKFMEENEKLKRILKSHGKDEECVLEAENKKLVEDQEKLKTELRKTSDALSKAQNDVMEMKMQSERLSKEYDQLLKEHSELQKQREILPHRRGESTVTTEAEIGVMEPQQRNADSHQKLEEAKNRFFPRASSSRSMALQIPIKLILDFLASRTMGINLLFQAIKFVIICYCCHSKLIQEHAGQICNGLN

SEQ ID NO: 1414 - protein, 147 aa, Homo Sapiens
MKLFRSQRNLYISGFSLFFWLVLRRLVTLITQLAKELSNKGVLKTQAENTNKAAKKFMEENEKLKRILKSHGKDEECVLEAENKKLVEDQEKLKTELRKTSDALSKAQNDVMEMKMQSERLSKEYDQLLKEHSELQDRLERGNKKRL

SEQ ID NO: 1415 - protein, 64 aa, Homo Sapiens
MTLQWAAVATFLYAEIGLILIFCLPFIPPQRWQKIFSFNVWGKIATFWNKAFLTIIILLIVLFL

SEQ ID NO: 1416 - protein, 133 aa, Homo Sapiens
MTLQWAAVATFLYAEIGLILIFCLPFIPPQRWQKIFSFNVWGKIATFWNKAFLTIIILLIVLFLDAVREVRKYSSVHTIEKSSTSRPDAYEHTQMKLFRSQRNLYISGFSLFFWLVLRRLVTLITQLAKELSN

SEQ ID NO: 1417 - protein, 171 aa, Homo Sapiens
MTLQWAAVATFLYAEIGLILIFCLPFIPPQRWQKIFSFNVWGKIATFWNKAFLTIIILLIVLFLDAVREVRKYSSVHTIEKSSTSRPDAYEHTQMKLFRSQRNLYISGFSLFFWLVLRRLVTLITQLAKELSNKGVLKTQAENTNKAAKKFMEENEKLKRFLLAKVHCRKL

SEQ ID NO: 1418 - protein, 196 aa, Homo Sapiens
MTLQWAAVATFLYAEIGLILIFCLPFIPPQRWQKIFSFNVWGKIATFWNKAFLTIIILLIVLFLDAVREVRKYSSVHTIEKSSTSRPDAYEHTQMKLFRSQRNLYISGFSLFFWLVLRRLVTLITQLAKELSNKGVLKTQAENTNKAAKKFMEENEKLKRILKSHGKDEECVLEAENKKLVEDQEKLKTELRKTSD

SEQ ID NO: 1419 - protein, 230 aa, Homo Sapiens
MTLQWAAVATFLYAEIGLILIFCLPFIPPQRWQKIFSFNVWGKIATFWNKAFLTIIILLIVLFLDAVREVRKYSSVHTIEKSSTSRPDAYEHTQMKLFRSQRNLYISGFSLFFWLVLRRLVTLITQLAKELSNKGVLKTQAENTNKAAKKFMEENEKLKRILKSHGKDEECVLEAENKKLVEDQEKLKTELRKTSDALSKAQNDVMEMKMQSERLSKEYDQLLKEHSELQ

SEQ ID NO: 1420 - protein, 241 aa, Homo Sapiens
MTLQWAAVATFLYAEIGLILIFCLPFIPPQRWQKIFSFNVWGKIATFWNKAFLTIIILLIVLFLDAVREVRKYSSVHTIEKSSTSRPDAYEHTQMKLFRSQRNLYISGFSLFFWLVLRRLVTLITQLAKELSNKGVLKTQAENTNKAAKKFMEENEKLKRILKSHGKDEECVLEAENKKLVEDQEKLKTELRKTSDALSKAQNDVMEMKMQSERLSKEYDQLLKEHSELQDRLERGNKKRL

SEQ ID NO: 1421 - protein, 241 aa, Homo Sapiens; identical to SEQ ID NO: 1420

SEQ ID NO: 1422 - protein, 348 aa, Homo Sapiens
MTLQWAAVATFLYAEIGLILIFCLPFIPPQRWQKIFSFNVWGKIATFWNKAFLTIIILLIVLFLDAVREVRKYSSVHTIEKSSTSRPDAYEHTQMKLFRSQRNLYISGFSLFFWLVLRRLVTLITQLAKELSNKGVLKTQAENTNKAAKKFMEENEKLKRILKSHGKDEECVLEAENKKLVEDQEKLKTELRKTSDALSKAQNDVMEMKMQSERLSKEYDQLLKEHSELQHSSFGEFLSKRSHKNGSIGKQTGSRKGSFRKRQQEKTVNFIKDTCNILCQNDNFVMLASRKFKFRKMHYDRFVIFLMPHIGCIVMALSKYLMMFQIYCKVCIPALKKNISMLNTIFTY

SEQ ID NO: 1423 - protein, 348 aa, Homo Sapiens; identical to SEQ ID NO: 1422

SEQ ID NO: 1424 - protein, 66 aa, Homo Sapiens
MTLQWAAVATFLYAEIGLILIFCLPFIPPQRWQKIFSFNVWGKIATFWNKAFLTIIILLIVLFLEF

SEQ ID NO: 1425 - protein, 163 aa, Homo Sapiens
  misc_feature (1)..(1): Xaa can be any naturally occurring amino acid
XDAYEHTQMKLFRSQRNLYISGFSLFFWLVLRRLVTLITQLAKELSNKGVLKTQAENTNKAAKKFMEENEKLKRILKSHGKDEECVLEAENKKLVEDQEKLKTELRKTSDALSKAQNDVMEMKMQSERLSKEYDQLLKEHSELQKSHSQPGAAAFLVKEVESF

SEQ ID NO: 1426 - protein, 868 aa, Homo Sapiens
MENVLAKALYDNVAESPDELSFRKGDIMTVLEQDTQGLDGWWLCSLHGRQGIVPGNRLKILVGMYDKKPAGPGPGPPATPAQPQPGLHAPAPPASQYTPMLPNTYQPQPDSVYLVPTPSKAQQGLYQVPGPSPQFQSPPAKQTSTFSKQTPHHPFPSPATDLYQVPPGPGGPAQDIYQVPPSAGMGHDIYQVPPSMDTRSWEGTKPPAKVVVPTRVGQGYVYEAAQPEQDEYDIPRHLLAPGPQDIYDVPPVRGLLPSQYGQEVYDTPPMAVKGPNGRDPLLEVYDVPPSVEKGLPPSNHHAVYDVPPSVSKDVPDGPLLREETYDVPPAFAKAKPFDPARTPLVLAAPPPDSPPAEDVYDVPPPAPDLYDVPPGLRRPGPGTLYDVPRERVLPPEVADGGVVDSGVYAVPPPAEREAPAEGKRLSASSTGSTRSSQSASSLEVAGPGREPLELEVAVEALARLQQGVSATVAHLLDLAGSAGATGSWRSPSEPQEPLVQDLQAAVAAVQSAVHELLEFARSAVGNAAHTSDRALHAKLSRQLQKMEDVHQTLVAHGQALDAGRGGSGATLEDLDRLVACSRAVPEDAKQLASFLHGNASLLFRRTKATAPGPEGGGTLHPNPTDKTSSIQSRPLPSPPKFTSQDSPDGQYENSEGGWMEDYDYVHLQGKEEFEKTQKELLEKGSITRQGKSQLELQQLKQFERLEQEVSRPIDHDLANWTPAQPLAPGRTGGLGPSDRQLLLFYLEQCEANLTTLTNAVDAFFTAVATNQPPKIFVAHSKFVILSAHKLVFIGDTLSRQAKAADVRSQVTHYSNLLCDLLRGIVATTKAAALQYPSPSAAQDMVERVKELGHSTQQFRRVLGQLAAA

SEQ ID NO: 1427 - protein, 888 aa, Homo Sapiens
MHCPGEAPLAAPRPTPKDPCLRNVLAKALYDNVAESPDELSFRKGDIMTVLEQDTQGLDGWWLCSLHGRQGIVPGNRLKILVGMYDKKPAGPGPGPPATPAQPQPGLHAPAPPASQYTPMLPNTYQPQPDSVYLVPTPSKAQQGLYQVPGPSPQFQSPPAKQTSTFSKQTPHHPFPSPATDLYQVPPGPGGPAQDIYQVPPSAGMGHDIYQVPPSMDTRSWEGTKPPAKVVVPTRVGQGYVYEAAQPEQDEYDIPRHLLAPGPQDIYDVPPVRGLLPSQYGQEVYDTPPMAVKGPNGRDPLLEVYDVPPSVEKGLPPSNHHAVYDVPPSVSKDVPDGPLLREETYDVPPAFAKAKPFDPARTPLVLAAPPPDSPPAEDVYDVPPPAPDLYDVPPGLRRPGPGTLYDVPRERVLPPEVADGGVVDSGVYAVPPPAEREAPAEGKRLSASSTGSTRSSQSASSLEVAGPGREPLELEVAVEALARLQQGVSATVAHLLDLAGSAGATGSWRSPSEPQEPLVQDLQAAVAAVQSAVHELLEFARSAVGNAAHTSDRALHAKLSRQLQKMEDVHQTLVAHGQALDAGRGGSGATLEDLDRLVACSRAVPEDAKQLASFLHGNASLLFRRTKATAPGPEGGGTLHPNPTDKTSSIQSRPLPSPPKFTSQDSPDGQYENSEGGWMEDYDYVHLQGKEEFEKTQKELLEKGSITRQGKSQLELQQLKQFERLEQEVSRPIDHDLANWTPAQPLAPGRTGGLGPSDRQLLLFYLEQCEANLTTLTNAVDAFFTAVATNQPPKIFVAHSKFVILSAHKLVFIGDTLSRQAKAADVRSQVTHYSNLLCDLLRGIVATTKAAALQYPSPSAAQDMVERVKELGHSTQQFRRVLGQLAAA

SEQ ID NO: 1428 - protein, 888 aa, Homo Sapiens
MLTHRPQEAEQRGRTPGPSFEWNVLAKALYDNVAESPDELSFRKGDIMTVLEQDTQGLDGWWLCSLHGRQGIVPGNRLKILVGMYDKKPAGPGPGPPATPAQPQPGLHAPAPPASQYTPMLPNTYQPQPDSVYLVPTPSKAQQGLYQVPGPSPQFQSPPAKQTSTFSKQTPHHPFPSPATDLYQVPPGPGGPAQDIYQVPPSAGMGHDIYQVPPSMDTRSWEGTKPPAKVVVPTRVGQGYVYEAAQPEQDEYDIPRHLLAPGPQDIYDVPPVRGLLPSQYGQEVYDTPPMAVKGPNGRDPLLEVYDVPPSVEKGLPPSNHHAVYDVPPSVSKDVPDGPLLREETYDVPPAFAKAKPFDPARTPLVLAAPPPDSPPAEDVYDVPPPAPDLYDVPPGLRRPGPGTLYDVPRERVLPPEVADGGVVDSGVYAVPPPAEREAPAEGKRLSASSTGSTRSSQSASSLEVAGPGREPLELEVAVEALARLQQGVSATVAHLLDLAGSAGATGSWRSPSEPQEPLVQDLQAAVAAVQSAVHELLEFARSAVGNAAHTSDRALHAKLSRQLQKMEDVHQTLVAHGQALDAGRGGSGATLEDLDRLVACSRAVPEDAKQLASFLHGNASLLFRRTKATAPGPEGGGTLHPNPTDKTSSIQSRPLPSPPKFTSQDSPDGQYENSEGGWMEDYDYVHLQGKEEFEKTQKELLEKGSITRQGKSQLELQQLKQFERLEQEVSRPIDHDLANWTPAQPLAPGRTGGLGPSDRQLLLFYLEQCEANLTTLTNAVDAFFTAVATNQPPKIFVAHSKFVILSAHKLVFIGDTLSRQAKAADVRSQVTHYSNLLCDLLRGIVATTKAAALQYPSPSAAQDMVERVKELGHSTQQFRRVLGQLAAA

SEQ ID NO: 1429 - protein, 870 aa, Homo Sapiens
MNHLNVLAKALYDNVAESPDELSFRKGDIMTVLEQDTQGLDGWWLCSLHGRQGIVPGNRLKILVGMYDKKPAGPGPGPPATPAQPQPGLHAPAPPASQYTPMLPNTYQPQPDSVYLVPTPSKAQQGLYQVPGPSPQFQSPPAKQTSTFSKQTPHHPFPSPATDLYQVPPGPGGPAQDIYQVPPSAGMGHDIYQVPPSMDTRSWEGTKPPAKVVVPTRVGQGYVYEAAQPEQDEYDIPRHLLAPGPQDIYDVPPVRGLLPSQYGQEVYDTPPMAVKGPNGRDPLLEVYDVPPSVEKGLPPSNHHAVYDVPPSVSKDVPDGPLLREETYDVPPAFAKAKPFDPARTPLVLAAPPPDSPPAEDVYDVPPPAPDLYDVPPGLRRPGPGTLYDVPRERVLPPEVADGGVVDSGVYAVPPPAEREAPAEGKRLSASSTGSTRSSQSASSLEVAGPGREPLELEVAVEALARLQQGVSATVAHLLDLAGSAGATGSWRSPSEPQEPLVQDLQAAVAAVQSAVHELLEFARSAVGNAAHTSDRALHAKLSRQLQKMEDVHQTLVAHGQALDAGRGGSGATLEDLDRLVACSRAVPEDAKQLASFLHGNASLLFRRTKATAPGPEGGGTLHPNPTDKTSSIQSRPLPSPPKFTSQDSPDGQYENSEGGWMEDYDYVHLQGKEEFEKTQKELLEKGSITRQGKSQLELQQLKQFERLEQEVSRPIDHDLANWTPAQPLAPGRTGGLGPSDRQLLLFYLEQCEANLTTLTNAVDAFFTAVATNQPPKIFVAHSKFVILSAHKLVFIGDTLSRQAKAADVRSQVTHYSNLLCDLLRGIVATTKAAALQYPSPSAAQDMVERVKELGHSTQQFRRVLGQLAAA

SEQ ID NO: 1430 - protein, 888 aa, Homo Sapiens
MNHLNVLAKALYDNVAESPDELSFRKGDIMTVLEQDTQGLDGWWLCSLHGRQGIVPGNRLKILVGMYDKKPAGPGPGPPATPAQPQPGLHAPAPPASQYTPMLPNTYQPQPDSVYLVPTPSKAQQGLYQVPGPSPQFQSPPAKQTSTFSKQTPHHPFPSPATDLYQVPPGPGGPAQDIYQVPPSAGMGHDIYQVPPSMDTRSWEGTKPPAKVVVPTRVGQGYVYEAAQPEQDEYDIPRHLLAPGPQDIYDVPPVRGLLPSQYGQEVYDTPPMAVKGPNGRDPLLEVYDVPPSVEKGLPPSNHHAVSKCQGNARARLRLWGVWVYDVPPSVSKDVPDGPLLREETYDVPPAFAKAKPFDPARTPLVLAAPPPDSPPAEDVYDVPPPAPDLYDVPPGLRRPGPGTLYDVPRERVLPPEVADGGVVDSGVYAVPPPAEREAPAEGKRLSASSTGSTRSSQSASSLEVAGPGREPLELEVAVEALARLQQGVSATVAHLLDLAGSAGATGSWRSPSEPQEPLVQDLQAAVAAVQSAVHELLEFARSAVGNAAHTSDRALHAKLSRQLQKMEDVHQTLVAHGQALDAGRGGSGATLEDLDRLVACSRAVPEDAKQLASFLHGNASLLFRRTKATAPGPEGGGTLHPNPTDKTSSIQSRPLPSPPKFTSQDSPDGQYENSEGGWMEDYDYVHLQGKEEFEKTQKELLEKGSITRQGKSQLELQQLKQFERLEQEVSRPIDHDLANWTPAQPLAPGRTGGLGPSDRQLLLFYLEQCEANLTTLTNAVDAFFTAVATNQPPKIFVAHSKFVILSAHKLVFIGDTLSRQAKAADVRSQVTHYSNLLCDLLRGIVATTKAAALQYPSPSAAQDMVERVKELGHSTQQFRRVLGQLAAA

SEQ ID NO: 1431 - protein, 916 aa, Homo Sapiens
MPAKPFLSSVLLSWKVLDFSGPGPQGTGQPCSCGHWAEGQGGPPEPAGGPNVLAKALYDNVAESPDELSFRKGDIMTVLEQDTQGLDGWWLCSLHGRQGIVPGNRLKILVGMYDKKPAGPGPGPPATPAQPQPGLHAPAPPASQYTPMLPNTYQPQPDSVYLVPTPSKAQQGLYQVPGPSPQFQSPPAKQTSTFSKQTPHHPFPSPATDLYQVPPGPGGPAQDIYQVPPSAGMGHDIYQVPPSMDTRSWEGTKPPAKVVVPTRVGQGYVYEAAQPEQDEYDIPRHLLAPGPQDIYDVPPVRGLLPSQYGQEVYDTPPMAVKGPNGRDPLLEVYDVPPSVEKGLPPSNHHAVYDVPPSVSKDVPDGPLLREETYDVPPAFAKAKPFDPARTPLVLAAPPPDSPPAEDVYDVPPPAPDLYDVPPGLRRPGPGTLYDVPRERVLPPEVADGGVVDSGVYAVPPPAEREAPAEGKRLSASSTGSTRSSQSASSLEVAGPGREPLELEVAVEALARLQQGVSATVAHLLDLAGSAGATGSWRSPSEPQEPLVQDLQAAVAAVQSAVHELLEFARSAVGNAAHTSDRALHAKLSRQLQKMEDVHQTLVAHGQALDAGRGGSGATLEDLDRLVACSRAVPEDAKQLASFLHGNASLLFRRTKATAPGPEGGGTLHPNPTDKTSSIQSRPLPSPPKFTSQDSPDGQYENSEGGWMEDYDYVHLQGKEEFEKTQKELLEKGSITRQGKSQLELQQLKQFERLEQEVSRPIDHDLANWTPAQPLAPGRTGGLGPSDRQLLLFYLEQCEANLTTLTNAVDAFFTAVATNQPPKIFVAHSKFVILSAHKLVFIGDTLSRQAKAADVRSQVTHYSNLLCDLLRGIVATTKAAALQYPSPSAAQDMVERVKELGHSTQQFRRVLGQLAAA

SEQ ID NO: 1432 - protein, 57 aa, Homo Sapiens
MPAKPFLSSVLLSWKVLDFSGPGPQGTGQPCSCGHWAEGQGGPPEPAGGPVSQGSSD

SEQ ID NO: 1433 - protein, 57 aa, Homo Sapiens; identical to SEQ ID NO: 1432

SEQ ID NO: 1434 - protein, 722 aa, Homo Sapiens
MQGKNVLAKALYDNVAESPDELSFRKGDIMTVLEQDTQGLDGWWLCSLHGRQGIVPGNRLKILVVVPTRVGQGYVYEAAQPEQDEYDIPRHLLAPGPQDIYDVPPVRGLLPSQYGQEVYDTPPMAVKGPNGRDPLLEVYDVPPSVEKGLPPSNHHAVYDVPPSVSKDVPDGPLLREETYDVPPAFAKAKPFDPARTPLVLAAPPPDSPPAEDVYDVPPPAPDLYDVPPGLRRPGPGTLYDVPRERVLPPEVADGGVVDSGVYAVPPPAEREAPAEGKRLSASSTGSTRSSQSASSLEVAGPGREPLELEVAVEALARLQQGVSATVAHLLDLAGSAGATGSWRSPSEPQEPLVQDLQAAVAAVQSAVHELLEFARSAVGNAAHTSDRALHAKLSRQLQKMEDVHQTLVAHGQALDAGRGGSGATLEDLDRLVACSRAVPEDAKQLASFLHGNASLLFRRTKATAPGPEGGGTLHPNPTDKTSSIQSRPLPSPPKFTSQDSPDGQYENSEGGWMEDYDYVHLQGKEEFEKTQKELLEKGSITRQGKSQLELQQLKQFERLEQEVSRPIDHDLANWTPAQPLAPGRTGGLGPSDRQLLLFYLEQCEANLTTLTNAVDAFFTAVATNQPPKIFVAHSKFVILSAHKLVFIGDTLSRQAKAADVRSQVTHYSNLLCDLLRGIVATTKAAALQYPSPSAAQDMVERVKELGHSTQQFRRVLGQLAAA

SEQ ID NO: 1435 - protein, 870 aa, Homo Sapiens
MSVPNVLAKALYDNVAESPDELSFRKGDIMTVLEQDTQGLDGWWLCSLHGRQGIVPGNRLKILVGMYDKKPAGPGPGPPATPAQPQPGLHAPAPPASQYTPMLPNTYQPQPDSVYLVPTPSKAQQGLYQVPGPSPQFQSPPAKQTSTFSKQTPHHPFPSPATDLYQVPPGPGGPAQDIYQVPPSAGMGHDIYQVPPSMDTRSWEGTKPPAKVVVPTRVGQGYVYEAAQPEQDEYDIPRHLLAPGPQDIYDVPPVRGLLPSQYGQEVYDTPPMAVKGPNGRDPLLEVYDVPPSVEKGLPPSNHHAVYDVPPSVSKDVPDGPLLREETYDVPPAFAKAKPFDPARTPLVLAAPPPDSPPAEDVYDVPPPAPDLYDVPPGLRRPGPGTLYDVPRERVLPPEVADGGVVDSGVYAVPPPAEREAPAEGKRLSASSTGSTRSSQSASSLEVAGPGREPLELEVAVEALARLQQGVSATVAHLLDLAGSAGATGSWRSPSEPQEPLVQDLQAAVAAVQSAVHELLEFARSAVGNAAHTSDRALHAKLSRQLQKMEDVHQTLVAHGQALDAGRGGSGATLEDLDRLVACSRAVPEDAKQLASFLHGNASLLFRRTKATAPGPEGGGTLHPNPTDKTSSIQSRPLPSPPKFTSQDSPDGQYENSEGGWMEDYDYVHLQGKEEFEKTQKELLEKGSITRQGKSQLELQQLKQFERLEQEVSRPIDHDLANWTPAQPLAPGRTGGLGPSDRQLLLFYLEQCEANLTTLTNAVDAFFTAVATNQPPKIFVAHSKFVILSAHKLVFIGDTLSRQAKAADVRSQVTHYSNLLCDLLRGIVATTKAAALQYPSPSAAQDMVERVKELGHSTQQFRRVLGQLAAA

SEQ ID NO: 1436 - protein, 50 aa, Homo Sapiens
MTVLEQDTQGLDGWWLCSLHGRQGIVPGNRLKILVGMYDKKPAGPGPGPP

SEQ ID NO: 1437 - protein, 59 aa, Homo Sapiens
MTVLEQDTQGLDGWWLCSLHGRQGIVPGNRLKILVGMYDKKPAGPGPGPPATPAQPQPG

SEQ ID NO: 1438 - protein, 80 aa, Homo Sapiens
MTVLEQDTQGLDGWWLCSLHGRQGIVPGNRLKILVGMYDKKPAGPGPGPPATPAQPQPGLHAPAPPASQYTPMLPNTYQP

SEQ ID NO: 1439 - protein, 120 aa, Homo Sapiens
MTVLEQDTQGLDGWWLCSLHGRQGIVPGNRLKILVGMYDKKPAGPGPGPPATPAQPQPGLHAPAPPASQYTPMLPNTYQPQPDSVYLVPTPSKAQQGLYQVPGPSPQFQSPPAKQTSTFS

SEQ ID NO: 1440 - protein, 128 aa, Homo Sapiens
MTVLEQDTQGLDGWWLCSLHGRQGIVPGNRLKILVGMYDKKPAGPGPGPPATPAQPQPGLHAPAPPASQYTPMLPNTYQPQPDSVYLVPTPSKAQQGLYQVPGPSPQFQSPPAKQTSTFSKQTPHHPF

SEQ ID NO: 1441 - protein, 133 aa, Homo Sapiens
MTVLEQDTQGLDGWWLCSLHGRQGIVPGNRLKILVGMYDKKPAGPGPGPPATPAQPQPGLHAPAPPASQYTPMLPNTYQPQPDSVYLVPTPSKAQQGLYQVPGPSPQFQSPPAKQTSTFSKQTPHHPFPSPAT

SEQ ID NO: 1442 - protein, 135 aa, Homo Sapiens
MTVLEQDTQGLDGWWLCSLHGRQGIVPGNRLKILVGMYDKKPAGPGPGPPATPAQPQPGLHAPAPPASQYTPMLPNTYQPQPDSVYLVPTPSKAQQGLYQVPGPSPQFQSPPAKQTSTFSKQTPHHPFPSPATDL

SEQ ID NO: 1443 - protein, 238 aa, Homo Sapiens
  misc_feature (1)..(1): Xaa can be any naturally occurring amino acid
XPQFQSPPAKQTSTFSKQTPHHPFPSPATDLYQVPPGPGGPAQDIYQVPPSAGMGHDIYQVPPSMDTRSWEGTKPPAKVVVPTRVGQGYVYEAAQPEQDEYDIPRHLLAPGPQDIYDVPPVRGLLPSQYGQEVYDVPPSVSKDVPDGPLLREETYDVPPAFAKAKPFDPARTPLVLAAPPPDSPPAEDVYDVPPPAPDLYDVPPGLRRPGPGTLYDVPRERVLPPEVADGGVVDSGVY

SEQ ID NO: 1444 - protein, 120 aa, Homo Sapiens
AVQFTGWSSSCILHFPEVLHDFHSLQTLPSLLQRIGNPNETQNNSTSWPVFKSTEQKYLTLNTESTRIMTKLRAQQCRFWTSFFPKVLEMTEPICCYCEPGTALAARAAQMKMTGSAYSQ

SEQ ID NO: 1445 - protein, 132 aa, Homo Sapiens
AVQFTGWSSSCILHFPEVLHDFHSLQTLPSLLQRIGNPNETQNNSTSWPVFKSTEQKYLTLNTESTRIMTKLRAQQCRFWTSFFPKVLEMTGNIDEAEWEWKAGFHRWNNYMMDWKNQFNDYTSKKESCVGL

SEQ ID NO: 1446 - protein, 602 aa, Homo Sapiens
MHSKVTIICIRFLFWFLLLCMLIGKSHTEDDIIIATKNGKVRGMNLTVFGGTVTAFLGIPYAQPPLGRLRFKKPQSLTKWSDIWNATKYANSCCQNIDQSFPGFHGSEMWNPNTDLSEDCLYLNVWIPAPKPKNATVLIWIYGGGFQTGTSSLHVYDGKFLARVERVIVVSMNYRVGALGFLALPGNPEAPGNMGLFDQQLALQWVQKNIAAFGGNPKSVTLFGESAGAASVSLHLLSPGSHSLFTRAILQSGSFNAPWAVTSLYEARNRTLNLAKLTGCSRENETEIIKCLRNKDPQEILLNEAFVVPYGTPLSVNFGPTVDGDFLTDMPDILLELGQFKKTQILVGVNKDEGTAFLVYGAPGFSKDNNSIITRKEFQEGLKIFFPGVSEFGKESILFHYTDWVDDQRPENYREALGDVVGDYNFICPALEFTKKFSEWGNNAFFYYFEHRSSKLPWPEWMGVMHGYEIEFVFGLPLERRDNYTKAEEILSRSIVKRWANFAKYGNPNETQNNSTSWPVFKSTEQKYLTLNTESTRIMTKLRAQQCRFWTSFFPKVLEMTGNIDEAEWEWKAGFHRWNNYMMDWKNQFNDYTSKKESCVGL

SEQ ID NO: 1447 - protein, 525 aa, Homo Sapiens
MHSKVTIICIRFLFWFLLLCMLIGKSHTEDDIIIATKNGKVRGMNLTVFGGTVTAFLGIPYAQPPLGRLRFKKPQSLTKWSDIWNATKYANSCCQNIDQSFPGFHGSEMWNPNTDLSEDCLYLNVWIPAPKPKNATVLIWIYGGGFQTGTSSLHVYDGKFLARVERVIVVSMNYRVGALGFLALPGNPEAPGNMGLFDQQLALQWVQKNIAAFGGNPKSVTLFGESAGAASVSLHLLSPGSHSLFTRAILQSGSFNAPWAVTSLYEARNRTLNLAKLTGCSRENETEIIKCLRNKDPQEILLNEAFVVPYGTPLSVNFGPTVDGDFLTDMPDILLELGQFKKTQILVGVNKDEGTAFLVYGAPGFSKDNNSIITRKEFQEGLKIFFPGVSEFGKESILFHYTDWVDDQRPENYREALGDVVGDYNFICPALEFTKKFSEWGNNAFFYYFEHRSSKLPWPEWMGVMHGYEIEFVFGLPLERRDNYTKAEEILSRSIVKRWANFAKYGCSSSTILNYVLETEPVVLI

SEQ ID NO: 1448 - protein, 562 aa, Homo Sapiens
MHSKVTIICIRFLFWFLLLCMLIGKSHTEDDIIIATKNGKVRGMNLTVFGGTVTAFLGIPYAQPPLGRLRFKKPQSLTKWSDIWNATKYANSCCQNIDQSFPGFHGSEMWNPNTDLSEDCLYLNVWIPAPKPKNATVLIWIYGGGFQTGTSSLHVYDGKFLARVERVIVVSMNYRVGALGFLALPGNPEAPGNMGLFDQQLALQWVQKNIAAFGGNPKSVTLFGESAGAASVSLHLLSPGSHSLFTRAILQSGSFNAPWAVTSLYEARNRTLNLAKLTGCSRENETEIIKCLRNKDPQEILLNEAFVVPYGTPLSVNFGPTVDGDFLTDMPDILLELGQFKKTQILVGVNKDEGTAFLVYGAPGFSKDNNSIITRKEFQEGLKIFFPGVSEFGKESILFHYTDWVDDQRPENYREALGDVVGDYNFICPALEFTKKFSEWGNNAFFYYFEHRSSKLPWPEWMGVMHGYEIEFVFGLPLERRDNYTKAEEILSRSIVKRWANFAKYGNPNETQNNSTSWPVFKSTEQKYLTLNTESTRIMTKLRAQQCRFWTSFFPKVLEMTG

SEQ ID NO: 1449 - protein, 218 aa, Homo Sapiens
MAVVAAAAGWLLRLRAAGAEGHWRRLPGAGLARGFLHPAATVEDAAQRRQVAHFTFQPDPEPREYGQTQKMNLFQSVTSALDNSLAKDPTAVIFGEDVAFGGVFRCTVGLRDKYGKDRVFNTPLCEQGIVGFGIGIAVTGATAIAEIQFADYIFPAFDQIVNEAAKYRYRSGDLFNCGSLTIRSPWGCVGHGALYHSQSPEAFFAHCPGIKIKVISLS

SEQ ID NO: 1450 - protein, 392 aa, Homo Sapiens
MAVVAAAAGWLLRLRAAGAEGHWRRLPGAGLARGFLHPAATVEDAAQRRQVAHFTFQPDPEPREYGQTQKMNLFQSVTSALDNSLAKDPTAVIFGEDVAFGGVFRCTVGLRDKYGKDRVFNTPLCEQGIVGFGIGIAVTGATAIAEIQFADYIFPAFDQIVNEAAKYRYRSGDLFNCGSLTIRSPWGCVGHGALYHSQSPEAFFAHCPGIKVVIPRSPFQAKGLLLSCIEDKNPCIFFEPKILYRAAAEEVPIEPYNIPLSQAEVIQEGSDVTLVAWGTQVHVIREVASMAKEKLGVSCEVIDLRTIIPWDVDTICKSVIKTGRLLISHEAPLTGGFASEISSTVQEECFLNLEAPISRVCGYDTPFPHIFEPFYIPDKWKCYDALRKMINY

SEQ ID NO: 1451 - protein, 392 aa, Homo Sapiens; identical to SEQ ID NO: 1450

SEQ ID NO: 1452 - protein, 329 aa, Homo Sapiens
MCGATSFLHECTRLILVTTQNAEFLQKGLQVHTCFGVYPHASVWHDCASQKKGCAVYLHVSVEFNKLIPENGFIKFHQVRRVMTILFLTMVISYFGCMKAAPMKEANIRGQGGLAYPGVRTHGTLESVNGPKAGSRGLTSLADTFEHVIEELLDEDQKVRPNEENNKDADLYTSRVMLSSQVPLEPPLLFLLEEYKNYLDAANMSMRVRRHSDPARRGELSVCDSISEWVTAADKKTAVDMSGGTVTVLEKVPVSKGQLKQYFYETKCNPMGYTKEGCRGIDKRHWNSQCRTTQSYVRALTMDSKKRIGWRFIRIDTSCVCTLTIKRGR

SEQ ID NO: 1453 - protein, 77 aa, Homo Sapiens
MCGATSFLHECTRLILVTTQNAEFLQKGLQVHTCFGVYPHASVWHDCASQKKGCAVYLHVSVEFNKLIPENGFIKGW

SEQ ID NO: 1454 - protein, 255 aa, Homo Sapiens
MFHQVRRVMTILFLTMVISYFGCMKAAPMKEANIRGQGGLAYPGVRTHGTLESVNGPKAGSRGLTSLADTFEHVIEELLDEDQKVRPNEENNKDADLYTSRVMLSSQVPLEPPLLFLLEEYKNYLDAANMSMRVRRHSDPARRGELSVCDSISEWVTAADKKTAVDMSGGTVTVLEKVPVSKGQLKQYFYETKCNPMGYTKEGCRGIDKRHWNSQCRTTQSYVRALTMDSKKRIGWRFIRIDTSCVCTLTIKRGR

SEQ ID NO: 1455 - protein, 262 aa, Homo Sapiens
MQSREEEWFHQVRRVMTILFLTMVISYFGCMKAAPMKEANIRGQGGLAYPGVRTHGTLESVNGPKAGSRGLTSLADTFEHVIEELLDEDQKVRPNEENNKDADLYTSRVMLSSQVPLEPPLLFLLEEYKNYLDAANMSMRVRRHSDPARRGELSVCDSISEWVTAADKKTAVDMSGGTVTVLEKVPVSKGQLKQYFYETKCNPMGYTKEGCRGIDKRHWNSQCRTTQSYVRALTMDSKKRIGWRFIRIDTSCVCTLTIKRGR

SEQ ID NO: 1456 - protein, 247 aa, Homo Sapiens
MTILFLTMVISYFGCMKAAPMKEANIRGQGGLAYPGVRTHGTLESVNGPKAGSRGLTSLADTFEHVIEELLDEDQKVRPNEENNKDADLYTSRVMLSSQVPLEPPLLFLLEEYKNYLDAANMSMRVRRHSDPARRGELSVCDSISEWVTAADKKTAVDMSGGTVTVLEKVPVSKGQLKQYFYETKCNPMGYTKEGCRGIDKRHWNSQCRTTQSYVRALTMDSKKRIGWRFIRIDTSCVCTLTIKRGR

SEQ ID NO: 1457 - protein, 247 aa, Homo Sapiens; identical to SEQ ID NO: 1456

SEQ ID NO: 1458 - protein, 247 aa, Homo Sapiens; identical to SEQ ID NO: 1456

SEQ ID NO: 1459 - protein, 247 aa, Homo Sapiens; identical to SEQ ID NO: 1456

SEQ ID NO: 1460 - protein, 247 aa, Homo Sapiens; identical to SEQ ID NO: 1456

SEQ ID NO: 1461 - protein, 247 aa, Homo Sapiens; identical to SEQ ID NO: 1456

SEQ ID NO: 1462 - protein, 247 aa, Homo Sapiens; identical to SEQ ID NO: 1456

SEQ ID NO: 1463 - protein, 247 aa, Homo Sapiens; identical to SEQ ID NO: 1456

SEQ ID NO: 1464 - protein, 247 aa, Homo Sapiens; identical to SEQ ID NO: 1456

SEQ ID NO: 1465 - protein, 247 aa, Homo Sapiens; identical to SEQ ID NO: 1456

SEQ ID NO: 1466 - protein, 247 aa, Homo Sapiens; identical to SEQ ID NO: 1456

SEQ ID NO: 1467 - protein, 247 aa, Homo Sapiens; identical to SEQ ID NO: 1456

SEQ ID NO: 1468 - protein, 247 aa, Homo Sapiens; identical to SEQ ID NO: 1456

SEQ ID NO: 1469 - protein, 247 aa, Homo Sapiens; identical to SEQ ID NO: 1456

SEQ ID NO: 1470 - protein, 100 aa, Homo Sapiens
MRALTLLALLALAALCIAGQAGAKPSGAESSKGAAFVSKQEGSEVVKRPRRYLYQWLGAPVPYPDPLEPRREVCELNPDCDELADHIGFQEAYRRFYGPV

SEQ ID NO: 1471 - protein, 368 aa, Homo Sapiens
MWPLWRLVSLLALSQALPFEQRGFWDFTLDDGPFMMNDEEASGADTSGVLDPDSVTPTYSAMCPFGCHCHLRVVQCSDLGLKSVPKEISPDTTLLDLQNNDISELRKDDFKGLQHLYALVLVNNKISKIHEKAFSPLRKLQKLYISKNHLVEIPPNLPSSLVELRIHDNRIRKVPKGVFSGLRNMNCIEMGGNPLENSGFEPGAFDGLKLNYLRISEAKLTGIPKDLPETLNELHLDHNKIQAIELEDLLRYSKLYRLGLGHNQIRMIENGSLSFLPTLRELHLDNNKLARVPSGLPDLKLLQVVYLHSNNITKVGVNDFCPMGFGVKRAYYNGISLFNNPVPYWEVQPATFRCVTDRLAIQFGNYKK

SEQ ID NO: 1472 - protein, 238 aa, Homo Sapiens
MWPLWRLVSLLALSQALPFEQRGFWDFTLDDGPFMMNDEEASGADTSGVLDPDSVTPTYSAMCPFGCHCHLRVVQCSDLGLKSVPKEISPDTTLLDLQNNDISELRKDDFKGLQHLYVRSWEEPAGLQQRAGVRALVLVNNKISKIHEKAFSPLRKLQKLYISKNHLVEIPPNLPSSLVELRIHDNRIRKVPKGVFSGLRNMNCIEMGGNPLENSGFEPGAFDGLKLNYLRISEAKLT

SEQ ID NO: 1473 - protein, 121 aa, Homo Sapiens
MAVKKIAIFGATGQTGLTTLAQAVQAGYEVTVLVRDSSRLPSEGPRPAHVVVGDVLQAADVDKTVAGQDAVIVLLGTRNDLSPTTVMSEGARNIVAAMKAHGVDKLSCSGTLPRCPHDCRL

SEQ ID NO: 1474 - protein, 206 aa, Homo Sapiens
MAVKKIAIFGATGQTGLTTLAQAVQAGYEVTVLVRDSSRLPSEGPRPAHVVVGDVLQAADVDKTVAGQDAVIVLLGTRNDLSPTTVMSEGARNIVAAMKAHGVDKVVACTSAFLLWDPTKVPPRLQAVTDDHIRMHKVLRESGLKYVAVMPPHIGDQPLTGAYTVTLDGRGPSRVISKHDLGHFMLRCLTTDEYDGHSTYPSHQYQ

SEQ ID NO: 1475 - protein, 163 aa, Homo Sapiens
MAVKKIAIFGATGQTGLTTLAQAVQAGYEVTVLVRDSSRLPSEGPRPAHVVVGDVLQAADVDKTVAGQDAVIVLLGTRNDLSPTTVMSEGARNIVAAMKAHGVDKVVACTSGDQPLTGAYTVTLDGRGPSRVISKHDLGHFMLRCLTTDEYDGHSTYPSHQYQ

SEQ ID NO: 1476 - protein, 154 aa, Homo Sapiens
MAVKKIAIFGATGQTGLTTLAQAVQAGYEVTVLVRDSSRLPSEGPRPAHVVVGDVLQAADVDKTVAGQDAVIVLLGTRNDLSPTTVMSEGARNIVAAMKAHGVDKVVACTSGGWWDHGGGAELGGTGEAAQGPLKGDAEAIPCYCAFTEHQLCA

SEQ ID NO: 1477 - protein, 245 aa, Homo Sapiens
MAVKKIAIFGATGQTGLTTLAQAVQAGYEVTVLVRDSSRLPSEGPRPAHVVVGDVLQAADVDKTVAGQDAVIVLLGTRNDLSTEPPLCPRPSPTPRPPAPPPPPAPPLPPLPPPPPTSDSHSLSPLRSHDSDVRGRPEHCGSHEGSWCGQAFLLWDPTKVPPRLQAVTDDHIRMHKVLRESGLKYVAVMPPHIGDQPLTGAYTVTLDGRGPSRVISKHDLGHFMLRCLTTDEYDGHSTYPSHQYQ

SEQ ID NO: 1478 - protein, 730 aa, Homo Sapiens
MPGVARLPLLLGLLLLPRPGRPLDLADYTYDLAEEDDSEPLNYKDPCKAAAFLGDIALDEEDLRAFQVQQAVDLRRHTARKSSIKAAVPGNTSTPSCQSTNGQPQRGACGRWRGRSRSRRAATSRPERVWPDGVIPFVIGGNFTGSQRAVFRQAMRHWEKHTCVTFLERTDEDSYIVFTYRPCGCCSYVGRRGGGPQAISIGKNCDKFGIVVHELGHVVGFWHEHTRPDRDRHVSIVRENIQPGQEYNFLKMEPQEVESLGETYDFDSIMHYARNTFSRGIFLDTIVPKYEVNGVKPPIGQRTRLSKGDIAQARKLYKCPACGETLQDSTGNFSSPEYPNGYSAHMHCVWRISVTPGEKIILNFTSLDLYRSRLCWYDYVEVRDGFWRKAPLRGRFCGSKLPEPIVSTDSRLWVEFRSSSNWVGKGFFAVYEAICGGDVKKDYGHIQSPNYPDDYRPSKVCIWRIQVSEGFHVGLTFQSFEIERHDSCAYDYLEVRDGHSESSTLIGRYCGYEKPDDIKSTSSRLWLKFVSDGSINKAGFAVNFFKEVDECSRPNRGGCEQRCLNTLGSYKCSCDPGYELAPDKRRCEAACGGFLTKLNGSITSPGWPKEYPPNKNCIWQLVAPTQYRISLQFDFFETEGNDVCKYDFVEVRSGLTADSKLHGKFCGSEKPEVITSQYNNMRVEFKSDNTVSKKGFKAHFFSEKRPALQPPRGRPHQLKFRVQKRNRTPQ

SEQ ID NO: 1479 - protein, 986 aa, Homo Sapiens
MPGVARLPLLLGLLLLPRPGRPLDLADYTYDLAEEDDSEPLNYKDPCKAAAFLGDIALDEEDLRAFQVQQAVDLRRHTARKSSIKAAVPGNTSTPSCQSTNGQPQRGACGRWRGRSRSRRAATSRPERVWPDGVIPFVIGGNFTGSQRAVFRQAMRHWEKHTCVTFLERTDEDSYIVFTYRPCGCCSYVGRRGGGPQAISIGKNCDKFGIVVHELGHVVGFWHEHTRPDRDRHVSIVRENIQPGQEYNFLKMEPQEVESLGETYDFDSIMHYARNTFSRGIFLDTIVPKYEVNGVKPPIGQRTRLSKGDIAQARKLYKCPACGETLQDSTGNFSSPEYPNGYSAHMHCVWRISVTPGEKIILNFTSLDLYRSRLCWYDYVEVRDGFWRKAPLRGRFCGSKLPEPIVSTDSRLWVEFRSSSNWVGKGFFAVYEAICGGDVKKDYGHIQSPNYPDDYRPSKVCIWRIQVSEGFHVGLTFQSFEIERHDSCAYDYLEVRDGHSESSTLIGRYCGYEKPDDIKSTSSRLWLKFVSDGSINKAGFAVNFFKEVDECSRPNRGGCEQRCLNTLGSYKCSCDPGYELAPDKRRCEAACGGFLTKLNGSITSPGWPKEYPPNKNCIWQLVAPTQYRISLQFDFFETEGNDVCKYDFVEVRSGLTADSKLHGKFCGSEKPEVITSQYNNMRVEFKSDNTVSKKGFKAHFFSDKDECSKDNGGCQQDCVNTFGSYECQCRSGFVLHDNKHDCKEAGCDHKVTSTSGTITSPNWPDKYPSKKECTWAISSTPGHRVKLTFMEMDIESQPECAYDHLEVFDGRDAKAPVLGRFCGSKKPEPVLATGSRMFLRFYSDNSVQRKGFQASHATECGGQVRADVKTKDLYSHAQFGDNNYPGGVDCEWVIVAEEGYGVELVFQTFEVEEETDCGYDYMELFDGYDSTAPRLGRYCGSGPPEEVYSAGDSVLVKFHSDDTITKKGFHLRYTSTKFQDTLHSRK

SEQ ID NO: 1480 - protein, 622 aa, Homo Sapiens
MPGVARLPLLLGLLLLPRPGRPLDLADYTYDLAEEDDSEPLNYKDPCKAAAFLGDIALDEEDLRAFQVQQAVDLRRHTARKSSIKAAVPGNTSTPSCQSTNGQPQRGACGRWRGRSRSRRAATSRPERVWPDGVIPFVIGGNFTGSQRAVFRQAMRHWEKHTCVTFLERTDEDSYIVFTYRPCGCCSYVGRRGGGPQAISIGKNCDKFGIVVHELGHVVGFWHEHTRPDRDRHVSIVRENIQPGQEYNFLKMEPQEVESLGETYDFDSIMHYARNTFSRGIFLDTIVPKYEVNGVKPPIGQRTRLSKGDIAQARKLYKCPACGETLQDSTGNFSSPEYPNGYSAHMHCVWRISVTPGEKIILNFTSLDLYRSRLCWYDYVEVRDGFWRKAPLRGRFCGSKLPEPIVSTDSRLWVEFRSSSNWVGKGFFAVYEAICGGDVKKDYGHIQSPNYPDDYRPSKVCIWRIQVSEGFHVGLTFQSFEIERHDSCAYDYLEVRDGHSESSTLIGRYCGYEKPDDIKSTSSRLWLKFVSDGSINKAGFAVNFFKEVDECSRPNRGGCEQRCLNTLGSYKCSCDPGYELAPDKRRCEGCYDLQVGKPLLWDRHCFRLSTHGPEMLGTALRG

SEQ ID NO: 1481 - protein, 717 aa, Homo Sapiens
MPGVARLPLLLGLLLLPRPGRPLDLADYTYDLAEEDDSEPLNYKDPCKAAAFLGDIALDEEDLRAFQVQQAVDLRRHTARKSSIKAAVPGNTSTPSCQSTNGQPQRGACGRWRGRSRSRRAATSRPERVWPDGVIPFVIGGNFTGSQRAVFRQAMRHWEKHTCVTFLERTDEDSYIVFTYRPCGCCSYVGRRGGGPQAISIGKNCDKFGIVVHELGHVVGFWHEHTRPDRDRHVSIVRENIQPGQEYNFLKMEPQEVESLGETYDFDSIMHYARNTFSRGIFLDTIVPKYEVNGVKPPIGQRTRLSKGDIAQARKLYKCPACGETLQDSTGNFSSPEYPNGYSAHMHCVWRISVTPGEKIILNFTSLDLYRSRLCWYDYVEVRDGFWRKAPLRGRFCGSKLPEPIVSTDSRLWVEFRSSSNWVGKGFFAVYEAICGGDVKKDYGHIQSPNYPDDYRPSKVCIWRIQVSEGFHVGLTFQSFEIERHDSCAYDYLEVRDGHSESSTLIGRYCGYEKPDDIKSTSSRLWLKFVSDGSINKAGFAVNFFKEVDECSRPNRGGCEQRCLNTLGSYKCSCDPGYELAPDKRRCEAACGGFLTKLNGSITSPGWPKEYPPNKNCIWQLVAPTQYRISLQFDFFETEGNDVCKYDFVEVRSGLTADSKLHGKFCGSEKPEVITSQYNNMRVEFKSDNTVSKKGFKAHFFSGGELFGLLGHPPRRP

SEQ ID NO: 1482 - protein, 730 aa, Homo Sapiens; identical to SEQ ID NO: 1478

SEQ ID NO: 1483 - protein, 302 aa, Homo Sapiens
MPGVARLPLLLGLLLLPRPGRPLDLADYTYDLAEEDDSEPLNYKDPCKAAAFLGDIALDEEDLRAFQVQQAVDLRRHTARKSSIKAAVPGNTSTPSCQSTNGQPQRGACGRWRGRSRSRRAATSRPERVWPDGVIPFVIGGNFTGSQRAVFRQAMRHWEKHTCVTFLERTDEDSYIVFTYRPCGCCSYVGRRGGGPQAISIGKNCDKFGIVVHELGHVVGFWHEHTRPDRDRHVSIVRENIQPGVLHSSLLLLSCGSRNGASFPCSLESSIHQALCWTGLFLRPSPFPRLPLAAPRTLRAGV

SEQ ID NO: 1484 - protein, 302 aa, Homo Sapiens; identical to SEQ ID NO: 1483

SEQ ID NO: 1485 - protein, 189 aa, Homo Sapiens
MPGVARLPLLLGLLLLPRPGRPLDLADYTYDLAEEDDSEPLNYKDPCKAAAFLGDIALDEEDLRAFQVQQAVDLRRHTARKSSIKAAVPGNTSTPSCQSTNGQPQRGACGRWRGRSRSRRAATSRPERVWPDGVIPFVIGGNFTGSQRAVFRQAMRHWEKHTCVTFLERTDEDSYIVFTYRPCGSGPPP

SEQ ID NO: 1486 - protein, 189 aa, Homo Sapiens; identical to SEQ ID NO: 1485

SEQ ID NO: 1487 - protein, 189 aa, Homo Sapiens; identical to SEQ ID NO: 1485

SEQ ID NO: 1488 - protein, 189 aa, Homo Sapiens; identical to SEQ ID NO: 1485

SEQ ID NO: 1489 - protein, 61 aa, Homo Sapiens
MPGVARLPLLLGLLLLPRPGRPLDLADYTYDLAEEDDSEPLNYKDPCKLPFLGTLPWTKRT

SEQ ID NO: 1490 - protein, 424 aa, Homo Sapiens
MGSLVLTLCALFCLAAYLVSGSPIMNLEQSPLEEDMSLFGDVFSEQDGVDFNTLLQSMKDEFLKTLNLSDIPTQDSAKVDPPEYMLELYNKFATDRTSMPSANIIRSFKNEDLFSQPVSFNGLRKYPLLFNVSIPHHEEVIMAELRLYTLVQRDRMIYDGVDRKITIFEVLESKGDNEGERNMLVLVSGEIYGTNSEWETFDVTDAIRRWQKSGSSTHQLEVHIESKHDEAEDASSGRLEIDTSAQNKHNPLLIVFSDDQSSDKERKEELNEMISHEQLPELDNLGLDSFSSGPGEEALLQMRSNIIYDSTARIRRNAKGNYCKRTPLYIDFKEIGWDSWIIAPPGYEAYECRGVCNYPLAEHLTPTKHAIIQALVHLKNSQKASKACCVPTKLEPISILYLDKGVVTYKFKYEGMAVSECGCR

SEQ ID NO: 1491 - protein, 392 aa, Homo Sapiens
MVLLSILRILFLCELVLFMEHRAQMAEGGQSSIALLAEAPTLPLIEELLEESPGEQPRKPRLLGHSLRYMLELYRRSADSHGHPRENRTIGATMVRLVKPLTNVARPHRGTWHIQILGFPLRPNRGLYQLVRATVVYRHHLQLTRFNLSCHVEPWVQKNPTNHFPSSEGDSSKPSLMSNAWKEMDITQLVQQRFWNNKGHRILRLRFMCQQQKDSGGLELWHGTSSLDIAFLLLYFNDTHKSIRKAKFLPRGMEEFMERESLLRRTRQADGISAEVTASSSKHSGPENNQCSLHPFQISFRQLGWDHWIIAPPFYTPNYCKGTCLRVLRDGLNSPNHAIIQNLINQLVDQSVPRPSCVPYKYVPISVLMIEANGSILYKEYEGMIAESCTCR

SEQ ID NO: 1492 - protein, 396 aa, Homo Sapiens
MVAGTRCLLALLLPQVLLGGAAGLVPELGRRKFAAASSGRPSSQPSDEVLSEFELRLLSMFGLKQRPTPSRDAVVPPYMLDLYRRHSGQPGSPAPDHRLERAASRANTVRSFHHEESLEELPETSGKTTRRFFFNLSSIPTEEFITSAELQVFREQMQDALGNNSSFHHRINIYEIIKPATANSKFPVTRLLDTRLVNQNASRWESFDVTPAVMRWTAQGHANHGFVVEVAHLEEKQGVSKRHVRISRSLHQDEHSWSQIRPLLVTFGHDGKGHPLHKREKRQAKHKQRKRLKSSCKRHPLYVDFSDVGWNDWIVAPPGYHAFYCHGECPFPLADHLNSTNHAIVQTLVNSVNSKIPKACCVPTELSAISMLYLDENEKVVLKNYQDMVVEGCGCR

SEQ ID NO: 1493 - protein, 472 aa, Homo Sapiens
MAGASRLLFLWLGCFCVSLAQGERPKPPFPELRKAVPGDRTAGGGPDSELQPQDKVSEHMLRLYDRYSTVQAARTPGSLEGGSQPWRPRLLREGNTVRSFRAAAAETLERKGLYIFNLTSLTKSENILSATLYFCIGELGNISLSCPVSGGCSHHAQRKHIQIDLSAWTLKFSRNQSQLLGHLSVDMAKSHRDIMSWLSKDITQLLRKAKENEEFLIGFNITSKGRQLPKRRLPFPEPYILVYANDAAISEPESVVSSLQGHRNFPTGTVPKWDSHIRAALSIERRKKRSTGVLLPLQNNELPGAEYQYKKDEVWEERKPYKTLQAQAPEKSKNKKKQRKGPHRKSQTLQFDEQTLKKARRKQWIEPRNCARRYLKVDFADIGWSEWIISPKSFDAYYCSGACQFPMPKSLKPSNHATIQSIVRAVGVVPGIPEPCCVPEKMSSLSILFFDENKNVVLKVYPNMTVESCACR

SEQ ID NO: 1494 - protein, 104 aa, Homo Sapiens
LIPETGKKKVAEIQGHAGGRRSGQSHELLRDFEATLLQMFGLRRRPQPSKSAVIPDYMRDLYRLQSGEEEEEQIHSTGLEYPERPASRANTVRSFHHEASLRTR

SEQ ID NO: 1495 - protein, 271 aa, Homo Sapiens
MFGLRRRPQPSKSAVIPDYMRDLYRLQSGEEEEEQIHSTGLEYPERPASRANTVRSFHHEEHLENIPGTSENSAFRFLFNLSSIPENEVISSAELRLFREQVDQGPDWERGFHRINIYEVMKPPAEVVPGHLITRLLDTRLVHHNVTRWETFDVSPAVLRWTREKQPNYGLAIEVTHLHQTRTHQGQHVRISRSLPQGSGNWAQLRPLLVTFGHDGRGHALTRRRRAKRSPKHHSQRARKKNKNCRRHSLYVDFSDVGWNDWIVAPPGYQA

SEQ ID NO: 1496 - protein, 110 aa, Homo Sapiens
MIPGNRMLMVVLLCQVLLGGASHASLIPETGKKKVAEIQGHAGGRRSGQSHELLRDFEATLLQMFGLRRRPQPSKSAVIPDYMRDLYRLQSGEEEEEQIHSTGLEYPERP

SEQ ID NO: 1497 - protein, 408 aa, Homo Sapiens
MIPGNRMLMVVLLCQVLLGGASHASLIPETGKKKVAEIQGHAGGRRSGQSHELLRDFEATLLQMFGLRRRPQPSKSAVIPDYMRDLYRLQSGEEEEEQIHSTGLEYPERPASRANTVRSFHHEEHLENIPGTSENSAFRFLFNLSSIPENEVISSAELRLFREQVDQGPDWERGFHRINIYEVMKPPAEVVPGHLITRLLDTRLVHHNVTRWETFDVSPAVLRWTREKQPNYGLAIEVTHLHQTRTHQGQHVRISRSLPQGSGNWAQLRPLLVTFGHDGRGHALTRRRRAKRSPKHHSQRARKKNKNCRRHSLYVDFSDVGWNDWIVAPPGYQAFYCHGDCPFPLADHLNSTNHAIVQTLVNSVNSSIPKACCVPTELSAISMLYLDEYDKVVLKNYQEMVVEGCGCR

SEQ ID NO: 1498 - protein, 408 aa, Homo Sapiens; identical to SEQ ID NO: 1497

SEQ ID NO: 1499 - protein, 408 aa, Homo Sapiens; identical to SEQ ID NO: 1497

SEQ ID NO: 1500 - protein, 408 aa, Homo Sapiens; identical to SEQ ID NO: 1497

SEQ ID NO: 1501 - protein, 29 aa, Homo Sapiens
NTVRSFHHEGQSLPPVCVGEGWWDWLEGQ

SEQ ID NO: 1502 - protein, 513 aa, Homo Sapiens
MPGLGRRAQWLCWWWGLLCSCCGPPPLRPPLPAAAAAAAGGQLLGDGGSPGRTEQPPPSPQSSSGFLYRRLKTQEKREMQKEILSVLGLPHRPRPLHGLQQPQPPALRQQEEQQQQQQLPRGEPPPGRLKSAPLFMLDLYNALSADNDEDGASEGERQQSWPHEAASSSQRRQPPPGAAHPLNRKSLLAPGSGSGGASPLTSAQDSAFLNDADMVMSFVNLVEYDKEFSPRQRHHKEFKFNLSQIPEGEVVTAAEFRIYKDCVMGSFKNQTFLISIYQVLQEHQHRDSDLFLLDTRVVWASEEGWLEFDITATSNLWVVTPQHNMGLQLSVVTRDGVHVHPRAAGLVGRDGPYDKQPFMVAFFKVSEVHVRTTRSASSRRRQQSRNRSTQSQDVARVSSASDYNSSELKTACRKHELYVSFQDLGWQDWIIAPKGYAANYCDGECSFPLNAHMNATNHAIVQTLVHLMNPEYVPKPCCAPTKLNAISVLYFDDNSNVILKKYRNMVVRACGCH

SEQ ID NO: 1503 - protein, 365 aa, Homo Sapiens
MHVRSLRAAAPHSFVALWAPLFLLRSALADFSLDNEVHSSFIHRRLRSQERREMQREILSILGLPHRPRPHLQGKHNSAPMFMLDLYNAMAVEEGGGPGGQGFSYPYKAVFSTQGPPLASLQDSHFLTDADMVMSFVNLVEHDKEFFHPRYHHREFRFDLSKIPEGEAVTAAEFRIYKDYIRERFDNETFRISVYQVLQEHLGRESDLFLLDSRTLWASEEGWLVFDITATSNHWVVNPRHNLGLQLSVETLDENSSSDQRQACKKHELYVSFRDLGWQDWIIAPEGYAAYYCEGECAFPLNSYMNATNHAIVQTLVHFINPETVPKPCCAPTQLNAISVLYFDDSSNVILKKYRNMVVRACGCH

SEQ ID NO: 1504 - protein, 431 aa, Homo Sapiens
MHVRSLRAAAPHSFVALWAPLFLLRSALADFSLDNEVHSSFIHRRLRSQERREMQREILSILGLPHRPRPHLQGKHNSAPMFMLDLYNAMAVEEGGGPGGQGFSYPYKAVFSTQGPPLASLQDSHFLTDADMVMSFVNLVEHDKEFFHPRYHHREFRFDLSKIPEGEAVTAAEFRIYKDYIRERFDNETFRISVYQVLQEHLGRESDLFLLDSRTLWASEEGWLVFDITATSNHWVVNPRHNLGLQLSVETLDGQSINPKLAGLIGRHGPQNKQPFMVAFFKATEVHFRSIRSTGSKQRSQNRSKTPKNQEALRMANVAENSSSDQRQACKKHELYVSFRDLGWQDWIIAPEGYAAYYCEGECAFPLNSYMNATNHAIVQTLVHFINPETVPKPCCAPTQLNAISVLYFDDSSNVILKKYRNMVVRACGCH

SEQ ID NO: 1505 - protein, 412 aa, Homo Sapiens
MHVRSLRAAAPHSFVALWAPLFLLRSALADFSLDNEVHSSFIHRRLRSQERREMQREILSILGLPHRPRPHLQGKHNSAPMFMLDLYNAMAVEEGGGPGGQGFSYPYKAVFSTQGPPLASLQDSHFLTDADMVMSFVNLVEHDKEFFHPRYHHREFRFDLSKIPEGEAVTAAEFRIYKDYIRERFDNETFRISVYQVLQEHLGRESDLFLLDSRTLWASEEGWLVFDITATSNHWVVNPRHNLGLQLSVETLDGQSINPKLAGLIGRHGPQNKQPFMVAFFKATEVHFRSIRSTGSKQRSQNRSKTPKNQEALRMANVAENSSSDQRQACKKHELYVSFRDLGWQDWIIAPEGYAAYYCEGECAFPLNSYMNATNHAIVQTLVGVTPSWGVVTWAGQAAGPPDPAASKLGPE

SEQ ID NO: 1506 - protein, 297 aa, Homo Sapiens
  misc_feature (1)..(1): Xaa can be any naturally occurring amino acid
XPPLASLQDSHFLTDADMVMSFVNLVEHDKEFFHPRYHHREFRFDLSKIPEGEAVTAAEFRIYKDYIRERFDNETFRISVYQVLQEHLGSTGTCCMPCLRASTRTNQTRVPALWKLTFQQRRGHGRESDLFLLDSRTLWASEEGWLVFDITATSNHWVVNPRHNLGLQLSVETLDGQSINPKLAGLIGRHGPQNKQPFMVAFFKATEVHFRSIRSTGSKQRSQNRSKTPKNQEALRMANVAENSSSDQRQACKKHELYVSFRDLGWQDWIIAPEGYAAYYCEGECAFPLNSYMNATN

SEQ ID NO: 1507 - protein, 402 aa, Homo Sapiens
MAARPGPLWLLGLTLCALGGGGPGLRPPPGCPQRRLGARERRDVQREILAVLGLPGRPRPRAPPAASRLPASAPLFMLDLYHAMAGDDDEDGAPAEQRLGRADLVMSFVNMVERDRALGHQEPHWKEFRFDLTQIPAGEAVTAAEFRIYKVPSIHLLNRTLHVSMFQVVQEQSNRESDLFFLDLQTLRAGDEGWLVLDVTAASDCWLLKRHKDLGLRLYVETEDGHSVDPGLAGLLGQRAPRSQQPFVVTFFRASPSPIRTPRAVRPLRRRQPKKSNELPQANRLPGIFDDVRGSHGRQVCRRHELYVSFQDLGWLDWVIAPQGYSAYYCEGECSFPLDSCMNATNHAILQSLVHLMKPNAVPKACCAPTKLSATSVLYYDSSNNVILRKHRNMVVKACGCH

SEQ ID NO: 1508 - protein, 402 aa, Homo Sapiens
MTALPGPLWLLGLALCALGGGGPGLRPPPGCPQRRLGARERRDVQREILAVLGLPGRPRPRAPPAASRLPASAPLFMLDLYHAMAGDDDEDGAPAERRLGRADLVMSFVNMVERDRALGHQEPHWKEFRFDLTQIPAGEAVTAAEFRIYKVPSIHLLNRTLHVSMFQVVQEQSNRESDLFFLDLQTLRAGDEGWLVLDVTAASDCWLLKRHKDLGLRLYVETEDGHSVDPGLAGLLGQRAPRSQQPFVVTFFRASPSPIRTPRAVRPLRRRQPKKSNELPQANRLPGIFDDVHGSHGRQVCRRHELYVSFQDLGWLDWVIAPQGYSAYYCEGECSFPLDSCMNATNHAILQSLVHLMMPDAVPKACCAPTKLSATSVLYYDSSNNVILRKHRNMVVKACGCH

SEQ ID NO: 1509 - protein, 90 aa, Homo Sapiens
MLWFSGVGALAERYCRRSPGITCCVLLLLNCSGVPMSLASSFLTGSVAKCENEGEVLQIPFITDNPCIMCVCLHEPTRWSNLTQNPGFYD

SEQ ID NO: 1510 - protein, 685 aa, Homo Sapiens
MLWFSGVGALAERYCRRSPGITCCVLLLLNCSGVPMSLASSFLTGSVAKCENEGEVLQIPFITDNPCIMCVCLNKEVTCKREKCPVLSRDCALAIKQRGACCEQCKGCTYEGNTYNSSFKWQSPAEPCVLRQCQEGVVTESGVRCVVHCKNPLEHLGMCCPTCPGCVFEGVQYQEGEEFQPEGSKCTKCSCTGGRTQCVREVCPILSCPQHLSHIPPGQCCPKCLGQRKVFDLPFGSCLFRSDVYDNGSSFLYDNCTACTCRDSTVVCKRKCSHPGGCDQGQEGCCEECLLRVPPEDIKVCKFGNKIFQDGEMWSSINCTICACVKGRTECRNKQCIPISSCPQGKILNRKGCCPICTEKPGVCTVFGDPHYNTFDGRTFNFQGTCQYVLTKDCSSPASPFQVLVKNDARRTRSFSWTKSVELVLGESRVSLQQHLTVRWNGSRIALPCRAPHFHIDLDGYLLKVTTKAGLEISWDGDSFVEVMAAPHLKGKLCGLCGNYNGHKRDDLIGGDGNFKFDVDDFAESWRVESNEFCNRPQRKPVPELCQGTVKVKLRAHRECQKLKSWEFQTCHSTVDYATFYRSCVTDMCECPVHKNCYCESFLAYTRACQREGIKVHWEPQQNCAATQCKHGAVYDTCGPGCIKTCDNWNEIGPCNKPCVAGCHCPANLVLHKGRCIKPVLCPQR

SEQ ID NO: 1511 - protein, 133 aa, Homo Sapiens
MLWFSGVGALAERYCRRSPGITCCVLLLLNCSGVPMSLASSFLTGSVAKCENEGEVLQIPFITDNPCIMCVCLNKEVTCKREKCPVLSRDCALAIKQRGACCEQCKVLVSRVLRDTVLFTLKYWRLPVFWLHL

SEQ ID NO: 1512 - protein, 161 aa, Homo Sapiens
MLWFSGVGALAERYCRRSPGITCCVLLLLNCSGVPMSLASSFLTGSVAKCENEGEVLQIPFITDNPCIMCVCLVAPMKEIPITAPSNGRARLSLVFYASARRALSQSLGCAVLFIVKTLWSIWECAAPHVQAVCLRVCSIKKGRNFSQKEANVPSVPALEA

SEQ ID NO: 1513 - protein, 987 aa, Homo Sapiens
MRCRNMFFSFKASLCGCGAATAPSLTAISCTLNCSCQSFKPGKINHRQCDQCKHGWVAHALSKLRIPPMYPTSQVEIVQSNVVFDISSLMLYGTQAIPVRLKILLDRLFSVLKQDEVLQILHALDWTLQDYIRGYVLQDASGKVLDHWSIMTSEEEVATLQQFLRFGETKSIVELMAIQEKEEQSIIIPPSTANVDIRAFIESCSHRSSSLPTPVDKGNPSSIHPFENLISNMTFMLPFQFFNPLPPALIGSLPEQYMLEQGHDQSQDPKQEVHGPFPDSSFLTSSSTPFQVEKDQCLNCPDAITKKEDSTHLSDSSSYNIVTKFERTQLSPEAKVKPERNSLGTKKGRVFCTACEKTFYDKGTLKIHYNAVHLKIKHKCTIEGCNMVFSSLRSRNRHSANPNPRLHMPMNRNNRDKDLRNSLNLASSENYKCPGFTVTSPDCRPPPSYPGSGEDSKGQPAFPNIGQNGVLFPNLKTVQPVLPFYRSPATPAEVANTPGILPSLPLLSSSIPEQLISNEMPFDALPKKKSRKSSMPIKIEKEAVEIANEKRHNLSSDEDMPLQVVSEDEQEACSPQSHRVSEEQHVQSGGLGKPFPEGERPCHRESVIESSGAISQTPEQATHNSERETEQTPALIMVPREVEDGGHEHYFTPGMEPQVPFSDYMELQQRLLAGGLFSALSNRGMAFPCLEDSKELEHVGQHALARQIEENRFQCDICKKTFKNACSVKIHHKNMHVKEMHTCTVEGCNATFPSRRSRDRHSSNLNLHQKALSQEALESSEDHFRAAYLLKDVAKEAYQDVAFTQQASQTSVIFKGTSRMGSLVYPITQVHSASLESYNSGPLSEGTILDLSTTSSMKSESSSHSSWDSDGVSEEGTVLMEDSDGNCEGSSLVPGEDEYPICVLMEKADQSLASLPSGLPITCHLCQKTYSNKGTFRAHYKTVHLRQLHKCKVPGCNTMFSSVRSRNRHSQNPNLHKSLASSPSHLQ

SEQ ID NO: 1514 - protein, 994 aa, Homo Sapiens
MRRRPPSRGGRGAARARETRRQPRHRSGRRMAEAISCTLNCSCQSFKPGKINHRQCDQCKHGWVAHALSKLRIPPMYPTSQVEIVQSNVVFDISSLMLYGTQAIPVRLKILLDRLFSVLKQDEVLQILHALDWTLQDYIRGYVLQDASGKVLDHWSIMTSEEEVATLQQFLRFGETKSIVELMAIQEKEEQSIIIPPSTANVDIRAFIESCSHRSSSLPTPVDKGNPSSIHPFENLISNMTFMLPFQFFNPLPPALIGSLPEQYMLEQGHDQSQDPKQEVHGPFPDSSFLTSSSTPFQVEKDQCLNCPDAITKKEDSTHLSDSSSYNIVTKFERTQLSPEAKVKPERNSLGTKKGRVFCTACEKTFYDKGTLKIHYNAVHLKIKHKCTIEGCNMVFSSLRSRNRHSANPNPRLHMPMNRNNRDKDLRNSLNLASSENYKCPGFTVTSPDCRPPPSYPGSGEDSKGQPAFPNIGQNGVLFPNLKTVQPVLPFYRSPATPAEVANTPGILPSLPLLSSSIPEQLISNEMPFDALPKKKSRKSSMPIKIEKEAVEIANEKRHNLSSDEDMPLQVVSEDEQEACSPQSHRVSEEQHVQSGGLGKPFPEGERPCHRESVIESSGAISQTPEQATHNSERETEQTPALIMVPREVEDGGHEHYFTPGMEPQVPFSDYMELQQRLLAGGLFSALSNRGMAFPCLEDSKELEHVGQHALARQIEENRFQCDICKKTFKNACSVKIHHKNMHVKEMHTCTVEGCNATFPSRRSRDRHSSNLNLHQKALSQEALESSEDHFRAAYLLKDVAKEAYQDVAFTQQASQTSVIFKGTSRMGSLVYPITQVHSASLESYNSGPLSEGTILDLSTTSSMKSESSSHSSWDSDGVSEEGTVLMEDSDGNCEGSSLVPGEDEYPICVLMEKADQSLASLPSGLPITCHLCQKTYSNKGTFRAHYKTVHLRQLHKCKVPGCNTMFSSVRSRNRHSQNPNLHKSLASSPSHLQ

SEQ ID NO: 1515 - protein, 22 aa, Homo Sapiens
MLRGTMTAWRGMRPEVTLACLL

SEQ ID NO: 1516 - protein, 32 aa, Homo Sapiens
MLRGTMTAWRGMRPEVTLACLLLATAGCFADL

SEQ ID NO: 1517 - protein, 85 aa, Homo Sapiens
MLRGTMTAWRGMRPEVTLACLLLATAGCFADLNEVPQVTVQPASTVQKPGGTVILGCVVEPPRMNVTWRLNGKELNGSDDALGVL

SEQ ID NO: 1518 - protein, 1115 aa, Homo Sapiens
MLRGTMTAWRGMRPEVTLACLLLATAGCFADLNEVPQVTVQPASTVQKPGGTVILGCVVEPPRMNVTWRLNGKELNGSDDALGVLITHGTLVITALNNHTVGRYQCVARMPAGAVASVPATVTLANLQDFKLDVQHVIEVDEGNTAVIACHLPESHPKAQVRYSVKQEWLEASRGNYLIMPSGNLQIVNASQEDEGMYKCAAYNPVTQEVKTSGSSDRLRVRRSTAEAARIIYPPEAQTIIVTKGQSLILECVASGIPPPRVTWAKDGSSVTGYNKTRFLLSNLLIDTTSEEDSGTYRCMADNGVGQPGAAVILYNVQVFEPPEVTMELSQLVIPWGQSAKLTCEVRGNPPPSVLWLRNAVPLISSQRLRLSRRALRVLSMGPEDEGVYQCMAENEVGSAHAVVQLRTSRPSITPRLWQDAELATGTPPVSPSKLGNPEQMLRGQPALPRPPTSVGPASPQCPGEKGQGAPAEAPIILSSPRTSKTDSYELVWRPRHEGSGRAPILYYVVKHRKQVTNSSDDWTISGIPANQHRLTLTRLDPGSLYEVEMAAYNCAGEGQTAMVTFRTGRRPKPEIMASKEQQIQRDDPGASPQSSSQPDHGRLSPPEAPDRPTISTASETSVYVTWIPRGNGGFPIQSFRVEYKKLKKVGDWILATSAIPPSRLSVEITGLEKGTSYKFRVRALNMLGESEPSAPSRPYVVSGYSGRVYERPVAGPYITFTDAVNETTIMLKWMYIPASNNNTPIHGFYIYYRPTDSDNDSDYKKDMVEGDKYWHSISHLQPETSYDIKMQCFNEGGESEFSNVMICETKARKSSGQPGRLPPPTLAPPQPPLPETIERPVGTGAMVARSSDLPYLIVGVVLGSIVLIIVTFIPFCLWRAWSKQKHTTDLGFPRSALPPSCPYTMVPLGGLPGHQASGQPYLSGISGRACANGIHMNRGCPSAAVGYPGMKPQQHCPGELQQQSDTSSLLRQTHLGNGYDPQSHQITRGPKSSPDEGSFLYTLPDDSTHQLLQPHHDCCQRQEQPAAVGQSGVRRAPDSPVLEAVWDPPFHSGPPCCLGLVPVEEVDSPDSCQVSGGDWCPQHPVGAYVGQEPGMQLSPGPLVRVSFETPPLTI

SEQ ID NO: 1519 - protein, 1114 aa, Homo Sapiens
MLRGTMTAWRGMRPEVTLACLLLATAGCFADLNEVPQVTVQPASTVQKPGGTVILGCVVEPPRMNVTWRLNGKELNGSDDALGVLITHGTLVITALNNHTVGRYQCVARMPAGAVASVPATVTLANLQDFKLDVQHVIEVDEGNTAVIACHLPESHPKAQVRYSVKQEWLEASRGNYLIMPSGNLQIVNASQEDEGMYKCAAYNPVTQEVKTSGSSDRLRVRRSTAEAARIIYPPEAQTIIVTKGQSLILECVASGIPPPRVTWAKDGSSVTGYNKTRFLLSNLLIDTTSEEDSGTYRCMADNGVGQPGAAVILYNVQVFEPPEVTMELSQLVIPWGQSAKLTCEVRGNPPPSVLWLRNAVPLISSQRLRLSRRALRVLSMGPEDEGVYQCMAENEVGSAHAVVQLRTSRPSITPRLWQDAELATGTPPVSPSKLGNPEQMLRGQPALPRPPTSVGPASPQCPGEKGQGAPAEAPIILSSPRTSKTDSYELVWRPRHEGSGRAPILYYVVKHRKVTNSSDDWTISGIPANQHRLTLTRLDPGSLYEVEMAAYNCAGEGQTAMVTFRTGRRPKPEIMASKEQQIQRDDPGASPQSSSQPDHGRLSPPEAPDRPTISTASETSVYVTWIPRGNGGFPIQSFRVEYKKLKKVGDWILATSAIPPSRLSVEITGLEKGTSYKFRVRALNMLGESEPSAPSRPYVVSGYSGRVYERPVAGPYITFTDAVNETTIMLKWMYIPASNNNTPIHGFYIYYRPTDSDNDSDYKKDMVEGDKYWHSISHLQPETSYDIKMQCFNEGGESEFSNVMICETKARKSSGQPGRLPPPTLAPPQPPLPETIERPVGTGAMVARSSDLPYLIVGVVLGSIVLIIVTFIPFCLWRAWSKQKHTTDLGFPRSALPPSCPYTMVPLGGLPGHQASGQPYLSGISGRACANGIHMNRGCPSAAVGYPGMKPQQHCPGELQQQSDTSSLLRQTHLGNGYDPQSHQITRGPKSSPDEGSFLYTLPDDSTHQLLQPHHDCCQRQEQPAAVGQSGVRRAPDSPVLEAVWDPPFHSGPPCCLGLVPVEEVDSPDSCQVSGGDWCPQHPVGAYVGQEPGMQLSPGPLVRVSFETPPLTI

SEQ ID NO: 1520 - protein, 1114 aa, Homo Sapiens; identical to SEQ ID NO: 1519

SEQ ID NO: 1521 - protein, 157 aa, Homo Sapiens
MLRGTMTAWRGMRPEVTLACLLLATAGCFADLNEVPQVTVQPASTVQKPGGTVILGCVVEPPRMNVTWRLNGKELNGSDDALGVLITHGTLVITALNNHTVGRYQCVARMPAGAVASVPATVTLASESAPLPPCHGAVPPHLSHPEAPTIHAASCYS

SEQ ID NO: 1522 - protein, 157 aa, Homo Sapiens; identical to SEQ ID NO: 1521

SEQ ID NO: 1523 - protein, 65 aa, Homo Sapiens
MTHEVLSTFIPSEGSSSKVEEVDLQDFKLDVQHVIEVDEGNTAVIACHLPESHPKAQVRYSVKQE

SEQ ID NO: 1524 - protein, 39 aa, Homo Sapiens
  misc_feature (1)..(1): Xaa can be any naturally occurring amino acid
XQQQSDTSSLLRQTHLGNGYDPQSHQITRAPMLLGPCAS

SEQ ID NO: 1525 - protein, 84 aa, Homo Sapiens
  misc_feature (1)..(1): Xaa can be any naturally occurring amino acid
XRACANGIHMNRGCPSAAVGYPGMKPQQHCPGELQQQSDTSSLLRQTHLGNGYDPQSHQITSCCSPITTAANARSSLLLWASQG

SEQ ID NO: 1526 - protein, 85 aa, Homo Sapiens
MADGGGGGGTGAVGGGGTSQASAGAATGATGASGGGGPINPASLPPGDPQLIALIVEQLKSRGLFDSFRRDCLADVDTKNTPDTF

SEQ ID NO: 1527 - protein, 129 aa, Homo Sapiens
MADGGGGGGTGAVGGGGTSQASAGAATGATGASGGGGPINPASLPPGDPQLIALIVEQLKSRGLFDSFRRDCLADVDTKPAYQNLRQKVDNFVSTHLDKQEWNPTMNKNQLRNGLRQSVVQIRQTPFES

SEQ ID NO: 1528 - protein, 185 aa, Homo Sapiens
MADGGGGGGTGAVGGGGTSQASAGAATGATGASGGGGPINPASLPPGDPQLIALIVEQLKSRGLFDSFRRDCLADVDTKPAYQNLRQKVDNFVSTHLDKQEWNPTMNKNQLRNGLRQSVVQSGMLEAGVDRIISQVVDPKLNHIFRPQIERAIHEFLAAQKKAAVPAPPPEPEGQDPPAPSQDTS

SEQ ID NO: 1529 - protein, 42 aa, Homo Sapiens
MNKNQLRNGLRQSVVQSGMLEAGVDRIISQVVDPKLNHIFRP

SEQ ID NO: 1530 - protein, 118 aa, Homo Sapiens
  misc_feature (1)..(1): Xaa can be any naturally occurring amino acid
XLALLGPAGAVAPSTRPRCLPATRSSSLSSWSSSRAGAFLTASAGTAWPTWTPRSGMLEAGVDRIISQVVDPKLNHIFRPQIERAIHEFLAAQKKAAVPAPPPEPEGQDPPAPSQDTS

SEQ ID NO: 1531 - protein, 137 aa, Homo Sapiens
MLSGRLVLGLVSMAGRVCLCQGSAGSGAIGPVEAAIRTKLEEALSPEVLELRNESGGHAVPPGSETHFRVAVVSSRFEGLSPLQRHRLVHAALAEELGGPVHALAIQARTPAQWRENSQLDTSPPCLGGNKKTLGTP

SEQ ID NO: 1532 - protein, 137 aa, Homo Sapiens; identical to SEQ ID NO: 1531

SEQ ID NO: 1533 - protein, 137 aa, Homo Sapiens; identical to SEQ ID NO: 1531

SEQ ID NO: 1534 - protein, 55 aa, Homo Sapiens
MENVCEKVTNSVSSELQPYFQTLPVMTKIDSVAGINYGLVAPPATTAETLDVQMK

SEQ ID NO: 1535 - protein, 286 aa, Homo Sapiens
MENVCEKVTNSVSSELQPYFQTLPVMTKIDSVAGINYGLVAPPATTAETLDVQMKGEFYSENHHNPPPFAPPVMEFPAAHDRMVYLGLSDYFFNTAGLVYQEAGVLKMTLRDDMIPKESKFRLTTKFFGTFLPEVAKKFPNMKIQIHVSASTPPHLSVQPTGLTFYPAVDVQAFAVLPNSSLASLFLIGMHTTGSMEVSAESNRLVGELKLDRLLLELKHSNIGPFPVELLQDIMNYIVPILVLPRVNEKLQKGFPLPTPARVQLYNVVLQPHQNFLLFGADVVYK

SEQ ID NO: 1536 - protein, 487 aa, Homo Sapiens
MRENMARGPCNAPRWASLMVLVAIGTAVTAAVNPGVVVRISQKGLDYASQQGTAALQKELKRIKIPDYSDSFKIKHLGKGHYSFYSMDIREFQLPSSQISMVPNVGLKFSISNANIKISGKWKAQKRFLKMSGNFDLSIEGMSISADLKLGSNPTSGKPTITCSSCSSHINSVHVHISKSKVGWLIQLFHKKIESALRNKMNSQVCEKVTNSVSSELQPYFQTLPVMTKIDSVAGINYGLVAPPATTAETLDVQMKGEFYSENHHNPPPFAPPVMEFPAAHDRMVYLGLSDYFFNTAGLVYQEAGVLKMTLRDDMIPKESKFRLTTKFFGTFLPEVAKKFPNMKIQIHVSASTPPHLSVQPTGLTFYPAVDVQAFAVLPNSSLASLFLIGMHTTGSMEVSAESNRLVGELKLDRLLLELKHSNIGPFPVELLQDIMNYIVPILVLPRVNEKLQKGFPLPTPARVQLYNVVLQPHQNFLLFGADVVYK

SEQ ID NO: 1537 - protein, 261 aa, Homo Sapiens
MTKIDSVAGINYGLVAPPATTAETLDVQMKGEFYSENHHNPPPFAPPVMEFPAAHDRMVYLGLSDYFFNTAGLVYQEAGVLKMTLRDDMIPKESKFRLTTKFFGTFLPEVAKKFPNMKIQIHVSASTPPHLSVQPTGLTFYPAVDVQAFAVLPNSSLASLFLIGMHTTGSMEVSAESNRLVGELKLDRLLLELKHSNIGPFPVELLQDIMNYIVPILVLPRVNEKLQKGFPLPTPARVQLYNVVLQPHQNFLLFGADVVYK

SEQ ID NO: 1538 - protein, 242 aa, Homo Sapiens
MFQTGGLIVFYGLLAQTLPLNVNPALPLSPTGLAGSLTNALSNGLLSGGLLGILENLPLLDILKPGGGTSGGLLGGLLGKVTSVIPGLNNIIDIKVTDPQLLELGLVQSPDGHRLYVTIPLGIKLQVNTPLVGASLLRLAVKLDITAEILAVRDKQERIHLVLGDCTHSPGSLQISLLDGLGPLPIQGLLDSLTGILNKVLPELVQGNVCPLVNEVLRGLDITLVHDIVNMLIHGLQFVIKV

SEQ ID NO: 1539 - protein, 256 aa, Homo Sapiens
MFQTGGLIVFYGLLAQTMAQFGGLPVPLDQTLPLNVNPALPLSPTGLAGSLTNALSNGLLSGGLLGILENLPLLDILKPGGGTSGGLLGGLLGKVTSVIPGLNNIIDIKVTDPQLLELGLVQSPDGHRLYVTIPLGIKLQVNTPLVGASLLRLAVKLDITAEILAVRDKQERIHLVLGDCTHSPGSLQISLLDGLGPLPIQGLLDSLTGILNKVLPELVQGNVCPLVNEVLRGLDITLVHDIVNMLIHGLQFVIKV

SEQ ID NO: 1540 - protein, 256 aa, Homo Sapiens; identical to SEQ ID NO: 1539

SEQ ID NO: 1541 - protein, 256 aa, Homo Sapiens; identical to SEQ ID NO: 1539

SEQ ID NO: 1542 - protein, 249 aa, Homo Sapiens
MLQLWKLVLLCGVLTGTSESLLDNLGNDLSNVVDKLEPVLHEGLETVDNTLKGILEKLKVDLGVLQKSSAWQLAKQKAQEAEKLLNNVISKLLPTNTDIFGLKISNSLILDVKAEPIDDGKGLNLSFPVTANVTVAGPIIGQIINLKASLDLLTAVTIETDPQTHQPVAVLGECASDPTSISLSLLDKHSQIINKFVNSVINTLKSTVSSLLQKEICPLIRIFIHSLDVNVIQQVVDNPQHKTQLQTLI

SEQ ID NO: 1543 - protein, 249 aa, Homo Sapiens; identical to SEQ ID NO: 1542

SEQ ID NO: 1544 - protein, 218 aa, Homo Sapiens
MMCPLWRLLIFLGLLALPLAPHKQPWPGLAQAHRDNKSTLARIIAQGLIKHNAESRIQNIHFGDRLNASAQVAPGLVGWLISGRKHQQQQESRSFDNNIVKMCAHMSIVVEFWLEKDEFGRRDLVIGKCDAEPSSVHVAILTEAIPPKMNQFLYNLKENLQKVLPHMVESQVCPLIGEILGQLDVKLLKSLIEQEAAHEPTHHETSQPSACQAGESPS

SEQ ID NO: 1545 - protein, 254 aa, Homo Sapiens
MMCPLWRLLIFLGLLALPLAPHKQPWPGLAQAHRDNKSTLARIIAQGLIKHNAESRIQNIHFGDRLNASAQVAPGLVGWLISGRKHQQQQESSINITNIQLDCGGIQISFHKEWFSANISLEFDLELRPSFDNNIVKMCAHMSIVVEFWLEKDEFGRRDLVIGKCDAEPSSVHVAILTEAIPPKMNQFLYNLKENLQKVLPHMVESQVCPLIGEILGQLDVKLLKSLIEQEAAHEPTHHETSQPSACQAGESPS

SEQ ID NO: 1546 - protein, 147 aa, Homo Sapiens
MAGPWTFTLLCGLLAATLIQATLSPTAVLILGPKVIKEKLTQELKDHNATSILQQLPLLSAMREKPAGGIPVLGSLVNTVLKHIIWLKVITANILQLQVKPSANDQELLVKIPLDMVAGFNTPLVKTIVEFHMTTEAQATIRMDTSA

SEQ ID NO: 1547 - protein, 484 aa, Homo Sapiens
MAGPWTFTLLCGLLAATLIQATLSPTAVLILGPKVIKEKLTQELKDHNATSILQQLPLLSAMREKPAGGIPVLGSLVNTVLKHIIWLKVITANILQLQVKPSANDQELLVKIPLDMVAGFNTPLVKTIVEFHMTTEAQATIRMDTSASGPTRLVLSDCATSHGSLRIQLLHKLSFLVNALAKQVMNLLVPSLPNLVKNQLCPVIEASFNGMYADLLQLVKVPISLSIDRLEFDLLYPAIKGDTIQLYLGAKLLDSQGKVTKWFNNSAASLTMPTLDNIPFSLIVSQDVVKAAVAAVLSPEEFMVLLDSVLPESAHRLKSSIGLINEKAADKLGSTQIVKILTQDTPEFFIDQGHAKVAQLIVLEVFPSSEALRPLFTLGIEASSEAQFYTKGDQLILNLNNISSDRIQLMNSGIGWFQPDVLKNIITEIIHSILLPNQNGKLRSGVPVSLVKALGFEAAESSLTKDALVLTPASLWKPSSPVSQ

SEQ ID NO: 1548 - protein, 458 aa, Homo Sapiens
MAWASRLGLLLALLLPVVGASTPGTVVRLNKAALSYVSEIGKAPLQRALQVTVPHFLDWSGEALQPTRIRILNVHVPRLHLKFIAGFGVRLLAAANFTFKVFRAPEPLELTLPVELLADTRVTQSSIRTPVVSISACSLFSGHANEFDGSNSTSHALLVLVQKHIKAVLSNKLCLSISNLVQGVNVHLGTLIGLNPVGPESQIRYSMVSVPTVTSDYISLEVNAVLFLLGKPIILPTDATPFVLPRHVGTEGSMATVGLSQQLFDSALLLLQKAGALNLDITGQLRSDDNLLNTSALGRLIPEVARQFPEPMPVVLKVRLGATPVAMLHTNNATLRLQPFVEVLATASNSAFQSLFSLDVVVNLRLQLSVSKVKLQGTTSVLGDVQLTVASSNVGFIDTDQVRTLMGTVFEKPLLDHLNALLAMGIALPGVVNLHYVAPEIFVYEGYVVISSGLFYQS

SEQ ID NO: 1549 - protein, 476 aa, Homo Sapiens
MQPVMLALWSLLLLWGLATPCQELLETVGTLARIDKDELGKAIQNSLVGEPILQNVLGSVTAVNRGLLGSGGLLGGGGLLGHGGVFGVVEELSGLKIEELTLPKVLLKLLPGFGVQLSLHTKVGMHCSGPLGGLLQLAAEVNVTSRVALAVSSRGTPILILKRCSTLLGHISLFSGLLPTPLFGVVEQMLFKVLPGLLCPVVDSVLGVVNELLGAVLGLVSLGALGSVEFSLATLPLISNQYIELDINPIVKSVAGDIIDFPKSRAPAKVPPKKDHTSQVMVPLYLFNTTFGLLQTNGALDMDITPELVPSDVPLTTTDLAALLPEALGKLPLHQQLLLFLRVREAPTVTLHNKKALVSLPANIHVLFYVPKGTPESLFELNSVMTVRAQLAPSATKLHISLSLERLSVKVASSFTHAFDGSRLEEWLSHVVGAVYAPKLNVALDVGIPLPKVLNINFSNSVLEIVENAVVLTVAS

SEQ ID NO: 1550 - protein, 614 aa, Homo Sapiens
MWMAWCVAALSVVAVCGTSHETNTVLRVTKDVLSNAISGMLQQSDALHSALREVPLGVGDIPYNDFHVRGPPPVYTNGKKLDGIYQYGHIETNDNTAQLGGKYRYGEILESEGSIRDLRNSGYRSAENAYGGHRGLGRYRAAPVGRLHRRELQPGEIPPGVATGAVGPGGLLGTGGMLAADGILAGQGGLLGGGGLLGDGGLLGGGGVLGVLGEGGILSTVQGITGLRIVELTLPRVSVRLLPGVGVYLSLYTRVAINGKSLIGFLDIAVEVNITAKVRLTMDRTGYPRLVIERCDTLLGGIKVKLLRGLLPNLVDNLVNRVLADVLPDLLCPIVDVVLGLVNDQLGLVDSLIPLGILGSVQYTFSSLPLVTGEFLELDLNTLVGEAGGGLIDYPLGWPAVSPKPMPELPPMGDNTKSQLAMSANFLGSVLTLLQKQHALDLDITNGMFEELPPLTTATLGALIPKVFQQYPESCPLIIRIQVLNPPSVMLQKDKALVKVLATAEVMVSQPKDLETTICLIDVDTEFLASFSTEGDKLMIDAKLEKTSLNLRTSNVGNFDIGLMEVLVEKIFDLAFMPAMNAVLGSGVPLPKILNIDFSNADIDVLEDLLVLSA

SEQ ID NO: 1551 - protein, 44 aa, Homo Sapiens
MWMAWCVAALSVVAVCGTSHETNTVLRVTKDVLSNGFSPISWTI

SEQ ID NO: 1552 - protein, 453 aa, Homo Sapiens
MLRILCLALCSLLTGTRADPGALLRLGMDIMNQVQSAMDESHILEKMAAEAGKKQPGMKPIKGITNLKVKDVQLPVITLNFVPGVGIFQCVSTGMTVTGKSFMGGNMEIIVALNITATNRLLRDEETGLPVFKSEGCEVILVNVKTNLPSNMLPKMVNKFLDSTLHKVLPGLMCPAIDAVLVYVNRKWTNLSDPMPVGQMGTVKYVLMSAPATTASYIQLDFSPVVQQQKGKTIKLADAGEALTFPEGYAKGSSQLLLPATFLSAELALLQKSFHVNIQDTMIGELPPQTTKTLARFIPEVAVAYPKSKPLTTQIKIKKPPKVTMKTGKSLLHLHSTLEMFAARWRSKAPMSLFLLEVHFNLKVQYSVHENQLQMATSLDRLLSLSRKSSSIGNFNERELTGFITSYLEEAYIPVVNDVLQVGLPLPDFLAMNYNLAELDIVENALMLDLKLG

SEQ ID NO: 1553 - protein, 88 aa, Homo Sapiens
MLRILCLALCSLLTGTRADPGALLRLGMDIMNREVQSAMDESHILEKMAAEAGKKQPGMKPIKGITNEQGHFEEEMRLESQISTLHAT

SEQ ID NO: 1554 - protein, 82 aa, Homo Sapiens
MCTKTIPVLWGCFLLWNLYVSSSQTIYPGIKARITQRALDYGVQAGMKMIEQMLKEKKLPDLSGSESLEFLKVDYVNYNFSK

SEQ ID NO: 1555 - protein, 507 aa, Homo Sapiens
MCTKTIPVLWGCFLLWNLYVSSSQTIYPGIKARITQRALDYGVQAGMKMIEQMLKEKKLPDLSGSESLEFLKVDYVNYNFSNIKISAFSFPNTSLAFVPGVGIKALTNHGTANISTDWGFESPLFQDTGGADLFLSGVYFTGIIILTRNDFGHPTLKLQDCYAQLSHAHVSFSGELSVLYNSFAEPMEKPILKNLNEMLCPIIASEVKALNANLSTLEVLTKIDNYTLLDYSLISSPEITENYLDLNLKGVFYPLENLTDPPFSPVPFVLPERSNSMLYIGIAEYFFKSASFAHFTAGVFNVTLSTEEISNHFVQNSQGLGNVLSRIAEIYILSQPFMVRIMATEPPIINLQPGNFTLDIPASIMMLTQPKNSTVETIVSMDFVASTSVGLVILGQRLVCSLSLNRFRLALPESNRSNIEVLRFENILSSILHFGVLPLANAKLQQGFPLSNPHKFLFVNSDIEVLEGFLLISTDLKYETSSKQQPSFHVWEGLNLISRQWRGKSAP

SEQ ID NO: 1556 - protein, 507 aa, Homo Sapiens; identical to SEQ ID NO: 1555

SEQ ID NO: 1557 - protein, 264 aa, Homo Sapiens
MEKPILKNLNEMLCPIIASEVKALNANLSTLEVLTKIDNYTLLDYSLISSPEITENYLDLNLKGVFYPLENLTDPPFSPVPFVLPERSNSMLYIGIAEYFFKSASFAHFTAGVFNVTLSTEEISNHFVQNSQGLGNVLSRVASTSVGLVILGQRLVCSLSLNRFRLALPESNRSNIEVLRFENILSSILHFGVLPLANAKLQQGFPLSNPHKFLFVNSDIEVLEGFLLISTDLKYETSSKQQPSFHVWEGLNLISRQWRGKSAP

SEQ ID NO: 1558 - protein, 64 aa, Homo Sapiens
MAVSRHLTRGRKMAHVIAACLYLVCRTEGTPHMLLDLSDLLQVNVYVLGKTFLLLARELCINAP

SEQ ID NO: 1559 - protein, 562 aa, Homo Sapiens
MAVSRHLTRGRKMAHVIAACLYLVCRTEGTPHMLLDLSDLLQVNVYVLGKTFLLLARELCINAPAIDPCLYIPRFAHLLEFGEKNHEVSMTALRLLQRMKRDWMHTGRRPSGLCGAALLVAARMHDFRRTVKEVISVVKVCESTLRKRLTEFEDTPTSQLTIDEFMKIDLEEECDPPSYTAGQRKLRMKQLEQVLSKKLEEVEGEISSYQDAIEIELENSRPKAKGGLASLAKDGSTEDTASSLCGEEDTEDEELEAAASHLNKDLYRELLGGAPGSSEAAGSPEWGGRPPALGSLLDPLPTAASLGISDSIRECISSQSSDPKDASGDGELDLSGIDDLEIDRYILNESEARVKAELWMRENAEYLREQREKEARIAKEKELGIYKEHKPKKSCKRREPIQASTAREAIEKMLEQKKISSKINYSVLRGLSSAGGGSPHREDAQPEHSASARKLSRRRTPASRSGADPVTSVGKRLRPLVSTQPAKKVATGEALLPSSPTLGAEPARPQAVLVESGPVSYHADEEADEEEPDEEDGEPCVSALQMMGSNDYGCDGDEDDGY

SEQ ID NO: 1560 - protein, 584 aa, Homo Sapiens
MAVSRHLTRGRKMAHVIAACLYLVCRTEGTPHMLLDLSDLLQVNVYVLGKTFLLLARELCINAPAIDPCLYIPRFAHLLEFGEKNHEVSMTALRLLQRMKRDWMHTGRRPSGLCGAALLVAARMHDFRRTVKEVISVVKVCESTLRKRLTEFEDTPTSQLTIDEFMKIDLEEECDPPSYTAGQRKLRMKQLEQVLSKKLEEVEGEISSYQDAIEIELENSRPKAKGGLASLAKDGSTEDTASSLCGEEDTEDEELEAAASHLNKDLYRELLGGAPGSSEAAGSPEWGGRPPALGSLLDPLPTAASLGISDSIRECISSQSSDPKDASGDGELDLSGIDDLEIDRRDLSMPRCAKAKSQPHFPVLAQYILNESEARVKAELWMRENAEYLREQREKEARIAKEKELGIYKEHKPKKSCKRREPIQASTAREAIEKMLEQKKISSKINYSVLRGLSSAGGGSPHREDAQPEHSASARKLSRRRTPASRSGADPVTSVGKRLRPLVSTQPAKKVATGEALLPSSPTLGAEPARPQAVLVESGPVSYHADEEADEEEPDEEDGEPCVSALQMMGSNDYGCDGDEDDGY

SEQ ID NO: 1561 - protein, 439 aa, Homo Sapiens
MHDFRRTVKEVISVVKVCESTLRKRLTEFEDTPTSQLTIDEFMKIDLEEECDPPSYTAGQRKLRMKQLEQVLSKKLEEVEGEISSYQDAIEIELENSRPKAKGGLASLAKDGSTEDTASSLCGEEDTEDEELEAAASHLNKDLYRELLGGAPGSSEAAGSPEWGGRPPALGSLLDPLPTAASLGISDSIRECISSQSSDPKDASGDGELDLSGIDDLEIDRYILNESEARVKAELWMRENAEYLREQREKEARIAKEKELGIYKEHKPKKSCKRREPIQASTAREAIEKMLEQKKISSKINYSVLRGLSSAGGGSPHREDAQPEHSASARKLSRRRTPASRSGADPVTSVGKRLRPLVSTQPAKKVATGEALLPSSPTLGAEPARPQAVLVESGPVSYHADEEADEEEPDEEDGEPCVSALQMMGSNDYGCDGDEDDGY

SEQ ID NO: 1562 - protein, 14 aa, Homo Sapiens
MTALRLLQRMKRDW

SEQ ID NO: 1563 - protein, 45 aa, Homo Sapiens
MTALRLLQRMKRDWMHTGRRPSGLCGAALLVAARMHDFRRTVKEV

SEQ ID NO: 1564 - protein, 134 aa, Homo Sapiens [sequence omitted]

SEQ ID NO: 1565 - protein, 184 aa, Homo Sapiens
MTALRLLQRMKRDWMHTGRRPSGLCGAALLVAARMHDFRRTVKEVISVVKVCESTLRKRLTEFEDTPTSQLTIDEFMKIDLEEECDPPSYTAGQRKLRMKQLEQVLSKKLEEVEGEISSYQDAIEIELENSPPSRREGRRRPESLPRPLRGKAPVPLVGGLSSGMAAPDVAEGASPCVLRRGWP

SEQ ID NO: 1566 - protein, 155 aa, Homo Sapiens
MTALRLLQRMKRDWMHTGRRPSGLCGAALLVAARMHDFRRTVKEVISVVKVCESTLRKRLTEFEDTPTSQLTIDEFMKIDLEEECDPPSYTAGQRKLRMKQLEQVLSKKLEEVEGEISSYQDAIEIELENSRPKAKGGLASLAKDGSTEDTASSL

SEQ ID NO: 1567 - protein, 234 aa, Homo Sapiens
MTALRLLQRMKRDWMHTGRRPSGLCGAALLVAARMHDFRRTVKEVISVVKVCESTLRKRLTEFEDTPTSQLTIDEFMKIDLEEECDPPSYTAGQRKLRMKQLEQVLSKKLEEVEGEISSYQDAIEIELENSRPKAKGGLASLAKDGSTEDTASSLCGEEDTEDEELEAAASHLNKDLYRELLGGAPGSSEAAGSPEWGGRPPALGSLLDPLPTAASLGISDSIRECISSQSSDP

SEQ ID NO: 1568 - protein, 473 aa, Homo Sapiens
MTALRLLQRMKRDWMHTGRRPSGLCGAALLVAARMHDFRRTVKEVISVVKVCESTLRKRLTEFEDTPTSQLTIDEFMKIDLEEECDPPSYTAGQRKLRMKQLEQVLSKKLEEVEGEISSYQDAIEIELENSRPKAKGGLASLAKDGSTEDTASSLCGEEDTEDEELEAAASHLNKDLYRELLGGAPGSSEAAGSPEWGGRPPALGSLLDPLPTAASLGISDSIRECISSQSSDPKDASGDGELDLSGIDDLEIDRYILNESEARVKAELWMRENAEYLREQREKEARIAKEKELGIYKEHKPKKSCKRREPIQASTAREAIEKMLEQKKISSKINYSVLRGLSSAGGGSPHREDAQPEHSASARKLSRRRTPASRSGADPVTSVGKRLRPLVSTQPAKKVATGEALLPSSPTLGAEPARPQAVLVESGPVSYHADEEADEEEPDEEDGEPCVSALQMMGSNDYGCDGDEDDGY

SEQ ID NO: 1569 - protein, 161 aa, Homo Sapiens
MTALRLLQRMKRDWMHTGRRPSGLCGAALLVAARMHDFRRTVKEVISVVKVCESTLRKRLTEFEDTPTSQLTIDEFMKIDLEEECDPPSYTAGQRKLRMKQLEQVLSKKLEEVEGEISSYQDAIEIELENSRPKAPHRGGRADGGPRASPGLFVGRPQYHS

SEQ ID NO: 1570 - protein, 208 aa, Homo Sapiens
MTGRVCRGCGGTDIELDAARGDAVCTACGSVLEDNIIVSEVQFVESSGGGSSAVGQFVSLDGAGKTPTLGGGFHVNLGKESRAQTLQNGRRHIHHLGNQLQLNQHCLDTAFNFFKMAVSRHLTRGRKMAHVIAACLYLVCRTEGTPHMLLDLSDLLQVDSLRPASFPTWGCDLGVVTRVVTGVYPRCLHASQWPVCAACPVRKFWSVG

SEQ ID NO: 1571 - protein, 677 aa, Homo Sapiens
MTGRVCRGCGGTDIELDAARGDAVCTACGSVLEDNIIVSEVQFVESSGGGSSAVGQFVSLDGAGKTPTLGGGFHVNLGKESRAQTLQNGRRHIHHLGNQLQLNQHCLDTAFNFFKMAVSRHLTRGRKMAHVIAACLYLVCRTEGTPHMLLDLSDLLQVNVYVLGKTFLLLARELCINAPAIDPCLYIPRFAHLLEFGEKNHEVSMTALRLLQRMKRDWMHTGRRPSGLCGAALLVAARMHDFRRTVKEVISVVKVCESTLRKRLTEFEDTPTSQLTIDEFMKIDLEEECDPPSYTAGQRKLRMKQLEQVLSKKLEEVEGEISSYQDAIEIELENSRPKAKGGLASLAKDGSTEDTASSLCGEEDTEDEELEAAASHLNKDLYRELLGGAPGSSEAAGSPEWGGRPPALGSLLDPLPTAASLGISDSIRECISSQSSDPKDASGDGELDLSGIDDLEIDRYILNESEARVKAELWMRENAEYLREQREKEARIAKEKELGIYKEHKPKKSCKRREPIQASTAREAIEKMLEQKKISSKINYSVLRGLSSAGGGSPHREDAQPEHSASARKLSRRRTPASRSGADPVTSVGKRLRPLVSTQPAKKVATGEALLPSSPTLGAEPARPQAVLVESGPVSYHADEEADEEEPDEEDGEPCVSALQMMGSNDYGCDGDEDDGY

SEQ ID NO: 1572 - protein, 650 aa, Homo Sapiens
MTGRVCRGCGGTDIELDAARGDAVCTACGSVLEDNIIVSEVQFVESSGGGSSAVGQFVSLDGRRHIHHLGNQLQLNQHCLDTAFNFFKMAVSRHLTRGRKMAHVIAACLYLVCRTEGTPHMLLDLSDLLQVNVYVLGKTFLLLARELCINAPAIDPCLYIPRFAHLLEFGEKNHEVSMTALRLLQRMKRDWMHTGRRPSGLCGAALLVAARMHDFRRTVKEVISVVKVCESTLRKRLTEFEDTPTSQLTIDEFMKIDLEEECDPPSYTAGQRKLRMKQLEQVLSKKLEEVEGEISSYQDAIEIELENSRPKAKGGLASLAKDGSTEDTASSLCGEEDTEDEELEAAASHLNKDLYRELLGGAPGSSEAAGSPEWGGRPPALGSLLDPLPTAASLGISDSIRECISSQSSDPKDASGDGELDLSGIDDLEIDRYILNESEARVKAELWMRENAEYLREQREKEARIAKEKELGIYKEHKPKKSCKRREPIQASTAREAIEKMLEQKKISSKINYSVLRGLSSAGGGSPHREDAQPEHSASARKLSRRRTPASRSGADPVTSVGKRLRPLVSTQPAKKVATGEALLPSSPTLGAEPARPQAVLVESGPVSYHADEEADEEEPDEEDGEPCVSALQMMGSNDYGCDGDEDDGY

SEQ ID NO: 1573 - protein, 185 aa, Homo Sapiens
  misc_feature (1)..(1): Xaa can be any naturally occurring amino acid
XGQFVSLDGAGKTPTLGGGFHVNLGKESRAQTLQNDPCLYIPRFAHLLEFGEKNHEVSMTALRLLQRMKRDWMHTGRRPSGLCGAALLVAARMHDFRRTVKEVISVVKVCESTLRKRLTEFEDTPTSQLTIDEFMKIDLEEECDPPSYTAGQRKLRMKQLEQVLSKKLEEVEGEISSYQDAIEIE

SEQ ID NO: 1574 - protein, 761 aa, Homo Sapiens
MNWRFVELLYFLFIWGRISVQPSHQEPAGTDQHVSKEFDWLISDRGPFHHSRSYLSFVERHRQGFTTRYKIYREFARWKVRNTAIERRDLVRHPVPLMPEFQRSIRLLGRRPTTQQFIDTIIKKYGTHLLISATLGGEEALTMYMDKSRLDRKSGNATQSVEALHQLASSYFVDRDGTMRRLHEIQISTGAIKVTETRTGPLGCNSYDNLDSVSSVLLQSTESKLHLQGLQIIFPQYLQEKFVQSALSYIMCNGEGEYLCQNSQCRCQCAEEFPQCNCPITDIQIMEYTLANMAKSWAEAYKDLENSDEFKSFMKRLPSNHFLTIGSIHQHWGNDWDLQNRYKLLQSATEAQRQKIQRTARKLFGLSVRCRHNPNHQLPRERTIQQWLARVQSLLYCNENGFWGTFLESQRSCVCHGSTTLCQRPIPCVIGGNNSCAMCSLANISLCGSCNKGYKLYRGRCEPQNVDSERSEQFISFETDLDFQDLELKYLLQKMDSRLYVHTTFISNEIRLDTFFDPRWRKRMSLTLKSNKNRMDFIHMVIGMSMRICQMRNSSLDPMFFVYVNPFSGSHSEGWNMPFGEFGYPRWEKIRLQNSQCYNWTLLLGNRWKTFFETVHIYLRSRTRLPTLLRNETGQGPVDLSDPSKRQFYIKISDVQVFGYSLRFNADLLRSAVQQVNQSYTQGGQFYSSSSVMLLLLDIRDRINRLAPPVAPGKPQLDLFSCMLKHRLKLTNSEIIRVNHALDLYNTEILKQSDQMTAKLC

SEQ ID NO: 1575 - protein, 320 aa, Homo Sapiens
MNWRFVELLYFLFIWGRISVQPSHQEPAGTDQHVSKEFDWLISDRGPFHHSRSYLSFVERHRQGFTTRYKIYREFARWKVRNTAIERRDLVRHPVPLMPEFQRSIRLLGRRPTTQQFIDTIIKKYGTHLLISATLGGEEALTMYMDKSRLDRKSGNATQSVEALHQLASSYFVDRDGTMRRLHEIQISTGAIKVTETRTGPLGCNSYDNLDSVSSVLLQSTESKLHLQGLQIIFPQYLQEKFVQSALSYIMCNGEGEYLCQNSQCRCQCAEEFPQCNCPITDIQIMEYTLANMAKSWAEAYKDLENSGRESHSVPLHEWP

SEQ ID NO: 1576 - protein, 783 aa, Homo Sapiens
MRWQCGTRFRGLRPAVAPWTALLALGLPGWVLAVSATAAAVVPEQHASVAGQHPLDWLLTDRGPFHRAQEYADFMERYRQGFTTRYRIYREFARWKVNNLALERKDFFSLPLPLAPEFIRNIRLLGRRPNLQQVTENLIKKYGTHFLLSATLGGEESLTIFVDKQKLGRKTETTGGASIIGGSGNSTAVSLETLHQLAASYFIDRESTLRRLHHIQIATGAIKVTETRTGPLGCSNYDNLDSVSSVLVQSPENKVQLLGLQVLLPEYLRERFVAAALSYITCSSEGELVCKENDCWCKCSPTFPECNCPDADIQAMEDSLLQIQDSWATHNRQFEESEEFQALLKRLPDDRFLNSTAISQFWAMDTSLQHRYQQLGAGLKVLFKKTHRILRRLFNLCKRCHRQPRFRLPKERSLSYWWNRIQSLLYCGESTFPGTFLEQSHSCTCPYDQSSCQGPIPCALGEGPACAHCAPDNSTRCGSCNPGYVLAQGLCRPEVAESLENFLGLETDLQDLELKYLLQKQDSRIEVHSIFISNDMRLGSWFDPSWRKRMLLTLKSNKYKPGLVHVMLALSLQICLTKNSTLEPVMAIYVNPFGGSHSESWFMPVNEGSFPDWERTNVDAAAQCQNWTITLGNRWKTFFETVHVYLRSRIKSLDDSSNETIYYEPLEMTDPSKNLGYMKINTLQVFGYSLPFDPDAIRDLILQLDYPYTQGSQDSALLQLIELRDRVNQLSPPGKVRLDLFSCLLRHRLKLANNEVGRIQSSLRAFNSKLPNPVEYETGKLCS

SEQ ID NO: 1577 - protein, 28 aa, Homo Sapiens
MIWRSRAGAELFSLMALWEWIALSLHCW

SEQ ID NO: 1578 - protein, 158 aa, Homo Sapiens
MIWRSRAGAELFSLMALWEWIALSLHCWVLAVAAVSDQHATSPFDWLLSDKGPFHRSQEYTDFVDRSRQGFSTRYKIYREFGRWKVNNLAVERRNFLGSPLPLAPEFFRNIRLLGRRPTLQQITENLIKKYGTHFLLSATLGGEESLTIFVDKRKLSK

SEQ ID NO: 1579 - protein, 766 aa, Homo Sapiens
MIWRSRAGAELFSLMALWEWIALSLHCWVLAVAAVSDQHATSPFDWLLSDKGPFHRSQEYTDFVDRSRQGFSTRYKIYREFGRWKVNNLAVERRNFLGSPLPLAPEFFRNIRLLGRRPTLQQITENLIKKYGTHFLLSATLGGEESLTIFVDKRKLSKRAEGSDSTTNSSSVTLETLHQLAASYFIDRDSTLRRLHHIQIASTAIKVTETRTGPLGCSNYDNLDSVSSVLVQSPENKIQLQGLQVLLPDYLQERFVQAALSYIACNSEGEFICKENDCWCHCGPKFPECNCPSMDIQAMEENLLRITETWKAYNSDFEESDEFKLFMKRLPMNYFLNTSTIMHLWTMDSNFQRRYEQLENSMKQLFLKAQKIVHKLFSLSKRCHKQPLISLPRQRTSTYWLTRIQSFLYCNENGLLGSFSEETHSCTCPNDQVVCTAFLPCTVGDASACLTCAPDNRTRCGTCNTGYMLSQGLCKPEVAESTDHYIGFETDLQDLEMKYLLQKTDRRIEVHAIFISNDMRLNSWFDPSWRKRMLLTLKSNKYKSSLVHMILGLSLQICLTKNSTLEPVLAVYVNPFGGSHSESWFMPVNENSFPDWERTKLDLPLQCYNWTLTLGNKWKTFFETVHIYLRSRIKSNGPNGNESIYYEPLEFIDPSRNLGYMKINNIQVFGYSMHFDPEAIRDLILQLDYPYTQGSQDSALLQLLEIRDRVNKLSPPGQRRLDLFSCLLRHRLKLSTSEVVRIQSALQAFNAKLPNTMDYDTTKLCS

SEQ ID NO: 1580 - protein, 385 aa, Homo Sapiens
MAAALFVLLGFALLGTHGASGAAGFVQAPLSQQRWVGGSVELHCEAVGSPVPEIQWWFEGQGPNDTCSQLWDGARLDRVHIHATYHQHAASTISIDTLVEEDTGTYECRASNDPDRNHLTRAPRVKWVRAQAVVLVLEPGTVFTTVEDLGSKILLTCSLNDSATEVTGHRWLKGGVVLKEDALPGQKTEFKVDSDDQWGEYSCVFLPEPMGTANIQLHGPPRVKAVKSSEHINEGETAMLVCKSESVPPVTDWAWYKITDSEDKALMNGSESRFFVSSSQGRSELHIENLNMEADPGQYRCNGTSSKGSDQAIITLRVRSHLAALWPFLGIVAEVLVLVTIIFIYEKRRKPEDVLDDDDAGSAPLKSSGQHQNDKGKNVRQRNSS

SEQ ID NO: 1581 - protein, 55 aa, Homo Sapiens
MAAALFVLLGFALLGTHGASGAAGTVFTTVEDLGSKILLTCSLNDSATEQRAAPE

SEQ ID NO: 1582 - protein, 132 aa, Homo Sapiens
MAAALFVLLGFALLGTHGASGAAGTVFTTVEDLGSKILLTCSLNDSATEVTGHRWLKGGVVLKEDALPGQKTEFKAPTRPSSRSACAATWPPSGPSWASWLRCWCWSPSSSSTRSAGSPRTSWMMTTPALHP

SEQ ID NO: 1583 - protein, 269 aa, Homo Sapiens
MAAALFVLLGFALLGTHGASGAAGTVFTTVEDLGSKILLTCSLNDSATEVTGHRWLKGGVVLKEDALPGQKTEFKVDSDDQWGEYSCVFLPEPMGTANIQLHGPPRVKAVKSSEHINEGETAMLVCKSESVPPVTDWAWYKITDSEDKALMNGSESRFFVSSSQGRSELHIENLNMEADPGQYRCNGTSSKGSDQAIITLRVRSHLAALWPFLGIVAEVLVLVTIIFIYEKRRKPEDVLDDDDAGSAPLKSSGQHQNDKGKNVRQRNSS

SEQ ID NO: 1584 - protein, 161 aa, Homo Sapiens [sequence omitted]

SEQ ID NO: 1585 - protein, 189 aa, Homo Sapiens
MAAALFVLLGFALLGTHGASGAGPPRVKAVKSSEHINEGETAMLVCKSESVPPVTDWAWYKITDSEDKALMNGSESRFFVSSSQGRSELHIENLNMEADPGQYRCNGTSSKGSDQAIITLRVRSHLAALWPFLGIVAEVLVLVTIIFIYEKRRKPEDVLDDDDAGSAPLKSSGQHQNDKGKNVRQRNSS

SEQ ID NO: 1586 - protein, 221 aa, Homo Sapiens
MAAALFVLLGFALLGTHGASGAVFTTVEDLGSKILLTCSLNDSATEVTGHRWLKGGVVLKEDALPGQKTEFKVDSDDQWGEYSCVFLPEPMGTANIQLHGPPRVKAVKSSEHINEGETAMLVCKSESVPPVTDWAWYKITDSEDKALMNGSESRFFVSSSQGRSELHIENLNMEADPGQYRCNGTSSKGSDQAIITLRVRSHLAALWPFLGIVAEVLVLVT

SEQ ID NO: 1587 - protein, 52 aa, Homo Sapiens
MGTANIQLHGPPRVKAVKSSEHINEGETAMLVCKSESVPPVTDWAWYKITDS

SEQ ID NO: 1588 - protein, 84 aa, Homo Sapiens
MGTANIQLHGPPRVKAVKSSEHINEGETAMLVCKSESVPPVTDWAWYKITDSEDKALMNGSESRFFVSSSQGRSELHIENLNME

SEQ ID NO: 1589 - protein, 176 aa, Homo Sapiens
MGTANIQLHGPPRVKAVKSSEHINEGETAMLVCKSESVPPVTDWAWYKITDSEDKALMNGSESRFFVSSSQGRSELHIENLNMEADPGQYRCNGTSSKGSDQAIITLRVRSHLAALWPFLGIVAEVLVLVTIIFIYEKRRKPEDVLDDDDAGSAPLKSSGQHQNDKGKNVRQRNSS

SEQ ID NO: 1590 - protein, 205 aa, Homo Sapiens
MKQSDASPQERVDSDDQWGEYSCVFLPEPMGTANIQLHGPPRVKAVKSSEHINEGETAMLVCKSESVPPVTDWAWYKITDSEDKALMNGSESRFFVSSSQGRSELHIENLNMEADPGQYRCNGTSSKGSDQAIITLRVRSHLAALWPFLGIVAEVLVLVTIIFIYEKRRKPEDVLDDDDAGSAPLKSSGQHQNDKGKNVRQRNSS

SEQ ID NO: 1591 - protein, 132 aa, Homo Sapiens
MGSLMLLFVETTRNSSACIFPVILNELSSTVETITHFPEVTDGECVFPFHYKNGTYYDCIKSKARHKWCSLNKTYEGYWKFCSAEDFANCVFPFWYRRLIYWECTDDGEAFGKKWCSLTKNFNKDRIWKYCE

SEQ ID NO: 1592 - protein, 155 aa, Homo Sapiens
GLDYQSCPTSEDCENNPVDSFWKRASIQYSKDSSGVIHVMLNGSEPTGAYPIKGFFADYEIPNLQKEKITRIEIWVMHEIGGPNVESCGEGSMKVLEKRLKDMGFQYSCINDYRPVKLLQCVDHSTHPDCALKSPKRLCGTLGVRPRAEPYNRRF

SEQ ID NO: 1593 - protein, 318 aa, Homo Sapiens
MAAQGCAASRLLQLLLQLLLLLLLLAAGGARARWRGEGTSAHLRDIFLGRCAEYRALLSPEQRNKNCTAIWEAFKVALDKDPCSVLPSDYDLFINLSRHSIPRDKSLFWENSHLLVNSFADNTRRFMPLSDVLYGRVADFLSWCRQKNDSGLDYQSCPTSEDCENNPVDSFWKRASIQYSKDSSGVIHVMLNGSEPTGAYPIKGFFADYEIPNLQKEKITRIEIWVMHEIGGPNVESCGEGSMKVLEKRLKDMGFQYSCINDYRPVKLLQCVDHSTHPDCALKSAAAATQRKAPSLYTEQRAGLIIPLFLVLASRTQL

SEQ ID NO: 1594 - protein, 333 aa, Homo Sapiens
MAAQGCAASRLLQLLLQLLLLLLLLAAGGARARWRGEGTSAHLRDIFLGRCAEYRALLSPEQRQIRNSREPPVLHTTQNKNCTAIWEAFKVALDKDPCSVLPSDYDLFINLSRHSIPRDKSLFWENSHLLVNSFADNTRRFMPLSDVLYGRVADFLSWCRQKNDSGLDYQSCPTSEDCENNPVDSFWKRASIQYSKDSSGVIHVMLNGSEPTGAYPIKGFFADYEIPNLQKEKITRIEIWVMHEIGGPNVESCGEGSMKVLEKRLKDMGFQYSCINDYRPVKLLQCVDHSTHPDCALKSAAAATQRKAPSLYTEQRAGLIIPLFLVLASRTQL

SEQ ID NO: 1595 - protein, 97 aa, Homo Sapiens
  misc_feature (1)..(1): Xaa can be any naturally occurring amino acid
XSEPTGAYPIKGFFADYEIPNLQKEKITRIEIWVMHEIGGPNVESCGEGSMKVLEKRLKDMGFQYSCINDYRPVKLLQCVDHSTHPDCALKSKLWEP

SEQ ID NO: 1596 - protein, 186 aa, Homo Sapiens
  misc_feature (1)..(1): Xaa can be any naturally occurring amino acid
XSLFWENSHLLVNSFADNTRRFMPLSDVLYGRVADFLSWCRQKNDSGLDYQSCPTSEDCENNPVDSFWKRASIQYSKDSSGVIHVMLNGSEPTGAYPIKGFFADYEIPNLQKEKITRIEIWVMHEIGGPNVESCGEGSMKVLEKRLKDMGFQYSCINDYRPVKLLQCVDHSTHPDCALKSDGVSPC

SEQ ID NO: 1597 - protein, 478 aa, Homo Sapiens
MPRRGYSKPGSWGSFWAMLTLVGLVTHAAQRADVGGEAAGTSINHSQAVLQRLQELLRQGNASDVVLRVQAAGTDEVRVFHAHRLLLGLHSELFLELLSNQSEAVLQEPQDCAAVFDKFIRYLYCGELTVLLTQAIPLHRLATKYGVSSLQRGVADYMRAHLAGGAGPAVGWYHYAVGTGDEALRESCLQFLAWNLSAVAASTEWGAVSPELLWQLLQRSDLVLQDELELFHALEAWLGRARPPPAVAERALRAIRYPMIPPAQLFQLQARSAALARHGPAVADLLLQAYQFHAASPLHYAKFFDVNGSAFLPRNYLAPAWGAPWVINNPARDDRSTSFQTQLGPSGHDAGRRVTWNVLFSPRWLPVSLRPVYADAAGTALPAARPEDGRPRLVVTPASSGGDAAGVSFQKTVLVGARQQGRLLVRHAYSFHQSSEEAGDFLAHADLQRRNSEYLVENALHLHLIVKPVYHTLIRTPK

SEQ ID NO: 1598 - protein, 179 aa, Homo Sapiens
MAHAHIQGGRRAKSRFVVCIMSGARSKLALFLCGCYVVALGAHTGEESVADHHEAEYYVAAVYEHPSILSLNPLALISRQEALELMNQNLDIYEQQVMTAAQKDVQIIVFPEDGIHGFNFTRTSIYPFLDFMPSPQVVRWNPCLEPHRFNDTEVIPAFFLSRLRVHRGDLSQGPEAVTC

SEQ ID NO: 1599 - protein, 543 aa, Homo Sapiens
MAHAHIQGGRRAKSRFVVCIMSGARSKLALFLCGCYVVALGAHTGEESVADHHEAEYYVAAVYEHPSILSLNPLALISRQEALELMNQNLDIYEQQVMTAAQKDVQIIVFPEDGIHGFNFTRTSIYPFLDFMPSPQVVRWNPCLEPHRFNDTEVLQRLSCMAIRGDMFLVANLGTKEPCHSSDPRCPKDGRYQFNTNVVFSNNGTLVDRYRKHNLYFEAAFDVPLKVDLITFDTPFAGRFGIFTCFDILFFDPAIRVLRDYKVKHVVYPTAWMNQLPLLAAIEIQKAFAVAFGINVLAANVHHPVLGMTGSGIHTPLESFWYHDMENPKSHLIIAQVAKNPVGLIGAENATGETDPSHSKFLKILSGDPYCEKDAQEVHCDEATKWNVNAPPTFHSEMMYDNFTLVPVWGKEGYLHVCSNGLCCYLLYERPTLSKELYALGVFDGLHTVHGTYYIQVCALVRCGGLGFDTCGQEITEATGIFEFHLWGNFSTSYIFPLFLTSGMTLEVPDQLGWENDHYFLRKSRLSSGLVTAALYGRLYERD

SEQ ID NO: 1600 - protein, 545 aa, Homo Sapiens
MARKETQLIIKMNHLARFVVCIMSGARSKLALFLCGCYVVALGAHTGEESVADHHEAEYYVAAVYEHPSILSLNPLALISRQEALELMNQNLDIYEQQVMTAAQKDVQIIVFPEDGIHGFNFTRTSIYPFLDFMPSPQVVRWNPCLEPHRFNDTEVLQRLSCMAIRGDMFLVANLGTKEPCHSSDPRCPKDGRYQFNTNVVFSNNGTLVDRYRKHNLYFEAAFDVPLKVDLITFDTPFAGRFGIFTCFDILFFDPAIRVLRDYKVKHVVYPTAWMNQLPLLAAIEIQKAFAVAFGINVLAANVHHPVLGMTGSGIHTPLESFWYHDMENPKSHLIIAQVAKNPVGLIGAENATGETDPSHSKFLKILSGDPYCEKDAQEVHCDEATKWNVNAPPTFHSEMMYDNFTLVPVWGKEGYLHVCSNGLCCYLLYERPTLSKELYALGVFDGLHTVHGTYYIQVCALVRCGGLGFDTCGQEITEATGIFEFHLWGNFSTSYIFPLFLTSGMTLEVPDQLGWENDHYFLRKSRLSSGLVTAALYGRLYERD

SEQ ID NO: 1601 - protein, 545 aa, Homo Sapiens
MPEGGGTSRRLLPMQSRFVVCIMSGARSKLALFLCGCYVVALGAHTGEESVADHHEAEYYVAAVYEHPSILSLNPLALISRQEALELMNQNLDIYEQQVMTAAQKDVQIIVFPEDGIHGFNFTRTSIYPFLDFMPSPQVVRWNPCLEPHRFNDTEVLQRLSCMAIRGDMFLVANLGTKEPCHSSDPRCPKDGRYQFNTNVVFSNNGTLVDRYRKHNLYFEAAFDVPLKVDLITFDTPFAGRFGIFTCFDILFFDPAIRVLRDYKVKHVVYPTAWMNQLPLLAAIEIQKAFAVAFGINVLAANVHHPVLGMTGSGIHTPLESFWYHDMENPKSHLIIAQVAKNPVGLIGAENATGETDPSHSKFLKILSGDPYCEKDAQEVHCDEATKWNVNAPPTFHSEMMYDNFTLVPVWGKEGYLHVCSNGLCCYLLYERPTLSKELYALGVFDGLHTVHGTYYIQVCALVRCGGLGFDTCGQEITEATGIFEFHLWGNFSTSYIFPLFLTSGMTLEVPDQLGWENDHYFLRKSRLSSGLVTAALYGRLYERD

SEQ ID NO: 1602 - protein, 159 aa, Homo Sapiens
MSGARSKLALFLCGCYVVALGAHTGEESVADHHEAEYYVAAVYEHPSILSLNPLALISRQEALELMNQNLDIYEQQVMTAAQKDVQIIVFPEDGIHGFNFTRTSIYPFLDFMPSPQVVRWNPCLEPHRFNDTEVIPAFFLSRLRVHRGDLSQGPEAVTC

SEQ ID NO: 1603 - protein, 251 aa, Homo Sapiens
MSGARSKLALFLCGCYVVALGAHTGEESVADHHEAEYYVAAVYEHPSILSLNPLALISRQEALELMNQNLDIYEQQVMTAAQKDVQIIVFPEDGIHGFNFTRTSIYPFLDFMPSPQVVRWNPCLEPHRFNDTEVLQRLSCMAIRGDMFLVANLGTKEPCHSSDPRCPKDGRYQFNTNVVFSNNGTLVDRYRKHNLYFEAAFDVPLKVDLITFDTPFAGRFGIFTCFDILFFDPAIRVLRDYKVKHVVYPTA

SEQ ID NO: 1604 - protein, 523 aa, Homo Sapiens
MSGARSKLALFLCGCYVVALGAHTGEESVADHHEAEYYVAAVYEHPSILSLNPLALISRQEALELMNQNLDIYEQQVMTAAQKDVQIIVFPEDGIHGFNFTRTSIYPFLDFMPSPQVVRWNPCLEPHRFNDTEVLQRLSCMAIRGDMFLVANLGTKEPCHSSDPRCPKDGRYQFNTNVVFSNNGTLVDRYRKHNLYFEAAFDVPLKVDLITFDTPFAGRFGIFTCFDILFFDPAIRVLRDYKVKHVVYPTAWMNQLPLLAAIEIQKAFAVAFGINVLAANVHHPVLGMTGSGIHTPLESFWYHDMENPKSHLIIAQVAKNPVGLIGAENATGETDPSHSKFLKILSGDPYCEKDAQEVHCDEATKWNVNAPPTFHSEMMYDNFTLVPVWGKEGYLHVCSNGLCCYLLYERPTLSKELYALGVFDGLHTVHGTYYIQVCALVRCGGLGFDTCGQEITEATGIFEFHLWGNFSTSYIFPLFLTSGMTLEVPDQLGWENDHYFLRKSRLSSGLVTAALYGRLYERD

SEQ ID NO: 1605 - protein, 523 aa, Homo Sapiens; identical to SEQ ID NO: 1604

SEQ ID NO: 1606 - protein, 523 aa, Homo Sapiens; identical to SEQ ID NO: 1604

SEQ ID NO: 1607 - protein, 523 aa, Homo Sapiens; identical to SEQ ID NO: 1604

SEQ ID NO: 1608 - protein, 56 aa, Homo Sapiens
FIIFMAVSICCIKKLQREKKILSGEKKVEQEEKEIAQQLQEELRWRRTFLHAGECL

SEQ ID NO: 1609 - protein, 96 aa, Homo Sapiens
MEPAAALHFSLPASLLLLLLLLLLSLCALVSAQFTVVGPANPILAMVGENTTLRCHLSPEKNAEDMEVRWFRSQFSPAVFVYKGGRERTEEQMEEY

SEQ ID NO: 1610 - protein, 256 aa, Homo Sapiens
MEPAAALHFSLPASLLLLLLLLLLSLCALVSAQFTVVGPANPILAMVGENTTLRCHLSPEKNAEDMEVRWFRSQFSPAVFVYKGGRERTEEQMEEYRGRITFVSKDINRGSVALVIHNVTAQENGIYRCYFQEGRSYDEAILRLVVAESFMPSASPWMVALAVILTASPWMVSMTVILAVFIIFMAVSICCIKKLQREKKILSGEKKVEQEEKEIAQQLQEELRWRRTFLHAGYELPGIRGPSWKRPLHGEPPSAF

SEQ ID NO: 1611 - protein, 239 aa, Homo Sapiens
MEPAAALHFSLPASLLLLLLLLLLSLCALVSAQFTVVGPANPILAMVGENTTLRCHLSPEKNAEDMEVRWFRSQFSPAVFVYKGGRERTEEQMEEYRGRITFVSKDINRGSVALVIHNVTAQENGIYRCYFQEGRSYDEAILRLVVAGLGSKPLIEIKAQEDGSIWLECISGGWYPEPLTVWRDPYGEVVPALKEVSIADADGLFMVTTAVIIRDKYVRNVSCSVNNTLLGQEKETVIF

SEQ ID NO: 1612 - protein, 523 aa, Homo Sapiens
MEPAAALHFSLPASLLLLLLLLLLSLCALVSAQFTVVGPANPILAMVGENTTLRCHLSPEKNAEDMEVRWFRSQFSPAVFVYKGGRERTEEQMEEYRGRITFVSKDINRGSVALVIHNVTAQENGIYRCYFQEGRSYDEAILRLVVAGLGSKPLIEIKAQEDGSIWLECISGGWYPEPLTVWRDPYGEVVPALKEVSIADADGLFMVTTAVIIRDKYVRNVSCSVNNTLLGQEKETVIFIPESFMPSASPWMVALAVILTASPWMVSMTVILAVFIIFMAVSICCIKKLQREKKILSGEKKVEQEEKEIAQQLQEELRWRRTFLHAADVVLDPDTAHPELFLSEDRRSVRRGPYRQRVPDNPERFDSQPCVLGWESFASGKHYWEVEVENVMVWTVGVCRHSVERKGEVLLIPQNGFWTLEMFGNQYRALSSPERILPLKESLCRVGVFLDYEAGDVSFYNMRDRSHIYTCPRSAFTVPVRPFFRLGSDDSPIFICPALTGASGVMVPEEGLKLHRVGTHQSL

SEQ ID NO: 1613 - protein, 336 aa, Homo Sapiens
MEPAAALHFSLPASLLLLLLLLLLSLCALVSAQFTVVGPANPILAMVGENTTLRCHLSPEKNAEDMEVRWFRSQFSPAVFVYKGGRERTEEQMEEYRGRITFVSKDINRGSVALVIHNVTAQENGIYRCYFQEGRSYDEAILRLVVAGLGSKPLIEIKAQEDGSIWLECISGGWYPEPLTVWRDPYGEVVPALKEVSIADADGLFMVTTAVIIRDKYVRNVSCSVNNTLLGQEKETVIFIPESFMPSASPWMVALAVILTASPWMVSMTVILAVFIIFMAVSICCIKKLQREKKILSGEKKVEQEEKEIAQQLQEELRWRRTFLHADVNLTGLRNT

SEQ ID NO: 1614 - protein, 523 aa, Homo Sapiens; identical to SEQ ID NO: 1612

SEQ ID NO: 1615 - protein, 313 aa, Homo Sapiens
MEPAAALHFSLPASLLLLLLLLLLSLCALVSESFMPSASPWMVALAVILTASPWMVSMTVILAVFIIFMAVSICCIKKLQREKKILSGEKKVEQEEKEIAQQLQEELRWRRTFLHAADVVLDPDTAHPELFLSEDRRSVRRGPYRQRVPDNPERFDSQPCVLGWESFASGKHYWEVEVENVMVWTVGVCRHSVERKGEVLLIPQNGFWTLEMFGNQYRALSSPERILPLKESLCRVGVFLDYEAGDVSFYNMRDRSHIYTCPRSAFTVPVRPFFRLGSDDSPIFICPALTGASGVMVPEEGLKLHRVGTHQSL

SEQ ID NO: 1616 - protein, 110 aa, Homo Sapiens
MEPAAALHFSLPASLLLLLLLLLLSLCALVSGLGSKPLIEIKAQEDGSIWLECISGGWYPEPLTVWRDPYGEVVPALKEVSIADADGLFMVTTAVIIRDKYVRNVSCSVN

SEQ ID NO: 1617 - protein, 184 aa, Homo Sapiens
MEPAAALHFSLPASLLLLLLLLLLSLCALVSGLGSKPLIEIKAQEDGSIWLECISGGWYPEPLTVWRDPYGEVVPALKEVSIADADGLFMVTTAVIIRDKYVRNVSCSVNNTLLGQEKETVIFIPESFMPSASPWMVALAVILTASPWMVSMTVILAVFIIFMAVSICCIKKLQREKKILSGEK

SEQ ID NO: 1618 - protein, 407 aa, Homo Sapiens
MEPAAALHFSLPASLLLLLLLLLLSLCALVSGLGSKPLIEIKAQEDGSIWLECISGGWYPEPLTVWRDPYGEVVPALKEVSIADADGLFMVTTAVIIRDKYVRNVSCSVNNTLLGQEKETVIFIPESFMPSASPWMVALAVILTASPWMVSMTVILAVFIIFMAVSICCIKKLQREKKILSGEKKVEQEEKEIAQQLQEELRWRRTFLHAADVVLDPDTAHPELFLSEDRRSVRRGPYRQRVPDNPERFDSQPCVLGWESFASGKHYWEVEVENVMVWTVGVCRHSVERKGEVLLIPQNGFWTLEMFGNQYRALSSPERILPLKESLCRVGVFLDYEAGDVSFYNMRDRSHIYTCPRSAFTVPVRPFFRLGSDDSPIFICPALTGASGVMVPEEGLKLHRVGTHQSL

SEQ ID NO: 1619 - protein, 39 aa, Homo Sapiens
MEPAAALHFSLPASLLLLLLLLLLSLCALVSVLPRSVCV

SEQ ID NO: 1620 - protein, 80 aa, Homo Sapiens
MVTTAVIIRDKYVRNVSCSVNNTLLGQEKETVIFIPESFMPSASPWMVALAVILTASPWMVSMTVILAVFIIFMAVSICC

SEQ ID NO: 1621 - protein, 237 aa, Homo Sapiens
MVTTAVIIRDKYVRNVSCSVNNTLLGQEKETVIFIPESFMPSASPWMVALAVILTASPWMVSMTVILAVFIIFMAVSICCIKKLQREKKILSGEKKVEQEEKEIAQQLQEELRWRRTFLHAADVVLDPDTAHPELFLSEDRRSVRRGPYRQRVPDNPERFDSQPCVLGWESFASGKHYWEVEVENVMVWTVGVCRHSVERKGEVLLIPQNGFWTLEMFGNQYRALSSPERILPLKES

SEQ ID NO: 1622 - protein, 43 aa, Homo Sapiens
MKMASFLAFLLLNFRVCLLLLQLLMPHSAQFSVLGPSGPILAM

SEQ ID NO: 1623 - protein, 92 aa, Homo Sapiens
MKMASFLAFLLLNFRVCLLLLQLLMPHSAQFSVLGPSGPILAMVGEDADLPCHLFPTMSAETMELKWVSSSLRQVVNVYADGKEVEDRQSAP

SEQ ID NO: 1624 - protein, 119 aa, Homo Sapiens
MKMASFLAFLLLNFRVCLLLLQLLMPHSAQFSVLGPSGPILAMVGEDADLPCHLFPTMSAETMELKWVSSSLRQVVNVYADGKEVEDRQSAPYRGRTSILRDGITAGKAALRIHNVTAS

SEQ ID NO: 1625 - protein, 513 aa, Homo Sapiens
MKMASFLAFLLLNFRVCLLLLQLLMPHSAQFSVLGPSGPILAMVGEDADLPCHLFPTMSAETMELKWVSSSLRQVVNVYADGKEVEDRQSAPYRGRTSILRDGITAGKAALRIHNVTASDSGKYLCYFQDGDFYEKALVELKVAALGSDLHVDVKGYKDGGIHLECRSTGWYPQPQIQWSNNKGENIPTVEAPVVADGVGLYAVAASVIMRGSSGEGVSCTIRSSLLGLEKTASISIADPFFRSAQRWIAALAGTLPVLLLLLGGAGYFLWQQQEEKKTQFRKKKREQELREMAWSTMKQEQSTRVKLLEELRWRSIQYASRGERHSAYNEWKKALFKPADVILDPKTANPILLVSEDQRSVQRAKEPQDLPDNPERFNWHYCVLGCESFISGRHYWEVEVGDRKEWHIGVCSKNVQRKGWVKMTPENGFWTMGLTDGNKYRTLTEPRTNLKLPKPPKKVGVFLDYETGDISFYNAVDGSHIHTFLDVSFSEALYPVFRILTLEPTALTICPA

SEQ ID NO: 1626 - protein, 352 aa, Homo Sapiens
MKMASFLAFLLLNFRVCLLLLQLLMPHSAQFSVLGPSGPILAMVGEDADLPCHLFPTMSAETMELKWVSSSLRQVVNVYADGKEVEDRQSAPYRGRTSILRDGITAGKAALRIHNVTASDSGKYLCYFQDGDFYEKALVELKVAALGSDLHVDVKGYKDGGIHLECRSTGWYPQPQIQWSNNKGENIPTVEAPVVADGVGLYAVAASVIMRGSSGEGVSCTIRSSLLGLEKTASISIADPFFRSAQRWIAALAGTLPVLLLLLGGAGYFLWQQQEEKKTQFRKKKREQELREMAWSTMKQEQSTRVKLLEELRWRSIQYASRGERHSAYNEWKKALFKPGEEMLQMRLHFVK

SEQ ID NO: 1627 - protein, 378 aa, Homo Sapiens
MKMASFLAFLLLNFRVCLLLLQLLMPHSAQFSVLGPSGPILAMVGEDADLPCHLFPTMSAETMELKWVSSSLRQVVNVYADGKEVEDRQSAPYRGRTSILRDGITAGKAALRIHNVTASDSGKYLCYFQDGDFYEKALVELKVAALGSDLHVDVKGYKDGGIHLECRSTGWYPQPQIQWSNNKGENIPTVEAPVVADGVGLYAVAASVIMRGSSGEGVSCTIRSSLLGLEKTASISIADPFFRSAQRWIAALAGTLPVLLLLLGGAGYFLWQQQEEKKTQFRKKKREQELREMAWSTMKQEQSTRVKLLEELRWRSIQYASRGERHSAYNEWKKALFKPGPPIGQTQQQTRGQGSPVALSQESAQRTDSWGPEEGGES

SEQ ID NO: 1628 - protein, 461 aa, Homo Sapiens
MKMASFLAFLLLNFRVCLLLLQLLMPHSAQFSVLGPSGPILAMVGEDADLPCHLFPTMSAETMELKWVSSSLRQVVNVYADGKEVEDRQSAPYRGRTSILRDGITAGKAALRIHNVTASDSGKYLCYFQDGDFYEKALVELKVADGVGLYAVAASVIMRGSSGEGVSCTIRSSLLGLEKTASISIADPFFRSAQRWIAALAGTLPVLLLLLGGAGYFLWQQQEEKKTQFRKKKREQELREMAWSTMKQEQSTRVKLLEELRWRSIQYASRGERHSAYNEWKKALFKPADVILDPKTANPILLVSEDQRSVQRAKEPQDLPDNPERFNWHYCVLGCESFISGRHYWEVEVGDRKEWHIGVCSKNVQRKGWVKMTPENGFWTMGLTDGNKYRTLTEPRTNLKLPKPPKKVGVFLDYETGDISFYNAVDGSHIHTFLDVSFSEALYPVFRILTLEPTALTICPA

SEQ ID NO: 1629 - protein, 311 aa, Homo Sapiens
MGIPRAQFSVLGPSGPILAMVGEDADLPCHLFPTMSAETMELKWVSSSLRQVVNVYADGKEVEDRQSAPYRGRTSILRDGITAGKAALRIHNVTASDSGKYLCYFQDGDFYEKALVELKVAALGSNLHVEVKGYEDGGIHLECRSTGWYPQPQIQWSNAKGENIPAVEAPVVADGVGLYEVAASVIMRGGSGEGVSCIIRNSLLGLEKTASISIADPFFRSAQPWIAALAGTLPILLLLLAGASYFLWRQQKEITALSSEIESEQEMKEMGYAATEREISLRESLQEELKRKKIQYLTRGEESSSDTNKSA

SEQ ID NO: 1630 - protein, 334 aa, Homo Sapiens
MKMASSLAFLLLNFHVSLLLVQLLTPCSAQFSVLGPSGPILAMVGEDADLPCHLFPTMSAETMELKWVSSSLRQVVNVYADGKEVEDRQSAPYRGRTSILRDGITAGKAALRIHNVTASDSGKYLCYFQDGDFYEKALVELKVAALGSNLHVEVKGYEDGGIHLECRSTGWYPQPQIQWSNAKGENIPAVEAPVVADGVGLYEVAASVIMRGGSGEGVSCIIRNSLLGLEKTASISIADPFFRSAQPWIAALAGTLPILLLLLAGASYFLWRQQKEITALSSEIESEQEMKEMGYAATEREISLRESLQEELKRKKIQYLTRGEESSSDTNKSA

SEQ ID NO: 1631 - protein, 334 aa, Homo Sapiens; identical to SEQ ID NO: 1630

SEQ ID NO: 1632 - protein, 334 aa, Homo Sapiens; identical to SEQ ID NO: 1630

SEQ ID NO: 1633 - protein, 334 aa, Homo Sapiens; identical to SEQ ID NO: 1630

SEQ ID NO: 1634 - protein, 160 aa, Homo Sapiens
MKMASSLAFLLLNFHVSLLLVQLLTPCSAQFSVLGPSGPILAMVGEDADLPCHLFPTMSAETMELKWVSSSLRQVVNVYADGKEVEDRQSAPYRGRTSILRDGITAGKAALRIHNVTASDSGKYLCYFQDGDFYEKALVELKVADPFFRSAQPWIAALAG

SEQ ID NO: 1635 - protein, 43 aa, Homo Sapiens
MKMASSLAFLLLNFHVSLLLVQLLTPCSGLCSPLGSLYLAFPV

SEQ ID NO: 1636 - protein, 115 aa, Homo Sapiens
MVGEDADLPCHLFPTMSAETMELKWVSSSLRQVVNVYADGKEVEDRQSAPYRGRTSILRDGITAGKAALRIHNVTASDSGKYLCYFQDGDFYEKALVELKVAALGSNLHVEVKGY

SEQ ID NO: 1637 - protein, 196 aa, Homo Sapiens
MVGEDADLPCHLFPTMSAETMELKWVSSSLRQVVNVYADGKEVEDRQSAPYRGRTSILRDGITAGKAALRIHNVTASDSGKYLCYFQDGDFYEKALVELKVAALGSNLHVEVKGYEDGGIHLECRSTGWYPQPQIQWSNAKGENIPAVEAPVVADGVGLYEVAASVIMRGGSGEGVSCIIRNSLLGLEKTASISIA

SEQ ID NO: 1638 - protein, 292 aa, Homo Sapiens
MVGEDADLPCHLFPTMSAETMELKWVSSSLRQVVNVYADGKEVEDRQSAPYRGRTSILRDGITAGKAALRIHNVTASDSGKYLCYFQDGDFYEKALVELKVAALGSNLHVEVKGYEDGGIHLECRSTGWYPQPQIQWSNAKGENIPAVEAPVVADGVGLYEVAASVIMRGGSGEGVSCIIRNSLLGLEKTASISIADPFFRSAQPWIAALAGTLPILLLLLAGASYFLWRQQKEITALSSEIESEQEMKEMGYAATEREISLRESLQEELKRKKIQYLTRGEESSSDTNKSA

SEQ ID NO: 1639 - protein, 115 aa, Homo Sapiens
RGGSGEGVSCIIRNSLLGLEKTASISIADPFFRSAQPWIAALAGTLPILLLLLAGASYFLWRQQKEITALSSEIESEQEMKEMGYAATEREISLRESLQEELKRKKIQYLTREWL

SEQ ID NO: 1640 - protein, 138 aa, Homo Sapiens
MKMASSLAFLLLNFHVSLFLVQLLTPCSAQFSVLGPSGPILAMVGEDADLPCHLFPTMSAETMELRWVSSSLRQVVNVYADGKEVEDRQSAPYRGRTSILRDGITAGKAALRIHNVTASDSGKYLCYFQDGDFYEKAL

SEQ ID NO: 1641 - protein, 238 aa, Homo Sapiens
MKMASSLAFLLLNFHVSLFLVQLLTPCSAQFSVLGPSGPILAMVGEDADLPCHLFPTMSAETMELRWVSSSLRQVVNVYADGKEVEDRQSAPYRGRTSILRDGITAGKAALRIHNVTASDSGKYLCYFQDGDFYEKALVELKVAALGSDLHIEVKGYEDGGIHLECRSTGWYPQPQIKWSDTKGENIPAVEAPVVADGVGLYAVAASVIMRGSSGGGVSCIIRNSLLGLEKTASISIA

SEQ ID NO: 1642 - protein, 584 aa, Homo Sapiens
MKMASSLAFLLLNFHVSLFLVQLLTPCSAQFSVLGPSGPILAMVGEDADLPCHLFPTMSAETMELRWVSSSLRQVVNVYADGKEVEDRQSAPYRGRTSILRDGITAGKAALRIHNVTASDSGKYLCYFQDGDFYEKALVELKVAALGSDLHIEVKGYEDGGIHLECRSTGWYPQPQIKWSDTKGENIPAVEAPVVADGVGLYAVAASVIMRGSSGGGVSCIIRNSLLGLEKTASISIADPFFRSAQPWIAALAGTLPISLLLLAGASYFLWRQQKEKIALSRETEREREMKEMGYAATEQEISLREKLQEELKWRKIQYMARGEKSLAYHEWKMALFKPADVILDPDTANAILLVSEDQRSVQRAEEPRDLPDNPERFEWRYCVLGCENFTSGRHYWEVEVGDRKEWHIGVCSKNVERKKGWVKMTPENGYWTMGLTDGNKYRALTEPRTNLKLPEPPRKVGIFLDYETGEISFYNATDGSHIYTFPHASFSEPLYPVFRILTLEPTALTICPIPKEVESSPDPDLVPDHSLETPLTPGLANESGEPQAEVTSLLLPAHPGAEVSPSATTNQNHKLQARTEALY

SEQ ID NO: 1643 - protein, 127 aa, Homo Sapiens
MKMASSLAFLLLNFHVSLFLVQLLTPCSDADLPCHLFPTMSAETMELRWVSSSLRQVVNVYADGKEVEDRQSAPYRGRTSILRDGITAGKAALRIHNVTASDSGKYLCYFQDGDFYEKALVELKVAA

SEQ ID NO: 1644 - protein, 100 aa, Homo Sapiens
MVGEDADLPCHLFPTMSAETMELRWVSSSLRQVVNVYADGKEVEDRQSAPYRGRTSILRDGITAGKAALRIHNVTASDSGKYLCYFQDGDFYEKALVELK

SEQ ID NO: 1645 - protein, 140 aa, Homo Sapiens
MVGEDADLPCHLFPTMSAETMELRWVSSSLRQVVNVYADGKEVEDRQSAPYRGRTSILRDGITAGKAALRIHNVTASDSGKYLCYFQDGDFYEKALVELKVAALGSDLHIEVKGYEDGGIHLECRSTGWYPQPQIKWSDT

SEQ ID NO: 1646 - protein, 250 aa, Homo Sapiens
MVGEDADLPCHLFPTMSAETMELRWVSSSLRQVVNVYADGKEVEDRQSAPYRGRTSILRDGITAGKAALRIHNVTASDSGKYLCYFQDGDFYEKALVELKVAALGSDLHIEVKGYEDGGIHLECRSTGWYPQPQIKWSDTKGENIPAVEAPVVADGVGLYAVAASVIMRGSSGGGVSCIIRNSLLGLEKTASISIADPFFRSAQPWIAALAGTLPISLLLLAGASYFLWRQQKEKIALSRETEREREMKE

SEQ ID NO: 1647 - protein, 535 aa, Homo Sapiens
MVGEDADLPCHLFPTMSAETMELRWVSSSLRQVVNVYADGKEVEDRQSAPYRGRTSILRDGITAGKAALRIHNVTASDSGKYLCYFQDGDFYEKALVELKVAALGSDLHIEVKGYEDGGIHLECRSTGWYPQPQIKWSDTKGENIPAVEAPVVADGVGLYAVAASVIMRGSSGGGVSCIIRNSLLGLEKTASISIADPFFRSAQPWIAALAGTLPISLLLLAGASYFLWRQQKEKIALSRETEREREMKEMGYAATEQEISLREWRKIQYMARGEKSLAYHEWKMALFKPADVILDPDTANAILLVSEDQRSVQRAEEPRDLPDNPERFEWRYCVLGCENFTSGRHYWEVEVGDRKEWHIGVCSKNVERKKGWVKMTPENGYWTMGLTDGNKYRALTEPRTNLKLPEPPRKVGIFLDYETGEISFYNATDGSHIYTFPHASFSEPLYPVFRILTLEPTALTICPIPKEVESSPDPDLVPDHSLETPLTPGLANESGEPQAEVTSLLLPAHPGAEVSPSATTNQNHKLQARTEALY

SEQ ID NO: 1648 - protein, 210 aa, Homo Sapiens
MVGEDADLPCHLFPTMSAETMELRWVSSSLRQVVNVYADGKEVEDRQSAPYRGRTSILRDGITAGKAALRIHNVTASDSGKYLCYFQDGDFYEKALVELKVAEWRKIQYMARGEKSLAYHEWKMALFKPADVILDPDTANAILLVSEDQRSVQRAEEPRDLPDNPERFEWRYCVLGCENFTSGRHYWEVEVGDRKEWHIGVCSKNVERKK

SEQ ID NO: 1649 - protein, 270 aa, Homo Sapiens
MWLLVSVILISRISSVGGEAMFCDFPKINHGILYDEEKYKPFSQVPTGEVFYYSCEYNFVSPSKSFWTRITCAEEGWSPTPKCLRLCFFPFVENGHSESSGQTHLEGDTVQIICNTGYRLQNNENNISCVERGWSTPPKCRSTISAEKCGPPPPIDNGDITSFLLSVYAPGSSVEYQCQNLYQLEGNNQITCRNGQWSEPPKCLDPCVISQEIMEKYNIKLKWTNQQKLYSRTGDIVEFVCKSGYHPTKSHSFRAMCQNGKLVYPSCEEK

SEQ ID NO: 1650 - protein, 81 aa, Homo Sapiens
MRLLVLSSLLCILLLCFSIFSTEGKRRPAKAWSGRRTRLCCHRVPSPNSTNLKGHHVRLCKPCKLEPEPRLWVVPGALPQV

SEQ ID NO: 1651 - protein, 121 aa, Homo Sapiens
MAASQCLCCSKFLFQRQNLACFLTNPHCGSLVNADGHGEVWTDWNNMSKFFQYGWRCTTNENTYSNRTLMGNWNQERYDLRNIVQPKPLPSQDLSESLTGSQDINLNWILPDTNAQKSQLT

SEQ ID NO: 1652 - protein, 150 aa, Homo Sapiens
MAASQCLCCSKFLFQRQNLACFLTNPHCGSLVNADGHGEVWTDWNNMSKFFQYGWRCTTNENTYSNRTLMGNWNQERYDLRNIVQPKPLPSQFGHYFETTYDTSYNNKMPLSTHRFKREPHWFPGHQPELDPPRYKCTEKSTYMNSYSKP

SEQ ID NO: 1653 - protein, 142 aa, Homo Sapiens
MEQPSKDFCDSHKKSSKSSTYSASSYSSSGKRQNLACFLTNPHCGSLVNADGHGEVWTDWNNMSKFFQYGWRCTTNENTYSNRTLMGNWNQERYDLRNIVQPKPLPSQFGHYFETTYDTSYNNKMPLSTHRFKREPHWFPGH

SEQ ID NO: 1654 - protein, 104 aa, Homo Sapiens
MSKFFQYGWRCTTNENTYSNRTLMGNWNQERYDLRNIVQPKPLPSQFGHYFETTYDTSYNNKMPLSTHRFKREPHWFPGHQPELDPPRYKCTEKSTYMNSYSKP

SEQ ID NO: 1655 - protein, 190 aa, Homo Sapiens
MVIWVILSLLGELGKPGLLTSLKNMEQPSKDFCDSHKKSSKSSTYSASSYSSSGKRQNLACFLTNPHCGSLVNADGHGEVWTDWNNMSKFFQYGWRCTTNENTYSNRTLMGNWNQERYDLRNIVQPKPLPSQFGHYFETTYDTSYNNKMPLSTHRFKREPHWFPGHQPELDPPRYKCTEKSTYMNSYSKP

SEQ ID NO: 1656 - protein, 25 aa, Homo Sapiens
MWTALVLIWIFSLSLSESHAASNDP

SEQ ID NO: 1657 - protein, 114 aa, Homo Sapiens
MWTALVLIWIFSLSLSESHAASNDPRNFVPNKMWKGLVKRNASVETVDNKTSEDVTMAAASPVTLTKGTSAAHLNSMEVTTEDTSRTDAYESYKKKDYTQVDYLINGMYADSEM

SEQ ID NO: 1658 - protein, 449 aa, Homo Sapiens
MWTALVLIWIFSLSLSESHAASNDPRNFVPNKMWKGLVKRNASVETVDNKTSEDVTMAAASPVTLTKGTSAAHLNSMEVTTEDTSRTDVSEPATSGGAADGVTSIAPTAVASSTTAASITTAASSMTVASSAPTTAASSTTVASIAPTTAASSMTAASSTPMTLALPAPTSTSTGRTPSTTATGHPSLSTALAQVPKSSALPRTATLATLATRAQTVATTANTSSPMSTRPSPSKHMPSDTAASPVPPMRPQAQGPISQVSVDQPVVNTTNKSTPMPSNTTPEPAPTPTVVTTTKAQAREPTASPVPVPHTSPIPEMEAMSPTTQPSPMPYTQRAAGPGTSQAPEQVETEATPGTDSTGPTPRSSGGTKMPATDSCQPSTQGQYMVVTTEPLTQAVVDKTLLLVVLLLGVTLFITVLVLFALQAYESYKKKDYTQVDYLINGMYADSEM

SEQ ID NO: 1659 - protein, 145 aa, Homo Sapiens
MLTRLVLSAHLSSTTSPPWTHAAISWELDNVLMPSPRIWPQVTPTGRSASVRSEGNTSSLWNFSAGQDVHAIVTRTCESVLSSAVYTHGCGCVRSATNITCQSSGQQRQAARQEEENSICKAHDSREGRLGYPLSAHQPGSGGPN

SEQ ID NO: 1660 - protein, 145 aa, Homo Sapiens; identical to SEQ ID NO: 1659

SEQ ID NO: 1661 - protein, 98 aa, Homo Sapiens
MVLAMLGALHPRAGLSLFLHLILAVALLRSQPLRSQRSVPEAFSAPLELSQPLSGLVDDYGILPKHPRPRGPRPLLSRAQQRKRDGPDLAEYYYDAHL

SEQ ID NO: 1662 - protein, 376 aa, Homo Sapiens
MGHQFLRGLLTLLLPPPPLYTRHRMLGPESVPPPKRSRSKLMAPPRIGTHNGTFHCDEALACALLRLLPEYRDAEIVRTRDPEKLASCDIVVDVGGEYDPRRHRYDHHQRSFTETMSSLSPGKPWQTKLSSAGLIYLHFGHKLLAQLLGTSEEDSMVGTLYDKMYENFVEEVDAVDNGISQWAEGEPRYALTTTLSARVARLNPTWNHPDQDTEAGFKRAMDLVQEEFLQRLDFYQHSWLPARALVEEALAQRFQVDPSGEIVELAKGACPWKEHLYHLESGLSPPVAIFFVIYTDQAGQWRIQCVPKEPHSFQSRLPLPEPWRGLRDEALDQVSGIPGCIFVHASGFTGGHHTREGALSMARATLAQRSYLPQIS

SEQ ID NO: 1663 - protein, 301 aa, Homo Sapiens
MLGPESVPPPKRSRSKLMAPPRIGTHNGTFHCDEALACALLRLLPEYRDAEIVRTRDPEKLASCDIVVDVGGEYDPRRHRYDHHQRSFTETMSSLSPGKPWQTKLSSAGLIYLHFGHKLLAQLLGTSEEDSMVGTLYDKAGFKRAMDLVQEEFLQRLDFYQHSWLPARALVEEALAQRFQVDPSGEIVELAKGACPWKEHLYHLESGLSPPVAIFFVIYTDQAGQWRIQCVPKEPHSFQSRLPLPEPWRGLRDEALDQVSGIPGCIFVHASGFTGGHHTREGALSMARATLAQRSYLPQIS

SEQ ID NO: 1664 - protein, 213 aa, Homo Sapiens
MYENFVEEVDAVDNGISQWAEGEPRYALTTTLSARVARLNPTWNHPDQDTEAGFKRAMDLVQEEFLQRLDFYQHSWLPARALVEEALAQRFQVDPSGEIVELAKGACPWKEHLYHLESGLSPPVAIFFVIYTDQAGQWRIQCVPKEPHSFQSRLPLPEPWRGLRDEALDQVSGIPGCIFVHASGFTGGHHTREGALSMARATLAQRSYLPQIS

SEQ ID NO: 1665 - protein, 130 aa, Homo Sapiens
  misc_feature (1)..(1): Xaa can be any naturally occurring amino acid
XMVGTLYDKVDPSGEIVELAKGACPWKEHLYHLESGLSPPVAIFFVIYTDQAGQWRIQCVPKEPHSFQSRLPLPEPWRGLRDEALDQVSGIPGCIFVHASGFTGGHHTREGALSMARATLAQRSYLPQIS

SEQ ID NO: 1666 - protein, 46 aa, Homo Sapiens
MAVEDHFELCLAKCRTSSQSVQHENTYRDPIAKYCYGESPPELFPA

SEQ ID NO: 1667 - protein, 47 aa, Homo Sapiens
MVNLAAMVWRRLLRKRWVLALVFGLSLVYFLSSTFKQATFARGRICW

SEQ ID NO: 1668 - protein, 205 aa, Homo Sapiens
MVNLAAMVWRRLLRKRWVLALVFGLSLVYFLSSTFKQEERAVRDRNLLQVHDHNQPIPWKVQFNLGNSSRPSNQCRNSIQGKHLITDELGYVCERKDLLVNGCCNVNVPSTKQYCCDGCWPNGCCSAYEYCVSCCLQPNKQLLLERFLNRAAVAFQNLFMAVEDHFELCLAKCRTSSQSVQHENTYRDPIAKYCYGESPPELFPA

SEQ ID NO: 1669 - protein, 43 aa, Homo Sapiens
  misc_feature (1)..(1): Xaa can be any naturally occurring amino acid
XFGLSLVYFLSSTFKQSVQHENTYRDPIAKYCYGESPPELFPA

SEQ ID NO: 1670 - protein, 53 aa, Homo Sapiens
MPAGVPMSTYLKMFAASLLAMCAGAEVVHRYYRPDLMRNRLRRVKLISQSHIA

SEQ ID NO: 1671 - protein, 53 aa, Homo Sapiens; identical to SEQ ID NO: 1670

SEQ ID NO: 1672 - protein, 59 aa, Homo Sapiens
MPAGVPMSTYLKMFAASLLAMCAGAEVVHRYYRPDLQNWITSLSVGELEGLGRVEQRRP

SEQ ID NO: 1673 - protein, 59 aa, Homo Sapiens; identical to SEQ ID NO: 1672

SEQ ID NO: 1674 - protein, 71 aa, Homo Sapiens
MPAGVPMSTYLKMFAASLLAMCAGAEVVHRYYRPDLTIPEIPPKRGELKTELLGLKERKHKPQVSQQEELK

SEQ ID NO: 1675 - protein, 71 aa, Homo Sapiens; identical to SEQ ID NO: 1674

SEQ ID NO: 1676 - protein, 71 aa, Homo Sapiens; identical to SEQ ID NO: 1674

SEQ ID NO: 1677 - protein, 71 aa, Homo Sapiens; identical to SEQ ID NO: 1674

SEQ ID NO: 1678 - protein, 37 aa, Homo Sapiens
MPAGVPMSTYLKMFAASLLAMCAGAEVVHRYYRPDLV

SEQ ID NO: 1679 - protein, 46 aa, Homo Sapiens
MPAGVPMSTYLKMFAASLLAMCAGAEVVHRYYRPDLVSAGGLLFYF

SEQ ID NO: 1680 - protein, 135 aa, Homo Sapiens [sequence omitted]

SEQ ID NO: 1681 - protein, 135 aa, Homo Sapiens
MFQNLQGTFEKEIGKIIPFTIAFKRAEAVEPDGCVQSWRCCLPCDLGQASRFIHTTVCSAIRWRSCKGERNFAERHILPAELEEQSNHAGMGPILPAMPSVDGNHFQHPAGDCHPYGILCLQAHSASVTARQVLQ

SEQ ID NO: 1682 - protein, 107 aa, Homo Sapiens
MLERENESHGSKSCSRARIGTEVACRACLPPHCAMPPIDAFLCLPFSFALVSGKLYQWKEPVISSVHSKVKRTAEVKEEIVEKEMKKLVHSVFNMADYTFPLQVNTW

SEQ ID NO: 1683 - protein, 49 aa, Homo Sapiens
MLRPALPWLYLGLCSLLVGEAEAPSPVDPLERSRPYAVLRGQNLDQTLH

SEQ ID NO: 1684 - protein, 76 aa, Homo Sapiens
MLRPALPWLYLGLCSLLVGEAEAPSPVDPLERSRPYAVLRGQNLESLSPRLECNGAISARCNLRVWGSSDSPASAP

SEQ ID NO: 1685 - protein, 76 aa, Homo Sapiens; identical to SEQ ID NO: 1684

SEQ ID NO: 1686 - protein, 61 aa, Homo Sapiens
MLRPALPWLYLGLCSLLVGEAEAPSPVDPLERSRPYAVLRGQNLETTGERICLQLFAQHLT

SEQ ID NO: 1687 - protein, 72 aa, Homo Sapiens
MLRPALPWLYLGLCSLLVGEAEAPSPVDPLERSRPYAVLRGQNLVLMGTIFSILLVTVILMAFCVYKPIRRR

SEQ ID NO: 1688 - protein, 126 aa, Homo Sapiens
MRLPGCTLAASEAAPLLNPLVDDYVASEGAVQRVLVPAYAKQLSPATQLAIQRATPETGPENGTKLPPPRPEDMLNAAAALDSALEESGPGSTGELRHSLGLTVSPCRTRGSGQKNSRRKRDLVLS

SEQ ID NO: 1689 - protein, 358 aa, Homo Sapiens
MRLPGCTLAASEAAPLLNPLVDDYVASEGAVQRVLVPAYAKQLSPATQLAIQRATPETGPENGTKLPPPRPEDMLNAAAALDSALEESGPGSTGELRHSLGLTVSPCRTRGSGQKNSRRKRDLVLSKLVHNVHNHITNDKRFNGSESIKSSWNISVVKFLLEKLKQELVTSPHNYTDKELKGACVAYFLTKRREYRNSLNPFKGLKEKEEKKLRSRRYRLFANRSSIMRHFGPEDQRLWNDVTEELMSDEEDSLNEPGVWVARPPRFRAQRLTELCYHLDANSKHGTKANRVYGPPSDRLPSAEAQLLPPELYNPNFQEEEDEGGDENAPGSPSFDQPHKTCCPDLNSFIEIKVEKDE

SEQ ID NO: 1690 - protein, 9 aa, Homo Sapiens
MSFSATILF

SEQ ID NO: 1691 - protein, 9 aa, Homo Sapiens
MSFSATILF

SEQ ID NO: 1692 - protein, 11 aa, Homo Sapiens
MSFSATILFSP

SEQ ID NO: 1693 - protein, 50 aa, Homo Sapiens
MSFSATILFSPPSGSEARCCCCACKSETNGGNTGSQGGNPPPSTPITVTG

SEQ ID NO: 1694 - protein, 79 aa, Homo Sapiens
MSFSATILFSPPSGSEARCCCCACKSETNGGNTGSQGGNPPPSTPITVTGHGLAVQSSEQLLHVIYQRVDKAVGLAEAA

SEQ ID NO: 1695 - protein, 83 aa, Homo Sapiens
MSFSATILFSPPSGSEARCCCCACKSETNGGNTGSQGGNPPPSTPITVTGHGLAVQSSEQLLHVIYQRVDKAVGLAEAALGLA

SEQ ID NO: 1696 - protein, 106 aa, Homo Sapiens
MSFSATILFSPPSGSEARCCCCACKSETNGGNTGSQGGNPPPSTPITVTGHGLAVQSSEQLLHVIYQRVDKAVGLAEAALGLARANNELLKRLQEEVGDLRQGKVS

SEQ ID NO: 1697 - protein, 136 aa, Homo Sapiens
MSFSATILFSPPSGSEARCCCCACKSETNGGNTGSQGGNPPPSTPITVTGHGLAVQSSEQLLHVIYQRVDKAVGLAEAALGLARANNELLKRLQEEVGDLRQGKVSIPDEDGESRAHSSPPEEPGPLKESPGEAFK

SEQ ID NO: 1698 - protein, 199 aa, Homo Sapiens
MSFSATILFSPPSGSEARCCCCACKSETNGGNTGSQGGNPPPSTPITVTGHGLAVQSSEQLLHVIYQRVDKAVGLAEAALGLARANNELLKRLQEEVGDLRQGKVSIPDEDGESRAHSSPPEEPGPLKESPGEAFKALSAVEEECDSVGSGVQVVIEELRQLGAASVGPGPLGFPATQRDMRLPGCTLAASEAAPLLNP

SEQ ID NO: 1699 - protein, 209 aa, Homo Sapiens
MSFSATILFSPPSGSEARCCCCACKSETNGGNTGSQGGNPPPSTPITVTGHGLAVQSSEQLLHVIYQRVDKAVGLAEAALGLARANNELLKRLQEEVGDLRQGKVSIPDEDGESRAHSSPPEEPGPLKESPGEAFKALSAVEEECDSVGSGVQVVIEELRQLGAASVGPGPLGFPATQRDMRLPGCTLAASEAAPLLNPLVDDYVASEG

SEQ ID NO: 1700 - protein, 498 aa, Homo Sapiens
MSFSATILFSPPSGSEARCCCCACKSETNGGNTGSQGGNPPPSTPITVTGHGLAVQSSEQLLHVIYQRVDKAVGLAEAALGLARANNELLKRLQEEVGDLRQGKVSIPDEDGESRAHSSPPEEPGPLKESPGEAFKALSAVEEECDSVGSGVQVVIEELRQLGAASVGPGPLGFPATQRDMRLPGCTLAASEAAPLLNPLVDDYVASEGAVQRVLVPAYAKQLSPATQLAIQRATPETGPENGTKLPPPRPEDMLNAAAALDSALEESGPGSTGELRHSLGLTVSPCRTRGSGQKNSRRKRDLVLSKLVHNVHNHITNDKRFNGSESIKSSWNISVVKFLLEKLKQELVTSPHNYTDKELKGACVAYFLTKRREYRNSLNPFKGLKEKEEKKLRSRRYRLFANRSSIMRHFGPEDQRLWNDVTEELMSDEEDSLNEPDRLPSAEAQLLPPELYNPNFQEEEDEGGDENAPGSPSFDQPHKTCCPDLNSFIEIKVEKDE

SEQ ID NO: 1701 - protein, 538 aa, Homo Sapiens
MSFSATILFSPPSGSEARCCCCACKSETNGGNTGSQGGNPPPSTPITVTGHGLAVQSSEQLLHVIYQRVDKAVGLAEAALGLARANNELLKRLQEEVGDLRQGKVSIPDEDGESRAHSSPPEEPGPLKESPGEAFKALSAVEEECDSVGSGVQVVIEELRQLGAASVGPGPLGFPATQRDMRLPGCTLAASEAAPLLNPLVDDYVASEGAVQRVLVPAYAKQLSPATQLAIQRATPETGPENGTKLPPPRPEDMLNAAAALDSALEESGPGSTGELRHSLGLTVSPCRTRGSGQKNSRRKRDLVLSKLVHNVHNHITNDKRFNGSESIKSSWNISVVKFLLEKLKQELVTSPHNYTDKELKGACVAYFLTKRREYRNSLNPFKGLKEKEEKKLRSRRYRLFANRSSIMRHFGPEDQRLWNDVTEELMSDEEDSLNEPGVWVARPPRFRAQRLTELCYHLDANSKHGTKANRVYGPPSDRLPSAEAQLLPPELYNPNFQEEEDEGGDENAPGSPSFDQPHKTCCPDLNSFIEIKVEKDE

SEQ ID NO: 1702 - protein, 538 aa, Homo Sapiens; identical to SEQ ID NO: 1701

SEQ ID NO: 1703 - protein, 538 aa, Homo Sapiens; identical to SEQ ID NO: 1701

SEQ ID NO: 1704 - protein, 402 aa, Homo Sapiens
MASLGLLLLLLLTALPPLWSSSLPGLDTAESKATIADLILSALERATVFLEQRLPEINLDGMVGVRVLEEQLKSVREKWAQEPLLQPLSLRVGMLGEKLEAAIQRSLHYLKLSDPKYLREFQLTLQPGFWKLPHAWIHTDASLVYPTFGPQDSFSEERSDVCLVQLLGTGTDSSEPCGLSDLCRSLMTKPGCSGYCLSHQLLFFLWARMRGCTQGPLQQSQDYINLFCANMMDLNRRAEAIGYAYPTRDIFMENIMFCGMGGFSDFYKLRWLEAILSWQKQQEGCFGEPDAEDEELSKAIQYQQHFSRRVKRREKQFPDSRSVAQAGVQWRNLGSLQPLPPGFKQFSCLILPSSWDYRSVPPYLANFYIFLVETGFHHVAHAGLELLISRDPPTSGSQSVGL

SEQ ID NO: 1705 - protein, 361 aa, Homo Sapiens
MASLGLLLLLLLTALPPLWSSSLPGLDTAESKATIADLILSALERATVFLEQRLPEINLDGMVGVRVLEEQLKSVREKWAQEPLLQPLSLRVGMLGEKLEAAIQRSLHYLKLSDPKYLREFQLTLQPGFWKLPHAWIHTDASLVYPTFGPQDSFSEERSDVCLVQLLGTGTDSSEPCGLSDLCRSLMTKPGCSGYCLSHQLLFFLWARMRGCTQGPLQQSQDYINLFCANMMDLNRRAEAIGYAYPTRDIFMENIMFCGMGGFSDFYKLRWLEAILSWQKQQEGCFGEPDAEDEELSKAIQYQQHFSRRVKRREKQFPDGCSSHNTATAVAALGGFLYILAEYPPANREPHPSTPPPPSSR

SEQ ID NO: 1706 - protein, 434 aa, Homo Sapiens
MASLGLLLLLLLTALPPLWSSSLPGLDTAESKATIADLILSALERATVFLEQRLPEINLDGMVGVRVLEEQLKSVREKWAQEPLLQPLSLRVGMLGEKLEAAIQRSLHYLKLSDPKYLREFQLTLQPGFWKLPHAWIHTDASLVYPTFGPQDSFSEERSDVCLVQLLGTGTDSSEPCGLSDLCRSLMTKPGCSGYCLSHQLLFFLWARMRGCTQGPLQQSQDYINLFCANMMDLNRRAEAIGYAYPTRDIFMENNVTGHPVFYLPLCDSFLPPKAAPVTELYTDGPVMFCGMGGFSDFYKLRWLEAILSWQKQQEGCFGEPDAEDEELSKAIQYQQHFSRRVKRREKQFPDSRSVAQAGVQWRNLGSLQPLPPGFKQFSCLILPSSWDYRSVPPYLANFYIFLVETGFHHVAHAGLELLISRDPPTSGSQSVGL

SEQ ID NO: 1707 - protein, 182 aa, Homo Sapiens
MEALVCAFSELHIREDAVSQAQGRPGHPDAPPNIYEGGLGSPQPQCPSAQGSKPKNFRLRHLRGLGLYLESHPPPTGQCESHWLGRLMAGGCLPQPEGTAWALDLPQGTLGPRNSLCSALLEARLPRDSLGSSASSSSMDPDKGALPQPSPSRLRPKRSWGTWEEAMCPLCKRTRSGALERP

SEQ ID NO: 1708 - protein, 191 aa, Homo Sapiens
  misc_feature (1)..(1): Xaa can be any naturally occurring amino acid
XEQGPAAPKSWLLLPTTLALHGSLDAVSQAQGRPGHPDAPPNIYEGGLGSPQPQCPSAQGSKPKNFRLRHLRGLGLYLESHPPPTGQCESHWLGRLMAGGCLPQPEGTAWALDLPQGTLGPRNSLCSALLEARLPRDSLGSSASSSSMDPDKGALPQPSPSRLRPKRSWGTWEEAMCPLCKRTRSGALERP

SEQ ID NO: 1709 - protein, 90 aa, Homo Sapiens
MKTLPVLVLSLTLLTVFSETSPILTEKQAKQLLRSRRQDRPSKPGFPDEPMREYMHHLLALEHRAEEQFLEHWLNPHCKPHCDRNRIHPV

SEQ ID NO: 1710 - protein, 275 aa, Homo Sapiens
MDGDEKELESSEEGGSAEERRLEPPSSSHYCLYSYRGSRLAQQRGDSEDGSPSGTNAETPSGDDFSLSLADTNLPSEVEPELRSFIAKRLSRGAVFEGLGNVASVELKIPGYRVGCYYCLFQNEKLLPETVTIDSERNPSEYVVCFLGGSEKGLELFRLELDKYIQGLKNNMNCEARGLESHIKSYLSSWFEDVVCPIQRVVLLFQEKLTFLLHAALSYTPVEVKESDEKTKRDINRFLSVASLQGLIHEGTMTSLCMAMTEEQHKSVVIDCSSS

SEQ ID NO: 1711 - protein, 75 aa, Homo Sapiens
MLPSLQESMDGDEKELESSEEGGSAEERRLEPPSSSHYCLYSYRGSRLAQQRGDSEDGSPSGTNAETPSGDDFRY

SEQ ID NO: 1712 - protein, 396 aa, Homo Sapiens
MLPSLQESMDGDEKELESSEEGGSAEERRLEPPSSSHYCLYSYRGSRLAQQRGDSEDGSPSGTNAETPSGDDFSLSLADTNLPSEVEPELRSFIAKRLSRGAVFEGLGNVASVELKIPGYRVGCYYCLFQNEKLLPETVTIDSERNPSEYVVCFLGGSEKGLELFRLELDKYIQGLKNNMNCEARGLESHIKSYLSSWFEDVVCPIQRVVLLFQEKLTFLLHAALSYTPVEVKESDEKTKRDINRFLSVASLQGLIHEGTMTSLCMAMTEEQHKSVVIDCSSSQPQFCNAGSNRFCEDWMQAFLNGAKGGNPFLFRQVLENFKLKAIQDTNNLKRFIRQAEMNHYALFKCYMFLKNCGSGDILLKIVKVEHEEMPEAKNVIAVLEEFMKEALDQSF

SEQ ID NO: 1713 - protein, 396 aa, Homo Sapiens [sequence omitted]

SEQ ID NO: 1714 - protein, 38 aa, Homo Sapiens
MNCEARGLESHIKSYLSSWFEDVVCPIQRVVLLFQEKL

SEQ ID NO: 1715 - protein, 88 aa, Homo Sapiens
MNCEARGLESHIKSYLSSWFEDVVCPIQRVVLLFQEKLTFLLHAALSYTPVEVKESDEKTKRDINRFLSVASLQGLIHEGTMTSLCMA

SEQ ID NO: 1716 - protein, 132 aa, Homo Sapiens
MNCEARGLESHIKSYLSSWFEDVVCPIQRVVLLFQEKLTFLLHAALSYTPVEVKESDEKTKRDINRFLSVASLQGLIHEGTMTSLCMAMTEEQHKSVVIDCSSSQPQFCNAGSNRFCEDWMQAFLNGAKGGN

SEQ ID NO: 1717 - protein, 48 aa, Homo Sapiens
  misc_feature (1)..(1): Xaa can be any naturally occurring amino acid
XAMTEEQHKSVVIDCSSSQPQFCNAGHTRHKQFEEIYPTGRNESLCFV

SEQ ID NO: 1718 - protein, 97 aa, Homo Sapiens
  misc_feature (1)..(1): Xaa can be any naturally occurring amino acid
XLLFQEKLTFLLHAALSYTPVEVKESDEKTKRDINRFLSVASLQGLIHEGTMTSLCMAMTEEQHKSVVIDCSSSQPQFCNAEILDPPPLLFTLSHPS

SEQ ID NO: 1719 - protein, 189 aa, Homo Sapiens
LIALTSLTAASSFSKAREEEITPVVSIAYKVLEVFPKGRWVLITCCAPQPPPPITYSLCGTKNIKVAKKVVKTHEPASFNLNVTLKSSPDLLTYFCWASSTSGAHVDSARLQMHWELWSKPVSELRANFTLQDRGAGPRVEMICQASSGSPPITNSLIGKDGQVHLQQRPCHRQPANFSFLPSQTSDWF

SEQ ID NO: 1720 - protein, 265 aa, Homo Sapiens
MGLPGLFCLAVLAASSFSKAREEEITPVVSIAYKVLEVFPKGRWVLITCCAPQPPPPITYSLCGTKNIKVAKKVVKTHEPASFNLNVTLKSSPDLLTYFCWASSTSGAHVDSARLQMHWELWSKPVSELRANFTLQDRGAGPRVEMICQASSGSPPITNSLIGKDGQVHLQQRPCHRQPANFSFLPSQTSDWFWCQAANNANVQHSALTVVPPGGDQKMEDWQGPLESPILALPLYRSTRRLSEEEFGGFRIGNGEVRGRKAAAM

SEQ ID NO: 1721 - protein, 151 aa, Homo Sapiens
  misc_feature (1)..(1): Xaa can be any naturally occurring amino acid
XQPPPPITYSLCGTKNIKVAKKVVKTHEPASFNLNVTLKSSPDLLTYFCWASSTSGAHVDSARLQMHWELWSRQRGRPQGGDDLPGVLGQPTYHQQPDREGWAGPPAAETMPQAACQLLLPAEPDIGLVLVPGCKQRQCPAQRPHSGAPRW

SEQ ID NO: 1722 - protein, 35 aa, Homo Sapiens
ESMIPITRSLQKALHHLSRLRDLVDDTNGERSPKM

SEQ ID NO: 1723 - protein, 372 aa, Homo Sapiens
MAKSKTKHRLCSQESSVSALLASCTLSGSNSSNSDGSFHYKDKLYRSASQALQAYIDDFDLGQIYPGASTGKINIDEDFTNMSQFCNYIYKPNNAFENLDHKKHSNFISCRRHTVNDIDSMSLTTDDLLRLPADGSFSYTYVGPSHRTSKKNKKCRGRLGSLDIEKNPHFQGPYTSMGKDNFVTPVIRSNINGKQCGDKIELLILKAKRNLEQCTEELPKSMKKDDSPCSLDKLEADRSWENIPVTFKSPVPVNSDDSPQQTSRAKSAKGVLEDFLNNDNQSCTLSGGKHHGPVEALKQMLFNLQAVQERFNQNKTTDPKEEIKQVSEDDFSKLQLKESMIPITRSLQKALHHLSRLRDLVDDTNGERSPKM

SEQ ID NO: 1724 - protein, 533 aa, Homo Sapiens
MAKSKTKHRLCSQESSVSALLASCTLSGSNSSNSDGSFHYKDKLYRSASQALQAYIDDFDLGQIYPGASTGKINIDEDFTNMSQFCNYIYKPNNAFENLDHKKHSNFISCRRHTVNDIDSMSLTTDDLLRLPADGSFSYTYVGPSHRTSKKNKKCRGRLGSLDIEKNPHFQGPYTSMGKDNFVTPVIRSNINGKQCGRLKNPKLMNRTNNCISESSLSFPKKSSFKDSSEHSLEKNYPRWLTSQKSDLNVSGITSIPDFKYPVWLHNQDLLPDANSQRVYQIFKDDQCSPRHSHQAQGTSRLINKLDCFEYAFEPSNFSNSLSDDKELVNEYKCDFEHSQCQCENPLLPGQSTKPFSGDKIELLILKAKRNLEQCTEELPKSMKKDDSPCSLDKLEADRSWENIPVTFKSPVPVNSDDSPQQTSRAKSAKGVLEDFLNNDNQSCTLSGGKHHGPVEALKQMLFNLQAVQERFNQNKTTDPKEEIKQVSEDDFSKLQLKESMIPITRSLQKALHHLSRLRDLVDDTNGERSPKM

SEQ ID NO: 1725 - protein, 533 aa, Homo Sapiens; identical to SEQ ID NO: 1724

SEQ ID NO: 1726 - protein, 151 aa, Homo Sapiens
MKKDDSPCSLDKLEADRSWENIPVTFKSPVPVNSDDSPQQTSRAKSAKGVLEDFLNNDNQSCTLSGGKHHGPVEALKQMLFNLQAVQERFNQNKTTDPKEEIKQVSEDDFSKLQLKESMIPITRSLQKALHHLSRLRDLVDDTNGERSPKM

SEQ ID NO: 1727 - protein, 142 aa, Homo Sapiens
MFVDNRIQKSMLLDLNKEIMNELGVTVVGDIIAILKHAKVVHRQDMCKAATESVPCSPSPLAGEIRRGTSAASRMITNSLNHDSPPSTPPRRPDTSTSKISVTVSNKMAAKSAKATAALARREEESLAVPAKRRRVTAEMEG

SEQ ID NO: 1728 - protein, 355 aa, Homo Sapiens
MFVDNRIQKSMLLDLNKEIMNELGVTVVGDIIAILKHAKVVHRQDMCKAATESVPCSPSPLAGEIRRGTSAASRMITNSLNHDSPPSTPPRRPDTSTSKISVTVSNKMAAKSAKATAALARREEESLAVPAKRRRVTAEMEGKYVINMPKGTTPRTRKILEQQQAAKGLHRTSVFDRLGAETKADTTTGSKPTGVFSRLGATPETDEDLAWDSDNDSSSSVLQYAGVLKKLGRGPAKASPQPALTVKAKATSSATTAAAPTLRRLALSSRSGLERKPESLSKVSIIKRLGAAALVPEAQDSQVTSTKSKSSAEVKVTIKRTLVGPRGSSSSEGLGAQMDHAGTVSVFKRLGRRTF

SEQ ID NO: 1729 - protein, 422 aa, Homo Sapiens
MVMAALSLVAACWGRAAADESVQLPAAPGSSVRARETMVSVTMATSEWIQFFKEAGIPPGPAVNYAVMFVDNRIQKSMLLDLNKEIMNELGVTVVGDIIAILKHAKVVHRQDMCKAATESVPCSPSPLAGEIRRGTSAASRMITNSLNHDSPPSTPPRRPDTSTSKISVTVSNKMAAKSAKATAALARREEESLAVPAKRRRVTAEMEGKYVINMPKGTTPRTRKILEQQQAAKGLHRTSVFDRLGAETKADTTTGSKPTGVFSRLGATPETDEDLAWDSDNDSSSSVLQYAGVLKKLGRGPAKASPQPALTVKAKATSSATTAAAPTLRRLALSSRSGLERKPESLSKVSIIKRLGAAALVPEAQDSQVTSTKSKSSAEVKVTIKRTLVGPRGSSSSEGLGAQMDHAGTVSVFKRLGRRTF

SEQ ID NO: 1730 - protein, 141 aa, Homo Sapiens
MVMAALSLVAACWGRAAADESVQLPAAPGSSVRARETMVSVTMATSEWIQFFKEAGIPPGPAVNYAVMFVDNRIQKSMLLDLNKEIMNELGVTVVGDIIAILKHAKVVHRQGLTPSPRLECSSTISAHCNLCLPGHVQSCH

SEQ ID NO: 1731 - protein, 146 aa, Homo Sapiens
MVSVTMATSEWIQFFKEAGIPPGPAVNYAVMFVDNRIQKSMLLDLNKEIMNELGVTVVGDIIAILKHAKVVHRQDMCKAATESVPCSPSPLAGEIRRGTSAASRMITNSLNHDSPPSTPPRRPDTSTSKISVTVSNKMAAKSAKAT

SEQ ID NO: 1732 - protein, 168 aa, Homo Sapiens
  misc_feature (1)..(1): Xaa can be any naturally occurring amino acid
XEMEGKYVINMPKGTTPRTRKILEQQQAAKGLHRTSVFDRLGAETKADTTTGSKPTGVFSRLGATPETDEDLAWDSDNDSSSSVLQYAGVLKKLGRGPAKASPQPALTVKAKATSSATTAAAPTLRRLALSSRSGLERKPESLSKVSIIKRLGAAALVPEAQDSQASA

SEQ ID NO: 1733 - protein, 146 aa, Homo Sapiens
  misc_feature (1)..(1): Xaa can be any naturally occurring amino acid
XGSSVRARETMVSVTMATSEWIQFFKEAGIPPGPAVNYAVMFVDNRIQKSMLLDLNKEIMNELGVTVVGDIIAILKHAKVVHRQDMCKAATESVPCSPSPLAGEIRRGTSDGVSLCCPGWSTVARPWLSATSASRVQAVLLPQPPE

SEQ ID NO: 1734 - protein, 133 aa, Homo Sapiens
  misc_feature (1)..(1): Xaa can be any naturally occurring amino acid
XTDEDLAWDSDNDSSSSVLQYAGVLKKLGRGPAKASPQPALTVKAKATSSATTAAAPTLRRLALSSRSGLERKPESLSKVSIIKRLGAAALVPEAQDSQVTSTKSPTVRCVLPDPPVPPASQRPPRRRWRRAC

SEQ ID NO: 1735 - protein, 110 aa, Homo Sapiens
MRSECVLGAASDSGQEAPRDTWFLQGWKASRRFLIKGSVAGGAVYLVYDQELLGPSDKSQAALQKAGEVVPPAMYQFSQYVCQQTGLQIPQLPAPPKIYFPIRDSWNAGI

SEQ ID NO: 1736 - protein, 140 aa, Homo Sapiens
MRSECVLGAASDSGQEAPRDTWFLQGWKASRRFLIKGSVAGGAVYLVYDQELLGPSDKSQAALQKAGEVVPPAMYQFSQYVCQQTGLQIPQLPAPPKIYFPIRDSWNAGIMTVMSALSVAPSKAREYSKEGWEYVKARTK

SEQ ID NO: 1737 - protein, 88 aa, Homo Sapiens
MVARVWSLMRFLIKGSVAGGAVYLVYDQELLGPSDKSQAALQKAGEVVPPAMYQFSQYVCQQTGLQIPQLPAPPKIYFPIRDSWNAGI

SEQ ID NO: 1738 - protein, 118 aa, Homo Sapiens
MVARVWSLMRFLIKGSVAGGAVYLVYDQELLGPSDKSQAALQKAGEVVPPAMYQFSQYVCQQTGLQIPQLPAPPKIYFPIRDSWNAGIMTVMSALSVAPSKAREYSKEGWEYVKARTK

SEQ ID NO: 1739 - protein, 100 aa, Homo Sapiens
MASKSWLNFLTFLCGSAIGFLLCSQLFSILLGEKVDTQPNVLHNDPHARHSDDNGQNHLEGQMNFNADSSQHKDENTDIAENLYQKVRILCWVMTGPQNL

SEQ ID NO: 1740 - protein, 131 aa, Homo Sapiens
MASKSWLNFLTFLCGSAIGFLLCSQLFSILLGEKVDTQPNVLHNDPHARHSDDNGQNHLEGQMNFNADSSQHKDENTDIAENLYQKVRILCWVMTGPQNLEKKAKHVKATWAQRCNKVLFMSSEENKDFPA

SEQ ID NO: 1741 - protein, 363 aa, Homo Sapiens
MASKSWLNFLTFLCGSAIGFLLCSQLFSILLGEKVDTQPNVLHNDPHARHSDDNGQNHLEGQMNFNADSSQHKDENTDIAENLYQKVRILCWVMTGPQNLEKKAKHVKATWAQRCNKVLFMSSEENKDFPAVGLKTKEGRDQLYWKTIKAFQYVHEHYLEDADWFLKADDDTYVILDNLRWLLSKYDPEEPIYFGRRFKPYVKQGYMSGGAGYVLSKEALKRFVDAFKTDKCTHSSSIEDLALGRCMEIMNVEAGDSRDTIGKETFHPFVPEHHLIKGYLPRTFWYWNYNYYPPVEGPGCCSDLAVSFHYVDSTTMYELEYLVYHLRPYGYLYRYQPTLPERILKEISQANKNEDTKVKLGNP

SEQ ID NO: 1742 - protein, 309 aa, Homo Sapiens
MASKSWLNFLTFLCGSAIGFLLCSQLFSILLGEKVDTQPNVLHNDPHARHSDDNGQNHLEGQMNFNADSSQHKDENTDIAENLYQKVRILCWVMTGPQNLEKKAKHVKATWAQRCNKVLFMSSEENKDFPAVGLKTKEGRDQLYWKTIKAFQYVHEHYLEDADWFLKADDDTYVILDNLRWLLSKYDPEEPIYFGRRFKPYVKQGYMSGGAGYVLSKEALKRFVDAFKTDKCTHSSSIEDLALGRCMEIMNVEAGDSRDTIGKETFHPFVPEHHLIKGYLPRTFWYWNYNYYPPVEVSLEILLLCQYLD

SEQ ID NO: 1743 - protein, 363 aa, Homo Sapiens; identical to SEQ ID NO: 1741

SEQ ID NO: 1744 - protein, 823 aa, Homo Sapiens
MWGSPALAWAVWLACVQPTVFPWSLSFRSDTDKPSSAAEVLTEASSCWTDTVECFSDYMTLWIPRSHVEGLRRWLARTLHLPGTWRSPDHLDSSLAKCGYFLHLASDGDFLFRVQYSACFVQKEKANYRLEIRIFQKGVMGLERSDRYIMKCPMLRSRLGQESVHCGPMFIQVSRPLPLWRDNRQTPWLLSLRGELVASLEDASLMGLYVDMNATTVTVQSPRQGLLQRWEVLNTSAELLPLWLVSGHHAYSLEAACPPVSFQPESEVLVHIPKQRLGLVKRGSYIEETLSLRFLRVHQSNIFMVTENKDFVVVSIPAAGVLQVQRCQEVGGTPGTQAFYRVDLSLEFAEMAAPVLWTVESFFQCVGSGTESPASTAALRTTPSPPSPGPETPPAGVPPAASSQVWAAGPAAQEWLSRDLLHRPSDALAKKGLGPFLQTAKPARRGQTSASILPRVVQAQRGPQPPPGEAGIPGHPTPPATLPSEPVEGVQASPWRPRPVLPTHPALTLPVSSDASSPSPPAPRPERPESLLVSGPSVTLTEGLGTVRPEQDPAKSPGSPLLLRGLSSGDVAAPEPIMGEPGQASEEFQPLARPWRATLAAEELVSHRSPGEPQETCSGTEVERPRQTGPGLPREGARGHMDLSSSEPSQDIEGPGLSILPARDATFSTPSVRQPDPSAWLSSGPELTGMPRVRLAAPLAVLPMEPLPPEPVRPAALLTPEASSVGGPDQARYLESAPGWPVGQEEWGVAHTSSPPSTQTLSLWAPTGVLLPSLVELEYPFQAGRGASLQQELTEPTLALSAESHRPPELQDSVEGLSERPSR

SEQ ID NO: 1745 - protein, 658 aa, Homo Sapiens
  misc_feature (1)..(1): Xaa can be any naturally occurring amino acid
XIMKCPMLRSRLGQESVHCGPMFIQVSRPLPLWRDNRQTPWLLSLRGELVASLEDASLMGLYVDMNATTVTVQSPRQGLLQRWEVSGGQQALPGVSFQPESEVLVHIPKQRLGLVKRGSYIEETLSLRFLRVHQSNIFMVTENKDFVVVSIPAAGVLQVQRCQEVGGTPGTQAFYRVDLSLEFAEMAAPVLWTVESFFQCVGSGTESPASTAALRTTPSPPSPGPETPPAGVPPAASSQVWAAGPAAQEWLSRDLLHRPSDALAKKGLGPFLQTAKPARRGQTSASILPRVVQAQRGPQPPPGEAGIPGHPTPPATLPSEPVEGVQASPWRPRPVLPTHPALTLPVSSDASSPSPPAPRPERPESLLVSGPSVTLTEGLGTVRPEQDPAKSPGSPLLLRGLSSGDVAAPEPIMGEPGQASEEFQPLARPWRATLAAEELVSHRSPGEPQETCSGTEVERPRQTGPGLPREGARGHMDLSSSEPSQDIEGPGLSILPARDATFSTPSVRQPDPSAWLSSGPELTGMPRVRLAAPLAVLPMEPLPPEPVRPAALLTPEASSVGGPDQARYLESAPGWPVGQEEWGVAHTSSPPSTQTLSLWAPTGVLLPSLVELEYPFQAGRGASLQQELTEPTLALSAESHRPPELQDSVEGLSERPSR

SEQ ID NO: 1746 - protein, 69 aa, Homo Sapiens
  misc_feature (1)..(1): Xaa can be any naturally occurring amino acid
XPSTQTLSLWAPTGVLLPSLVELEYPFQAGRGASLQQELTEPTLALSAESHRPPELQDSVEGLSERPSR

SEQ ID NO: 1747 - protein, 775 aa, Homo Sapiens
  misc_feature (1)..(1): Xaa can be any naturally occurring amino acid
XSLSFRSDTDKPSSAAEVLTEASSCWTDTVECFSDYMTLWIPRSHVEGLRRWLARTLHLPGTWRSPDHLDSSLAKCGYFLHLASDGDFLFRVQYSACFVQKEKANYRLEIRIFQKGVMGLERSDRYIMKCPMLRSRLGQESVHCGPMFIQVSRPLPLWRDNRQTPWLLSLRGELVASLEDASLMGLYVDMNATTVTVQSPRQGLLQRWEVLNTSAELLPLWLVSGHHAYSLEAACPPVSFQPESEVLVHIPKQRLGLVKRGSYIEETLSLRFLRVHQSNIFMVTENKDFVVVSIPAAGVLQVQRCQEVGGTPGTQAFYRVDLSLEFAEMAAPVLWTVESFFQCVGSGTESPASTAALRTTPSPPSPGPETPPAGVPPAASSQKGLGPFLQTAKPARRGQTSASILPRVVQAQRGPQPPPGEAGIPGHPTPPATLPSEPVEGVQASPWRPRPVLPTHPALTLPVSSDASSPSPPAPRPERPESLLVSGPSVTLTEGLGTVRPEQDPAKSPGSPLLLRGLSSGDVAAPEPIMGEPGQASEEFQPLARPWRATLAAEELVSHRSPGEPQETCSGTEVERPRQTGPGLPREGARGHMDLSSSEPSQDIEGPGLSILPARDATFSTPSVRQPDPSAWLSSGPELTGMPRVRLAAPLAVLPMEPLPPEPVRPAALLTPEASSVGGPDQARYLESAPGWPVGQEEWGVAHTSSPPSTQTLSLWAPTGVLLPSLVELEYPFQAGRGASLQQELTEPTLALSAESHRPPELQDSVEGLSERPSR

SEQ ID NO: 1748 - protein, 15 aa, Homo Sapiens
MALRHLALLAGLLVG

SEQ ID NO: 1749 - protein, 57 aa, Homo Sapiens
MALRHLALLAGLLVGVASKSMENTAQLPECCVDVVGVNASCPGASLCGPGCYRRWNA

SEQ ID NO: 1750 - protein, 86 aa, Homo Sapiens
MALRHLALLAGLLVGVASKSMENTAQLPECCVDVVGVNASCPGASLCGPGCYRRWNADGSASCVRCGNGTLPAYNGSECRSFAGPG

SEQ ID NO: 1751 - protein, 103 aa, Homo Sapiens
MALRHLALLAGLLVGVASKSMENTAQLPECCVDVVGVNASCPGASLCGPGCYRRWNADGSASCVRCGNGTLPAYNGSECRSFAGPGAPFPMNRSSGTPGRPHP

SEQ ID NO: 1752 - protein, 224 aa, Homo Sapiens [sequence omitted]

SEQ ID NO: 1753 - protein, 189 aa, Homo Sapiens
MALRHLALLAGLLVGVASKSMENTAQLPECCVDVVGVNASCPGASLCGPGCYRRWNADGSASCVRCGNGTLPAYNGSECRSFAGPGAPFPMNRSSGTPGRPHPGAPRVAASLFLGTFFISSGLILSVAGFFYLKRSSKLPRACYRRNKAPALQPGEAAAMIPPPQSSDVGSAGKEDPPRQGRPPIPAPP

SEQ ID NO: 1754 - protein, 344 aa, Homo Sapiens
MALRHLALLAGLLVGVASKSMENTAQLPECCVDVVGVNASCPGASLCGPGCYRRWNADGSASCVRCGNGTLPAYNGSECRSFAGPGAPFPMNRSSGTPGRPHPGAPRVAASLFLGTFFISSGLILSVAGFFYLKRSSKLPRACYRRNKAPALQPGEAAAMIPPPQSSGNSSCRIPLWGFPSLGQSQGALWVCPQTGLPGSGSRPPLPGSPGDPPTRQGQGRIWLVPPALDLSWIWPAPPARPPLIPVTSMLFPVPETWGLQERRTHHDRADPQYLLLLEVQLHPRTDAAGLRQALLSSHRFSGAGSGGPKSQPVRKPRYVRRERPLDRATDPAAFPGEARISNV

SEQ ID NO: 1755 - protein, 198 aa, Homo Sapiens
MALRHLALLAGLLVGVASKSMENTAQLPECCVDVVGVNASCPGASLCGPGCYRRWNADGSASCVRCGNGTLPAYNGSECRSFAGPGAPFPMNRSSGTPGRPHPGAPRVAASLFLGTFFISSGLILSVAGFFYLKRSSKLPRACYRRNKAPALQPGEAAAMIPPPQSSVRKPRYVRRERPLDRATDPAAFPGEARISNV

SEQ ID NO: 1756 - protein, 198 aa, Homo Sapiens; identical to SEQ ID NO: 1755

SEQ ID NO: 1757 - protein, 98 aa, Homo Sapiens
MALRHLALLAGLLVGVASKSMENTDTDVPAPEVLTRSTAGVRGACASQRGALRCLLGERLLRNGWVRRGPHGEASWPAMGAPLPAVTAQRAAHRYRGV

SEQ ID NO: 1758 - protein, 64 aa, Homo Sapiens
MALRHLALLAGLLVGVASKSMENTDTDVPAPEVLTRSTAGVRGACASQRGALRCLLGPAARVLC

SEQ ID NO: 1759 - protein, 111 aa, Homo Sapiens
MALRHLALLAGLLVGVASKSMENTDTDVPAPEVLTRSTAGVRGACASQRGALRCLLGPAARVLCGCGGRQRQLPRRKSVWSRLLQALERGRERQLRPLWERNPPSLQRLRV

SEQ ID NO: 1760 - protein, 380 aa, Homo Sapiens
MALRHLALLAGLLVGVASKSMENTVTRNSTAVINTQAEGTLSPPGLSSLPVVREWALTHTAQLPECCVDVVGVNASCPGASLCGPGCYRRWNADGSASCVRCGNGTLPAYNGSECRSFAGPGAPFPMNRSSGTPGRPHPGAPRVAASLFLGTFFISSGLILSVAGFFYLKRSSKLPRACYRRNKAPALQPGEAAAMIPPPQSSGNSSCRIPLWGFPSLGQSQGALWVCPQTGLPGSGSRPPLPGSPGDPPTRQGQGRIWLVPPALDLSWIWPAPPARPPLIPVTSMLFPVPETWGLQERRTHHDRADPQYLLLLEVQLHPRTDAAGLRQALLSSHRFSGAGSGGPKSQPVRKPRYVRRERPLDRATDPAAFPGEARISNV

SEQ ID NO: 1761 - protein, 289 aa, Homo Sapiens
MARKIMQDKEKIREKYGPEWARLPPAQQDEIIDRCLVGPRAPAPRDPGDSEELTRFPGLRGPTGQKVVRFGDEDLTWQDEHSAPFSWETKSQMEFSISALSIQEPSNGTAASEPRPLSKASQGSQALKSSQGSRSSSLDALGPTRKEEEASFWKINAERSRGEGPEAEFQSLTPSQIKSMEKGEKVLPPCYRQEPAPKDREAKVERPSTLRQEQRPLPNVSTERERPQPVQAFSSALHEAAPSQLEGKLPSPDVRQDDGEDTLFSEPKFAQVSSSNVVLKTGFDFLDNW

SEQ ID NO: 1762 - protein, 327 aa, Homo Sapiens
MASMAAAIAASRSAVMSGNRPLDDRERKRFTYFSSLSPMARKIMQDKEKIREKYGPEWARLPPAQQDEIIDRCLVGPRAPAPRDPGDSEELTRFPGLRGPTGQKVVRFGDEDLTWQDEHSAPFSWETKSQMEFSISALSIQEPSNGTAASEPRPLSKASQGSQALKSSQGSRSSSLDALGPTRKEEEASFWKINAERSRGEGPEAEFQSLTPSQIKSMEKGEKVLPPCYRQEPAPKDREAKVERPSTLRQEQRPLPNVSTERERPQPVQAFSSALHEAAPSQLEGKLPSPDVRQDDGEDTLFSEPKFAQVSSSNVVLKTGFDFLDNW

SEQ ID NO: 1763 - protein, 197 aa, Homo Sapiens
MEFSISALSIQEPSNGTAASEPRPLSKASQGSQALKSSQGSRSSSLDALGPTRKEEEASFWKINAERSRGEGPEAEFQSLTPSQIKSMEKGEKVLPPCYRQEPAPKDREAKVERPSTLRQEQRPLPNVSTERERPQPVQAFSSALHEAAPSQLEGKLPSPDVRQDDGEDTLFSEPKFAQVSSSNVVLKTGFDFLDNW

SEQ ID NO: 1764 - protein, 110 aa, Homo Sapiens
MEKGEKVLPPCYRQEPAPKDREAKVERPSTLRQEQRPLPNVSTERERPQPVQAFSSALHEAAPSQLEGKLPSPDVRQDDGEDTLFSEPKFAQVSSSNVVLKTGFDFLDNW

SEQ ID NO: 1765 - protein, 160 aa, Homo Sapiens
MQDKEKIREKYGPEWARLPPAQQDEIIDRCLVGPRAPAPRDPGDSEELTRFPGLRGPTGQKVVRFGDEDLTWQDEHSAPFSWETKSQMEFSISALSIQEPSNGTAASEPRPLSKASQGSQALKSSQGSRSSSLDALGPTRKEEEASFWKINAERSRGEGP

SEQ ID NO: 1766 - protein, 131 aa, Homo Sapiens
MDVLFVAIFAVPLILGQEYEDEERLGEDEYYQVVYYYTVTPSYDDFSADFTIDYSIFESEDRLNRLDKDITEAIETTISLETARADHPKPVTVKPVTTEPSPDLNDAVSSLRSPIPLLLSCAFVQVGMYFM

SEQ ID NO: 1767 - protein, 131 aa, Homo Sapiens; identical to SEQ ID NO: 1766

SEQ ID NO: 1768 - protein, 121 aa, Homo Sapiens
MDVLFVAIFAVPLILGQEYEDEERLGEDEYYQVVYYYTVTPSYDDFSADFTIDYSIFESEDRLNRLDKDITEAIETTISLETARADHPKPVTVKPVTTEPVEEGCYDSLDGSLARGNWKIK

SEQ ID NO: 1769 - protein, 341 aa, Homo Sapiens
MVPAAGALLWVLLLNLGPRAAGAQGLTQTPTEMQRVSLRFGGPMTRSYRSTARTGLPRKTRIILEDENDAMADADRLAGPAAAELLAATVSTGFSRSSAINEEDGSSEEGVVINAGKDSTSRELPSATPNTAGSSSTRFIANSQEPEIRLTSSLPRSPGRSTEDLPGSQATLSQWSTPGSTPSRWPSPSPTAMPSPEDLRLVLMPWGPWHCHCKSGTMSRSRSGKLHGLSGRLRVGALSQLRTEHKPCTYQQCPCNRLREECPLDTSLCTDTNCASQSTTSTRTTTTPFPTIHLRSSPSLPPASPCPALAFWKRVRIGLEDIWNSLSSVFTEMQPIDRNQR

SEQ ID NO: 1770 - protein, 221 aa, Homo Sapiens
MEGPRGWLVLCVLAISLASMVTEDLCRAPDGKKGEAGRPGRRGRPGLKGEQGEPGAPGIRTGIQGLKGDQGEPGPSGNPGKVGYPGPSGPLGARGIPGIKGTKGSPGNIKDQPRPAFSAIRRNPPMGGNVVIFDTVITNQEEPYQNHSGRFVCTVPGYYYFTFQVLSQWEICLSIVSSSRGQVRRSLGFCDTTNKGLFQVVSGGMVLQLQQGDQVWVEKDP

SEQ ID NO: 1771 - protein, 245 aa, Homo Sapiens
MEGPRGWLVLCVLAISLASMVTEDLCRAPDGKKGEAGRPGRRGRPGLKGEQGEPGAPGIRTGIQGLKGDQGEPGPSGNPGKVGYPGPSGPLGARGIPGIKGTKGSPGNIKDQPRPAFSAIRRNPPMGGNVVIFDTVITNQEEPYQNHSGRFVCTVPGYYYFTFQVLSQWEICLSIVSSSRGQVRRSLGFCDTTNKGLFQVVSGGMVLQLQQGDQVWVEKDPKKGHIYQGSEADSVFSGFLIFPSA

SEQ ID NO: 1772 - protein, 245 aa, Homo Sapiens; identical to SEQ ID NO: 1771

SEQ ID NO: 1773 - protein, 153 aa, Homo Sapiens
MKIPWGSIPVLMLLLLLGLIDISQAQLSCTGPPAIPGIPGIPGTPGPDGQPGTPGIKGEKGLPGLAGDHGEFGEKGDPGIPGNPGKVGPKGPMGPKGGPGAPGAPGPKGESGDYKATQKIAFSATRTINVPLRRDQTIRFDHVITNMNNNYEP

SEQ ID NO: 1774 - protein, 229 aa, Homo Sapiens
MKIPWGSIPVLMLLLLLGLIDISQAQLSCTGPPAIPGIPGIPGTPGPDGQPGTPGIKGEKGLPGLAGDHGEFGEKGDPGIPGNPGKVGPKGPMGPKGGPGAPGAPGPKGESGDYKATQKIAFSATRTINVPLRRDQTIRFDHVITNMNNNYEPRSGKFTCKVPGLYYFTYHASSRGNLCVNLMRGRERAQKVVTFCDYAYNTFQVTTGGMVLKLEQGENVFLQATDKNS

SEQ ID NO: 1775 - protein, 251 aa, Homo Sapiens
MKIPWGSIPVLMLLLLLGLIDISQAQLSCTGPPAIPGIPGIPGTPGPDGQPGTPGIKGEKGLPGLAGDHGEFGEKGDPGIPGNPGKVGPKGPMGPKGGPGAPGAPGPKGESGDYKATQKIAFSATRTINVPLRRDQTIRFDHVITNMNNNYEPRSGKFTCKVPGLYYFTYHASSRGNLCVNLMRGRERAQKVVTFCDYAYNTFQVTTGGMVLKLEQGENVFLQATDKNSLLGMEGANSIFSGFLLFPDMEA

SEQ ID NO: 1776 - protein, 253 aa, Homo Sapiens
MMMKIPWGSIPVLMLLLLLGLIDISQAQLSCTGPPAIPGIPGIPGTPGPDGQPGTPGIKGEKGLPGLAGDHGEFGEKGDPGIPGNPGKVGPKGPMGPKGGPGAPGAPGPKGESGDYKATQKIAFSATRTINVPLRRDQTIRFDHVITNMNNNYEPRSGKFTCKVPGLYYFTYHASSRGNLCVNLMRGRERAQKVVTFCDYAYNTFQVTTGGMVLKLEQGENVFLQATDKNSLLGMEGANSIFSGFLLFPDMEA

SEQ ID NO: 1777 - protein, 245 aa, Homo Sapiens
MDVGPSSLPHLGLKLLLLLLLLPLRGQANTGCYGIPGMPGLPGAPGKDGYDGLPGPKGEPGIPAIPGIRGPKGQKGEPGLPGHPGKNGPMGPPGMPGVPGPMGIPGEPGEEGRYKQKFQSVFTVTRQTHQPPAPNSLIRFNAVLTNPQGDYDTSTGKFTCKVPGLYYFVYHASHTANLCVLLYRSGVKVVTFCGHTSKTNQVNSGGVLLRLQVGEEVWLAVNDYYDMVGIQGSDSVFSGFLLFPD

SEQ ID NO: 1778 - protein, 245 aa, Homo Sapiens; identical to SEQ ID NO: 1777

SEQ ID NO: 1779 - protein, 245 aa, Homo Sapiens; identical to SEQ ID NO: 1777

SEQ ID NO: 1780 - protein, 258 aa, Homo Sapiens
MLLVLVVLIPVLVSSGGPEGHYEMLGTCRMVCDPYPARGPGAGARTDGGDALSEQSGAPPPSTLVQGPQGKPGRTGKPGPPGPPGDPGPPGPVGPPGEKGEPGKPGPPGLPGAGGSGAISTATYTTVPRVAFYAGLKNPHEGYEVLKFDDVVTNLGNNYDAASGKFTCNIPGTYFFTYHVLMRGGDGTSMWADLCKNGQVRASAIAQDADQNYDYASNSVILHLDAGDEVFIKLDGGKAHGGNSNKYSTFSGFIIYSD

SEQ ID NO: 1781 - protein, 287 aa, Homo Sapiens
MALGLLIAVPLLLQAAPRGAAHYEMMGTCRMICDPYTAAPGGEPPGAKAQPPGPSTAALEVMQDLSANPPPPFIQGPKGDPGRPGKPGPRGPPGEPGPPGPRGPPGEKGDSGRPGLPGLQLTAGTASGVGVVGGGAGVGGDSEGEVTSALSATFSGPKIAFYVGLKSPHEGYEVLKFDDVVTNLGNHYDPTTGKFSCQVRGIYFFTYHILMRGGDGTSMWADLCKNGQVRASAIAQDADQNYDYASNSVVLHLDSGDEVYVKLDGGKAHGGNNNKYSTFSGFLLYPD

SEQ ID NO: 1782 - protein, 255 aa, Homo Sapiens
MVLLLVILIPVLVSSAGTSAHYEMLGTCRMVCDPYGGTKAPSTAATPDRGLMQSLPTFIQGPKGEAGRPGKAGPRGPPGEPGPPGPMGPPGEKGEPGRQGLPGPPGAPGLNAAGAISAATYSTVPKIAFYAGLKRQHEGYEVLKFDDVVTNLGNHYDPTTGKFTCSIPGIYFFTYHVLMRGGDGTSMWADLCKNNQVRASAIAQDADQNYDYASNSVVLHLEPGDEVYIKLDGGKAHGGNNNKYSTFSGFIIYAD

SEQ ID NO: 1783 - protein, 213 aa, Homo Sapiens
MVLLLVILIPVLVSSAGTSAHYEMLGTCRMVCDPYGGTKAPSTAATPDRGLMQSLPTFIQGPPGAPGLNAAGAISAATYSTVPKIAFYAGLKRQHEGYEVLKFDDVVTNLGNHYDPTTGKFTCSIPGIYFFTYHVLMRGGDGTSMWADLCKNNQVRASAIAQDADQNYDYASNSVVLHLEPGDEVYIKLDGGKAHGGNNNKYSTFSGFIIYAD

SEQ ID NO: 1784 - protein, 238 aa, Homo Sapiens
MVLLLLVAIPLLVHSSRGPAHYEMLGRCRMVCDPHGPRGPGPDGAPASVPPFPPGAKGEVGRRGKAGLRGPPGPPGPRGPPGEPGRPGPPGPPGPGPGGVAPAAGYVPRIAFYAGLRRPHEGYEVLRFDDVVTNVGNAYEAASGKFTCPMPGVYFFAYHVLMRGGDGTSMWADLMKNGQVRASAIAQDADQNYDYASNSVILHLDVGDEVFIKLDGGKVHGGNTNKYSTFSGFIIYPD

SEQ ID NO: 1785 - protein, 281 aa, Homo Sapiens
MGSRGQGLLLAYCLLLAFASGLVLSRVPHVQGEQQEWEGTEELPSPPDHAERAEEQHEKYRPSQDQGLPASRCLRCCDPGTSMYPATAVPQINITILKGEKGDRGDRGLQGKYGKTGSAGARGHTGPKGQKGSMGAPGERCKSHYAAFSVGRKKPMHSNHYYQTVIFDTEFVNLYDHFNMFTGKFYCYVPGLYFFSLNVHTWNQKETYLHIMKNEEEVVILFAQVGDRSIMQSQSLMLELREQDQVWVRLYKGERENAIFSEELDTYITFSGYLVKHATEP

SEQ ID NO: 1786 - protein, 281 aa, Homo Sapiens; identical to SEQ ID NO: 1785

SEQ ID NO: 1787 - protein, 281 aa, Homo Sapiens; identical to SEQ ID NO: 1785

SEQ ID NO: 1788 - protein, 281 aa, Homo Sapiens; identical to SEQ ID NO: 1785

SEQ ID NO: 1789 - protein, 281 aa, Homo Sapiens; identical to SEQ ID NO: 1785

SEQ ID NO: 1790 - protein, 281 aa, Homo Sapiens; identical to SEQ ID NO: 1785

SEQ ID NO: 1791 - protein, 281 aa, Homo Sapiens; identical to SEQ ID NO: 1785

SEQ ID NO: 1792 - protein, 281 aa, Homo Sapiens; identical to SEQ ID NO: 1785

SEQ ID NO: 1793 - protein, 199 aa, Homo Sapiens
MYPATAVPQINITILKGEKGDRGDRGLQGKYGKTGSAGARGHTGPKGQKGSMGAPGERCKSHYAAFSVGRKKPMHSNHYYQTVIFDTEFVNLYDHFNMFTGKFYCYVPGLYFFSLNVHTWNQKETYLHIMKNEEEVVILFAQVGDRSIMQSQSLMLELREQDQVWVRLYKGERENAIFSEELDTYITFSGYLVKHATEP

SEQ ID NO: 1794 - protein, 199 aa, Homo Sapiens; identical to SEQ ID NO: 1793

SEQ ID NO: 1795 - protein, 302 aa, Homo Sapiens
MRRWAWAAVVVLLGPQLVLLGGVGARREAQRTQQPGQRADPPNATASASSREGLPEAPKPSQASGPEFSDAHMTWLNFVRRPDDGALRKRCGSRDKKPRDLFGPPGPPGAEVTAETLLHEFQELLKEATERRFSGLLDPLLPQGAGLRLVGEAFHCRLQGPRRVDKRTLVELHGFQAPAAQGAFLRGSGLSLASGRFTAPVSGIFQFSASLHVDHSELQGKARLRARDVVCVLICIESLCQRHTCLEAVSGLESNSRVFTLQVQGLLQLQAGQYASVFVDNGSGAVLTIQAGSSFSGLLLGT

SEQ ID NO: 1796 - protein, 330 aa, Homo Sapiens
MGKLCLGPTLCPAAAAEESRDAEPRRELLCSGRPWTWRAAARVTTMIPWVLLACALPCAADPLLGAFARRDFRKGSPQLVCSLPGPQGPPGPPGAPGPSGMMGRMGFPGKDGQDGHDGDRGDSGEEGPPGRTGNRGKPGPKGKAGAIGRAGPRGPKGVNGTPGKHGTPGKKGPKGKKGEPGLPGPCSCGSGHTKSAFSVAVTKSYPRERLPIKFDKILMNEGGHYNASSGKFVCGVPGIYYFTYDITLANKHLAIGLVHNGQYRIRTFDANTGNHDVASGSTILALKQGDEVWLQIFYSEQNGLFYDPYWTDSLFTGFLIYADQDDPNEV

SEQ ID NO: 1797 - protein, 246 aa, Homo Sapiens
MLWRQLIYWQLLALFFLPFCLCQDEYMESPQTGGLPPDCSKCCHGDYSFRGYQGPPGPPGPPGIPGNHGNNGNNGATGHEGAKGEKGDKGDLGPRGERGQHGPKGEKGYPGIPPELQIAFMASLATHFSNQNSGIIFSSVETNIGNFFDVMTGRFGAPVSGVYFFTFSMMKHEDVEEVYVYLMHNGNTVFSMYSYEMKGKSDTSSNHAVLKLAKGDEVWLRMGNGALHGDHQRFSTFAGFLLFETK

SEQ ID NO: 1798 - protein, 319 aa, Homo Sapiens
MLWRQLIYWQLLALFFLPFCLCQDEYMEVSGRTNKVVARIVQSHQQTGRSGSRREKVRERSHPKTGTVDNNTSTDLKSLRPDELPHPEVDDLAQITTFWGQSPQTGGLPPDCSKCCHGDYSFRGYQGPPGPPGPPGIPGNHGNNGNNGATGHEGAKGEKGDKGDLGPRGERGQHGPKGEKGYPGIPPELQIAFMASLATHFSNQNSGIIFSSVETNIGNFFDVMTGRFGAPVSGVYFFTFSMMKHEDVEEVYVYLMHNGNTVFSMYSYEMKGKSDTSSNHAVLKLAKGDEVWLRMGNGALHGDHQRFSTFAGFLLFETK

SEQ ID NO: 1799 - protein, 100 aa, Homo Sapiens
MLPLLLGLLGPAACWALGPTPGPGSSELRSAFSAARTTPLEGTSEMAVTFDKVYVNIGGDFDVATGQFRCRVPGAYFFSFTAGKAPHKSLSVMLVRNRDE

SEQ ID NO: 1800 - protein, 329 aa, Homo Sapiens
MLPLLLGLLGPAACWALGPTPGPGSSELRSAFSAARTTPLEGTSEMAVTFDKVYVNIGGDFDVATGQFRCRVPGAYFFSFTAGKAPHKSLSVMLVRNRDEVQALAFDEQRRPGARRAASQSAMLQLDYGDTVWLRLHGAPQYALGAPGATFSGYLVYADADADAPARGPPAPPEPRSAFSAARTRSLVGSDAGPGPRHQPLAFDTEFVNIGGDFDAAAGVFRCRLPGAYFFSFTLGKLPRKTLSVKLMKNRDEVQAMIYDDGASRRREMQSQSVMLALRRGDAVWLLSHDHDGYGAYSNHGKYITFSGFLVYPDLAPAAPPGLGASELL

SEQ ID NO: 1801 - protein, 60 aa, Homo Sapiens
MRPLLVLLLLGLAAGSPPLDDNKIPSLCPGHPGLPGLPGPRGDPGPRGEAGPAGPTGPAG

SEQ ID NO: 1802 - protein, 243 aa, Homo Sapiens
MRPLLVLLLLGLAAGSPPLDDNKIPSLCPGHPGLPGTPGHHGSQGLPGRDGRDGRDGAPGAPGEKGEGGRPGLPGPRGDPGPRGEAGPAGPTGPAGECSVPPRSAFSAKRSESRVPPPSDAPLPFDRVLVNEQGHYDAVTGKFTCQVPGVYYFAVHATVYRASLQFDLVKNGESIASFFQFFGGWPKPASLSGGAMVRLEPEDQVWVQVGVGDYIGIYASIKTDSTFSGFLVYSDWHSSPVFA

SEQ ID NO: 1803 - protein, 243 aa, Homo Sapiens; identical to SEQ ID NO: 1802

SEQ ID NO: 1804 - protein, 112 aa, Homo Sapiens
MFVLLYVTSFAICASGQPRGNQLKGENYSPRYICSIPGLPGPPGPPGANGSPGPHGRIGLPGRDGRDGRKGEKGEKGTAGLRGKTGPLGLAGEKGDQGETGKKGPIGPEGEK

SEQ ID NO: 1805 - protein, 289 aa, Homo Sapiens
MFVLLYVTSFAICASGQPRGNQLKGENYSPRYICSIPGLPGPPGPPGANGSPGPHGRIGLPGRDGRDGRKGEKGEKGTAGLRGKTGPLGLAGEKGDQGETGKKGPIGPEGEKGEVGPIGPPGPKGDRGEQGDPGLPGVCRCGSIVLKSAFSVGITTSYPEERLPIIFNKVLFNEGEHYNPATGKFICAFPGIYYFSYDITLANKHLAIGLVHNGQYRIKTFDANTGNHDVASGSTVIYLQPEDEVWLEIFFTDQNGLFSDPGWADSLFSGFLLYVDTDYLDSISEDDEL

SEQ ID NO: 1806 - protein, 289 aa, Homo Sapiens; identical to SEQ ID NO: 1805

SEQ ID NO: 1807 - protein, 151 aa, Homo Sapiens
MSRQEPKMFVLLYVTSFAICASGQPRGNQLKGENYSPRYICSIPGLPGPPGPPGANGSPGPHGRIGLPGRDGRDGRKGEKGEKGTAGLRGKTGPLGLAGEKGDQGETGKKGPIGPEGEKGEVGPIGPPGPKGDRGEQGDPGLPGVCRCGSI

SEQ ID NO: 1808 - protein, 296 aa, Homo Sapiens
MSRQEPKMFVLLYVTSFAICASGQPRGNQLKGENYSPRYICSIPGLPGPPGPPGANGSPGPHGRIGLPGRDGRDGRKGEKGEKGTAGLRGKTGPLGLAGEKGDQGETGKKGPIGPEGEKGEVGPIGPPGPKGDRGEQGDPGLPGVCRCGSIVLKSAFSVGITTSYPEERLPIIFNKVLFNEGEHYNPATGKFICAFPGIYYFSYDITLANKHLAIGLVHNGQYRIKTFDANTGNHDVASGSTVIYLQPEDEVWLEIFFTDQNGLFSDPGWADSLFSGFLLYVDTDYLDSISEDDEL

SEQ ID NO: 1809 - protein, 256 aa, Homo Sapiens [sequence omitted]

SEQ ID NO: 1810 - protein, 252 aa, Homo Sapiens
MAAPALLLLALLLPVGAWPGLPRRPCVHCCRPAWPPGPYARVSDRDLWRGDLWRGLPRVRPTIDIEILKGEKGEAGVRGRAGRSGKEGPPGARGLQGRRGQKGQVGPPGAACRRAYAAFSVGRREGLHSSDHFQAVPFDTELVNLDGAFDLAAGRFLCTVPGVYFLSLNVHTWNYKETYLHIMLNRRPAAVLYAQPSERSVMQAQSLMLLLAAGDAVWVRMFQRDRDNAIYGEHGDLYITFSGHLVKPAAEL

SEQ ID NO: 1811 - protein, 333 aa, Homo Sapiens
MRIWWLLLAIEICTGNINSQDTCRQGHPGIPGNPGHNGLPGRDGRDGAKGDKGDAGEPGRPGSPGKDGTSGEKGERGADGKVEAKGIKGDQGSRGSPGKHGPKGLAGPMGEKGLRGETGPQGQKGNKGDVGPTGPEGPRGNIGPLGPTGLPGPMGPIGKPGPKGEAGPTGPQGEPGVRGIRGWKGDRGEKGKIGETLVLPKSAFTVGLTVLSKFPSSDMPIKFDKILYNEFNHYDTAAGKFTCHIAGVYYFTYHITVFSRNVQVSLVKNGVKILHTKDAYMSSEDQASGGIVLQLKLGDEVWLQVTGGERFNGLFADEDDDTTFTGFLLFSSP

SEQ ID NO: 1812 - protein, 333 aa, Homo Sapiens; identical to SEQ ID NO: 1811

SEQ ID NO: 1813 - protein, 333 aa, Homo Sapiens
MRIWWLLLAIEICTGNINSQDTCRQGHPGIPGNPGHNGLPGRDGRDGAKGDKGDAGEPGCPGSPGKDGTSGEKGERGADGKVEAKGIKGDQGSRGSPGKHGPKGLAGPMGEKGLRGETGPQGQKGNKGDVGPTGPEGPRGNIGPLGPTGLPGPMGPIGKPGPKGEAGPTGPQGEPGVRGIRGWKGDRGEKGKIGETLVLPKSAFTVGLTVLSKFPSSDVPIKFDKILYNEFNHYDTAVGKFTCHIAGVYYFTYHITVFSRNVQVSLVKNGVKILHTRDAYVSSEDQASGSIVLQLKLGDEMWLQVTGGERFNGLFADEDDDTTFTGFLLFSSQ

SEQ ID NO: 1814 - protein, 333 aa, Homo Sapiens; identical to SEQ ID NO: 1813

SEQ ID NO: 1815 - protein, 99 aa, Homo Sapiens
MRIWWLLLAIEICTGNINSQDTCRQGHPGIPGNPGHNGLPGRDGRDGAKGDKGDAGEPGCPGSPGKDGTSGEKGERGADGKVEAKGIKGMFRCLWSKTE

SEQ ID NO: 1816 - protein, 49 aa, Homo Sapiens
MSQGNKMLLTFHTDFSNEENGTIMFYKGFLAYYQAVDLDECASRSKSGE

SEQ ID NO: 1817 - protein, 72 aa, Homo Sapiens
MSQGNKMLLTFHTDFSNEENGTIMFYKGFLAYYQAVDLDECASRSKSGEEDPQPQCQHLCHNYVGGYFCSCR

SEQ ID NO: 1818 - protein, 94 aa, Homo Sapiens
MSQGNKMLLTFHTDFSNEENGTIMFYKGFLAYYQAVDLDECASRSKSGEEDPQPQCQHLCHNYVGGYFCSCRPGYELQEDRHSCQAECSSELYT

SEQ ID NO: 1819 - protein, 719 aa, Homo Sapiens
MSVRFRVGREENAQWWLLYLLVPALFCRAGGSIPIPQKLFGEVTSPLFPKPYPNNFETTTVITVPTGYRVKLVFQQFDLEPSEGCFYDYVKISADKKSLGRFCGQLGSPLGNPPGKKEFMSQGNKMLLTFHTDFSNEENGTIMFYKGFLAYYQAVDLDECASRSKSGEEDPQPQCQHLCHNYVGGYFCSCRPGYELQEDRHSCQAECSSELYTEASGYISSLEYPRSYPPDLRCNYSIRVERGLTLHLKFLEPFDIDDHQQVHCPYDQLQIYANGKNIGEFCGKQRPPDLDTSSNAVDLLFFTDESGDSRGWKLRYTTEIIKCPQPKTLDEFTIIQNLQPQYQFRDYFIATCKQGYQLIEGNQVLHSFTAVCQDDGTWHRAMPRCKIKDCGQPRNLPNGDFRYTTTMGVNTYKARIQYYCHEPYYKMQTRAGSRESEQGVYTCTAQGIWKNEQKGEKIPRCLPVCGKPVNPVEQRQRIIGGQKAKMGNFPWQVFTNIHGRGGGALLGDRWILTAAHTLYPKEHEAQSNASLDVFLGHTNVEELMKLGNHPIRRVSVHPDYRQDESYNFEGDIALLELENSVTLGPNLLPICLPDNDTFYDLGLMGYVSGFGVMEEKIAHDLRFVRLPVANPQACENWLRGKNRMDVFSQNMFCAGHPSLKQDACQGDSGGVFAVRDPNTDRWVATGIVSWGIGCSRGYGFYTKVLNYVDWIKKEMEEED

SEQ ID NO: 1820 - protein, 705 aa, Homo Sapiens
MWLLYLLVPALFCRAGGSIPIPQKLFGEVTSPLFPKPYPNNFETTTVITVPTGYRVKLVFQQFDLEPSEGCFYDYVKISADKKSLGRFCGQLGSPLGNPPGKKEFMSQGNKMLLTFHTDFSNEENGTIMFYKGFLAYYQAVDLDECASRSKSGEEDPQPQCQHLCHNYVGGYFCSCRPGYELQEDRHSCQAECSSELYTEASGYISSLEYPRSYPPDLRCNYSIRVERGLTLHLKFLEPFDIDDHQQVHCPYDQLQIYANGKNIGEFCGKQRPPDLDTSSNAVDLLFFTDESGDSRGWKLRYTTEIIKCPQPKTLDEFTIIQNLQPQYQFRDYFIATCKQGYQLIEGNQVLHSFTAVCQDDGTWHRAMPRCKIKDCGQPRNLPNGDFRYTTTMGVNTYKARIQYYCHEPYYKMQTRAGSRESEQGVYTCTAQGIWKNEQKGEKIPRCLPVCGKPVNPVEQRQRIIGGQKAKMGNFPWQVFTNIHGRGGGALLGDRWILTAAHTLYPKEHEAQSNASLDVFLGHTNVEELMKLGNHPIRRVSVHPDYRQDESYNFEGDIALLELENSVTLGPNLLPICLPDNDTFYDLGLMGYVSGFGVMEEKIAHDLRFVRLPVANPQACENWLRGKNRMDVFSQNMFCAGHPSLKQDACQGDSGGVFAVRDPNTDRWVATGIVSWGIGCSRGYGFYTKVLNYVDWIKKEMEEED

SEQ ID NO: 1821 - protein, 156 aa, Homo Sapiens
MWLLYLLVPALFCRAGGSIPIPQKLFGEVTSPLFPKPYPNNFETTTVITVPTGYRVKLVFQQFDLEPSEGCFYDYVKISADKKSLGRFCGQLGSPLGNPPGKKEFMSQGNKMLLTFHTDFSNEENGTIMFYKGFLAYYQAVGEEDPQPQCQHLCHN

SEQ ID NO: 1822 - protein, 144 aa, Homo Sapiens
MWLLYLLVPALFCRAGGSIPIPQKLFGEVTSPLFPKPYPNNFETTTVITVPTGYRVKLVFQQFDLEPSEGCFYDYVKISADKKSLGRFCGQLGSPLGNPPGKKEFMSQGNKMLLTFHTDFSNEENGTIMFYKGFLAYYQAVGLW

SEQ ID NO: 1823 - protein, 156 aa, Homo Sapiens
MWLLYLLVPALFCRAGGSIPIPQKLFGEVTSPLFPKPYPNNFETTTVITVPTGYRVKLVFQQFDLEPSEGCFYDYVKKEFMSQGNKMLLTFHTDFSNEENGTIMFYKGFLAYYQAVDLDECASRSKSGEEDPQPQCQHLCHNYVGGYFCSCRPGYE

SEQ ID NO: 1824 - protein, 671 aa, Homo Sapiens
MWLLYLLVPALFCRAGGSIPIPQKLFGEVTSPLFPKPYPNNFETTTVITVPTGYRVKLVFQQFDLEPSEGCFYDYVKMLLTFHTDFSNEENGTIMFYKGFLAYYQAVDLDECASRSKSGEEDPQPQCQHLCHNYVGGYFCSCRPGYELQEDRHSCQAECSSELYTEASGYISSLEYPRSYPPDLRCNYSIRVERGLTLHLKFLEPFDIDDHQQVHCPYDQLQIYANGKNIGEFCGKQRPPDLDTSSNAVDLLFFTDESGDSRGWKLRYTTEIIKCPQPKTLDEFTIIQNLQPQYQFRDYFIATCKQGYQLIEGNQVLHSFTAVCQDDGTWHRAMPRCKIKDCGQPRNLPNGDFRYTTTMGVNTYKARIQYYCHEPYYKMQTRAGSRESEQGVYTCTAQGIWKNEQKGEKIPRCLPVCGKPVNPVEQRQRIIGGQKAKMGNFPWQVFTNIHGRGGGALLGDRWILTAAHTLYPKEHEAQSNASLDVFLGHTNVEELMKLGNHPIRRVSVHPDYRQDESYNFEGDIALLELENSVTLGPNLLPICLPDNDTFYDLGLMGYVSGFGVMEEKIAHDLRFVRLPVANPQACENWLRGKNRMDVFSQNMFCAGHPSLKQDACQGDSGGVFAVRDPNTDRWVATGIVSWGIGCSRGYGFYTKVLNYVDWIKKEMEEED

SEQ ID NO: 1825 - protein, 83 aa, Homo Sapiens
GLRPGAVPGLCRGLCHNLIRRFGSKPVLWSARLPSGQAPWSEGVCILREEFAADLPHTAFLGEQDCPPPQGLPGPLPNRGCEL

SEQ ID NO: 1826 - protein, 110 aa, Homo Sapiens
MPGPRVWGKYLWRSPHSKGCPGAISHSSVRIQASSVVSKAPLWAGPLVRGSFQPISEASRGSEAINAPGDNPAKVQNHCQEPYYQAAAAGCGSYADPITDQPSVRFSPQL

SEQ ID NO: 1827 - protein, 314 aa, Homo Sapiens
MPGPRVWGKYLWRSPHSKGCPGAMWWLLLWGVLQACPTRGSVLLAQELPQQLTSPGYPEPYGKGQESSTDIKAPEGFAVRLVFQDFDLEPSQDCAGDSVTISFVGSDPSQFCGQQGSPLGRPPGQREFVSSGRSLRLTFRTQPSSENKTAHLHKGFLALYQTVAVNYSQPISEASRGSEAINAPGDNPAKVQNHCQEPYYQAAAAASTPSLFLCLSSFTPQGHSPVQPQGPGKTDRMGRRFFSVCLSADGQSPPLPRIRRPSVLPEPSWATSPGKPSPVSTAVGAGPCWGTDGSSLLPTPSTPRTVFLSGRTRV

SEQ ID NO: 1828 - protein, 487 aa, Homo Sapiens
MPGPRVWGKYLWRSPHSKGCPGAMWWLLLWGVLQACPTRGSVLLAQELPQQLTSPGYPEPYGKGQESSTDIKAPEGFAVRLVFQDFDLEPSQDCAGDSVTISFVGSDPSQFCGQQGSPLGRPPGQREFVSSGRSLRLTFRTQPSSENKTAHLHKGFLALYQTVAVNYSQPISEASRGSEAINAPGDNPAKVQNHCQEPYYQAAAAGALTCATPGTWKDRQDGEEVLQCMPVCGRPVTPIAQNQTTLGSSRAKLGNFPWQAFTSIHGRGGGALLGDRWILTAAHTIYPKDSVSLRKNQSVNVFLGHTAIDEMLKLGNHPVHRVVVHPDYRQNESHNFSGDIALLELQHSIPLGPNVLPVCLPDNETLYRSGLLGYVSGFGMEMGWLTTELKYSRLPVAPREACNAWLQKRQRPEVFSDNMFCVGDETQRHSVCQGDSGSVYVVWDNHAHHWVATGIVSWGIGCGEGYDFYTKVLSYVDWIKGVMNGKN

SEQ ID NO: 1829 - protein, 192 aa, Homo Sapiens
MPGPRVWGKYLWRSPHSKGCPGAMWWLLLWGVLQACPTRGSVLLAQELPQQLTSPGYPEPYGKGQESSTDIKAPEGFAVRLVFQDFDLEPSQDCAGDSVTISFVGSDPSQFCGQQGSPLGRPPGQREFVSSGRSLRLTFRTQPSSENKTAHLHKGFLALYQTVGALTCATPGTWKDRQDGEEVLQCMPVCGR

SEQ ID NO: 1830 - protein, 187 aa, Homo Sapiens
MPGPRVWGKYLWRSPHSKGCPGAMWWLLLWGVLQACPTRGSVLLAQELPQQLTSPGYPEPYGKGQESSTDIKAPEGFAVRLVFQDFDLEPSQDCAGDSVTISFVGSDPSQFCGQQGSPLGRPPGQREFVSSGRSLRLTFRTQPSSENKTAHLHKGFLALYQTVGECPSWGCREGASVPSHDPGIFKP

SEQ ID NO: 1831 - protein, 66 aa, Homo Sapiens
  misc_feature (1)..(1): Xaa can be any naturally occurring amino acid
XNPAKVQNHCQEPYYQAAAAGALTCATPGTWKDRQDGEEVLQCMPGCGSYADPITDQPSVRFSPQL

SEQ ID NO: 1832 - protein, 85 aa, Homo Sapiens
  misc_feature (1)..(1): Xaa can be any naturally occurring amino acid
XPGLRPGAVPGLCRGLCHNLIRRFGSKPVLWSARLPSGQAPWSEGVCILREEFAADLPHTAFLGEQDCPPPQGLPGPLPNRGCEL

SEQ ID NO: 1833 - protein, 194 aa, Homo Sapiens
  misc_feature (1)..(1): Xaa can be any naturally occurring amino acid
XSFVGSDPSQFCGQQGSPLGRPPGQREFVSSGRSLRLTFRTQPSSENKTAHLHKGFLALYQTVVCGRPVTPIAQNQTTLGSSRAKLGNFPWQAFTSIHGRGGGALLGDRWILTAAHTIYPKDSVSLRKNQSVNVFLGHTAIDEMLKLGNHPVHRVVVHPDYRQNESHNFSGDIALLELQHSIPLGPNVLPVCLP

SEQ ID NO: 1834 - protein, 157 aa, Homo Sapiens
MKNCGVNCSGDVFTALIGEIASPNYPKPYPENSRCEYQIRLEKGFQVVVTLRREDFDVEAADSAGNCLDSLVFVAGDRQFGPYCGHGFPGPLNIETKSNALDIIFQTDLTGQKKGWKLRYHGDPMPCPKEDTPNSVWEPAKAKYVFRDVVQITCLDG

SEQ ID NO: 1835 - protein, 521 aa, Homo Sapiens
MKNCGVNCSGDVFTALIGEIASPNYPKPYPENSRCEYQIRLEKGFQVVVTLRREDFDVEAADSAGNCLDSLVFVAGDRQFGPYCGHGFPGPLNIETKSNALDIIFQTDLTGQKKGWKLRYHGDPMPCPKEDTPNSVWEPAKAKYVFRDVVQITCLDGFEVVEGRVGATSFYSTCQSNGKWSNSKLKCQPVDCGIPESIENGKVEDPESTLFGSVIRYTCEEPYYYMENGGGGEYHCAGNGSWVNEVLGPELPKCVPVCGVPREPFEEKQRIIGGSDADIKNFPWQVFFDNPWAGGALINEYWVLTAAHVVEGNREPTMYVGSTSVQTSRLAKSKMLTPEHVFIHPGWKLLEVPEGRTNFDNDIALVRLKDPVKMGPTVSPICLPGTSSDYNLMDGDLGLISGWGRTEKRDRAVRLKAARLPVAPLRKCKEVKVEKPTADAEAYVFTPNMICAGGEKGMDSCKGDSGGAFAVQDPNDKTKFYAAGLVSWGPQCGTYGLYTRVKNYVDWIMKTMQENSTPRED

SEQ ID NO: 1836 - protein, 101 aa, Homo Sapiens
MWCIVLFSLLAWVYAEPTMYGEILSPNYPQAYPSEVEKSWDIEVPEGYGIHLYFTHLDIELSENCAYDSVQIISGDTEEGRLCGQRSSNNPHSPIVEEFQV

SEQ ID NO: 1837 - protein, 103 aa, Homo Sapiens
MWCIVLFSLLAWVYAEPTMYGEILSPNYPQAYPSEVEKSWDIEVPEGYGIHLYFTHLDIELSENCAYDSVQIISGDTEEGRLCGQRSSNNPHSPIVEEFQVPY

SEQ ID NO: 1838 - protein, 168 aa, Homo Sapiens
MWCIVLFSLLAWVYAEPTMYGEILSPNYPQAYPSEVEKSWDIEVPEGYGIHLYFTHLDIELSENCAYDSVQIISGDTEEGRLCGQRSSNNPHSPIVEEFQVPYNKLQVIFKSDFSNEERFTGFAAYYVATDINECTDFVDVPCSHFCNNFIGGYFCSCPPEYFLHDDM

SEQ ID NO: 1839 - protein, 688 aa, Homo Sapiens
MWCIVLFSLLAWVYAEPTMYGEILSPNYPQAYPSEVEKSWDIEVPEGYGIHLYFTHLDIELSENCAYDSVQIISGDTEEGRLCGQRSSNNPHSPIVEEFQVPYNKLQVIFKSDFSNEERFTGFAAYYVATDINECTDFVDVPCSHFCNNFIGGYFCSCPPEYFLHDDMKNCGVNCSGDVFTALIGEIASPNYPKPYPENSRCEYQIRLEKGFQVVVTLRREDFDVEAADSAGNCLDSLVFVAGDRQFGPYCGHGFPGPLNIETKSNALDIIFQTDLTGQKKGWKLRYHGDPMPCPKEDTPNSVWEPAKAKYVFRDVVQITCLDGFEVVEGRVGATSFYSTCQSNGKWSNSKLKCQPVDCGIPESIENGKVEDPESTLFGSVIRYTCEEPYYYMENGGGGEYHCAGNGSWVNEVLGPELPKCVPVCGVPREPFEEKQRIIGGSDADIKNFPWQVFFDNPWAGGALINEYWVLTAAHVVEGNREPTMYVGSTSVQTSRLAKSKMLTPEHVFIHPGWKLLEVPEGRTNFDNDIALVRLKDPVKMGPTVSPICLPGTSSDYNLMDGDLGLISGWGRTEKRDRAVRLKAARLPVAPLRKCKEVKVEKPTADAEAYVFTPNMICAGGEKGMDSCKGDSGGAFAVQDPNDKTKFYAAGLVSWGPQCGTYGLYTRVKNYVDWIMKTMQENSTPRED

SEQ ID NO: 1840 - protein, 688 aa, Homo Sapiens; identical to SEQ ID NO: 1839

SEQ ID NO: 1841 - protein, 688 aa, Homo Sapiens; identical to SEQ ID NO: 1839

SEQ ID NO: 1842 - protein, 682 aa, Homo Sapiens [sequence omitted]

SEQ ID NO: 1843 - protein, 355 aa, Homo Sapiens
  misc_feature (1)..(1): Xaa can be any naturally occurring amino acid
XSKVRRCRKPGPRDRQLTRVDKSPEMWCIVLFSLLAWVYAEPTMYGEILSPNYPQAYPSEVEKSWDIEVPEGYGIHLYFTHLDIELSENCAYDSVQIISGDTEEGRLCGQRSSNNPHSPIVEEFQVPYNKLQVIFKSDFSNEERFTGFAAYYVATDINECTDFVDVPCSHFCNNFIGGYFCSCPPEYFLHDDMKNCGVNCSGDVFTALIGEIASPNYPKPYPENSRCEYQIRLEKGFQVVVTLRREDFDVEAADSAGNCLDSLVFVAGDRQFGPYCGHGFPGPLNIETKSNALDIIFQTDLTGQKKGWKLRYHGDPMPCPKEDTPNSVWEPAKAKYVFRDVVQITCLDGFEVVEK

SEQ ID NO: 1844 - protein, 620 aa, Homo Sapiens
MGPLMVLFCLLFLYPAGHCPNPGISLGAVRTGFRFGHGDKVRYRCSSNLVLTGSSERECQGNGVWSGTEPICRQPYSYDFPEDVAPALGTSFSHMLGATNPTQKTKESLGRKIQIQRSGHLNLYLLLDCSQSVSENDFLIFKESASLMVDRIFSFEINVSVAIITFASEPKVLMSVLNDNSRDMTEVISSLENANYKDHENGTGTNTYAALNSVYLMMNNQMRLLGMETMAWQEIRHAIILLTDGKSNMGGSPKTAVDHIREILNINQKRNDYLDIYAIGVGKLDVDWRELNELGSKKDGERHAFILQDTKALHQVFEHMLDVSKLTDTICGVGNMSANASDQERTPWHVTIKPKSQETCRGALISDQWVLTAAHCFRDGNDHSLWRVNVGDPKSQWGKEFLIEKAVISPGFDVFAKKNQGILEFYGDDIALLKLAQKVKMSTHARPICLPCTMEANLALRRPQGSTCRDHENELLNKQSVPAHFVALNGSKLNINLKMGVEWTSCAEVVSQEKTMFPNLTDVREVVTDQFLCSGTQEDESPCKGESGGAVFLERRFRFFQVGLVSWGLYNPCLGSADKNSRKRAPRSKVPPPRDFHINLFRMQPWLRQHLGDVLNFLPL

SEQ ID NO: 1845 - protein, 203 aa, Homo Sapiens
MGPLMVLFCLLFLYPGLADSAPSCPQNVNISGGTFTLSHGWAPGSLLTYSCPQGLYPSPASRLCKSSGQWQTPGATRSLSKAVCKPGHCPNPGISLGAVRTGFRFGHGDKVRYRCSSNLVLTGSSERECQGNGVWSGTEPICRQPYSYDFPEDVAPALGTSFSHMLGATNPTQKTKESLGRKIQIQRSGHLNLYLLLDCSQSV

SEQ ID NO: 1846 - protein, 139 aa, Homo Sapiens
MGPLMVLFCLLFLYPGLADSAPSCPQNVNISGGTFTLSHGWAPGSLLTYSCPQGLYPSPASRLCKSSGQWQTPGATRSLSKAVCKPVRCPAPVSFENGIYTPRLGSYPVGGNVSFECEDGFILRGSPVRQCRPNGMWDG

SEQ ID NO: 1847 - protein, 752 aa, Homo Sapiens
MGPLMVLFCLLFLYPGLADSAPSCPQNVNISGGTFTLSHGWAPGSLLTYSCPQGLYPSPASRLCKSSGQWQTPGATRSLSKAVCKPVRCPAPVSFENGIYTPRLGSYPVGGNVSFECEDGFILRGSPVRQCRPNGMWDGETAVCDNGAGHCPNPGISLGAVRTGFRFGHGDKVRYRCSSNLVLTGSSERECQGNGVWSGTEPICRQPYSYDFPEDVAPALGTSFSHMLGATNPTQKTKESLGRKIQIQRSGHLNLYLLLDCSQSVSENDFLIFKESASLMVDRIFSFEINVSVAIITFASEPKVLMSVLNDNSRDMTEVISSLENANYKDHENGTGTNTYAALNSVYLMMNNQMRLLGMETMAWQEIRHAIILLTDGKSNMGGSPKTAVDHIREILNINQKRNDYLDIYAIGVGKLDVDWRELNELGSKKDGERHAFILQDTKALHQVFEHMLDVSKLTDTICGVGNMSANASDQERTPWHVTIKPKSQETCRGALISDQWVLTAAHCFRDGNDHSLWRVNVGDPKSQWGKEFLIEKAVISPGFDVFAKKNQGILEFYGDDIALLKLAQKVKMSTHARPICLPCTMEANLALRRPQGSTCRDHENELLNKQSVPAHFVALNGSKLNINLKMGVEWTSCAEVVSQEKTMFPNLTDVREVVTDQFLCSGTQEDESPCKGESGGAVFLERRFRFFQVGLVSWGLYNPCLGSADKNSRKRAPRSKVPPPRDFHINLFRMQPWLRQHLGDVLNFLPL

SEQ ID NO: 1848 - protein, 328 aa, Homo Sapiens
MGPLMVLFCLLFLYPGLADSAPSCPQNVNISGGTFTLSHGWAPGSLLTYSCPQGLYPSPASRLCKSSGQWQTPGATRSLSKAVCKPVRCPAPVSFENGIYTPRLGSYPVGGNVSFECEDGFILRGSPVRQCRPNGMWDGETAVCDNGAGHCPNPGISLGAVRTGFRFGHGDKVRYRCSSNLVLTGSSERECQGNGVWSGTEPICRQPYSYDFPEDVAPALGTSFSHMLGATNPTQKTKESLGRKIQIQRSGHLNLYLLLDCSQSVSENDFLIFKESASLMVDRVRNQESACSRGLPVLTISLCLLPLLRTPLTAHLLQEVFSDYTHAM

SEQ ID NO: 1849 - protein, 104 aa, Homo Sapiens
MGPLMVLFCLLFLYPGLADSAPSCPQNVNISGGTFTLSHGWAPGSLLTYSCPQGLYPSPASRLCKSSGQWQTPGATRSLSKAVCKREAPCGLCSGCALSSPCLL

SEQ ID NO: 1850 - protein, 136 aa, Homo Sapiens
MGRPGRAGHCPNPGISLGAVRTGFRFGHGDKVRYRCSSNLVLTGSSERECQGNGVWSGTEPICRQPYSYDFPEDVAPALGTSFSHMLGATNPTQKTKESLGRKIQIQRSGHLNLYLLLDCSQSVSENDFLIFKESA

SEQ ID NO: 1851 - protein, 506 aa, Homo Sapiens
MGTRSAIAAPRILCSRGLRSGSARATGSGVERSPSAAIFSFEINVSVAIITFASEPKVLMSVLNDNSRDMTEVISSLENANYKDHENGTGTNTYAALNSVYLMMNNQMRLLGMETMAWQEIRHAIILLTDGKSNMGGSPKTAVDHIREILNINQKRNDYLDIYAIGVGKLDVDWRELNELGSKKDGERHAFILQDTKALHQVFEHMLDVSKLTDTICGVGNMSANASDQERTPWHVTIKPKSQETCRGALISDQWVLTAAHCFRDGNDHSLWRVNVGDPKSQWGKEFLIEKAVISPGFDVFAKKNQGILEFYGDDIALLKLAQKVKMSTHARPICLPCTMEANLALRRPQGSTCRDHENELLNKQSVPAHFVALNGSKLNINLKMGVEWTSCAEVVSQEKTMFPNLTDVREVVTDQFLCSGTQEDESPCKGESGGAVFLERRFRFFQVGLVSWGLYNPCLGSADKNSRKRAPRSKVPPPRDFHINLFRMQPWLRQHLGDVLNFLPL

SEQ ID NO: 1852 - protein, 463 aa, Homo Sapiens
MGTRSAIAAPRILCSRGLRSGSARATGSGVERSPSAANPTLMTSLRTWPLPWALPSPTCLGPPIPPRRQRIFSFEINVSVAIITFASEPKVLMSVLNDNSRDMTEVISSLENANYKDHENGTGTNTYAALNSVYLMMNNQMRLLGMETMAWQEIRHAIILLTDGKSNMGGSPKTAVDHIREILNINQKRNDYLDIYAIGVGKLDVDWRELNELGSKKDGERHAFILQDTKALHQVFEHMLDVSKLTDTICGVGNMSANASDQERTPWHVTIKPKSQETCRGALISDQWVLTAAHCFRDGNDHSLWRVNVGDPKSQWGKEFLIEKAVISPGFDVFAKKNQGILEFYGDDIALLKLAQKVKMSTHARPICLPCTMEANLALRRPQGSTCRDHENELLNKQSVPAHFVALNGSKLNINLKMGVEWTSCAEVVSQEKTMFPNLTDVREVVTDQFLCSGTQEDESPCK

SEQ ID NO: 1853 - protein, 84 aa, Homo Sapiens
MGTRSAIAAPRILCSRGLRSGSARATGSGVERSPSAANPTLMTSLRTWPLPWALPSPTCLGPPIPPRRQRKAWAVKSKSSALVI

SEQ ID NO: 1854 - protein, 84 aa, Homo Sapiens; identical to SEQ ID NO: 1853

SEQ ID NO: 1855 - protein, 538 aa, Homo Sapiens
MRALCIRETCSSELGFSRNWSRRKAGHCPNPGISLGAVRTGFRFGHGDKVRYRCSSNLVLTGSSERECQGNGVWSGTEPICRQPYSYDFPEDVAPALGTSFSHMLGATNPTQKTKDHENGTGTNTYAALNSVYLMMNNQMRLLGMETMAWQEIRHAIILLTDGKSNMGGSPKTAVDHIREILNINQKRNDYLDIYAIGVGKLDVDWRELNELGSKKDGERHAFILQDTKALHQVFEHMLDVSKLTDTICGVGNMSANASDQERTPWHVTIKPKSQETCRGALISDQWVLTAAHCFRDGNDHSLWRVNVGDPKSQWGKEFLIEKAVISPGFDVFAKKNQGILEFYGDDIALLKLAQKVKMSTHARPICLPCTMEANLALRRPQGSTCRDHENELLNKQSVPAHFVALNGSKLNINLKMGVEWTSCAEVVSQEKTMFPNLTDVREVVTDQFLCSGTQEDESPCKGESGGAVFLERRFRFFQVGLVSWGLYNPCLGSADKNSRKRAPRSKVPPPRDFHINLFRMQPWLRQHLGDVLNFLPL

SEQ ID NO: 1856 - protein, 158 aa, Homo Sapiens
MRALCIRETCSSELGFSRNWSRRKAGHCPNPGISLGAVRTGFRFGHGDKVRYRCSSNLVLTGSSERECQGNGVWSGTEPICRQPYSYDFPEDVAPALGTSFSHMLGATNPTQKTKESLGRKIQIQRSGHLNLYLLLDCSQSVSENDFLIFKESASLMV

SEQ ID NO: 1857 - protein, 160 aa, Homo Sapiens
  misc_feature (1)..(1): Xaa can be any naturally occurring amino acid
XLMVDRIFSFEINVSVAIITFASEPKVLMSVLNDNSRDMTEVISSLENANYKDHENGTGTNTYAALNSVYLMMNNQMRLLGMETMAWQEIRHAIILLTDGKSNMGGSPKTAVDHIREILNINQKRNDYLAPKPQESGDFPLPHQTSMPSGWASWMWTGEN

SEQ ID NO: 1858 - protein, 526 aa, Homo Sapiens
  misc_feature (1)..(1): Xaa can be any naturally occurring amino acid
XMVLFCLLFLYPAGHCPNPGISLGAVRTGFRFGHGDKVRYRCSSNLVLTGSSERECQGNGVWSGTEPICRQPYSYDFPEDVAPALGTSFSHMLGATNPTQKTKDHENGTGTNTYAALNSVYLMMNNQMRLLGMETMAWQEIRHAIILLTDGKSNMGGSPKTAVDHIREILNINQKRNDYLDIYAIGVGKLDVDWRELNELGSKKDGERHAFILQDTKALHQVFEHMLDVSKLTDTICGVGNMSANASDQERTPWHVTIKPKSQETCRGALISDQWVLTAAHCFRDGNDHSLWRVNVGDPKSQWGKEFLIEKAVISPGFDVFAKKNQGILEFYGDDIALLKLAQKVKMSTHARPICLPCTMEANLALRRPQGSTCRDHENELLNKQSVPAHFVALNGSKLNINLKMGVEWTSCAEVVSQEKTMFPNLTDVREVVTDQFLCSGTQEDESPCKGESGGAVFLERRFRFFQVGLVSWGLYNPCLGSADKNSRKRAPRSKVPPPRDFHINLFRMQPWLRQHLGDVLNFLPL

SEQ ID NO: 1859 - protein, 57 aa, Homo Sapiens
MAAVRVLVASRLAAASAFTSLSPGGRTPSQRAALHLSVPRPAARVALDPGAPEPWRG

SEQ ID NO: 1860 - protein, 163 aa, Homo Sapiens
MAAVRVLVASRLAAASAFTSLSPGGRTPSQRAALHLSVPRPAARVALVLSGCGVYDGTEIHEASAILVHLSRGGAEVQIFAPDVPQMHVIDHTKGQPSEGESRNVLTESARIARGKITDLANLSAANHDAAIFPGGFGAAKNLDSVSLWTSSLWNCERYMSVM

SEQ ID NO: 1861 - protein, 237 aa, Homo Sapiens
MAAVRVLVASRLAAASAFTSLSPGGRTPSQRAALHLSVPRPAARVALVLSGCGVYDGTEIHEASAILVHLSRGGAEVQIFAPDVPQMHVIDHTKGQPSEGESRNVLTESARIARGKITDLANLSAANHDAAIFPGGFGAAKNLLCCIAPVLAAKVLRGVEVTVGHEQEEGGKWPYAGTAEAIKALGAKHCVKEVVEAHVDQKNKVVTTPAFMCETALHYIHDGIGAMVRKVLELTGK

SEQ ID NO: 1862 - protein, 217 aa, Homo Sapiens
MAAVRVLVASRLAAASAFTSLSPGGRTPSQRAALHLSVPRPAARVALVLSGCGVYDGTEIHEASAILVHLSRGGAEVQIFAPDVPQMHVIDHTKGQPSEGESRNVLTESARIARGKITDLANLSAANHDAAIFPGGFGAAKNLSTFAVDGKDCKVNKEVERVLKEFHQAGKPIGCDASTSLPAPAPWWSWNAALCCPGLSCVWCWQGESRTCVGEHQ

SEQ ID NO: 1863 - protein, 268 aa, Homo Sapiens
MAAVRVLVASRLAAASAFTSLSPGGRTPSQRAALHLSVPRPAARVALVLSGCGVYDGTEIHEASAILVHLSRGGAEVQIFAPDVPQMHVIDHTKGQPSEGESRNVLTESARIARGKITDLANLSAANHDAAIFPGGFGAAKNLSTFAVDGKDCKVNKEVERVLKEFHQAGKPIGLCCIAPVLAAKVLRGVEVTVGHEQEEGGKWPYAGTAEAIKALGAKHCVKEVVEAHVDQKNKVVTTPAFMCETALHYIHDGIGAMVRKVLELTGK

SEQ ID NO: 1864 - protein, 224 aa, Homo Sapiens
PSQRAALHLSVPRPAARVALVLSGCGVYDGTEIHEASAILVHLSRGGAEVQIFAPDVPQMHVIDHTKGQPSEGESRNVLTESARIARGKITDLANLSAANHDAAIFPGGFGAAKNLSTFAVDGKDCKVNKEVERVLKEFHQAGKPIGHSLKDLPGHCPGRPLKWSLRKRCRLRAPEGGPCCSRVTAGVKVSPMVSTSGSRPCQRSVPWMSAQREEPMALSSVTD

SEQ ID NO: 1865 - protein, 184 aa, Homo Sapiens
QPSEGESRNVLTESARIARGKITDLANLSAANHDAAIFPGGFGAAKNLSTFAVDGKDCKVNKEVERVLKEFHQAGKPIGLCCIAPVLAAKVLRGVEVTVGHEQEEGGKWPYAGTAEAIKALGAKHCVKEVVEAHVDQKNKVVTTPAFMCETALHYIHDGIGAMASWACWLMPVIPALWEAKARG

SEQ ID NO: 1866 - protein, 191 aa, Homo Sapiens
  misc_feature (1)..(1): Xaa can be any naturally occurring amino acid
XQMHVIDHTKGQPSEGESRNVLTESARIARGKITDLANLSAANHDAAIFPGGFGAAKNLSTFAVDGKDCKVNKEVERVLKEFHQAGKPIGLCCIAPVLAAKVLRGVEVTVGHEQEEGGKWPYAGTAEAIKALGAKHCVKEVVEAHVDQKNKVVTTPAFMCETALHYIHDGIGAMEEREIAAPQPPGLTSGE

SEQ ID NO: 1867 - protein, 190 aa, Homo Sapiens
  misc_feature (1)..(1): Xaa can be any naturally occurring amino acid
XSRGGAEVQIFAPDVPQMHVIDHTKGQPSEGESRNVLTESARIARGKITDLANLSAANHDAAIFPGGFGAAKNLSTFAVDGKDCKVNKEVERVLKEFHQAGKPIGPGDGGDVSMSVSLRSLSLALSLPGGSCSQPSLPPHRHPACPSGPARLLCLEGATKEEDVNVQVLREAGPAASVSVFRPQEEPRPG

SEQ ID NO: 1868 - protein, 266 aa, Homo Sapiens
CRLNQLSSQGEGSVARQRSVEWRGEASRWNSQMTACRHQESGRTYRRQPCTELGTCNNNSTLGVFALNCFTKGQKNSTLIFTRENTIRNCSCSADIRDCDYSLANLMCNCKTVLPLAVERTSYNGHLTIWFTDTSALGHLLNFTLVQDLKLSLCSTNTLPTEYLAICGLKRLRINMEAKHPFPEQSLLIHSGGDSDSREKPMWLHKGWQPCMYISFLDMALFNRDSALKSYSIENVTSIANNFPDFSYFRTFPMPSNKSYVVTFIY

SEQ ID NO: 1869 - protein, 219 aa, Homo Sapiens
MAPPSRHCLLLISTLGVFALNCFTKGQKNSTLIFTRENTIRNCSCSADIRDCDYSLANLMCNCKTVLPLAVERTSYNGHLTIWFTDTSALGHLLNFTLVQDLKLSLCSTNTLPTEYLAICGLKRLRINMEAKHPFPEQSLLIHSGGDSDSREKPMWLHKGWQPCMYISFLDMALFNRDSALKSYSIENVTSIANNFPDFSYFRTFPMPSNKSYVVTFIY

SEQ ID NO: 1870 - protein, 219 aa, Homo Sapiens; identical to SEQ ID NO: 1869

SEQ ID NO: 1871 - protein, 219 aa, Homo Sapiens; identical to SEQ ID NO: 1869

SEQ ID NO: 1872 - protein, 148 aa, Homo Sapiens
MFIKVMFGAGCSVLVNTSCRLVNLTAHLRQKAGLPPDATIALLAEDGNLVSLEEDLKEGASRAQTMGNSLLKERAIYVLVRIIKGEDMASTRYESLLENLDDHYPELAEELRRLSGLSSVGHNWRKRMGTRRGRHEQSPTSRPRKGPD

SEQ ID NO: 1873 - protein, 157 aa, Homo Sapiens
MFIKVMFGAGCSVLVNTSCRLVNLTAHLRQKAGLPPDATIALLAEDGNLVSLEEDLKEGASRAQTMGNSLLKERAIYVLVRIISKRERTWPPPAMSPYWRTWMTITQSWQRNCAGCQASPLWATTGGSVWALGEAAMSKAPLQGPERALIKGMDCTL

SEQ ID NO: 1874 - protein, 142 aa, Homo Sapiens
MFIKVMFGAGCSVLVNTSCRLVNLTAHLRQKAGLPPDATIALLAEDGNLVSLEEDLKEGASRAQTMGNSLLKERAIYVLVRIISKVAQEGEDMASTRYESLLENLDDHYPELAGANRQQPSRTPLAESGIAEKLHQQEGQGP

SEQ ID NO: 1875 - protein, 243 aa, Homo Sapiens
MLLSLLGACAVVGPFHGPEWEPVQGLLSQNHSCRDPQCCGNLLVLCLFLVWQVRHCWHQVTRTRFSTRNVIKVPLQKRAVPSMRCETVFKLTPEFFSPGKSRGLDSQQCAQRQRWGYRRSLQESWAQNLLSPQHPCPGPPSGVHTHSEPIFCTTSISNTCLLPQNSSWKAWQVPWCLHDGQTRPALDMCQEMEQLLLHSQERLVSLEPVISVRSRPTSMTLTTSLPNLLSAERLQFCPQRAPA

SEQ ID NO: 1876 - protein, 696 aa, Homo Sapiens
MAMARLGSWLGEAQWLALVSLFVAALATVGLYLAQWALARARPQPQRRAVEPGEGPRPGSDALLSWILTLGSWRSQWQAAWVTALNEEAERKGGPPFLSFEEDPRQQALELVVQEVSSVLRSAEEKVVVCHVVGQAIQFLVSETPALGAGCRLYDMRLSPFHLQLEFHMKEKREDLQISWSFISVPEMAVNIQPKALGEDQVAETSAMSDVLKDILKHLAGSASPSVVLITKPTTVKEAQNLQCAASTAQESCPPKPPRAHELKLLVRNIHVLLLSEPGASGHINAVCVVQLNDPVQRFSSTLTKNTPDLMWEEEFTFELNAKSKELHLQISEAGRSSEGLLATATVPLDLFKKQPSGPQSFTLTSGSACGSSVLGSVTAEFSYMEPGELKSWPIPPPVPAAKIEKDRTVMPCGTVVTTVTAVKTKPRVDVGRASPLSSDSPVKTPIKVKVIEKDISVQAIACRSAPVSKTLSSSDTELLVLNGSDPVAEVAIRQLSESSKLKLKSPRKKSTIIISGISKTSLSQDHDAALMQGYTASVDSTHQEDAPSHPERAAASAPPEEAESAQASLAPKPQEDELDSWDLEKEPQAAAWSSQVLLDPDGDELSESSMSVLEPGTAKKHKGGILRKGAKLFFRRRHQQKDPGMSQSHNDLVFLEQPEGSRRKGITLTRILNKKLLSRHRNKNTMNGAPVEPCT

SEQ ID NO: 1877 - protein, 541 aa, Homo Sapiens
MRLSPFHLQLEFHMKEKREDLQISWSFISVPEMAVNIQPKALGEDQVAETSAMSDVLKDILKHLAGSASPSVVLITKPTTVKEAQNLQCAASTAQESCPPKPPRAHELKLLVRNIHVLLLSEPGASGHINAVCVVQLNDPVQRFSSTLTKNTPDLMWEEEFTFELNAKSKELHLQISEAGRSSEGLLATATVPLDLFKKQPSGPQSFTLTSGSACGSSVLGSVTAEFSYMEPGELKSWPIPPPVPAAKIEKDRTVMPCGTVVTTVTAVKTKPRVDVGRASPLSSDSPVKTPIKVKVIEKDISVQAIACRSAPVSKTLSSSDTELLVLNGSDPVAEVAIRQLSESSKLKLKSPRKKSTIIISGISKTSLSQDHDAALMQGYTASVDSTHQEDAPSHPERAAASAPPEEAESAQASLAPKPQEDELDSWDLEKEPQAAAWSSQVLLDPDGDELSESSMSVLEPGTAKKHKGGILRKGAKLFFRRRHQQKDPGMSQSHNDLVFLEQPEGSRRKGITLTRILNKKLLSRHRNKNTMNGAPVEPCT

SEQ ID NO: 1878 - protein, 182 aa, Homo Sapiens
  misc_feature (1)..(1): Xaa can be any naturally occurring amino acid
XSTIIISGISKDHDAALMQGYTASVDSTHQEDAPSHPERAAASAPPEEAESAQASLAPKPQEDELDSWDLEKEPQAAAWSSQVLLDPDGDELSESSMSVLEPGTAKKHKGGILRKGAKLFFRRRHQQKDPGMSQSHNDLVFLEQPEGSRRKGITLTRILNKKLLSRHRNKNTMNGAPVEPCT

SEQ ID NO: 1879 - protein, 148 aa, Homo Sapiens
MAASPARPAVLALTGLALLLLLCWGPGGISGNKLKLMLQKREAPVPTKTKVAVDENKAKEFLGSLKRQKRQLWDRTRPEVQQWYQQFLYMGFDEAKFEDDITYWLNRDRNGHEYYGDYYQRHYDEDSAIGPRSPYGFRHGASVNYDDY

SEQ ID NO: 1880 - protein, 112 aa, Homo Sapiens
MLQKREAPVPTKTKVAVDENKAKEFLGSLKRQKRQLWDRTRPEVQQWYQQFLYMGFDEAKFEDDITYWLNRDRNGHEYYGDYYQRHYDEDSAIGPRSPYGFRHGASVNYDDY

SEQ ID NO: 1881 - protein, 142 aa, Homo Sapiens
MQQLRVRGSYRSASQFAGWRRVFYQARQGGISGNKLKLMLQKREAPVPTKTKVAVDENKAKEFLGSLKRQKRQLWDRTRPEVQQWYQQFLYMGFDEAKFEDDITYWLNRDRNGHEYYGDYYQRHYDEDSAIGPRSPYGFRHG

SEQ ID NO: 1882 - protein, 117 aa, Homo Sapiens
MIIDSSRIPSFTQLHSTMTRAPLLLLCVALVLLGHVNGATVRNEDKWKPLNNPRNRDLFFRRLQAYFKGRGLDLGTFPNPFPTNENPRPLSFQSELTASASADYEEQKNSFHNYLKG

SEQ ID NO: 1883 - protein, 385 aa, Homo Sapiens
MWGFRLLRSPPLLLLLPQLGIGNASSCSQARTMNPGGSGGARCSLSAEVRRRQCLQLSTVPGADPQRSNELLLLAAAGEGLERQDLPGDPAKEEPQPPPQHHVLYFPGDVQNYHEIMTRHPENYQWENWSLENVATILAHRFPNSYIWVIKCSRMHLHKFSCYDNFVKSNMFGAPEHNTDFGAFKHLYMLLVNAFNLSQNSLSKKSLNVWNKDSIASNCRSSPSHTTNGCQGEKVRTCEKSDESAMSFYPPSLNDASFTLIGFSKGCVVLNQLLFELKEAKKDKNIDAFIKSIRTMYWLDGGHSGGSNTWVTYPEVLKEFAQTGIIVHTHVTPYQVRDPMRSWIGKEHKKFVQILGDLGMQVTSQIHFTKEAPSIENHFRVHEVF

SEQ ID NO: 1884 - protein, 922 aa, Homo Sapiens
MHWLASATQTSASIVSSSLLSAVDVSSSLTMSEYFQNTSLPGTANSRQFSLPVVSNAAFLTGSISNFSRASAPAISSAWLQPSASGTSFQPLMGSAYLYQHSSTTMLSGVTGQSHICTSAASYPGVFEWDSTASTVKKSSSLRDFTVTVIDQNTAVSSMSMTAQYYKTSDTNTMVPLYPSLSASLVQGTLTQIPNQQGHNLSLPCQIGSQVYYYNQGTLGPQLSCLQSYGSVSYTGYRASAHQPEMVMVLKEVQPTNVLPPVSTSGMYYSVSSQPITETSVQVMETSLGMDTSLGLQSPSQTFCLPQTPEFSKSFSSRNTQTLESNPSPELGDISITPVQSPTNLLTLSPAPSQEKNENENLDEIKTNLSKPLDVHQILIGNQDPPLLPVEIPDIHPLLACIDPLGQEEQPGSENANLRNKSLSLEDQGIFENGIESSSDLADITTWVEDTYLPPIFSSLQDLDQPESPSAKKAKDTSAIKVNQVQEKSCVIKGHSDQVRKNKHKASEPIQGAPKAKIQPKNPECLLEREVVVGSATVSNSASVNKAKHSSNKPHKAASSRISKTKSHGQEKTKGNRKNSSKKSEESKQSGKKVKVEEKQTIPNMKRKKNQPELSQKTLKKPRSSLGMHMLESVQVFHALGKKIDMKTGFSSSRTLGSSSNTQNRQPFPALKPWLDIQHEGKGPEKIQVKAQKLDGSAEKECTSPSHSELPPPGKVKLIPLPFLTLDQPQARHVSRRPNPLASRRPAVAYPARPDSTNSAQSNAVNPSRPAPTNTSLTGPATPAQPISAKATQPSSANPTQPTVPQSAASRPSAYKTSSCSSLQREPVSTAVTSLRSLPKPQNQFLIQDFSLQPRPWRKPTVPEPVMSTPITEEQRPEREAMKRKAQQERENAAKYTSLGKVQFFIERERDMEIAEYYGYTI

SEQ ID NO: 1885 - protein, 192 aa, Homo Sapiens
ITHRIHWESASLLRSEETKENEGFTVTAEGKGQGTLSVVTMYHAKAKDQLTCNKFDLKVTIKPAPETGIPSPIFLSSVFLEKRPQDAKNTMILEICTRYRGDQDATMSILDISMMTGFAPDTDDLKQLANGVDRYISKYELDKAFSDRNTLIIYLDKVSHSEDDCLAFKVHQYFNVELIQPGAVKVYAYYNL

SEQ ID NO: 1886 - protein, 1663 aa, Homo Sapiens
MGPTSGPSLLLLLLTHLPLALGSPMYSIITPNILRLESEETMVLEAHDAQGDVPVTVTVHDFPGKKLVLSSEKTVLTPATNHMGNVTFTIPANREFKSEKGRNKFVTVQATFGTQVVEKVVLVSLQSGYLFIQTDKTIYTPGSTVLYRIFTVNHKLLPVGRTVMVNIENPEGIPVKQDSLSSQNQLGVLPLSWDIPELVNMGQWKIRAYYENSPQQVFSTEFEVKEYVLPSFEVIVEPTEKFYYIYNEKGLEVTITARFLYGKKVEGTAFVIFGIQDGEQRISLPESLKRIPIEDGSGEVVLSRKVLLDGVQNPRAEDLVGKSLYVSATVILHSGSDMVQAERSGIPIVTSPYQIHFTKTPKYFKPGMPFDLMVFVTNPDGSPAYRVPVAVQGEDTVQSLTQGDGVAKLSINTHPSQKPLSITVRTKKQELSEAEQATRTMQALPYSTVGNSNNYLHLSVLRTELRPGETLNVNFLLRMDRAHEAKIRYYTYLIMNKGRLLKAGRQVREPGQDLVVLPLSITTDFIPSFRLVAYYTLIGASGQREVVADSVWVDVKDSCVGSLVVKSGQSEDRQPVPGQQMTLKIEGDHGARVVLVAVDKGVFVLNKKNKLTQSKIWDVVEKADIGCTPGSGKDYAGVFSDAGLTFTSSSGQQTAQRAELQCPQPAARRRRSVQLTEKRMDKVGKYPKELRKCCEDGMRENPMRFSCQRRTRFISLGEACKKVFLDCCNYITELRRQHARASHLGLARSNLDEDIIAEENIVSRSEFPESWLWNVEDLKEPPKNGISTKLMNIFLKDSITTWEILAVSMSDKKGICVADPFEVTVMQDFFIDLRLPYSVVRNEQVEIRAVLYNYRQNQELKVRVELLHNPAFCSLATTKRRHQQTVTIPPKSSLSVPYVIVPLKTGLQEVEVKAAVYHHFISDGVRKSLKVVPEGIRMNKTVAVRTLDPERLGREGVQKEDIPPADLSDQVPDTESETRILLQGTPVAQMTEDAVDAERLKHLIVTPSGCGEQNMIGMTPTVIAVHYLDETEQWEKFGLEKRQGALELIKKGYTQQLAFRQPSSAFAAFVKRAPSTWLTAYVVKVFSLAVNLIAIDSQVLCGAVKWLILEKQKPDGVFQEDAPVIHQEMIGGLRNNNEKDMALTAFVLISLQEAKDICEEQVNSLPGSITKAGDFLEANYMNLQRSYTVAIAGYALAQMGRLKGPLLNKFLTTAKDKNRWEDPGKQLYNVEATSYALLALLQLKDFDFVPPVVRWLNEQRYYGGGYGSTQATFMVFQALAQYQKDAPDHQELNLDVSLQLPSRSSKITHRIHWESASLLRSEETKENEGFTVTAEGKGQGTLSVVTMYHAKAKDQLTCNKFDLKVTIKPAPETEKRPQDAKNTMILEICTRYRGDQDATMSILDISMMTGFAPDTDDLKQLANGVDRYISKYELDKAFSDRNTLIIYLDKVSHSEDDCLAFKVHQYFNVELIQPGAVKVYAYYNLEESCTRFYHPEKEDGKLNKLCRDELCRCAEENCFIQKSDDKVTLEERLDKACEPGVDYVYKTRLVKVQLSNDFDEYIMAIEQTIKSGSDEVQVGQQRTFISPIKCREALKLEEKKHYLMWGLSSDFWGEKPNLSYIIGKDTWVEHWPEEDECQDEENQKQCQDLGAFTESMVVFGCPN

SEQ ID NO: 1887 - protein, 103 aa, Homo Sapiens
MVLEAHDAQGDVPVTVTVHDFPGKKLVLSSEKTVLTPATNHMGNVTFTIPANREFKSEKGRNKFVTVQATFGTQVVEKVVLVSLQSGYLFIQTDKTIYTPGST

SEQ ID NO: 1888 - protein, 101 aa, Homo Sapiens
NNEKDMALTAFVLISLQEAKDICEEQVNSLPGSITKAGDFLEANYMNLQRSYTVAIAGYALAQMGRLKGPLLNKFLTTAKDEENQKQCQDLGAFTESMVVF

SEQ ID NO: 1889 - protein, 100 aa, Homo Sapiens
  misc_feature (1)..(1): Xaa can be any naturally occurring amino acid
XFIQKSDDKVTLEERLDKACEPGVDYVYKTRLVKVQLSNDFDEYIMAIEQTIKSGSDEVQVGQQRTFISPIKCREALKLEEKKHYLMWGLSSDFWGEKPK

SEQ ID NO: 1890 - protein, 119 aa, Homo Sapiens
MAGQPAATGSPSADKDGMEPNVVARISQWADDHLRLVRGHGIPLWPKLECSGTIIAHCCCSTHFGRKDPPTSASRVAGTTEHQHWNGHSWNNVTFEKHSTDIKIYKLFGYSSRIYKKKC

SEQ ID NO: 1891 - protein, 71 aa, Homo Sapiens
MAGQPAATGSPSADKDGMEPNVVARISQWADDHLRLVRNISTGMAIAGIMLLLRSIRLKSHVVLCWLSWLE

SEQ ID NO: 1892 - protein, 294 aa, Homo Sapiens
MAGQPAATGSPSADKDGMEPNVVARISQWADDHLRLVRNISTGMAIAGIMLLLRSIRLTSKFTSSSDIPVEFIRRNVKLRGRLRRITENGLEIEHIPITLPIIASLRKEPRGALLVKLAGVELAETGKAWLQKELKPSQLLWFQLLGKENSALFCYLLVSKGGYFSVNLNEEILRRGLGKTVLVKGLKYDSKIYWTVHRNLLKAELTALKKGEGIWKEDSEKESYLEKFKDSWREIWKKDSFLKTTGSDFSLKKESYYEKLKRTYEIWKDNMNNCSLILKFRELISRINFRRKG

SEQ ID NO: 1893 - protein, 251 aa, Homo Sapiens
MAIAGIMLLLRSIRLTSKFTSSSDIPVEFIRRNVKLRGRLRRITENGLEIEHIPITLPIIASLRKEPRGALLVKLAGVELAETGKAWLQKELKPSQLLWFQLLGKENSALFCYLLVSKGGYFSVNLNEEILRRGLGKTVLVKGLKYDSKIYWTVHRNLLKAELTALKKGEGIWKEDSEKESYLEKFKDSWREIWKKDSFLKTTGSDFSLKKESYYEKLKRTYEIWKDNMNNCSLILKFRELISRINFRRKG

SEQ ID NO: 1894 - protein, 115 aa, Homo Sapiens
  misc_feature (1)..(1): Xaa can be any naturally occurring amino acid
XAGQPAATGSPSADKDGMEPNVVARISQWADDHLRLVRGHGIPLWPKLECSGTIIAHCCCSTHFGRKDPPTSASRVAGTTDQVLHLSPRLECNGVISAHCNLCLPGSSDCPASPS

SEQ ID NO: 1895 - protein, 213 aa, Homo Sapiens
MESLLLLPRFGRISDLTVDLSTPEGSFPSDEGWPFAKYLGACGRMVAVNYVGEELWSYFNAPWEKRVDLAWQLMEIAEQLTNNDFEFALYLLDVSFDNFAVGPRDGKVIIVDAENVLVADKRLIRQNKPENWDVWYESKFDDCDKEACLSFSKEILCARATVDHNYYAVCQNLLSRHATWRGTSGGLLHDPPSEIAKDGRLEALLDECANPKK

SEQ ID NO: 1896 - protein, 221 aa, Homo Sapiens
MKSENGTVVGSFPSDEGWPFAKYLGACGRMVAVNYVGEELWSYFNAPWEKRVDLAWQLMEIAEQLTNNDFEFALYLLDVSFDNFAVGPRDGKVIIVDAENVLVADKRLIRQNKPENWDVWYESKFDDCDKEACLSFSKEILCARATVDHNYYAVCQNLLSRHATWRGTSGGLLHDPPSEIAKDGRLEALLDECANPKKRYGRFQAAKELREYLAQLSNNVR

SEQ ID NO: 1897 - protein, 192 aa, Homo Sapiens
MVAVNYVGEELWSYFNAPWEKRVDLAWQLMEIAEQLTNNDFEFALYLLDVSFDNFAVGPRDGKVIIVDAENVLVADKRLIRQNKPENWDVWYESKFDDCDKEACLSFSKEILCARATVDHNYYAVCQNLLSRHATWRGTSGGLLHDPPSEIAKDGRLEALLDECANPKKRYGRFQAAKELREYLAQLSNNVR

SEQ ID NO: 1898 - protein, 430 aa, Homo Sapiens
MWRLVPPKLGRLSRSLKLAALGSLLVLMVLHSPSLLASWQRNELTDRRFLQLNKCPACFGTSWCRRFLNGQVVFEAWGRLRLLDFLNVKNVYFAQYGEPREGGRRRVVLKRLGSQRELAQLDQSICKRATGRPRCDLLQAMPRTEFARLNGDVRLLTPEAVEGWSDLVHCPSQRLLDRLVRRYAETKDSGSFLLRNLKDSERMQLLLTLAFNPEPLVLQSFPSDEGWPFAKYLGACGRMVAVNYVGEELWSYFNAPWEKRVDLAWQLMEIAEQLTNNDFEFALYLLDVSFDNFAVGPRDGKVIIVDAENVLVADKRLIRQNKPENWDVWYESKFDDCDKEACLSFSKEILCARATVDHNYYAVCQNLLSRHATWRGTSGGLLHDPPSEIAKDGRLEALLDECANPKKRYGRFQAAKELREYLAQLSNNVR

SEQ ID NO: 1899 - protein, 1744 aa, Homo Sapiens
MRLLWGLIWASSFFTLSLQKPRLLLFSPSVVHLGVPLSVGVQLQDVPRGQVVKGSVFLRNPSRNNVPCSPKVDFTLSSERDFALLSLQVPLKDAKSCGLHQLLRGPEVQLVAHSPWLKDSLSRTTNIQGINLLFSSRRGHLFLQTDQPIYNPGQRVRYRVFALDQKMRPSTDTITVMVENSHGLRVRKKEVYMPSSIFQDDFVIPDISEPGTWKISARFSDGLESNSSTQFEVKKYVLPNFEVKITPGKPYILTVPGHLDEMQLDIQARYIYGKPVQGVAYVRFGLLDEDGKKTFFRGLESQTKLVNGQSHISLSKAEFQDALEKLNMGITDLQGLRLYVAAAIIESPGGEMEEAELTSWYFVSSPFSLDLSKTKRHLVPGAPFLLQALVREMSGSPASGIPVKVSATVSSPGSVPEVQDIQQNTDGSGQVSIPIIIPQTISELQLSVSAGSPHPAIARLTVAAPPSGGPGFLSIERPDSRPPRVGDTLNLNLRAVGSGATFSHYYYMILSRGQIVFMNREPKRTLTSVSVFVDHHLAPSFYFVAFYYHGDHPVANSLRVDVQAGACEGKLELSVDGAKQYRNGESVKLHLETDSLALVALGALDTALYAAGSKSHKPLNMGKVFEAMNSYDLGCGPGGGDSALQVFQAAGLAFSDGDQWTLSRKRLSCPKEKTTRKKRNVNFQKAINEKLGQYASPTAKRCCQDGVTRLPMMRSCEQRAARVQQPDCREPFLSCCQFAESLRKKSRDKGQAGLQRALEILQEEDLIDEDDIPVRSFFPENWLWRVETVDRFQILTLWLPDSLTTWEIHGLSLSKTKGLCVATPVQLRVFREFHLHLRLPMSVRRFEQLELRPVLYNYLDKNLTVSVHVSPVEGLCLAGGGGLAQQVLVPAGSARPVAFSVVPTAAAAVSLKVVARGSFEFPVGDAVSKVLQIEKEGAIHREELVYELNPLDHRGRTLEIPGNSDPNMIPDGDFNSYVRVTASDPLDTLGSEGALSPGGVASLLRLPRGCGEQTMIYLAPTLAASRYLDKTEQWSTLPPETKDHAVDLIQKGYMRIQQFRKADGSYAAWLSRDSSTWLTAFVLKVLSLAQEQVGGSPEKLQETSNWLLSQQQADGSFQDPCPVLDRSMQGGLVGNDETVALTAFVTIALHHGLAVFQDEGAEPLKQRVEASISKANSFLGEKASAGLLGAHAAAITAYALTLTKAPVDLLGVAHNNLMAMAQETGDNLYWGSVTGSQSNAVSPTPAPRNPSDPMPQAPALWIETTAYALLHLLLHEGKAEMADQASAWLTRQGSFQGGFRSTQDTVIALDALSAYWIASHTTEERGLNVTLSSTGRNGFKSHALQLNNRQIRGLEEELQFSLGSKINVKVGGNSKGTLKVLRTYNVLDMKNTTCQDLQIEVTVKGHVEYTMEANEDYEDYEYDELPAKDDPDAPLQPVTPLQLFEGRRNRRRREAPKVVEEQESRVHYTVCIWRNGKVGLSGMAIADVTLLSGFHALRADLEKLTSLSDRYVSHFETEGPHVLLYFDSVPTSRECVGFEAVQEVPVGLVQPASATLYDYYNPERRCSVFYGAPSKSRLLATLCSAEVCQCAEGKCPRQRRALERGLQDEDGYRMKFACYYPRVEYGFQVKVLREDSRAAFRLFETKITQVLHFTKDVKAAANQMRNFLVRASCRLRLEPGKEYLIMGLDGATYDLEGHPQYLLDSNSWIEEMPSERLCRSTRQRAACAQLNDFLQEYGTQGCQV

SEQ ID NO: 1900 - protein, 1698 aa, Homo Sapiens
MRLLWGLIWASSFFTLSLQKPRLLLFSPSVVHLGVPLSVGVQLQDVPRGQVVKGSVFLRNPSRNNVPCSPKVDFTLSSERDFALLSLQVPLKDAKSCGLHQLLRGPEVQLVAHSPWLKDSLSRTTNIQGINLLFSSRRGHLFLQTDQPIYNPGQRVRYRVFALDQKMRPSTDTITVMVENSHGLRVRKKEVYMPSSIFQDDFVIPDISEPGTWKISARFSDGLESNSSTQFEVKKYVLPNFEVKITPGKPYILTVPGHLDEMQLDIQARYIYGKPVQGVAYVRFGLLDEDGKKTFFRGLESQTKLVNGQSHISLSKAEFQDALEKLNMGITDLQGLRLYVAAAIIESPGGEMEEAELTSWYFVSSPFSLDLSKTKRHLVPGAPFLLQALVREMSGSPASGIPVKVSATVSSPGSVPEVQDIQQNTDGSGQVSIPIIIPQTISELQLSVSAGSPHPAIARLTVAAPPSGGPGFLSIERPDSRPPRVGDTLNLNLRAVGSGATFSHYYYMILSRGQIVFMNREPKRTLTSVSVFVDHHLAPSFYFVAFYYHGDHPVANSLRVDVQAGACEGKLELSVDGAKQYRNGESVKLHLETDSLALVALGALDTALYAAGSKSHKPLNMGKVFEAMNSYDLGCGPGGGDSALQVFQAAGLAFSDGDQWTLSRKRLSCPKEKTTRKKRNVNFQKAINEKLGQYASPTAKRCCQDGVTRLPMMRSCEQRAARVQQPDCREPFLSCCQFAESLRKKSRDKGQAGLQRALEILQEEDLIDEDDIPVRSFFPENWLWRVETVDRFQILTLWLPDSLTTWEIHGLSLSKTKGLCVATPVQLRVFREFHLHLRLPMSVRRFEQLELRPVLYNYLDKNLTVSVHVSPVEGLCLAGGGGLAQQVLVPAGSARPVAFSVVPTAAAAVSLKVVARGSFEFPVGDAVSKVLQIEKEGAIHREELVYELNPLDHRGRTLEIPGNSDPNMIPDGDFNSYVRVTASDPLDTLGSEGALSPGGVASLLRLPRGCGEQTMIYLAPTLAASRYLDKTEQWSTLPPETKDHAVDLIQKGYMRIQQFRKADGSYAAWLSRDSSTWLTAFVLKVLSLAQEQVGGSPEKLQETSNWLLSQQQADGSFQDPCPVLDRSMQGGLVGNDETVALTAFVTIALHHGLAVFQDEGAEPLKQRVEASISKANSFLGEKASAGLLGAHAAAITAYALTLTKAPVDLLGVAHNNLMAMAQETGDNLYWGSVTGSQSNAVSPTPAPRNPSDPMPQAPALWIETTAYALLHLLLHEGKAEMADQASAWLTRQGSFQGGFRSTQDTVIALDALSAYWIASHTTEERGLNVTLSSTGRNGFKSHALQLNNRQIRGLEEELQFSLGSKINVKVGGNSKGTLKVLRTYNVLDMKNTTCQDLQIEVTVKGHVEYTMEANEDYEDYEYDELPAKDDPDAPLQPVTPLQLFEGRRNRRRREAPKLTSLSDRYVSHFETEGPHVLLYFDSVPTSRECVGFEAVQEVPVGLVQPASATLYDYYNPERRCSVFYGAPSKSRLLATLCSAEVCQCAEGKCPRQRRALERGLQDEDGYRMKFACYYPRVEYGFQVKVLREDSRAAFRLFETKITQVLHFTKDVKAAANQMRNFLVRASCRLRLEPGKEYLIMGLDGATYDLEGHPQYLLDSNSWIEEMPSERLCRSTRQRAACAQLNDFLQEYGTQGCQV

SEQ ID NO: 1901 - protein, 1698 aa, Homo Sapiens
MRLLWGLIWASSFFTLSLQKPRLLLFSPSVVHLGVPLSVGVQLQDVPRGQVVKGSVFLRNPSRNNVPCSPKVDFTLSSERDFALLSLQVPLKDAKSCGLHQLLRGPEVQLVAHSPWLKDSLSRTTNIQGINLLFSSRRGHLFLQTDQPIYNPGQRVRYRVFALDQKMRPSTDTITVMVENSHGLRVRKKEVYMPSSIFQDDFVIPDISEPGTWKISARFSDGLESNSSTQFEVKKYVLPNFEVKITPGKPYILTVPGHLDEMQLDIQARYIYGKPVQGVAYVRFGLLDEDGKKTFFRGLESQTKLVNGQSHISLSKAEFQDALEKLNMGITDLQGLRLYVAAAIIESPGGEMEEAELTSWYFVSSPFSLDLSKTKRHLVPGAPFLLQALVREMSGSPASGIPVKVSATVSSPGSVPEVQDIQQNTDGSGQVSIPIIIPQTISELQLSVSAGSPHPAIARLTVAAPPSGGPGFLSIERPDSRPPRVGDTLNLNLRAVGSGATFSHYYYMILSRGQIVFMNREPKRTLTSVSVFVDHHLAPSFYFVAFYYHGDHPVANSLRVDVQAGACEGKLELSVDGAKQYRNGESVKLHLETDSLALVALGALDTALYAAGSKSHKPLNMGKVFEAMNSYDLGCGPGGGDSALQVFQAAGLAFSDGDQWTLSRKRLSCPKEKTTRKKRNVNFQKAINEKLGQYASPTAKRCCQDGVTRLPMMRSCEQRAARVQQPDCREPFLSCCQFAESLRKKSRDKGQAGLQRALEILQEEDLIDEDDIPVRSFFPENWLWRVETVDRFQILTLWLPDSLTTWEIHGLSLSKTKGLCVATPVQLRVFREFHLHLRLPMSVRRFEQLELRPVLYNYLDKNLTVSVHVSPVEGLCLAGGGGLAQQVLVPAGSARPVAFSVVPTAATAVSLKVVARGSFEFPVGDAVSKVLQIEKEGAIHREELVYELNPLDHRGRTLEIPGNSDPNMIPDGDFNSYVRVTASDPLDTLGSEGALSPGGVASLLRLPRGCGEQTMIYLAPTLAASRYLDKTEQWSTLPPETKDHAVDLIQKGYMRIQQFRKADGSYAAWLSRGSSTWLTAFVLKVLSLAQEQVGGSPEKLQETSNWLLSQQQADGSFQDLSPVIHRSMQGGLVGNDETVALTAFVTIALHHGLAVFQDEGAEPLKQRVEASISKASSFLGEKASAGLLGAHAAAITAYALTLTKAPADLRGVAHNNLMAMAQETGDNLYWGSVTGSQSNAVSPTPAPRNPSDPMPQAPALWIETTAYALLHLLLHEGKAEMADQAAAWLTRQGSFQGGFRSTQDTVIALDALSAYWIASHTTEERGLNVTLSSTGRNGFKSHALQLNNRQIRGLEEELQFSLGSKINVKVGGNSKGTLKVLRTYNVLDMKNTTCQDLQIEVTVKGHVEYTMEANEDYEDYEYDELPAKDDPDAPLQPVTPLQLFEGRRNRRRREAPKLTSLSDRYVSHFETEGPHVLLYFDSVPTSRECVGFEAVQEVPVGLVQPASATLYDYYNPERRCSVFYGAPSKSRLLATLCSAEVCQCAEGKCPRQRRALERGLQDEDGYRMKFACYYPRVEYGFQVKVLREDSRAAFRLFETKITQVLHFTKDVKAAANQMRNFLVRASCRLRLEPGKEYLIMGLDGATYDLEGHPQYLLDSNSWIEEMPSERLCRSTRQRAACAQLNDFLQEYGTQGCQV

SEQ ID NO: 1902 - protein, 1744 aa, Homo Sapiens
MRLLWGLIWASSFFTLSLQKPRLLLFSPSVVHLGVPLSVGVQLQDVPRGQVVKGSVFLRNPSRNNVPCSPKVDFTLSSERDFALLSLQVPLKDAKSCGLHQLLRGPEVQLVAHSPWLKDSLSRTTNIQGINLLFSSRRGHLFLQTDQPIYNPGQRVRYRVFALDQKMRPSTDTITVMVENSHGLRVRKKEVYMPSSIFQDDFVIPDISEPGTWKISARFSDGLESNSSTQFEVKKYVLPNFEVKITPGKPYILTVPGHLDEMQLDIQARYIYGKPVQGVAYVRFGLLDEDGKKTFFRGLESQTKLVNGQSHISLSKAEFQDALEKLNMGITDLQGLRLYVAAAIIESPGGEMEEAELTSWYFVSSPFSLDLSKTKRHLVPGAPFLLQALVREMSGSPASGIPVKVSATVSSPGSVPEVQDIQQNTDGSGQVSIPIIIPQTISELQLSVSAGSPHPAIARLTVAAPPSGGPGFLSIERPDSRPPRVGDTLNLNLRAVGSGATFSHYYYMILSRGQIVFMNREPKRTLTSVSVFVDHHLAPSFYFVAFYYHGDHPVANSLRVDVQAGACEGKLELSVDGAKQYRNGESVKLHLETDSLALVALGALDTALYAAGSKSHKPLNMGKVFEAMNSYDLGCGPGGGDSALQVFQAAGLAFSDGDQWTLSRKRLSCPKEKTTRKKRNVNFQKAINEKLGQYASPTAKRCCQDGVTRLPMMRSCEQRAARVQQPDCREPFLSCCQFAESLRKKSRDKGQAGLQRALEILQEEDLIDEDDIPVRSFFPENWLWRVETVDRFQILTLWLPDSLTTWEIHGLSLSKTKGLCVATPVQLRVFREFHLHLRLPMSVRRFEQLELRPVLYNYLDKNLTVSVHVSPVEGLCLAGGGGLAQQVLVPAGSARPVAFSVVPTAATAVSLKVVARGSFEFPVGDAVSKVLQIEKEGAIHREELVYELNPLDHRGRTLEIPGNSDPNMIPDGDFNSYVRVTASDPLDTLGSEGALSPGGVASLLRLPRGCGEQTMIYLAPTLAASRYLDKTEQWSTLPPETKDHAVDLIQKGYMRIQQFRKADGSYAAWLSRGSSTWLTAFVLKVLSLAQEQVGGSPEKLQETSNWLLSQQQADGSFQDLSPVIHRSMQGGLVGNDETVALTAFVTIALHHGLAVFQDEGAEPLKQRVEASISKASSFLGEKASAGLLGAHAAAITAYALTLTKAPADLRGVAHNNLMAMAQETGDNLYWGSVTGSQSNAVSPTPAPRNPSDPMPQAPALWIETTAYALLHLLLHEGKAEMADQAAAWLTRQGSFQGGFRSTQDTVIALDALSAYWIASHTTEERGLNVTLSSTGRNGFKSHALQLNNRQIRGLEEELQFSLGSKINVKVGGNSKGTLKVLRTYNVLDMKNTTCQDLQIEVTVKGHVEYTMEANEDYEDYEYDELPAKDDPDAPLQPVTPLQLFEGRRNRRRREAPKVVEEQESRVHYTVCIWRNGKVGLSGMAIADVTLLSGFHALRADLEKLTSLSDRYVSHFETEGPHVLLYFDSVPTSRECVGFEAVQEVPVGLVQPASATLYDYYNPERRCSVFYGAPSKSRLLATLCSAEVCQCAEGKCPRQRRALERGLQDEDGYRMKFACYYPRVEYGFQVKVLREDSRAAFRLFETKITQVLHFTKDVKAAANQMRNFLVRASCRLRLEPGKEYLIMGLDGATYDLEGHPQYLLDSNSWIEEMPSERLCRSTRQRAACAQLNDFLQEYGTQGCQV

SEQ ID NO: 1903 - protein, 118 aa, Homo Sapiens
MHPPKTPSGALHRKRKMAAWPFSRLWKVSDPILFQMTLIAALLPAVLGNCGPPPTLSFAAPMDITLTETRFKTGTTLKYTCLPGYVRSHSTQTLTCNSDGEWVYNTFCILDTGFHHIG

SEQ ID NO: 1904 - protein, 152 aa, Homo Sapiens
MHPPKTPSGALHRKRKMAAWPFSRLWKVSDPILFQMTLIAALLPAVLGNCGPPPTLSFAAPMDITLTETRFKTGTTLKYTCLPGYVRSHSTQTLTCNSDGEWVYNTFCIYKRCRHPGELRNGQVEIKTDLSFGSQIEFSCSEGFFLIGSTTS

SEQ ID NO: 1905 - protein, 597 aa, Homo Sapiens
MHPPKTPSGALHRKRKMAAWPFSRLWKVSDPILFQMTLIAALLPAVLGNCGPPPTLSFAAPMDITLTETRFKTGTTLKYTCLPGYVRSHSTQTLTCNSDGEWVYNTFCIYKRCRHPGELRNGQVEIKTDLSFGSQIEFSCSEGFFLIGSTTSRCEVQDRGVGWSHPLPQCEIVKCKPPPDIRNGRHSGEENFYAYGFSVTYSCDPRFSLLGHASISCTVENETIGVWRPSPPTCEKITCRKPDVSHGEMVSGFGPIYNYKDTIVFKCQKGFVLRGSSVIHCDADSKWNPSPPACEPNSCINLPDIPHASWETYPRPTKEDVYVVGTVLRYRCHPGYKPTTDEPTTVICQKNLRWTPYQGCEALCCPEPKLNNGEITQHRKSRPANHCVYFYGDEISFSCHETSRFSAICQGDGTWSPRTPSCGDICNFPPKIAHGHYKQSSSYSFFKEEIIYECDKGYILVGQAKLSCSYSHWSAPAPQCKALCRKPELVNGRLSVDKDQYVEPENVTIQCDSGYGVVGPQSITCSGNRTWYPEVPKCEWETPEGCEQVLTGKRLMQCLPNPEDVKMALEVYKLSLEIEQLELQRDSARQSTLDKEL

SEQ ID NO: 1906 - protein, 181 aa, Homo Sapiens
MFFWCACCLMVAWRVSASDAEHCPELPPVDNSIFVAKEVEGQILGTYVCIKGYHLVGKKTLFCNASKEWDNTTTECRLGHCPDPVLVNGEFSSSGPVNVSDKITFMCNDHYILKGSNRSQCLEDHTWAPPFPICKSRDCDPPGNPVHGYFEGNNFTLGSTISYYCEDRYYLVGVQEQQCVD

SEQ ID NO: 1907 - protein, 252 aa, Homo Sapiens
MFFWCACCLMVAWRVSASDAEHCPELPPVDNSIFVAKEVEGQILGTYVCIKGYHLVGKKTLFCNASKEWDNTTTECRLGHCPDPVLVNGEFSSSGPVNVSDKITFMCNDHYILKGSNRSQCLEDHTWAPPFPICKSRDCDPPGNPVHGYFEGNNFTLGSTISYYCEDRYYLVGVQEQQCVDGEWSSALPVCKLIQEAPKPECEKALLAFQESKNLCEAMENFMQQLKESGMTMEELKYSLELKKAELKAKLL

SEQ ID NO: 1908 - protein, 252 aa, Homo Sapiens; identical to SEQ ID NO: 1907

SEQ ID NO: 1909 - protein, 252 aa, Homo Sapiens; identical to SEQ ID NO: 1907

SEQ ID NO: 1910 - protein, 251 aa, Homo Sapiens
MFFWCACCLMVAWRVSASDEHCPELPPVDNSIFVAKEVEGQILGTYVCIKGYHLVGKKTLFCNASKEWDNTTTECRLGHCPDPVLVNGEFSSSGPVNVSDKITFMCNDHYILKGSNRSQCLEDHTWAPPFPICKSRDCDPPGNPVHGYFEGNNFTLGSTISYYCEDRYYLVGVQEQQCVDGEWSSALPVCKLIQEAPKPECEKALLAFQESKNLCEAMENFMQQLKESGMTMEELKYSLELKKAELKAKLL

SEQ ID NO: 1911 - protein, 95 aa, Homo Sapiens
MAPPPACRSPMSPPPPPLLLLLLSLALLGARARAEPAGSAVPAQSRPCVDCHAFEFMQRALQDLRKTACSLDARTETLLLQAERRALCACWPAGH

SEQ ID NO: 1912 - protein, 128 aa, Homo Sapiens
MRVARRTRNVCRCPRAAGPGVPEPRAAPLPLLAMAPPPACRSPMSPPPPPLLLLLLSLALLGARARAEPAGSAVPAQSRPCVDCHAFEFMQRALQDLRKTACSLDARTETLLLQAERRALCACWPAGH

SEQ ID NO: 1913 - protein, 1676 aa, Homo Sapiens
MGLLGILCFLIFLGKTWGQEQTYVISAPKIFRVGASENIVIQVYGYTEAFDATISIKSYPDKKFSYSSGHVHLSSENKFQNSAILTIQPKQLPGGQNPVSYVYLEVVSKHFSKSKRMPITYDNGFLFIHTDKPVYTPDQSVKVRVYSLNDDLKPAKRETVLTFIDPEGSEVDMVEEIDHIGIISFPDFKIPSNPRYGMWTIKAKYKEDFSTTGTAYFEVKEYVLPHFSVSIEPEYNFIGYKNFKNFEITIKARYFYNKVVTEADVYITFGIREDLKDDQKEMMQTAMQNTMLINGIAQVTFDSETAVKELSYYSLEDLNNKYLYIAVTVIESTGGFSEEAEIPGIKYVLSPYKLNLVATPLFLKPGIPYPIKVQVKDSLDQLVGGVPVTLNAQTIDVNQETSDLDPSKSVTRVDDGVASFVLNLPSGVTVLEFNVKTDAPDLPEENQAREGYRAIAYSSLSQSYLYIDWTDNHKALLVGEHLNIIVTPKSPYIDKITHYNYLILSKGKIIHFGTREKFSDASYQSINIPVTQNMVPSSRLLVYYIVTGEQTAELVSDSVWLNIEEKCGNQLQVHLSPDADAYSPGQTVSLNMATGMDSWVALAAVDSAVYGVQRGAKKPLERVFQFLEKSDLGCGAGGGLNNANVFHLAGLTFLTNANADDSQENDEPCKEILRPRRTLQKKIEEIAAKYKHSVVKKCCYDGACVNNDETCEQRAARISLGPRCIKAFTECCVVASQLRANISHKDMQLGRLHMKTLLPVSKPEIRSYFPESWLWEVHLVPRRKQLQFALPDSLTTWEIQGVGISNTGICVADTVKAKVFKDVFLEMNIPYSVVRGEQIQLKGTVYNYRTSGMQFCVKMSAVEGICTSESPVIDHQGTKSSKCVRQKVEGSSSHLVTFTVLPLEIGLHNINFSLETWFGKEILVKTLRVVPEGVKRESYSGVTLDPRGIYGTISRRKEFPYRIPLDLVPKTEIKRILSVKGLLVGEILSAVLSQEGINILTHLPKGSAEAELMSVVPVFYVFHYLETGNHWNIFHSDPLIEKQKLKKKLKEGMLSIMSYRNADYSYSVWKGGSASTWLTAFALRVLGQVNKYVEQNQNSICNSLLWLVENYQLDNGSFKENSQYQPIKLQGTLPVEARENSLYLTAFTVIGIRKAFDICPLVKIDTALIKADNFLLENTLPAQSTFTLAISAYALSLGDKTHPQFRSIVSALKREALVKGNPPIYRFWKDNLQHKDSSVPNTGTARMVETTAYALLTSLNLKDINYVNPVIKWLSEEQRYGGGFYSTQDTINAIEGLTEYSLLVKQLRLSMDIDVSYKHKGALHNYKMTDKNFLGRPVEVLLNDDLIVSTGFGSGLATVHVTTVVHKTSTSEEVCSFYLKIDTQDIEASHYRGYGNSDYKRIVACASYKPSREESSSGSSHAVMDISLPTGISANEEDLKALVEGVDQLFTDYQIKDGHVILQLNSIPSSDFLCVRFRIFELFEVGFLSPATFTVYEYHRPDKQCTMFYSTSNIKIQKVCEGAACKCVEADCGQMQEELDLTISAETRKQTACKPEIAYAYKVSITSITVENVFVKYKATLLDIYKTGEAVAEKDSEITFIKKVTCTNAELVKGRQYLIMGKEALQIKYNFSFRYIYPLDSLTWIEYWPRDTTCSSCQAFLANLDEFAEDIFLNGC

SEQ ID NO: 1914 - protein, 72 aa, Homo Sapiens
MAVSVLRLTVVLGLLVLFLTCYADDKPDKPDDKPDDSGKDPKPDFPKFLSLLGTEIIENAVEFILRSMSRST

SEQ ID NO: 1915 - protein, 87 aa, Homo Sapiens
MAVSVLRLTVVLGLLVLFLTCYADDKPDKPDDKPDDSGKDPKPDFPKFLSLLGTEIIENAVEFILRSMSRSTGFMEFDDNEGKHSSK

SEQ ID NO: 1916 - protein, 31 aa, Homo Sapiens
MARRSVLYFILLNALINKGQACFCDHYAWTQ

SEQ ID NO: 1917 - protein, 133 aa, Homo Sapiens
MARRSVLYFILLNALINKGQACFCDHYAWTQWTSCSKTCNSGTQSRHRQIVVDKYYQENFCEQICSKQETRECNWQRCPINCLLGDFGPWSDCDPCIEKQSKVRSVLRPSQFGGQPCTAPLVAFQPCIPSKLC

SEQ ID NO: 1918 - protein, 934 aa, Homo Sapiens
MARRSVLYFILLNALINKGQACFCDHYAWTQWTSCSKTCNSGTQSRHRQIVVDKYYQENFCEQICSKQETRECNWQRCPINCLLGDFGPWSDCDPCIEKQSKVRSVLRPSQFGGQPCTAPLVAFQPCIPSKLCKIEEADCKNKFRCDSGRCIARKLECNGENDCGDNSDERDCGRTKAVCTRKYNPIPSVQLMGNGFHFLAGEPRGEVLDNSFTGGICKTVKSSRTSNPYRVPANLENVGFEVQTAEDDLKTDFYKDLTSLGHNENQQGSFSSQGGSSFSVPIFYSSKRSENINHNSAFKQAIQASHKKDSSFIRIHKVMKVLNFTTKAKDLHLSDVFLKALNHLPLEYNSALYSRIFDDFGTHYFTSGSLGGVYDLLYQFSSEELKNSGLTEEEAKHCVRIETKKRVLFAKKTKVEHRCTTNKLSEKHEGSFIQGAEKSISLIRGGRSEYGAALAWEKGSSGLEEKTFSEWLESVKENPAVIDFELAPIVDLVRNIPCAVTKRNNLRKALQEYAAKFDPCQCAPCPNNGRPTLSGTECLCVCQSGTYGENCEKQSPDYKSNAVDGQWGCWSSWSTCDATYKRSRTRECNNPAPQRGGKRCEGEKRQEEDCTFSIMENNGQPCINDDEEMKEVDLPEIEADSGCPQPVPPENGFIRNEKQLYLVGEDVEISCLTGFETVGYQYFRCLPDGTWRQGDVECQRTECIKPVVQEVLTITPFQRLYRIGESIELTCPKGFVVAGPSRYTCQGNSWTPPISNSLTCEKDTLTKLKGHCQLGQKQSGSECICMSPEEDCSHHSEDLCVFDTDSNDYFTSPACKFLAEKCLNNQQLHFLHIGSCQDGRQLEWGLERTRLSSNSTKKESCGYDTCYDWEKCSASTSKCVCLLPPQCFKGGNQLYCVKMGSSTSEKTLNICEVGTIRCANRKMEILHPGKCLA

SEQ ID NO: 1919 - protein, 934 aa, Homo Sapiens; identical to SEQ ID NO: 1918

SEQ ID NO: 1920 - protein, 191 aa, Homo Sapiens
MAAPRGRAAPWTTALLLLLASQVLSPGSCADEEEVPEEWVLLHVVQGQIGAGNYSYLRLNHEGKIVLRMRSLKGDADLYVSASSLHPSFDDYELQSATCGPDAVSIPAHFRRPVGIGVYGHPSHLESEFEMKVYYDGTVEQHPFGEAAYPADGADAGQKHAGAPEDASQEEESVLWTILISILKLVLEILF

SEQ ID NO: 1921 - protein, 325 aa, Homo Sapiens
MQGRVAGSCAPLGLLLVCLHLPGLFARSIGVVEEKVSQNLGTNLPQLGQPSSTGPSNSEHPQPALDPRSNDLARVPLKLSVPASDGFPPAGGSAVQRWPPSWGLPAMDSWPPEDPWQMMAAAAEDRLGEALPEELSYLSSAAALAPGSGPLPGESSPDATGLSPKASLLHQDSESRRLPRSNSLGAGGKILSQRPPWSLIHRVLPDHPWGTLNPSVSWGGGGPGTGWGTRPMPHPEGIWGINNQPPGTSWGNINRYPGGSWGNINRYPGGSWGNINRYPGGSWGNIHLYPGINNPFPPGVLRPPGSSWNIPAGFPNPPSPRLQWG

SEQ ID NO: 1922 - protein, 330 aa, Homo Sapiens
MAFLPSWVCVLVGSFSASLAGTSNLSETEPPLWKESPGQLSDYRVENSMYIINPWVYLERMGMYKIILNQTARYFAKFAPDNEQNILWGLPLQYGWQYRTGRLADPTRRTNCGYESGDHMCISVDSWWADLNYFLSSLPFLAAVDSGVMGISSDQVRLLPPPKNERKFCYDVSSCRSSFPETMNKWNTFYQYLQSPFSKFDDLLKYLWAAHTSTLADNIKSFEDRYDYYSKAEAHFERSWVLAVDHLAAVLFPTTLIRSYKFQKGMPPRILLNTDVAPFISDFTAFQNVVLVLLNMLDNVDKSIGYLCTEKSNVYRDHSESSSRSYGNNS

SEQ ID NO: 1923 - protein, 843 aa, Homo Sapiens
MKVISLFILVGFIGEFQSFSSASSPVNCQWDFYAPWSECNGCTKTQTRRRSVAVYGQYGGQPCVGNAFETQSCEPTRGCPTEEGCGERFRCFSGQCISKSLVCNGDSDCDEDSADEDRCEDSERRPSCDIDKPPPNIELTGNGYNELTGQFRNRVINTKSFGGQCRKVFSGDGKDFYRLSGNVLSYTFQVKINNDFNYEFYNSTWSYVKHTSTEHTSSSRKRSFFRSSSSSSRSYTSHTNEIHKGKSYQLLVVENTVEVAQFINNNPEFLQLAEPFWKELSHLPSLYDYSAYRRLIDQYGTHYLQSGSLGGEYRVLFYVDSEKLKQNDFNSVEEKKCKSSGWHFVVKFSSHGCKELENALKAASGTQNNVLRGEPFIRGGGAGFISGLSYLELDNPAGNKRRYSAWAESVTNLPQVIKQKLTPLYELVKEVPCASVKKLYLKWALEEYLDEFDPCHCRPCQNGGLATVEGTHCLCHCKPYTFGAACEQGVLVGNQAGGVDGGWSCWSSWSPCVQGKKTRSRECNNPPPSGGGRSCVGETTESTQCEDEELEHLRLLEPHCFPLSLVPTEFCPSPPALKDGFVQDEGTMFPVGKNVVYTCNEGYSLIGNPVARCGEDLRWLVGEMHCQKIACVLPVLMDGIQSHPQKPFYTVGEKVTVSCSGGMSLEGPSAFLCGSSLKWSPEMKNARCVQKENPLTQAVPKCQRWEKLQNSRCVCKMPYECGPSLDVCAQDERSKRILPLTVCKMHVLHCQGRNYTLTGRDSCTLPASAEKACGACPLWGKCDAESSKCVCREASECEEEGFSICVEVNGKEQTMSECEAGALRCRGQSISVTSIRPCAAETQ

SEQ ID NO: 1924 - protein, 324 aa, Homo Sapiens
MLWFRGALGVWVWLAAASQPCKNSNAGRRGQHPRRPAGSCVQRLTMRNTSKELQGATHRYAPCDWYYHVPVKRSEKAVDAPPASQIPGLSNLGDSHSENLPGTRRYWIKETDSEYVKLAKQGGRPDLLKHFAPGTRKGSPVAYSLPDWYIHHSKPPTASQQEVRAVSMPDYMVHEEFNPDQANGSYASRRGPFDFDMKTVWQREAEELEKEKKKLRLPAIDSKYLSKAGTPLGPKNPAGSRLSFPPVNGYKDEWLQQQQRADSDKRTPKTSRASVLSQSPRDLEGPQDAARLQDAEASEGPEDTPESSQSPEESVSASTPAELK

SEQ ID NO: 1925 - protein, 340 aa, Homo Sapiens
MLWFRGALGVWVWLAAASQPCKNSNAGRRGQHPRRPAGSCVQRLTMRNTSKELQGATHRYAPCDWYYHVPVKRSEKAVDAPPASQIPGLSNLGDSHSENLPGTRRYWIKETDSEYVKLAKQGGRPDLLKHFAPGTRKGSPVAYSLPDWYIHHSKPPTASQQEVRAVSMPDYMVHEEFNPDQANGSYASRRGPFDFDMKTVWQREAEELEKEKKKLRLPAIDSKYLSKAGTPLGPKNPAGSRLSFPPVPGQKNSSPTNFSKLISNGYKDEWLQQQQRADSDKRTPKTSRASVLSQSPRDLEGPQDAARLQDAEASEGPEDTPESSQSPEESVSASTPAELK

SEQ ID NO: 1926 - protein, 157 aa, Homo Sapiens
MPDYMVHEEFNPDQANGSYASRRGPFDFDMKTVWQREAEELEKEKKKLRLPAIDSKYLSKAGTPLGPKNPAGSRLSFPPVNGYKDEWLQQQQRADSDKRTPKTSRASVLSQSPRDLEGPQDAARLQDAEASEGPEDTPESSQSPEESVSASTPAELK

SEQ ID NO: 1927 - protein, 153 aa, Homo Sapiens
MPDYMVHEEFNPDQANGSYASRRGPFDFDMKTVWQREAEELEKEKKKLRLPAIDSKYLSKAGTPLGPKNPAGSRLSFPPVNGYKDEWLQQQQRADSDKRTPKTSRASVLSQSPRDLEGPQDAARLQDAEASEGPEDTPGPEESVSASTPAELK

SEQ ID NO: 1928 - protein, 295 aa, Homo Sapiens
MRNTSKELQGATHRYAPCDWYYHVPVKRSEKAVDAPPASQIPGLSNLGDSHSENLPGTRRYWIKETDSEYVKLAKQGGRPDLLKHFAPGTRKGSPVAYSLPDWYIHHSKPPTASQQEVRAVSMPDYMVHEEFNPDQANGSYASRRGPFDFDMKTVWQREAEELEKEKKKLRLPAIDSKYLSKAGTPLGPKNPAGSRLSFPPVPGQKNSSPTNFSKLISNGYKDEWLQQQQRADSDKRTPKTSRASVLSQSPRDLEGPQDAARLQDAEASEGPEDTPESSQSPEESVSASTPAELK

SEQ ID NO: 1929 - protein, 584 aa, Homo Sapiens
MFAVVFFILSLMTCQPGVTAQEKVNQRVRRAATPAAVTCQLSNWSEWTDCFPCQDKKYRHRSLLQPNKFGGTICSGDIWDQASCSSSTTCVRQAQCGQDFQCKETGRCLKRHLVCNGDQDCLDGSDEDDCEDVRAIDEDCSQYEPIPGSQKAALGYNILTQEDAQSVYDASYYGGQCETVYNGEWRELRYDSTCERLYYGDDEKYFRKPYNFLKYHFEALADTGISSEFYDNANDLLSKVKKDKSDSFGVTIGIGPAGSPLLVGVGVSHSQDTSFLNELNKYNEKKFIFTRIFTKVQTAHFKMRKDDIMLDEGMLQSLMELPDQYNYGMYAKFINDYGTHYITSGSMGGIYEYILVIDKAKMESLGITSRDITTCFGGSLGIQYEDKINVGGGLSGDHCKKFGGGKTERARKAMAVEDIISRVRGGSSGWSGGLAQNRSTITYRSWGRSLKYNPVVIDFEMQPIHEVLRHTSLGPLEAKRQNLRRALDQYLMEFNACRCGPCFNNGVPILEGTSCRCQCRLGSLGAACEQTQTEGAKADGSWSCWSSWSVCRAGIQERRRECDNPAPQNGGASCPGRKVQTQAC

SEQ ID NO: 1930 - protein, 529 aa, Homo Sapiens
MDTCMTLAFTLSGRFFMLLSQYRYAYLLQPSQFHGEPCNFSDKEVEDCVTNRPCGSQVRCEGFVCAQTGRCVNRRLLCNGDNDCGDQSDEANCRRIYKKCQHEMDQYWGIGSLASGINLFTNSFEGPVLDHRYYAGGCSPHYILNTRFRKPYNVESYTPQTQGKYEFILKEYESYSDFERNVTEKMASKSGFSFGFKIPGIFELGISSQSDRGKHYIRRTKRFSHTKSVFLHARSDLEVAHYKLKPRSLMLHYEFLQRVKRLPLEYSYGEYRDLFRDFGTHYITEAVLGGIYEYTLVMNKEAMERGDYTLNNVHACAKNDFKIGGAIEEVYVSLGVSVGKCRGILNEIKDRNKRDTMVEDLVVLVRGGASEHITTLAYQELPTADLMQEWGDAVQYNPAIIKVKVEPLYELVTATDFAYSSTVRQNMKQALEEFQKEVSSCHCAPCQGNGVPVLKGSRCDCICPVGSQGLACEVSYRKNTPIDGKWNCWSNWSSCSGRRKTRQRQCNNPPPQNGGSPCSGPASETLDCS

SEQ ID NO: 1931 - protein, 591 aa, Homo Sapiens
MKNSRTWAWRAPVELFLLCAALGCLSLPGSRGERPHSFGSNAVNKSFAKSRQMRSVDVTLMPIDCELSSWSSWTTCDPCQKKRYRYAYLLQPSQFHGEPCNFSDKEVEDCVTNRPCGSQVRCEGFVCAQTGRCVNRRLLCNGDNDCGDQSDEANCRRIYKKCQHEMDQYWGIGSLASGINLFTNSFEGPVLDHRYYAGGCSPHYILNTRFRKPYNVESYTPQTQGKYEFILKEYESYSDFERNVTEKMASKSGFSFGFKIPGIFELGISSQSDRGKHYIRRTKRFSHTKSVFLHARSDLEVAHYKLKPRSLMLHYEFLQRVKRLPLEYSYGEYRDLFRDFGTHYITEAVLGGIYEYTLVMNKEAMERGDYTLNNVHACAKNDFKIGGAIEEVYVSLGVSVGKCRGILNEIKDRNKRDTMVEDLVVLVRGGASEHITTLAYQELPTADLMQEWGDAVQYNPAIIKVKVEPLYELVTATDFAYSSTVRQNMKQALEEFQKEVSSCHCAPCQGNGVPVLKGSRCDCICPVGSQGLACEVSYRKNTPIDGKWNCWSNWSSCSGRRKTRQRQCNNPPPQNGGSPCSGPASETLDCS

SEQ ID NO: 1932 - protein, 539 aa, Homo Sapiens
MRSVDVTLMPIDCELSSWSSWTTCDPCQKKRYRYAYLLQPSQFHGEPCNFSDKEVEDCVTNRPCGSQVRCEGFVCAQTGRCVNRRLLCNGDNDCGDQSDEANCRRIYKKCQHEMDQYWGIGSLASGINLFTNSFEGPVLDHRYYAGGCSPHYILNTRFRKPYNVESYTPQTQGKYEFILKEYESYSDFERNVTEKMASKSGFSFGFKIPGIFELGISSQSDRGKHYIRRTKRFSHTKSVFLHARSDLEVAHYKLKPRSLMLHYEFLQRVKRLPLEYSYGEYRDLFRDFGTHYITEAVLGGIYEYTLVMNKEAMERGDYTLNNVHACAKNDFKIGGAIEEVYVSLGVSVGKCRGILNEIKDRNKRDTMVEDLVVLVRGGASEHITTLAYQELPTADLMQEWGDAVQYNPAIIKVKVEPLYELVTATDFAYSSTVRQNMKQALEEFQKEVSSCHCAPCQGNGVPVLKGSRCDCICPVGSQGLACEVSYRKNTPIDGKWNCWSNWSSCSGRRKTRQRQCNNPPPQNGGSPCSGPASETLDCS

SEQ ID NO: 1933 - protein, 202 aa, Homo Sapiens
MLPPGTATLLTLLLAAGSLGQKPQRPRRPASPISTIQPKANFDAQQFAGTWLLVAVGSACRFLQEQGHRAEATTLHVAPQGTAMAVSTFRKLDGICWQVRQLYGDTGVLGRFLLQARDARGAVHVVVAETDYQSFAVLYLERAGQLSVKLYARSLPVSDSVLSGFEQRVQEAHLTEDQIFYFPKYGFCEAADQFHVLDEVRR

SEQ ID NO: 1934 - protein, 164 aa, Homo Sapiens
MLPPGTATLLTLLLAAGSLGQKPQRPRRPASPISTIQPKANFDAQQFAGTWLLVAVGSACRFLQEQGHRAEATTLHVAPQGTAMAVSTFRKLDGICWQVRQLYGDTGVLGRFLLQARDARGAVHVVVAETDYQSFAVLYLERAGQLSVKLYGAQGVVTDRPGVG

SEQ ID NO: 1935 - protein, 559 aa, Homo Sapiens
MSACRSFAVAICILEISILTAQYTTSYDPELTESSGSASHIDCRMSPWSEWSQCDPCLRQMFRSRSIEVFGQFNGKRCTDAVGDRRQCVPTEPCEDAEDDCGNDFQCSTGRCIKMRLRCNGDNDCGDFSDEDDCESEPRPPCRDRVVEESELARTAGYGINILGMDPLSTPFDNEFYNGLCNRDRDGNTLTYYRRPWNVASLIYETKGEKNFRTEHYEEQIEAFKSIIQEKTSNFNAAISLKFTPTETNKAEQCCEETASSISLHGKGSFRFSYSKNETYQLFLSYSSKKEKMFLHVKGEIHLGRFVMRNRDVVLTTTFVDDIKALPTTYEKGEYFAFLETYGTHYSSSGSLGGLYELIYVLDKASMKRKGVELKDIKRCLGYHLDVSLAFSEISVGAEFNKDDCVKRGEGRAVNITSENLIDDVVSLIRGGTRKYAFELKEKLLRGTVIDVTDFVNWASSINDAPVLISQKLSPIYNLVPVKMKNAHLKKQNLERAIEDYINEFSVRKCHTCQNGGTVILMDGKCLCACPFKFEGIACEISKQKISEGLPALEFPNEK

SEQ ID NO: 1936 - protein, 183 aa, Homo Sapiens
MVRIWTTIMIVLILLLRIGPNKPSLSGRQAPAQAQTSDLVPSLFPLGLWAPGFCTWSSPDEDKRPRKPVPGTGNRDSGTRRRLQDATEQDPRPGNDVASAETAGPPSPSGIRAQDRAPRHRRAPPARMPVAPAPSADGEPLQEQGGGLFHRTRSVYNGLELNTWMKVERLFVEKFHQSFSLDN

SEQ ID NO: 1937 - protein, 235 aa, Homo Sapiens
MVRIWTTIMIVLILLLRIGPNKPSLSGRQAPAQAQTSDLVPSLFPLGLWAPGFCTWSSPDEDKRPRKPVPGTGNRDSGTRRRLQDATEQDPRPGNDVASAETAGPPSPSGIRAQDRAPRHRRAPPARMPVAPAPSADGGERRARAGRGTRVGGWGPKDPPFQQNPHRSRARRGLGRATAAGALHISTPPPEPLQEQGGGLFHRTRSVYNGLELNTWMKVERLFVEKFHQSFSLDN

SEQ ID NO: 1938 - protein, 202 aa, Homo Sapiens
MVRIWTTIMIVLILLLRIGPNKPSLSGRQAPAQAQTSDLVPSLFPLGLWAPGFCTWSSPDEDKVWRPAWEQGPKGEPDPRGLRPRKPVPGTGNRDSGTRRRLQDATEQDPRPGNDVASAETAGPPSPSGIRAQDRAPRHRRAPPARMPVAPAPSADGEPLQEQGGGLFHRTRSVYNGLELNTWMKVERLFVEKFHQSFSLDN

SEQ ID NO: 1939 - protein, 56 aa, Homo Sapiens
HVSLRLDKEHLVNISGGPMTYSHRLEEIRLHFGSEDSQGSEHLLNGQAFSGEEKVC

SEQ ID NO: 1940 - protein, 328 aa, Homo Sapiens
MEIVWEVLFLLQANFIVCISAQQNSPKIHEGWWAYKEVVQGSFVPVPSFWGLVNSAWNLCSVGKRQSPVNIETSHMIFDPFLTPLRINTGGRKVSGTMYNTGRHVSLRLDKEHLVNISGGPMTYSHRLEEIRLHFGSEDSQGSEHLLNGQAFSGEVQLIHYNHELYTNVTEAAKSPNGLVVVSIFIKVSDSSNPFLNRMLNRDTITRITYKNDAYLLQGLNIEELYPETSSFITYDGSMTIPPCYETASWIIMNKPVYITRMQMHSLRLLSQNQPSQIFLSMSDNFRPVQPLNNRCIRTNINFSLQGKDCPNNRAQKLQYRVNEWLLK

SEQ ID NO: 1941 - protein, 328 aa, Homo Sapiens; identical to SEQ ID NO: 1940

SEQ ID NO: 1942 - protein, 328 aa, Homo Sapiens; identical to SEQ ID NO: 1940

SEQ ID NO: 1943 - protein, 276 aa, Homo Sapiens
MEIVWEVLFLLQANFIVCISAQQNSPKIHEGWWAYKEVVQGSFVPVPSFWGLVNSAWNLCSVGKRQSPVNIETSHMIFDPFLTPLRINTGGRKVSGTMYNTGRHVSLRLDKEHLVNISGGPMTYSHRLEEIRLHFGSEDSQGSEHLLNGQAFSGEVQLIHYNHELYTNVTEAAKSPNGLVVVSIFIKVSDSSNPFLNRMLNRDTITRITYKNDAYLLQGLNIEELYPETSSFITYDGSMTIPPCYETASWIIMNKPVYITRMQMHSLRLLSQNQPS

SEQ ID NO: 1944 - protein, 42 aa, Homo Sapiens
MEIVWEVLFLLQANFIVCISGDLRRAVRRLWWQSGLEMQVTC

SEQ ID NO: 1945 - protein, 253 aa, Homo Sapiens
MIFDPFLTPLRINTGGRKVSGTMYNTGRHVSLRLDKEHLVNISGGPMTYSHRLEEIRLHFGSEDSQGSEHLLNGQAFSGEVQLIHYNHELYTNVTEAAKSPNGLVVVSIFIKVSDSSNPFLNRMLNRDTITRITYKNDAYLLQGLNIEELYPETSSFITYDGSMTIPPCYETASWIIMNKPVYITRMQMHSLRLLSQNQPSQIFLSMSDNFRPVQPLNNRCIRTNINFSLQGKDCPNNRAQKLQYRVNEWLLK

SEQ ID NO: 1946 - protein, 328 aa, Homo Sapiens
MGAAARLSAPRALVLWAALGAAAHIGPAPDPEDWWSYKDNLQGNFVPGPPFWGLVNAAWSLCAVGKRQSPVDVELKRVLYDPFLPPLRLSTGGEKLRGTLYNTGRHVSFLPAPRPVVNVSGGPLLYSHRLSELRLLFGARDGAGSEHQINHQGFSAEVQLIHFNQELYGNFSAASRGPNGLAILSLFVNVASTSNPFLSRLLNRDTITRISYKNDAYFLQDLSLELLFPESFGFITYQGSLSTPPCSETVTWILIDRALNITSLQMHSLRLLSQNPPSQIFQSLSGNSRPLQPLAHRALRGNRDPRHPERRCRGPNYRLHVDGVPHGR

SEQ ID NO: 1947 - protein, 113 aa, Homo Sapiens
  misc_feature (1)..(1): Xaa can be any naturally occurring amino acid
XDAYFLQDLSLELLFPESFGFITYQGSLSTPPCSETVTWILIDRALNITSLQMHSLRLLSQNPPSQIFQSLSGNSRPLQPLAHRALRGNRDPRHPERRCRGPNYRLHAQCFST

SEQ ID NO: 1948 - protein, 187 aa, Homo Sapiens
MRALVLLLSLFLLGGQAQHVSDWTYSEGALDEAHWPQHYPACGGQRQSPINLQRTKISLPSTMRMTVADGTVYIAQQMHFHWGGASSEISGSEHTVDGIRHVIEIHIVHYNSKYKSYDIAQDAPDGLAVLAAFVEVKNYPENTYYSNFISHLANIKYPGQRTTLTGLDVQDMLPRNLQHYYTYHGSL

SEQ ID NO: 1949 - protein, 179 aa, Homo Sapiens
MRALVLLLSLFLLGGQAQHVSDWTYSEGALDEAHWPQHYPACGGQRQSPINLQRTKVRYNPSLKGLNMTGYETQAGEFPMVNNGHTDWQAELFLPSLSSPCGEGAKHKGQRQWLCSPSLDSWWEAIIDGGSLWATLAECGLRAEGPEEGRHMEEKSPASQGACSGSRLPISRGPCTFFL

SEQ ID NO: 1950 - protein, 313 aa, Homo Sapiens
MRALVLLLSLFLLGGQAQHVSDWTYSEGALDEAHWPQHYPACGGQRQSPINLQRTKVRYNPSLKGLNMTGYETQAGEFPMVNNGHTVQISLPSTMRMTVADGTVYIAQQMHFHWGGASSEISGSEHTVDGIRHVIEIHIVHYNSKYKSYDIAQDAPDGLAVLAAFVEVKNYPENTYYSNFISHLANIKYPGQRTTLTGLDVQDMLPRNLQHYYTYHGSLTTPPCTENVHWFVLADFVKLSRTQVWKLENSLLDHRNKTIHNDYRRTQPLNHRVVESNFPNQGKGHGGHRGRSQNPRVQPTSTRHPLALGSLEA

SEQ ID NO: 1951 - protein, 308 aa, Homo Sapiens
MRALVLLLSLFLLGGQAQHVSDWTYSEGALDEAHWPQHYPACGGQRQSPINLQRTKVRYNPSLKGLNMTGYETQAGEFPMVNNGHTVQISLPSTMRMTVADGTVYIAQQMHFHWGGASSEISGSEHTVDGIRHVIEIHIVHYNSKYKSYDIAQDAPDGLAVLAAFVEVKNYPENTYYSNFISHLANIKYPGQRTTLTGLDVQDMLPRNLQHYYTYHGSLTTPPCTENVHWFVLADFVKLSRTQVWKLENSLLDHRNKTIHNDYRRTQPLNHRVVESNFPNQEYTLGSEFQFYLHKIEEILDYLRRALN

SEQ ID NO: 1952 - protein, 248 aa, Homo Sapiens
MRALVLLLSLFLLGGQAQHVSDWTYSVQISLPSTMRMTVADGTVYIAQQMHFHWGGASSEISGSEHTVDGIRHVIEIHIVHYNSKYKSYDIAQDAPDGLAVLAAFVEVKNYPENTYYSNFISHLANIKYPGQRTTLTGLDVQDMLPRNLQHYYTYHGSLTTPPCTENVHWFVLADFVKLSRTQVWKLENSLLDHRNKTIHNDYRRTQPLNHRVVESNFPNQEYTLGSEFQFYLHKIEEILDYLRRALN

SEQ ID NO: 1953 - protein, 459 aa, Homo Sapiens
MAPLCPSPWLPLLIPAPAPGLTVQLLLSLLLLVPVHPQRLPRMQEDSPLGGGSSGEDDPLGEEDLPSEEDSPREEDPPGEEDLPGEEDLPGEEDLPEVKPKSEEEGSLKLEDLPTVEAPGDPQEPQNNAHRDKEGDDQSHWRYGGDPPWPRVSPACAGRFQSPVDIRPQLAAFCPALRPLELLGFQLPPLPELRLRNNGHSVQLTLPPGLEMALGPGREYRALQLHLHWGAAGRPGSEHTVEGHRFPAEIHVVHLSTAFARVDEALGRPGGLAVLAAFLEEGPEENSAYEQLLSRLEEIAEEGSETQVPGLDISALLPSDFSRYFQYEGSLTTPPCAQGVIWTVFNQTVMLSAKQLHTLSDTLWGPGDSRLQLNFRATQPLNGRVIEASFPAGVDSSPRAAEPVQLNSCLAAGDILALVFGLLFAVTSVAFLVQMRRQHRRGTKGGVSYRPAEVAETGA

SEQ ID NO: 1954 - protein, 356 aa, Homo Sapiens [sequence omitted]

SEQ ID NO: 1955 - protein, 633 aa, Homo Sapiens
MAAAAAAATTAACSSGSAGTDAAGASGLQQPPPQPQPQPAAAAPAQPPPEPPRKPRMDPRRRQAALSFLTNISLDGRLPPQDAEWGGGEEGGAAKPGAGGACGARTRFSLLAAAERGGCIALAAPGTPAAGLAAGSGPCLPQPSSLPPLIPGGHATVSGPGVARGFASPLGAGRASGEQWQPPRPAPLAACAQLQLLDGSGAAGQEELEEDDAFISVQVPAAAFLGSGTPGSGSGSRGRLNSFTQGILPIAFSRPTSQNYCSLEQPGQGGSTSAFEQLQRSRRRLISQRSSLETLEDIEENAPLRRCRTLSGSPRPKNFKKIHFIKNMRQHDTRNGRIVLISGRRSFCSIFSVLPYRDSTQVGDLKLDGGRQSTGAVSLKEIIGLEGVELGADGKTVSYTQFLLPTNAFGARRNTIDSTSSFSQFRNLSHRSLSIGRASGTQGSLDTGSDLGDFMDYDPNLLDDPQWPCGKHKRVLIFPSYMTTVIDYVKPSDLKKDMNETFKEKFPHIKLTLSKIRSLKREMRKLAQEDCGLEEPTVAMAFVYFEKLALKGKLNKQNRKLCAGACVLLAAKIGSDLKKHEVKHLIDKLEEKFRLNRRELIAFEFPVLVALEFALHLPEHEVMPHYRRLVQSS

SEQ ID NO: 1956 - protein, 368 aa, Homo Sapiens
MLSKRGCHARIYADFPIRRLISQRSSLETLEDIEENAPLRRCRTLSGSPRPKNFKKIHFIKNMRQHDTRNGRIVLISGRRSFCSIFSVLPYRDSTQVGDLKLDGGRQSTGAVSLKEIIGLEGVELGADGKTVSYTQFLLPTNAFGARRNTIDSTSSFSQFRNLSHRSLSIGRASGTQGSLDTGSDLGDFMDYDPNLLDDPQWPCGKHKRVLIFPSYMTTVIDYVKPSDLKKDMNETFKEKFPHIKLTLSKIRSLKREMRKLAQEDCGLEEPTVAMAFVYFEKLALKGKLNKQNRKLCAGACVLLAAKIGSDLKKHEVKHLIDKLEEKFRLNRRELIAFEFPVLVALEFALHLPEHEVMPHYRRLVQSS

SEQ ID NO: 1957 - protein, 9 aa, Homo Sapiens
MRQHDTRNG

SEQ ID NO: 1958 - protein, 306 aa, Homo Sapiens
MRQHDTRNGRIVLISGRRSFCSIFSVLPYRDSTQVGDLKLDGGRQSTGAVSLKEIIGLEGVELGADGKTVSYTQFLLPTNAFGARRNTIDSTSSFSQFRNLSHRSLSIGRASGTQGSLDTGSDLGDFMDYDPNLLDDPQWPCGKHKRVLIFPSYMTTVIDYVKPSDLKKDMNETFKEKFPHIKLTLSKIRSLKREMRKLAQEDCGLEEPTVAMAFVYFEKLALKGKLNKQNRKLCAGACVLLAAKIGSDLKKHEVKHLIDKLEEKFRLNRRELIAFEFPVLVALEFALHLPEHEVMPHYRRLVQSS

SEQ ID NO: 1959 - protein, 38 aa, Homo Sapiens
MRQHDTRNGRIVLISGRRSFCSIFSVLPYRDSTQVGQQ

SEQ ID NO: 1960 - protein, 163 aa, Homo Sapiens
  misc_feature (1)..(1): Xaa can be any naturally occurring amino acid
XAAFLGSGTPGSGSGSRGRLNSFTQGILPIAFSRPTSQNYCSLEQPGQGGSTSAFEQLQRSRRRLISQRSSLETLEDIEENAPLRRCRTLSGSPRPKNFKKIHFIKNMRQHDTRNGRIVLISGRRSFCSIFSVLPYRDSTQVGYVYACMLCSSLGEKISHQCT

SEQ ID NO: 1961 - protein, 306 aa, Homo Sapiens
MCQCVRACVCVCVCACATQRASHSALPGTTISVKDWRLCLLDQFDACARSGLSEPRSLTLRVPSCGKPLPGPGARLGREVTPCLSFAFAWCWLKMCQEEQTSYMVVQTSEEGLAADAELPGPLLMLAQNCAVMHNLLGPACIFLRKGFAENRQPDRSLRPEEIEELREAFREFDKDKDGYINCRDLGNCMRTMGYMPTEMELIELSQQINMNLGGHVDFDDFVELMGPKLLAETADMIGVKELRDAFREFDTNGDGEISTSELREAMRKLLGHQVGHRDIEEIIRDVDLNGDGRVDFEEFVRMMSR

SEQ ID NO: 1962 - protein, 370 aa, Homo Sapiens
MGGGDGAAFKRPGDGARLQRVLGLGSRREPRSLPAGGPAPRRTAPPPPGHASAGPAAMSSHIAKSESKTSLLKAAAAAASGGSRAPRHGPARDPGLPSRRLPGSCPATPQSSGDPSSRRPLCRPAPREEGARGSQRVLPQAHCRPREALPAAASRPSPSSPLPPARGRDGEERGLSPALGLRGSLRARGRGDSVPAAASEADPFLHRLRPMLSSAFGQDRSLRPEEIEELREAFREFDKDKDGYINCRDLGNCMRTMGYMPTEMELIELSQQINMNLGGHVDFDDFVELMGPKLLAETADMIGVKELRDAFREFDTNGDGEISTSELREAMRKLLGHQVGHRDIEEIIRDVDLNGDGRVDFEEFVRMMSR

SEQ ID NO: 1963 - protein, 167 aa, Homo Sapiens
MGNCVKYPLRNLSRKDRSLRPEEIEELREAFREFDKDKDGYINCRDLGNCMRTMGYMPTEMELIELSQQINMNLGGHVDFDDFVELMGPKLLAETADMIGVKELRDAFREFDTNGDGEISTSELREAMRKLLGHQVGHRDIEEIIRDVDLNGDGRVDFEEFVRMMSR

SEQ ID NO: 1964 - protein, 227 aa, Homo Sapiens
MGNCVKYPLRNLSRKMCQEEQTSYMVVQTSEEGLAADAELPGPLLMLAQNCAVMHNLLGPACIFLRKGFAENRQPDRSLRPEEIEELREAFREFDKDKDGYINCRDLGNCMRTMGYMPTEMELIELSQQINMNLGGHVDFDDFVELMGPKLLAETADMIGVKELRDAFREFDTNGDGEISTSELREAMRKLLGHQVGHRDIEEIIRDVDLNGDGRVDFEEFVRMMSR

SEQ ID NO: 1965 - protein, 1091 aa, Homo Sapiens
MAAGCLLALTLTLFQSLLIGPSSEEPFPSAVTIKSWVDKMQEDLVTLAKTASGVNQLVDIYEKYQDLYTVEPNNARQLVEIAARDIEKLLSNRSKALVRLALEAEKVQAAHQWREDFASNEVVYYNAKDDLDPEKNDSEPGSQRIKPVFIEDANFGRQISYQHAAVHIPTDIYEGSTIVLNELNWTSALDEVFKKNREEDPSLLWQVFGSATGLARYYPASPWVDNSRTPNKIDLYDVRRRPWYIQGAASPKDMLILVDVSGSVSGLTLKLIRTSVSEMLETLSDDDFVNVASFNSNAQDVSCFQHLVQANVRNKKVLKDAVNNITAKGITDYKKGFSFAFEQLLNYNVSRANCNKIIMLFTDGGEERAQEIFNKYNKDKKVRVFTFSVGQHNYDRGPIQWMACENKGYYYEIPSIGAIRINTQEYLDVLGRPMVLAGDKAKQVQWTNVYLDALELGLVITGTLPVFNITGQFENKTNLKNQLILGVMGVDVSLEDIKRLTPRFTLCPNGYYFAIDPNGYVLLHPNLQPKNPKSQEPVTLDFLDAELENDIKVEIRNKMIDGESGEKTFRTLVKSQDERYIDKGNRTYTWTPVNGTDYSLALVLPTYSFYYIKAKLEETITQARSKKGKMKDSETLKPDNFEESGYTFIAPRDYCNDLKISDNNTEFLLNFNEFIDRKTPNNPSCNADLINRVLLDAGFTNELVQNYWSKQKNIKGVKARFVVTDGGITRVYPKEAGENWQENPETYEDSFYKRSLDNDNYVFTAPYFNKSGPGAYESGIMVSKAVEIYIQGKLLKPAVVGIKIDVNSWIENFTKTSIRDPCAGPVCDCKRNSDVMDCVILDDGGFLLMANHDDYTNQIGRFFGEIDPSLMRHLVNISVYAFNKSYDYQSVCEPGAAPKQGAGHRSAYVPSVADILQIGWWATAAAWSILQQFLLSLTFPRLLEAVEMEDDDFTASLSKQSCITEQTQYFFDNDSKSFSGVLDCGNCSRIFHGEKLMNTNLIFIMVESKGTCPCDTRLLIQAEQTSDGPNPCDMVKQPRYRKGPDVCFDNNVLEDYTDCGGVSGLNPSLWYIIGIQFLLLWLVSGSTHRLL

SEQ ID NO: 1966 - protein, 1103 aa, Homo Sapiens
MAAGCLLALTLTLFQSLLIGPSSEEPFPSAVTIKSWVDKMQEDLVTLAKTASGVNQLVDIYEKYQDLYTVEPNNARQLVEIAARDIEKLLSNRSKALVRLALEAEKVQAAHQWREDFASNEVVYYNAKDDLDPEKNDSEPGSQRIKPVFIEDANFGRQISYQHAAVHIPTDIYEGSTIVLNELNWTSALDEVFKKNREEDPSLLWQVFGSATGLARYYPASPWVDNSRTPNKIDLYDVRRRPWYIQGAASPKDMLILVDVSGSVSGLTLKLIRTSVSEMLETLSDDDFVNVASFNSNAQDVSCFQHLVQANVRNKKVLKDAVNNITAKGITDYKKGFSFAFEQLLNYNVSRANCNKIIMLFTDGGEERAQEIFNKYNKDKKVRVFTFSVGQHNYDRGPIQWMACENKGYYYEIPSIGAIRINTQEYLDVLGRPMVLAGDKAKQVQWTNVYLDALELGLVITGTLPVFNITGQFENKTNLKNQLILGVMGVDVSLEDIKRLTPRFTLCPNGYYFAIDPNGYVLLHPNLQPKPIGVGIPTINLRKRRPNIQNPKSQEPVTLDFLDAELENDIKVEIRNKMIDGESGEKTFRTLVKSQDERYIDKGNRTYTWTPVNGTDYSLALVLPTYSFYYIKAKLEETITQARYSETLKPDNFEESGYTFIAPRDYCNDLKISDNNTEFLLNFNEFIDRKTPNNPSCNADLINRVLLDAGFTNELVQNYWSKQKNIKGVKARFVVTDGGITRVYPKEAGENWQENPETYEDSFYKRSLDNDNYVFTAPYFNKSGPGAYESGIMVSKAVEIYIQGKLLKPAVVGIKIDVNSWIENFTKTSIRDPCAGPVCDCKRNSDVMDCVILDDGGFLLMANHDDYTNQIGRFFGEIDPSLMRHLVNISVYAFNKSYDYQSVCEPGAAPKQGAGHRSAYVPSVADILQIGWWATAAAWSILQQFLLSLTFPRLLEAVEMEDDDFTASLSKQSCITEQTQYFFDNDSKSFSGVLDCGNCSRIFHGEKLMNTNLIFIMVESKGTCPCDTRLLIQAEQTSDGPNPCDMVKQPRYRKGPDVCFDNNVLEDYTDCGGVSGLNPSLWYIIGIQFLLLWLVSGSTHRLL

SEQ ID NO: 1967 - protein, 309 aa, Homo Sapiens
MAAGCLLALTLTLFQSLLIGPSSEEPFPSAVTIKSWVDKMQEDLVTLAKTASGVNQLVDIYEKYQDLYTVEPNNARQLVEIAARDIEKLLSNRSKALVRLALEAEKVQAAHQWREDFASNEVVYYNAKDDLDPEKNDSEPGSQRIKPVFIEDANFGRQISYQHAAVHIPTDIYEGSTIVLNELNWTSALDEVFKKNREEDPSLLWQVFGSATGLARYYPASPWVDNSRTPNKIDLYDVRRRPWYIQGAASPKDMLILVDVSGSVSGLTLKLIRTSVSEMLETLSDDDFVNVASDSKEISPSPEEIFNAE

SEQ ID NO: 1968 - protein, 280 aa, Homo Sapiens
  misc_feature (1)..(1): Xaa can be any naturally occurring amino acid
XKRLTPRFTLCPNGYYFAIDPNGYVLLHPNLQPKPIGVGIPTINLRKRRPNIQEPVTLDFLDAELENDIKVEIRNKMIDGESGEKTFRTLVKSQDERYIDKGNRTYTWTPVNGTDYSLALVLPTYSFYYIKAKLEETITQARYSETLKPDNFEESGYTFIAPRDYCNDLKISDNNTEFLLNFNEFIDRKTPNNPSCNADLINRVLLDAGFTNELVQNYWSKQKNIKGVKARFVVTDGGITRVYPKEAGENWQENPETYEDSFYKRSLDNDNYVFTAPYFN

SEQ ID NO: 1969 - protein, 1073 aa, Homo Sapiens
MAVALGTRRRDRVKLWADTFGGDLYNTVTKYSGSLLLQKKYKDVESSLKIEEVDGLELVRKFSEDMENMLRRKVEAVQNLVEAAEEADLNHEFNESLVFDYYNSVLINERDEKGNFVELGAEFLLESNAHFSNLPVNTSISSVQLPTNVYNKDPDILNGVYMSEALNAVFVENFQRDPTLTWQYFGSATGFFRIYPGIKWTPDENGVITFDCRNRGWYIQAATSPKDIVILVDVSGSMKGLRMTIAKHTITTILDTLGENDFINIIAYNDYVHYIEPCFKGILVQADRDNREHFKLLVEELMVKGVGVVDQALREAFQILKQFQEAKQGSLCNQAIMLISDGAVEDYEPVFEKYNWPDCKVRVFTYLIGREVSFADRMKWIACNNKGYYTQISTLADTQENVMEYLHVLSRPMVINHDHDIIWTEAYMDSKLLSSQAQSLTLLTTVAMPVFSKKNETRSHGILLGVVGSDVALRELMKLAPRYKLGVHGYAFLNTNNGYILSHPDLRPLYREGKKLKPKPNYNSVDLSEVEWEDQAESLRTAMINRETGTLSMDVKVPMDKGKRVLFLTNDYFFTDISDTPFSLGVVLSRGHGEYILLGNTSVEEGLHDLLHPDLALAGDWIYCITDIDPDHRKLSQLEAMIRFLTRKDPDLECDEELVREVLFDAVVTAPMEAYWTALALNMSEESEHVVDMAFLGTRAGLLRSSLFVGSEKVSDRKFLTPEDEASVFTLDRFPLWYRQASEHPAGSFVFNLRWAEGPESAGEPMVVTASTAVAVTVDKRTAIAAAAGVQMKLEFLQRKFWAATRQCSTVDGPCTQSCEDSDLDCFVIDNNGFILISKRSRETGRFLGEVDGAVLTQLLSMGVFSQVTMYDYQAMCKPSSHHHSAAQPLVSPISAFLTATRWLLQELVLFLLEWSVWGSWYDRGAEAKSVFHHSHKHKKQDPLQPCDTEYPVFVYQPAIREANGIVECGPCQKVFVVQQIPNSNLLLLVTDPTCDCSIFPPVLQEATEVKYNASVKCDRMRSQKLRRRPDSCHAFHPEENAQDCGGASDTSASPPLLLLPVCAWGLLPQLLR

SEQ ID NO: 1970 - protein, 1090 aa, Homo Sapiens
MAVALGTRRRDRVKLWADTFGGDLYNTVTKYSGSLLLQKKYKDVESSLKIEEVDGLELVRKFSEDMENMLRRKVEAVQNLVEAAEEADLNHEFNESLVFDYYNSVLINERDEKGNFVELGAEFLLESNAHFSNLPVNTSISSVQLPTNVYNKDPDILNGVYMSEALNAVFVENFQRDPTLTWQYFGSATGFFRIYPGIKWTPDENGVITFDCRNRGWYIQAATSPKDIVILVDVSGSMKGLRMTIAKHTITTILDTLGENDFINIIAYNDYVHYIEPCFKGILVQADRDNREHFKLLVEELMVKGVGVVDQALREAFQILKQFQEAKQGSLCNQAIMLISDGAVEDYEPVFEKYNWPDCKVRVFTYLIGREVSFADRMKWIACNNKGYYTQISTLADTQENVMEYLHVLSRPMVINHDHDIIWTEAYMDSKLLSSQAQSLTLLTTVAMPVFSKKNETRSHGILLGVVGSDVALRELMKLAPRYKLGVHGYAFLNTNNGYILSHPDLRPLYREGKKLKPKPNYNSVDLSEVEWEDQAESLRTAMINRETGTLSMDVKVPMDKGKRVLFLTNDYFFTDISDTPFSLGVVLSRGHGEYILLGNTSVEEGLHDLLHPDLALAGDWIYCITDIDPDHRKLSQLEAMIRFLTRKDPDLECDEELVREVLFDAVVTAPMEAYWTALALNMSEESEHVVDMAFLGTRAGLLRSSLFVGSEKVSDRKFLTPEDEASVFTLDRFPLWYRQASEHPAGSFVFNLRWAEGPESAGEPMVVTASTAVAVTVDKRTAIAAAAGVQMKLEFLQRKFWAATRQCSTVDGPCTQSCEDSDLDCFVIDNNGFILISKRSRETGRFLGEVDGAVLTQLLSMGVFSQVTMYDYQAMCKPSSHHHSAAQPLVSPISAFLTATRWLLQELVLFLLEWSVWGSWYDRGAEAKSVFHHSHKHKKQDPLQPCDTEYPVFVYQPAIREANGIVECGPCQKVFVVQQIPNSNLLLLVTDPTCDCSIFPPVLQEATEVKYNASVKCDRMRSQKLRRRPDSCHAFHPEVRVEADRGWAGFSSPNPLCLGLCPCRQEHIGMPMNTPVPVLLGGNIRVYAL

SEQ ID NO: 1971 - protein, 56 aa, Homo Sapiens
MKLEFLQRKFWAATRQCSTVDGPCTQSCEDSDLDCFVIDNNGFILISKRSRESDYV

SEQ ID NO: 1972 - protein, 56 aa, Homo Sapiens; identical to SEQ ID NO: 1971

SEQ ID NO: 1973 - protein, 282 aa, Homo Sapiens
MKLEFLQRKFWAATRQCSTVDGPCTQSCEDSDLDCFVIDNNGFILISKRSRETGRFLGEVDGAVLTQLLSMGVFSQVTMYDYQAMCKPSSHHHSAAQPLVSPISAFLTATRWLLQELVLFLLEWSVWGSWYDRGAEAKSVFHHSHKHKKQDPLQPCDTEYPVFVYQPAIREANGIVECGPCQKVFVVQQIPNSNLLLLVTDPTCDCSIFPPVLQEATEVKYNASVKCDRMRSQKLRRRPDSCHAFHPEENAQDCGGASDTSASPPLLLLPVCAWGLLPQLLR

SEQ ID NO: 1974 - protein, 41 aa, Homo Sapiens
MKLEFLQRKFWAATRQDLDCFVIDNNGFILISKRSRESDYV

SEQ ID NO: 1975 - protein, 267 aa, Homo Sapiens
MKLEFLQRKFWAATRQDLDCFVIDNNGFILISKRSRETGRFLGEVDGAVLTQLLSMGVFSQVTMYDYQAMCKPSSHHHSAAQPLVSPISAFLTATRWLLQELVLFLLEWSVWGSWYDRGAEAKSVFHHSHKHKKQDPLQPCDTEYPVFVYQPAIREANGIVECGPCQKVFVVQQIPNSNLLLLVTDPTCDCSIFPPVLQEATEVKYNASVKCDRMRSQKLRRRPDSCHAFHPEENAQDCGGASDTSASPPLLLLPVCAWGLLPQLLR

SEQ ID NO: 1976 - protein, 1137 aa, Homo Sapiens
MVCGCSALLPLPNPRPTMPATPNFLANPSSSSRWIPLQPMPVAWAFVQKTSALLWLLLLGTSLSPAWGQAKIPLETVKLWADTFGGDLYNTVTKYSGSLLLQKKYKDVESSLKIEEVDGLELVRKFSEDMENMLRRKVEAVQNLVEAAEEADLNHEFNESLVFDYYNSVLINERDEKGNFVELGAEFLLESNAHFSNLPVNTSISSVQLPTNVYNKDPDILNGVYMSEALNAVFVENFQRDPTLTWQYFGSATGFFRIYPGIKWTPDENGVITFDCRNRGWYIQAATSPKDIVILVDVSGSMKGLRMTIAKHTITTILDTLGENDFINIIAYNDYVHYIEPCFKGILVQADRDNREHFKLLVEELMVKGVGVVDQALREAFQILKQFQEAKQGSLCNQAIMLISDGAVEDYEPVFEKYNWPDCKVRVFTYLIGREVSFADRMKWIACNNKGYYTQISTLADTQENVMEYLHVLSRPMVINHDHDIIWTEAYMDSKLLSSQAQSLTLLTTVAMPVFSKKNETRSHGILLGVVGSDVALRELMKLAPRYKLGVHGYAFLNTNNGYILSHPDLRPLYREGKKLKPKPNYNSVDLSEVEWEDQAESLRTAMINRETGTLSMDVKVPMDKGKRVLFLTNDYFFTDISDTPFSLGVVLSRGHGEYILLGNTSVEEGLHDLLHPDLALAGDWIYCITDIDPDHRKLSQLEAMIRFLTRKDPDLECDEELVREVLFDAVVTAPMEAYWTALALNMSEESEHVVDMAFLGTRAGLLRSSLFVGSEKVSDRKFLTPEDEASVFTLDRFPLWYRQASEHPAGSFVFNLRWAEGPESAGEPMVVTASTAVAVTVDKRTAIAAAAGVQMKLEFLQRKFWAATRQCSTVDGPCTQSCEDSDLDCFVIDNNGFILISKRSRETGRFLGEVDGAVLTQLLSMGVFSQVTMYDYQAMCKPSSHHHSAAQPLVSPISAFLTATRWLLQELVLFLLEWSVWGSWYDRGAEAKSVFHHSHKHKKQDPLQPCDTEYPVFVYQPAIREANGIVECGPCQKVFVVQQIPNSNLLLLVTDPTCDCSIFPPVLQEATEVKYNASVKCDRMRSQKLRRRPDSCHAFHPEENAQDCGGASDTSASPPLLLLPVCAWGLLPQLLR

SEQ ID NO: 1977 - protein, 601 aa, Homo Sapiens
MVCGCSALLPLPNPRPTMPATPNFLANPSSSSRWIPLQPMPVAWAFVQKTSALLWLLLLGTSLSPAWGQAKIPLETVKLWADTFGGDLYNTVTKYSGSLLLQKKYKDVESSLKIEEVDGLELVRKFSEDMENMLRRKVEAVQNLVEAAEEADLNHEFNESLVFDYYNSVLINERDEKGNFVELGAEFLLESNAHFSNLPVNTSISSVQLPTNVYNKDPDILNGVYMSEALNAVFVENFQRDPTLTWQYFGSATGFFRIYPGIKWTPDENGVITFDCRNRGWYIQAATSPKDIVILVDVSGSMKGLRMTIAKHTITTILDTLGENDFINIIAYNDYVHYIEPCFKGILVQADRDNREHFKLLVEELMVKGVGVVDQALREAFQILKQFQEAKQGSLCNQAIMLISDGAVEDYEPVFEKYNWPDCKVRVFTYLIGREVSFADRMKWIACNNKGYYTQISTLADTQENVMEYLHVLSRPMVINHDHDIIWTEAYMDSKLLSSQAQSLTLLTTVAMPVFSKKNETRSHGILLGVVGSDVALRELMKLAPRYKMPSTNSRPNAPPPWTLAAWSARIRLSEHQQWLHPLPSRPPAPVQRGEETKTQT

SEQ ID NO: 1978 - protein, 1154 aa, Homo Sapiens
MVCGCSALLPLPNPRPTMPATPNFLANPSSSSRWIPLQPMPVAWAFVQKTSALLWLLLLGTSLSPAWGQAKIPLETVKLWADTFGGDLYNTVTKYSGSLLLQKKYKDVESSLKIEEVDGLELVRKFSEDMENMLRRKVEAVQNLVEAAEEADLNHEFNESLVFDYYNSVLINERDEKGNFVELGAEFLLESNAHFSNLPVNTSISSVQLPTNVYNKDPDILNGVYMSEALNAVFVENFQRDPTLTWQYFGSATGFFRIYPGIKWTPDENGVITFDCRNRGWYIQAATSPKDIVILVDVSGSMKGLRMTIAKHTITTILDTLGENDFINIIAYNDYVHYIEPCFKGILVQADRDNREHFKLLVEELMVKGVGVVDQALREAFQILKQFQEAKQGSLCNQAIMLISDGAVEDYEPVFEKYNWPDCKVRVFTYLIGREVSFADRMKWIACNNKGYYTQISTLADTQENVMEYLHVLSRPMVINHDHDIIWTEAYMDSKLLSSQAQSLTLLTTVAMPVFSKKNETRSHGILLGVVGSDVALRELMKLAPRYKLGVHGYAFLNTNNGYILSHPDLRPLYREGKKLKPKPNYNSVDLSEVEWEDQAESLRTAMINRETGTLSMDVKVPMDKGKRVLFLTNDYFFTDISDTPFSLGVVLSRGHGEYILLGNTSVEEGLHDLLHPDLALAGDWIYCITDIDPDHRKLSQLEAMIRFLTRKDPDLECDEELVREVLFDAVVTAPMEAYWTALALNMSEESEHVVDMAFLGTRAGLLRSSLFVGSEKVSDRKFLTPEDEASVFTLDRFPLWYRQASEHPAGSFVFNLRWAEGPESAGEPMVVTASTAVAVTVDKRTAIAAAAGVQMKLEFLQRKFWAATRQCSTVDGPCTQSCEDSDLDCFVIDNNGFILISKRSRETGRFLGEVDGAVLTQLLSMGVFSQVTMYDYQAMCKPSSHHHSAAQPLVSPISAFLTATRWLLQELVLFLLEWSVWGSWYDRGAEAKSVFHHSHKHKKQDPLQPCDTEYPVFVYQPAIREANGIVECGPCQKVFVVQQIPNSNLLLLVTDPTCDCSIFPPVLQEATEVKYNASVKCDRMRSQKLRRRPDSCHAFHPEVRVEADRGWAGFSSPNPLCLGLCPCRQEHIGMPMNTPVPVLLGGNIRVYAL

SEQ ID NO: 1979 - protein, 780 aa, Homo Sapiens
MVCGCSALLPLPNPRPTMPATPNFLANPSSSSRWIPLQPMPVAWAFVQKTSALLWLLLLGTSLSPAWGQAKIPLETVKLWADTFGGDLYNTVTKYSGSLLLQKKYKDVESSLKIEEVDGLELVRKFSEDMENMLRRKVEAVQNLVEAAEEADLNHEFNESLVFDYYNSVLINERDEKGNFVELGAEFLLESNAHFSNLPVNTSISSVQLPTNVYNKDPDILNGVYMSEALNAVFVENFQRDPTLTWQYFGSATGFFRIYPGILVQADRDNREHFKLLVEELMVKGVGVVDQALREAFQILKQFQEAKQGSLCNQAIMLISDGAVEDYEPVFEKYNWPDCKISTLADTQENVMEYLHVLSRPMVINHDHDIIWTEAYMDSKLLSSQAQSLTLLTTVAMPVFSKKNETRSHGILLGVVGSDVALRELMKLAPRYKLGVHGYAFLNTNNGYILSHPDLRPLYREGKKLKPKPNYNSVDLSEVEWEDQAESKRVLFLTNDYFFTDISDTPFSLGVVLSRGHGEYILLGNTSVEEGLHDLLHPDLALAGDWIYCITDIDPDHRKLSQLEAMIRFLTRKDPDLECDEELVREVLFDAVVTAPMEAYWTALALNMSEESEHVVDMAFLGTRAGLLRSSLFVGSEKVSDRKFLTPEDEASVFTLDRFPLWYRQASEHPAGSFVFNLRWAEGPESAGEPMVVTASTAVAVTVDKRTAIAAAAGVQMKLEFLQRKFWAATRQCSTVDGPCTQSCEDSDLDCFVIDNNGFILISKRSREPGIKLRKKPIQT

SEQ ID NO: 1980 - protein, 1112 aa, Homo Sapiens
MVCGCSALLPLPNPRPTMPATPNFLANPSSSSRWIPLQPMPVAWAFVQKTSALLWLLLLGTSLSPAWGQAKIPLETVKLWADTFGGDLYNTVTKYSGSLLLQKKYKDVESSLKIEEVDGLELVRKFSEDMENMLRRKVEAVQNLVEAAEEADLNHEFNESLVFDYYNSVLINERDEKGNFVELGAEFLLESNAHFSNLPVNTSISSVQLPTNVYNKDPDILNGVYMSEALNAVFVENFQRDPTLTWQYFGSATGFFRIYPGIKWTPDENGVITFDCRNRGWYIQAATSPKDIVILVDVSGSMKGLRMTIAKHTITTILDTLGENDFINIIAYNDYVHYIEPCFKGILVQADRDNREHFKLLVEELMVKGVGVVDQALREAFQILKQFQEAKQGSLCNQAIMLISDGAVEDYEPVFEKYNWPDCKVRVFTYLIGREVSFADRMKWIACNNKGYYTQISTLADTQENVMEYLHVLSRPMVINHDHDIIWTEAYMDSKLLSSQAQSLTLLTTVAMPVFSKKNETRSHGILLGVVGSDVALRELMKLAPRYKYREGKKLKPKPNYNSVDLSEVEWEDQAESLRTAMINRETGTLSMDVKVPMDKGKRVLFLTNDYFFTDISDTPFSLGVVLSRGHGEYILLGNTSVEEGLHDLLHPDLALAGDWIYCITDIDPDHRKLSQLEAMIRFLTRKDPDLECDEELVREVLFDAVVTAPMEAYWTALALNMSEESEHVVDMAFLGTRAGLLRSSLFVGSEKVSDRKFLTPEDEASVFTLDRFPLWYRQASEHPAGSFVFNLRWAEGPESAGEPMVVTASTAVAVTVDKRTAIAAAAGVQMKLEFLQRKFWAATRQCSTVDGPCTQSCEDSDLDCFVIDNNGFILISKRSRETGRFLGEVDGAVLTQLLSMGVFSQVTMYDYQAMCKPSSHHHSAAQPLVSPISAFLTATRWLLQELVLFLLEWSVWGSWYDRGAEAKSVFHHSHKHKKQDPLQPCDTEYPVFVYQPAIREANGIVECGPCQKVFVVQQIPNSNLLLLVTDPTCDCSIFPPVLQEATEVKYNASVKCDRMRSQKLRRRPDSCHAFHPEENAQDCGGASDTSASPPLLLLPVCAWGLLPQLLR

SEQ ID NO: 1981 - protein, 192 aa, Homo Sapiens
  misc_feature (1)..(1): Xaa can be any naturally occurring amino acid
XELVREVLFDAVVTAPMEAYWTALALNMSEESEHVVDMAFLGTRAGLLRSSLFVGSEKVSDRKFLTPEDEASVFTLDRFPLWYRQASEHPAGSFVFNLRWAEGPESAGEPMVVTASTAVAVTVDKRTAIAAAAGVQMKLEFLQRKFWAATRQCSTVDGPCTQSCEDSDLDCFVIDNNGFILISKRSRESDYV

SEQ ID NO: 1982 - protein, 284 aa, Homo Sapiens
  misc_feature (1)..(1): Xaa can be any naturally occurring amino acid
XGVQMKLEFLQRKFWAATRQCSTVDGPCTQSCEDSDLDCFVIDNNGFILISKRSRETGRFLGEVDGAVLTQLLSMGVFSQVTMYDYQAMCKPSSHHHSAAQPLPISAFLTATRWLLQELVLFLLEWSVWGSWYDRGAEAKSVFHHSHKHKKQDPLQPCDTEYPVFVYQPAIREANGIVECGPCQKVFVVQQIPNSNLLLLVTDPTCDCSIFPPVLQEATEVKYNASVKCDRMRSQKLRRRPDSCHAFHPEENAQDCGGASDTSASPPLLLLPVCAWGLLPQLLR

SEQ ID NO: 1983 - protein, 234 aa, Homo Sapiens
MGAPAASLLLLLLLFACCWAPGGANLSQDDSQPWTSDETVVAGGTVVLKCQVKDHEDSSLQWSNPAQQTLYFGEKRALRDNRIQLVTSTPHELSISISNVALADEGEYTCSIFTMPVRTAKSLVTVLGIPQKPIITGYKSSLREKDTATLNCQSSGSKPAARLTWRKGDQELHGEPTRIQEDPNDTPTAMIRPDPPHPREGQKLLLHCEGRGNPVPQQYLWEKEGSVPPLKMTQ

SEQ ID NO: 1984 - protein, 398 aa, Homo Sapiens
MGAPAASLLLLLLLFACCWAPGGANLSQDDSQPWTSDETVVAGGTVVLKCQVKDHEDSSLQWSNPAQQTLYFGEKRALRDNRIQLVTSTPHELSISISNVALADEGEYTCSIFTMPVRTAKSLVTVLGIPQKPIITGYKSSLREKDTATLNCQSSGSKPAARLTWRKGDQELHGEPTRIQEDPNGKTFTVSSSVTFQVTREDDGASIVCSVNHESLKGADRSTSQRIEVLYTPTAMIRPDPPHPREGQKLLLHCEGRGNPVPQQYLWEKEGSVPPLKMTQESALIFPFLNKSDSGTYGCTATSNMGSYKAYYTLNVNDPSPVPSSSSTYHAIIGGIVAFIVFLLLIMLIFLGHYLIRHKGTYLTHEAKGSDDAPDADTAIINAEGGQSGGDDKKEYFI

SEQ ID NO: 1985 - protein, 432 aa, Homo Sapiens
MGAPAASLLLLLLLFACCWAPGGANLSQDGYWQEQDLELGTLAPLDEAISSTVWSSPDMLASQDSQPWTSDETVVAGGTVVLKCQVKDHEDSSLQWSNPAQQTLYFGEKRALRDNRIQLVTSTPHELSISISNVALADEGEYTCSIFTMPVRTAKSLVTVLGIPQKPIITGYKSSLREKDTATLNCQSSGSKPAARLTWRKGDQELHGEPTRIQEDPNGKTFTVSSSVTFQVTREDDGASIVCSVNHESLKGADRSTSQRIEVLYTPTAMIRPDPPHPREGQKLLLHCEGRGNPVPQQYLWEKEGSVPPLKMTQESALIFPFLNKSDSGTYGCTATSNMGSYKAYYTLNVNDPSPVPSSSSTYHAIIGGIVAFIVFLLLIMLIFLGHYLIRHKGTYLTHEAKGSDDAPDADTAIINAEGGQSGGDDKKEYFI

SEQ ID NO: 1986 - protein, 128 aa, Homo Sapiens
MGFQKFSPFLALSILVLLQAGSLHAAPFRSALESSPADPATLSEDEARLLLAALVQDYVQMKASELEQEQEREGSRIIAQKRACDTATCVTHRLAGLLSRSGGVVKNNFVPTNVGSKAFGRRRRDLQA

SEQ ID NO: 1987 - protein, 128 aa, Homo Sapiens; identical to SEQ ID NO: 1986

SEQ ID NO: 1988 - protein, 141 aa, Homo Sapiens
MGFQKFSPFLALSILVLLQAGSLHAAPFRSALESSPADPATLSEDEARLLLAALVQDYVQMKASELEQEQEREGSSLDSPRSKRCGNLSTCMLGTYTQDFNKFHTFPQTAIGVGAPGKKRDMSSDLERDHRPHNHCPEESL

SEQ ID NO: 1989 - protein, 141 aa, Homo Sapiens
MGFQKFSPFLALSILVLLQAGSLHAAPFRSALESSPADPATLSEDEARLLLAALVQDYVQMKASELEQEQEREGSSLDSPRSKRCGNLSTCMLGTYTQDFNKFHTFPQTAIGVGAPGKKRDMSSDLERDHRPHVSMPQNAN

SEQ ID NO: 1990 - protein, 141 aa, Homo Sapiens; identical to SEQ ID NO: 1989

SEQ ID NO: 1991 - protein, 127 aa, Homo Sapiens
MGFRKFSPFLALSILVLYQAGSLQAAPFRSALESSPDPATLSKEDARLLLAALVQDYVQMKASELKQEQETQGSSSAAQKRACNTATCVTHRLAGLLSRSGGMVKSNFVPTNVGSKAFGRRRRDLQA

SEQ ID NO: 1992 - protein, 127 aa, Homo Sapiens; identical to SEQ ID NO: 1991

SEQ ID NO: 1993 - protein, 138 aa, Homo Sapiens
MKKEANLQRGGMGFRKFSPFLALSILVLYQAGSLQAAPFRSALESSPDPATLSKEDARLLLAALVQDYVQMKASELKQEQETQGSSSAAQKRACNTATCVTHRLAGLLSRSGGMVKSNFVPTNVGSKAFGRRRRDLQA

SEQ ID NO: 1994 - protein, 508 aa, Homo Sapiens
MQFSGEKISGQRDLQKSKMRFTFTSRCLALFLLLNHPTPILPAFSNQTYPTIEPKPFLYVVGRKKMMDAQYKCYDRMQQLPAYQGEGPYCNRTWDGWLCWDDTPAGVLSYQFCPDYFPDFDPSEKVTKYCDEKGVWFKHPENNRTWSNYTMCNAFTPEKLKNAYVLYYLAIVGHSLSIFTLVISLGIFVFFRKLTTIFPLNWKYRKALSLGCQRVTLHKNMFLTYILNSMIIIIHLVEVVPNGELVRRDPVSCKILHFFHQYMMACNYFWMLCEGIYLHTLIVVAVFTEKQRLRWYYLLGWGFPLVPTTIHAITRAVYFNDNCWLSVETHLLYIIHGPVMAALVVNFFFLLNIVRVLVTKMRETHEAESHMYLKAVKATMILVPLLGIQFVVFPWRPSNKMLGKIYDYVMHSLIHFQGFFVATIYCFCNNEVQTTVKRQWAQFKIQWNQRWGRRPSNRSARAAAAAAEAGDIPIYICHQELRNEPANNQGEESAEIIPLNIIEQESSA

SEQ ID NO: 1995 - protein, 162 aa, Homo Sapiens
MRFTFTSRCLALFLLLNHPTPILPAFSNQTYPTIEPKPFLYVVGRKKMMDAQYKCYDRMQQLPAYQGEGPYCNRTWDGWLCWDDTPAGVLSYQFCPDYFPDFDPSEKVTKYCDEKGVWFKHPENNRTWSNYTMCNAFTPEKLKNAYVLYYLAIVGHSCQFSP

SEQ ID NO: 1996 - protein, 290 aa, Homo Sapiens
MRFTFTSRCLALFLLLNHPTPILPAFSNQTYPTIEPKPFLYVVGRKKMMDAQYKCYDRMQQLPAYQGEGPYCNRTWDGWLCWDDTPAGVLSYQFCPDYFPDFDPSEKVTKYCDEKGVWFKHPENNRTWSNYTMCNAFTPEKLKNAYVLYYLAIVGHSLSIFTLVISLGIFVFFRKLTTIFPLNWKYRKALSLGCQRVTLHKNMFLTYILNSMIIIIHLVEVVPNGELVRRDPVSCKILHFFHQYMMACNYFWMLCEGIYLHTLIVVAVFTEKQRLRWYYLLGWAPAFHRD

SEQ ID NO: 1997 - protein, 490 aa, Homo Sapiens
MRFTFTSRCLALFLLLNHPTPILPAFSNQTYPTIEPKPFLYVVGRKKMMDAQYKCYDRMQQLPAYQGEGPYCNRTWDGWLCWDDTPAGVLSYQFCPDYFPDFDPSEKVTKYCDEKGVWFKHPENNRTWSNYTMCNAFTPEKLKNAYVLYYLAIVGHSLSIFTLVISLGIFVFFRKLTTIFPLNWKYRKALSLGCQRVTLHKNMFLTYILNSMIIIIHLVEVVPNGELVRRDPVSCKILHFFHQYMMACNYFWMLCEGIYLHTLIVVAVFTEKQRLRWYYLLGWGFPLVPTTIHAITRAVYFNDNCWLSVETHLLYIIHGPVMAALVVNFFFLLNIVRVLVTKMRETHEAESHMYLKAVKATMILVPLLGIQFVVFPWRPSNKMLGKIYDYVMHSLIHFQGFFVATIYCFCNNEVQTTVKRQWAQFKIQWNQRWGRRPSNRSARAAAAAAEAGDIPIYICHQELRNEPANNQGEESAEIIPLNIIEQESSA

SEQ ID NO: 1998 - protein, 474 aa, Homo Sapiens
MRFTFTSRCLALFLLLNHPTPILPAFSNQTYPTIEPKPFLYVVGRKKMMDAQYKCYDRMQQLPAYQGEGPYCNRTWDGWLCWDDTPAGVLSYQFCPDYFPDFDPSEKVTKYCDEKGVWFKHPENNRTWSNYTMCNAFTPEKLKNAYVLYYLAIVGHSLSIFTLVISLGIFVFFRSLGCQRVTLHKNMFLTYILNSMIIIIHLVEVVPNGELVRRDPVSCKILHFFHQYMMACNYFWMLCEGIYLHTLIVVAVFTEKQRLRWYYLLGWGFPLVPTTIHAITRAVYFNDNCWLSVETHLLYIIHGPVMAALVVNFFFLLNIVRVLVTKMRETHEAESHMYLKAVKATMILVPLLGIQFVVFPWRPSNKMLGKIYDYVMHSLIHFQGFFVATIYCFCNNEVQTTVKRQWAQFKIQWNQRWGRRPSNRSARAAAAAAEAGDIPIYICHQELRNEPANNQGEESAEIIPLNIIEQESSA

SEQ ID NO: 1999 - protein, 474 aa, Homo Sapiens; identical to SEQ ID NO: 1998

SEQ ID NO: 2000 - protein, 274 aa, Homo Sapiens
MRFTFTSRCLALFLLLNHPTPILPAFSNQTYPTIEPKPFLYVVGRKKMMDAQYKCYDRMQQLPAYQGEGPYCNRTWDGWLCWDDTPAGVLSYQFCPDYFPDFDPSEKVTKYCDEKGVWFKHPENNRTWSNYTMCNAFTPEKLKNAYVLYYLAIVGHSLSIFTLVISLGIFVFFRSLGCQRVTLHKNMFLTYILNSMIIIIHLVEVVPNGELVRRDPVSCKILHFFHQYMMACNYFWMLCEGIYLHTLIVVAVFTEKQRLRWYYLLGWAPAFHRD

SEQ ID NO: 2001 - protein, 37 aa, Homo Sapiens
MEKKCTLYFLVLLPFFMILVTAELEESPEDSIQLGVT

SEQ ID NO: 2002 - protein, 78 aa, Homo Sapiens
MEKKCTLYFLVLLPFFMILVTAELEESPEDSIQLGVTRNKIMTAQYECYQKIMQDPIQQAEGVYCNRTWDGWLCWNDV

SEQ ID NO: 2003 - protein, 461 aa, Homo Sapiens [sequence omitted]

SEQ ID NO: 2004 - protein, 461 aa, Homo Sapiens [sequence omitted]

SEQ ID NO: 2005 - protein, 461 aa, Homo Sapiens [sequence omitted]

SEQ ID NO: 2006 - protein, 170 aa, Homo Sapiens
MAPRSAKETFRINPNVAANLSAPSDVILVRDEIALLHRYQSQMLGWILITLATIAALVSCCVAKCCSPLTSLQHCYWTSHLQNERELFEQAAEQHSRLLMMHRIKKLFGFIPGSEDVKHIRIPSCQDWKDISVPTLLCMGDDLQGHYSFLGNRVDEDNEEDRSRGIELKP

SEQ ID NO: 2007 - protein, 314 aa, Homo Sapiens
MCPTLNNIVSSLQRNGIFINSLIAALTIGGQQLFSSSTFSCPCQVGKNFYYGSAFLVIPALILLVAGFALRSQMWTITGEYCCSCAPPYRRISPLECKLACLRFFSITGRAVIAPLTWLAVTLLTGTYYECAASEFASVDHYPMFDNVSASKREEILAGFPCCRSAPSDVILVRDEIALLHRYQSQMLGWILITLATIAALVSCCVAKCCSPLTSLQHCYWTSHLQNERELFEQAAEQHSRLLMMHRIKKLFGFIPGSEDVKHIRIPSCQDWKDISVPTLLCMGDDLQGHYSFLGNRVDEDNEEDRSRGIELKP

SEQ ID NO: 2008 - protein, 171 aa, Homo Sapiens
MFDNVSASKREEILAGFPCCRSAPSDVILVRDEIALLHRYQSQMLGWILITLATIAALVSCCVAKCCSPLTSLQHCYWTSHLQNERELFEQAAEQHSRLLMMHRIKKLFGFIPGSEDVKHIRIPSCQDWKDISVPTLLCMGDDLQGHYSFLGNRVDEDNEEDRSRGIELKP

SEQ ID NO: 2009 - protein, 123 aa, Homo Sapiens
MLGWILITLATIAALVSCCVAKCCSPLTSLQHCYWTSHLQNERELFEQAAEQHSRLLMMHRIKKLFGFIPGSEDVKHIRIPSCQDWKDISVPTLLCMGDDLQGHYSFLGNRVDEDNEEDRSRG

SEQ ID NO: 2010 - protein, 128 aa, Homo Sapiens
MLGWILITLATIAALVSCCVAKCCSPLTSLQHCYWTSHLQNERELFEQAAEQHSRLLMMHRIKKLFGFIPGSEDVKHIRIPSCQDWKDISVPTLLCMGDDLQGHYSFLGNRVDEDNEEDRSRGIELKP

SEQ ID NO: 2011 - protein, 417 aa, Homo Sapiens
MLLSVPLLLGLLGLAVAEPAVYFKEQFLDGDGWTSRWIESKHKSDFGKFVLSSGKFYGDEEKDKGLQTSQDARFYALSASFEPFSNKGQTLVVQFTVKHEQNIDCGGGYVKLFPNSLDQTDMHGDSEYNIMFGPDICGPGTKKVHVIFNYKGKNVLINKDIRCKDDEFTHLYTLIVRPDNTYEVKIDNSQVESGSLEDDWDFLPPKKIKDPDASKPEDWDERAKIDDPTDSKPEDWDKPEHIPDPDAKKPEDWDEEMDGEWEPPVIQNPEYKGEWKPRQIDNPDYKGTWIHPEIDNPEYSPDPSIYAYDNFGVLGLDLWQVKSGTIFDNFLITNDEAYAEEFGNETWGVTKAAEKQMKDKQDEEQRLKEEEEDKKRKEEEEAEDKEDDEDKDEDEEDEEDKEEDEEEDVPGQAKDEL

SEQ ID NO: 2012 - protein, 247 aa, Homo Sapiens
MLLSVPLLLGLLGLAVAEPAVYFKEQFLDGDGWTSRWIESKHKSDFGKFVLSSGKFYGDEEKDKGPDICGPGTKKVHVIFNYKGKNVLINKDIRCKDDEFTHLYTLIVRPDNTYEVKIDNSQVESGSLEDDWDFLPPKKIKDPDASKPEDWDERAKIDDPTDSKPEDWDKPEHIPDPDAKKPEDWDEEMDGEWEPPVIQNPEYKGEWKPRQIDNPDYKGTWIHPEIDNPEYSPDPSIYAYDNFGVLG

SEQ ID NO: 2013 - protein, 163 aa, Homo Sapiens
  misc_feature (1)..(1): Xaa can be any naturally occurring amino acid
XEDWDERAKIDDPTDSKPEDWDKPEHIPDPDAKKPEDWDEEMDGEWEPPVIQNPEYKGEWKPRQIDNPDYKGTWIHPEIDNPEYSPDPSIYAYDNFGVLGLDLWQVKSGTIFDNFLITNDEAYAEEFGNETWGVTKAAEKQMKDKQDEEQRPERSCRRAGRAK

SEQ ID NO: 2014 - protein, 13 aa, Homo Sapiens
  misc_feature (1)..(1): Xaa can be any naturally occurring amino acid
XEEDVPGQAKDEL

SEQ ID NO: 2015 - protein, 384 aa, Homo Sapiens
MARALVQLWAICMLRVALATVYFQEEFLDGEHWRNRWLQSTNDSRFGHFRLSSGKFYGHKEKDKGLQTTQNGRFYAISARFKPFSNKGKTLVIQYTVKHEQKMDCGGGYIKVFPADIDQKNLNGKSQYYIMFGPDICGFDIKKVHVILHFKNKYHENKKLIRCKVDGFTHLYTLILRPDLSYDVKIDGQSIESGSIEYDWNLTSLKKETSPAESKDWEQTKDNKAQDWEKHFLDASTSKQSDWNGDLDGDWPAPMLQKPPYQDGLKPEGIHKDVWLHRKMKNTDYLTQYDLSEFENIGAIGLELWQVRSGTIFDNFLITDDEEYADNFGKATWGETKGPEREMDAIQAKEEMKKAREEEEEELLSGKINRHEHYFNQFHRRNEL

SEQ ID NO: 2016 - protein, 142 aa, Homo Sapiens
  misc_feature (1)..(1): Xaa can be any naturally occurring amino acid
XLVQLWAICMLRVALATVYFQEEFLDGEHWRNRWLQSTNDSRFGHFRLSSGKFYGHKEKDKGPDICGFDIKKVHVILHFKNKYHENKKLIRCKVDGFTHLYTLILRPDLSYDVKIDGQSIESGSIEYDWNLTSLKKETSPAE

SEQ ID NO: 2017 - protein, 315 aa, Homo Sapiens
MDLRQFLMCLSLCTAFALSKPTEKKDRVHHEPQLSDKVHNDAQSFDYDHDAFLGAEEAKTFDQLTPEESKERLGKIVSKIDGDKDGFVTVDELKDWIKFAQKRWIYEDVERQWKGHDLNEDGLVSWEEYKNATYGYVLDDPDPDDGFNYKQMMVRDERRFKMADKDGDLIATKEEFTAFLHPEEYDYMKDIVVQETMEDIDKNADGFIDLEEYIGDMYSHDGNTDEPEWVKTEREQFVEFRDKNRDGKMDKEETKDWILPSDYDHAEAEARHLVYESDQNKDGKLTKEEIVDKYDLFVGSQATDFGEALVRHDEF

SEQ ID NO: 2018 - protein, 224 aa, Homo Sapiens
MDLRQFLMCLSLCTAFALSKPTEKKDRVHHEPQLSDKVHNDAQSFDYDHDAFLGAEEAKTFDQLTPEESKERLGKIVSKIDGDKDGFVTVDELKDWIKFAQKRWIYEDVERQWKGHDLNEDGLVSWEEYKNATYGYVLDDPDPDDGFNYKQMMVRDERRFKMADKDGDLIATKEEFTAFLHPEEYDYMKDIVVQETMEDIDKNADGFIDLEEYIGWQAYQGGDR

SEQ ID NO: 2019 - protein, 315 aa, Homo Sapiens
MDLRQFLMCLSLCTAFALSKPTEKKDRVHHEPQLSDKVHNDAQSFDYDHDAFLGAEEAKTFDQLTPEESKERLGMIVDKIDADKDGFVTEGELKSWIKHAQKKYIYDNVENQWQEFDMNQDGLISWDEYRNVTYGTYLDDPDPDDGFNYKQMMVRDERRFKMADKDGDLIATKEEFTAFLHPEEYDYMKDIVVQETMEDIDKNADGFIDLEEYIGDMYSHDGNTDEPEWVKTEREQFVEFRDKNRDGKMDKEETKDWILPSDYDHAEAEARHLVYESDQNKDGKLTKEEIVDKYDLFVGSQATDFGEALVRHDEF

SEQ ID NO: 2020 - protein, 323 aa, Homo Sapiens
MKETDLIIMDLRQFLMCLSLCTAFALSKPTEKKDRVHHEPQLSDKVHNDAQSFDYDHDAFLGAEEAKTFDQLTPEESKERLGKIVSKIDGDKDGFVTVDELKDWIKFAQKRWIYEDVERQWKGHDLNEDGLVSWEEYKNATYGYVLDDPDPDDGFNYKQMMVRDERRFKMADKDGDLIATKEEFTAFLHPEEYDYMKDIVVQETMEDIDKNADGFIDLEEYIGDMYSHDGNTDEPEWVKTEREQFVEFRDKNRDGKMDKEETKDWILPSDYDHAEAEARHLVYESDQNKDGKLTKEEIVDKYDLFVGSQATDFGEALVRHDEF

SEQ ID NO: 2021 - protein, 323 aa, Homo Sapiens
MKETDLIIMDLRQFLMCLSLCTAFALSKPTEKKDRVHHEPQLSDKVHNDAQSFDYDHDAFLGAEEAKTFDQLTPEESKERLGMIVDKIDADKDGFVTEGELKSWIKHAQKKYIYDNVENQWQEFDMNQDGLISWDEYRNVTYGTYLDDPDPDDGFNYKQMMVRDERRFKMADKDGDLIATKEEFTAFLHPEEYDYMKDIVVQETMEDIDKNADGFIDLEEYIGDMYSHDGNTDEPEWVKTEREQFVEFRDKNRDGKMDKEETKDWILPSDYDHAEAEARHLVYESDQNKDGKLTKEEIVDKYDLFVGSQATDFGEALVRHDEF

SEQ ID NO: 2022 - protein, 147 aa, Homo Sapiens
  misc_feature (1)..(1): Xaa can be any naturally occurring amino acid
XIATKEEFTAFLHPEEYDYMKDIVVQETMEDIDKNADGFIDLEEYIGDMYSHDGNTDEPEWVKTEREQFVEFRDKNRDGKMDKEETKDWILPSDYDHAEAEARHLVYESDQNKDGKLTKEEIVDKYDLFVGSQATDFGEALVRHDEF

SEQ ID NO: 2023 - protein, 194 aa, Homo Sapiens
ILLVGYPPFWDEDQHRLYQQIKAGAYDFPSPEWDTVTPEAKDLINKMLTINPAKRITASEALKHPWICQRSTVASMMHRQETVDCLKKFNARRKLKGAILTTMLATRNFSAKSLLKKPDGVKSTESSNTTIEDEDVKARKQEIIKVTEQLIEAINNGDFEAYTKICDPGLTAFEPEALGNLVEGMDFHRFYFEN

SEQ ID NO: 2024 - protein, 512 aa, Homo Sapiens
MASTTTCTRFTDEYQLFEELGKGAFSVVRRCMKIPTGQEYAAKIINTKKLSARDHQKLEREARICRLLKHPNIVRLHDSISEEGFHYLVFDLVTGGELFEDIVAREYYSEADASHCIQQILEAVLHCHQMGVVHRDLKPENLLLASKSKGAAVKLADFGLAIEVQGDQQAWFGFAGTPGYLSPEVLRKDPYGKPVDMWACGVILYILLVGYPPFWDEDQHRLYQQIKAGAYDFPSPEWDTVTPEAKDLINKMLTINPAKRITASEALKHPWICQRSTVASMMHRQETVDCLKKFNARRKLKGAILTTMLATRNFSAAKSLLKKPDGVKINNKANVVTSPKENIPTPALEPQTTVIHNPDGNKESTESSNTTIEDEDVKARKQEIIKVTEQLIEAINNGDFEAYTKICDPGLTAFEPEALGNLVEGMDFHRFYFENALSKSNKPIHTIILNPHVHLVGDDAACIAYIRLTQYMDGSGMPKTMQSEETRVWHRRDGKWQNVHFHRSGSPTVPIK

SEQ ID NO: 2025 - protein, 533 aa, Homo Sapiens
MASTTTCTRFTDEYQLFEELGKGAFSVVRRCMKIPTGQEYAAKIINTKKLSARDHQKLEREARICRLLKHPNIVRLHDSISEEGFHYLVFDLVTGGELFEDIVAREYYSEADASHCIQQILEAVLHCHQMGVVHRDLKPENLLLASKSKGAAVKLADFGLAIEVQGDQQAWFGFAGTPGYLSPEVLRKDPYGKPVDMWACGVILYILLVGYPPFWDEDQHRLYQQIKAGAYDFPSPEWDTVTPEAKDLINKMLTINPAKRITASEALKHPWICQRSTVASMMHRQETVDCLKKFNARRKLKGAILTTMLATRNFSAAKSLLKKPDGVKINNKANVVTSPKENIPTPALEPQTTVIHNPDGNKESTESSNTTIEDEDVKARKQEIIKVTEQLIEAINNGDFEAYTKICDPGLTAFEPEALGNLVEGMDFHRFYFENALSKSNKPIHTIILNPHVHLVGDDAACIAYIRLTQYMDGSGMPKTMQSEETRVWHRRDGKWQNVHFHRSGSPTVPIKPPCIPNGKENFSGGTSLWQNI

SEQ ID NO: 2026 - protein, 478 aa, Homo Sapiens
MASTTTCTRFTDEYQLFEELGKGAFSVVRRCMKIPTGQEYAAKIINTKKLSARDHQKLEREARICRLLKHPNIVRLHDSISEEGFHYLVFDLVTGGELFEDIVAREYYSEADASHCIQQILESVNHCHLNGIVHRDLKPENLLLASKSKGAAVKLADFGLAIEVQGDQQAWFGFAGTPGYLSPEVLRKDPYGKPVDMWACGVILYILLVGYPPFWDEDQHRLYQQIKAGAYDFPSPEWDTVTPEAKDLINKMLTINPAKRITASEALKHPWICQRSTVASMMHRQETVDCLKKFNARRKLKGAILTTMLATRNFSAAKSLLKKPDGVKESTESSNTTIEDEDVKARKQEIIKVTEQLIEAINNGDFEAYTKICDPGLTAFEPEALGNLVEGMDFHRFYFENALSKSNKPIHTIILNPHVHLVGDDAACIAYIRLTQYMDGSGMPKTMQSEETRVWHRRDGKWQNVHFHRSGSPTVPIK

SEQ ID NO: 2027 - protein, 499 aa, Homo Sapiens
MASTTTCTRFTDEYQLFEELGKGAFSVVRRCMKIPTGQEYAAKIINTKKLSARDHQKLEREARICRLLKHPNIVRLHDSISEEGFHYLVFDLVTGGELFEDIVAREYYSEADASHCIQQILESVNHCHLNGIVHRDLKPENLLLASKSKGAAVKLADFGLAIEVQGDQQAWFGFAGTPGYLSPEVLRKDPYGKPVDMWACGVILYILLVGYPPFWDEDQHRLYQQIKAGAYDFPSPEWDTVTPEAKDLINKMLTINPAKRITASEALKHPWICQRSTVASMMHRQETVDCLKKFNARRKLKGAILTTMLATRNFSAAKSLLKKPDGVKESTESSNTTIEDEDVKARKQEIIKVTEQLIEAINNGDFEAYTKICDPGLTAFEPEALGNLVEGMDFHRFYFENALSKSNKPIHTIILNPHVHLVGDDAACIAYIRLTQYMDGSGMPKTMQSEETRVWHRRDGKWQNVHFHRSGSPTVPIKPPCIPNGKENFSGGTSLWQNI

SEQ ID NO: 2028 - protein, 492 aa, Homo Sapiens
MASTTTCTRFTDEYQLFEELGKGAFSVVRRCMKIPTGQEYAAKIINTKKLSARDHQKLEREARICRLLKHPNIVRLHDSISEEGFHYLVFDLVTGGELFEDIVAREYYSEADASHCIQQILESVNHCHLNGIVHRDLKPENLLLASKSKGAAVKLADFGLAIEVQGDQQAWFGFAGTPGYLSPEVLRKDPYGKPVDMWACGVILYILLVGYPPFWDEDQHRLYQQIKAGAYDFPSPEWDTVTPEAKDLINKMLTINPAKRITASEALKHPWICQRSTVASMMHRQETVDCLKKFNARRKLKGAILTTMLATRNFSAAKSLLKKPDGVKEPQTTVIHNPDGNKESTESSNTTIEDEDVKARKQEIIKVTEQLIEAINNGDFEAYTKICDPGLTAFEPEALGNLVEGMDFHRFYFENALSKSNKPIHTIILNPHVHLVGDDAACIAYIRLTQYMDGSGMPKTMQSEETRVWHRRDGKWQNVHFHRSGSPTVPIK

SEQ ID NO: 2029 - protein, 478 aa, Homo Sapiens
MASTTTCTRFTDEYQLFEELGKGAFSVVRRCMKIPTGQEYAAKIINTKKLSARDHQKLEREARICRLLKHPNIVRLHDSISEEGFHYLVFDLVTGGELFEDIVAREYYSEADASHCIQQILESVNHCHLNGIVHRDLKPENLLLASKSKGAAVKLADFGLAIEVQGDQQAWFGFAGTPGYLSPEVLRKDPYGKPVDMWACGVILYILLVGYPPFWDEDQHRLYQQIKAGAYDFPSPEWDTVTPEAKDLINKMLTINPAKRITASEALKHPWICQRSTVASMMHRQETVDCLKKFNARRKLKGAILTTMLATRNFSAAKSLLKKPDGVKESTESSNTTIEDEDVKARKQEIIKVTEQLIEAINNGDFEAYTKICDPGLTAFEPEALGNLVEGMDFHRFYFENALSKSNKPIHTIILNPHVHLVGDDAACIAYIRLTQYMDGSGMPKTMQSEETRVWHRRDGKWQNVHFHRSGSPTVPIN

SEQ ID NO: 2030 - protein, 478 aa, Homo Sapiens; identical to SEQ ID NO: 2026

SEQ ID NO: 2031 - protein, 510 aa, Homo Sapiens
MASTTTCTRFTDEYQLFEELGKGAFSVVRRCMKIPTGQEYAAKIINTKKLSARDHQKLEREARICRLLKHPNIVRLHDSISEEGFHYLVFDLVTGGELFEDIVAREYYSEADASHCIQQILESVNHCHLNGIVHRDLKPENLLLASKSKGAAVKLADFGLAIEVQGDQQAWFGFAGTPGYLSPEVLRKDPYGKPVDMWACGVILYILLVGYPPFWDEDQHRLYQQIKAGAYDFPSPEWDTVTPEAKDLINKMLTINPAKRITASEALKHPWICQRSTVASMMHRQETVDCLKKFNARRKLKGAILTTMLATRNFSAAKSLLKKPDGVKKRKSSSSVQMMESTESSNTTIEDEDVKARKQEIIKVTEQLIEAINNGDFEAYTKICDPGLTAFEPEALGNLVEGMDFHRFYFENALSKSNKPIHTIILNPHVHLVGDDAACIAYIRLTQYMDGSGMPKTMQSEETRVWHRRDGKWQNVHFHRSGSPTVPIKPPCIPNGKENFSGGTSLWQNI

SEQ ID NO: 2032 - protein, 489 aa, Homo Sapiens
MASTTTCTRFTDEYQLFEELGKGAFSVVRRCMKIPTGQEYAAKIINTKKLSARDHQKLEREARICRLLKHPNIVRLHDSISEEGFHYLVFDLVTGGELFEDIVAREYYSEADASHCIQQILESVNHCHLNGIVHRDLKPENLLLASKSKGAAVKLADFGLAIEVQGDQQAWFGFAGTPGYLSPEVLRKDPYGKPVDMWACGVILYILLVGYPPFWDEDQHRLYQQIKAGAYDFPSPEWDTVTPEAKDLINKMLTINPAKRITASEALKHPWICQRSTVASMMHRQETVDCLKKFNARRKLKGAILTTMLATRNFSAAKSLLKKPDGVKKRKSSSSVQMMESTESSNTTIEDEDVKARKQEIIKVTEQLIEAINNGDFEAYTKICDPGLTAFEPEALGNLVEGMDFHRFYFENALSKSNKPIHTIILNPHVHLVGDDAACIAYIRLTQYMDGSGMPKTMQSEETRVWHRRDGKWQNVHFHRSGSPTVPIK

SEQ ID NO: 2033 - protein, 498 aa, Homo Sapiens
MASTTTCTRFTDEYQLFEELGKGAFSVVRRCMKIPTGQEYAAKIINTKKLSARDHQKLEREARICRLLKHPNIVRLHDSISEEGFHYLVFDLVTGGELFEDIVAREYYSEADASHCIQQILESVNHCHLNGIVHRDLKPENLLLASKSKGAAVKLADFGLAIEVQGDQQAWFGFAGTPGYLSPEVLRKDPYGKPVDMWACGVILYILLVGYPPFWDEDQHRLYQQIKAGAYDFPSPEWDTVTPEAKDLINKMLTINPAKRITASEALKHPWICQRSTVASMMHRQETVDCLKKFNARRKLKGAILTTMLATRNFSAKSLLKKPDGVKESTESSNTTIEDEDVKARKQEIIKVTEQLIEAINNGDFEAYTKICDPGLTAFEPEALGNLVEGMDFHRFYFENALSKSNKPIHTIILNPHVHLVGDDAACIAYIRLTQYMDGSGMPKTMQSEETRVWHRRDGKWQNVHFHRSGSPTVPIKPPCIPNGKENFSGGTSLWQNI

SEQ ID NO: 2034 - protein, 182 aa, Homo Sapiens
  misc_feature (1)..(1): Xaa can be any naturally occurring amino acid
XRKLKGAILTTMLATRNFSAAKSLLKKPDGVKESTESSNTTIEDEDVKARKQEIIKVTEQLIEAINNGDFEAYTKICDPGLTAFEPEALGNLVEGMDFHRFYFENALSKSNKPIHTIILNPHVHLVGDDAACIAYIRLTQYMDGSGMPKTMQSEETRVWHRRDGKWQNVHFHRSGSPTVPIK

SEQ ID NO: 2035 - protein, 173 aa, Homo Sapiens
MGTMKTQRDGHSLGRWSLVLLLLGLVMPLAIIAQVLSYKEAVLRAIDGINQRSSDANLYRLLDLDPRPTMDGDPDTPKPVSFTVKETVCPRTTQQSPEDCDFKKDGLVKRCMGTVTLNQARGSFDISCDKDNKRFALLGDFFRKSKEKIGKEFKRIVQRIKDFLRNLVPRTES

SEQ ID NO: 2036 - protein, 32 aa, Homo Sapiens
MEGKWLLCMLLVLGTAIVEAHDGHDDDVIDIE

SEQ ID NO: 2037 - protein, 61 aa, Homo Sapiens
MEGKWLLCMLLVLGTAIVEAHDGHDDDVIDIEDDLDDVIEEVEDSKPDTTAPPSSPKESGR

SEQ ID NO: 2038 - protein, 79 aa, Homo Sapiens
MEGKWLLCMLLVLGTAIVEAHDGHDDDVIDIEDDLDDVIEEVEDSKPDTTAPPSSPKVTYKAPVPTGEVYFADSFDRGT

SEQ ID NO: 2039 - protein, 96 aa, Homo Sapiens
MEGKWLLCMLLVLGTAIVEAHDGHDDDVIDIEDDLDDVIEEVEDSKPDTTAPPSSPKVTYKAPVPTGEVYFADSFDRGTLSGKVGGRGNEGVKASR

SEQ ID NO: 2040 - protein, 107 aa, Homo Sapiens
MEGKWLLCMLLVLGTAIVEAHDGHDDDVIDIEDDLDDVIEEVEDSKPDTTAPPSSPKVTYKAPVPTGEVYFADSFDRGTLSGWILSKAKKDDTDDEIAKYDGKWEVE

SEQ ID NO: 2041 - protein, 134 aa, Homo Sapiens
MEGKWLLCMLLVLGTAIVEAHDGHDDDVIDIEDDLDDVIEEVEDSKPDTTAPPSSPKVTYKAPVPTGEVYFADSFDRGTLSGWILSKAKKDDTDDEIAKYDGKWEVEEMKESKLPGDKGLVLMSRAKHHAISAK

SEQ ID NO: 2042 - protein, 144 aa, Homo Sapiens
MEGKWLLCMLLVLGTAIVEAHDGHDDDVIDIEDDLDDVIEEVEDSKPDTTAPPSSPKVTYKAPVPTGEVYFADSFDRGTLSGWILSKAKKDDTDDEIAKYDGKWEVEEMKESKLPGDKGLVLMSRAKHHAISAKLNKPFLFDTK

SEQ ID NO: 2043 - protein, 168 aa, Homo Sapiens
MEGKWLLCMLLVLGTAIVEAHDGHDDDVIDIEDDLDDVIEEVEDSKPDTTAPPSSPKVTYKAPVPTGEVYFADSFDRGTLSGWILSKAKKDDTDDEIAKYDGKWEVEEMKESKLPGDKGLVLMSRAKHHAISAKLNKPFLFDTKPLIVQYEVNFQNGIECGGAYVKLL

SEQ ID NO: 2044 - protein, 592 aa, Homo Sapiens
MEGKWLLCMLLVLGTAIVEAHDGHDDDVIDIEDDLDDVIEEVEDSKPDTTAPPSSPKVTYKAPVPTGEVYFADSFDRGTLSGWILSKAKKDDTDDEIAKYDGKWEVEEMKESKLPGDKGLVLMSRAKHHAISAKLNKPFLFDTKPLIVQYEVNFQNGIECGGAYVKLLSKTPELNLDQFHDKTPYTIMFGPDKCGEDYKLHFIFRHKNPKTGIYEEKHAKRPDADLKTYFTDKKTHLYTLILNPDNSFEILVDQSVVNSGNLLNDMTPPVNPSREIEDPEDRKPEDWDERPKIPDPEAVKPDDWDEDAPAKIPDEEATKPEGWLDDEPEYVPDPDAEKPEDWDEDMDGEWEAPQIANPRCESAPGCGVWQRPVIDNPNYKGKWKPPMIDNPSYQGIWKPRKIPNPDFFEDLEPFRMTPFSAIGLELWSMTSDIFFDNFIICADRRIVDDWANDGWGLKKAADGAAEPGVVGQMIEAAEERPWLWVVYILTVALPVFLVILFCCSGKKQTSGMEYKKTDAPQPDVKEEEEEKEEEKDKGDEEEEGEEKLEEKQKSDAEEDGGTVSQEEEDRKPKAEEDEILNRSPRNRKPRRE

SEQ ID NO: 2045 - protein, 592 aa, Homo Sapiens; identical to SEQ ID NO: 2044

SEQ ID NO: 2046 - protein, 592 aa, Homo Sapiens; identical to SEQ ID NO: 2044

SEQ ID NO: 2047 - protein, 308 aa, Homo Sapiens
MEGKWLLCMLLVLGTAIVEAHDGHDDDVIDIEDDLDDVIEEVEEMKESKLPGDKGLVLMSRAKHHAISAKLNKPFLFDTKPLIVQYEVNFQNGIECGGAYVKLLSKTPELNLDQFHDKTPYTIMFGPDKCGEDYKLHFIFRHKNPKTGIYEEKHAKRPDADLKTYFTDKKTHLYTLILNPDNSFEILVDQSVVNSGNLLNDMTPPVNPSREIEDPEDRKPEDWDERPKIPDPEAVKPDDWDEDAPAKIPDEEATKPEGWLDDEPEYVPDPDAEKPEDWDEDMDGEWEAPQIANPRCESAPGCGVWQRP

SEQ ID NO: 2048 - protein, 131 aa, Homo Sapiens
MKESKLPGDKGLVLMSRAKHHAISAKLNKPFLFDTKPLIVQYEVNFQNGIECGGAYVKLLSKTPELNLDQFHDKTPYTIMFGPDKCGEDYKLHFIFRHKNPKTGIYEEKHAKRPDADLKTYFTDKKTHLYT

SEQ ID NO: 2049 - protein, 190 aa, Homo Sapiens
  misc_feature (1)..(1): Xaa can be any naturally occurring amino acid
XGLVLMSRAKHHAISAKLNKPFLFDTKPLIVQYEVNFQNGIECGGAYVKLLSKTPELNLDQFHDKTPYTIMFGPDKCGEDYKLHFIFRHKNPKTGIYEEKHAKRPDADLKTYFTDKKTHLYTLKSRGTNHLCFVHKEMGVSFPKTPGARHCSYPKASVLNPDNSFEILVDQSVVNSGNLLNDMTPPVNPS

SEQ ID NO: 2050 - protein, 170 aa, Homo Sapiens
  misc_feature (1)..(1): Xaa can be any naturally occurring amino acid
XLYCGAGQGVRAGRGTGTPAVPGRLEVTYKAPVPTGEVYFADSFDRGTLSGWILSKAKKDDTDDEIAKYDGKWEVEEMKESKLPGDKGLVLMSRAKHHAISAKLNKPFLFDTKPLIVQYEVNFQNGIECGGAYVKLLSKTPELNLDQFHDKTPYTIMFGPDKCGEDYKLH

SEQ ID NO: 2051 - protein, 111 aa, Homo Sapiens
AEQQALRLEVRAGPDSAGIALYSHEDVCVFKCSVSRETECSRVGKQSFIITLGCNSVLIQFATPNDFCSFYNILKTCRGHTLERSVFSERTEESSAVQYFQMRKLRLREVK

SEQ ID NO: 2052 - protein, 92 aa, Homo Sapiens
ALYSHEDVCVFKCSVSRETECSRVGKQSFIITLGCNSVLIQFATPNDFCSFYNILKTCRGHTLERSVFSERTEESSAVQYFQMRKLRLREVK

SEQ ID NO: 2053 - protein, 176 aa, Homo Sapiens
LAFWFDVAFIGSIQSYDISIVAQVDQTGSKSSNLLDLKNPFFRYTGTTPSPPPGSHYTSPSENMWNTGSTYNLSSGMAVAGMPTAYDLSSVIASGSSVGHNNLIPLANTGIVNHTHSRMGSIMSTGIVQGSSGAQGSGGGSTSAHYAVNSQFTMGGPAISMASPMSIPTNTMHYGS

SEQ ID NO: 2054 - protein, 608 aa, Homo Sapiens
MAAAAAAVGPGAGGAGSAVPGGAGPCATVSVFPGARLLTIGDANGEIQRHAEQQALRLEVRAGPDSAGIALYSHEDVCVFKCSVSRETECSRVGKQSFIITLGCNSVLIQFATPNDFCSFYNILKTCRGHTLERSVFSERTEESSAVQYFQFYGYLSQQQNMMQDYVRTGTYQRAILQNHTDFKDKIVLDVGCGSGILSFFAAQAGARKIYAVEASTMAQHAEVLVKSNNLTDRIVVIPGKVEEVSLPEQVDIIISEPMGYMLFNERMLESYLHAKKYLKPSGNMFPTIGDVHLAPFTDEQLYMEQFTKANFWYQPSFHGVDLSALRGAAVDEYFRQPVVDTFDIRILMAKSVKYTVNFLEAKEGDLHRIEIPFKFHMLHSGLVHGLAFWFDVAFIGSIMTVWLSTAPTEPLTHWYQVRCLFQSPLFAKAGDTLSGTCLLIANKRQSYDISIVAQVDQTGSKSSNLLDLKNPFFRYTGTTPSPPPGSHYTSPSENMWNTGSTYNLSSGMAVAGMPTAYDLSSVIASGSSVGHNNLIPLANTGIVNHTHSRMGSIMSTGIVQGSSGAQGSGGGSTSAHYAVNSQFTMGGPAISMASPMSIPTNTMHYGS

SEQ ID NO: 2055 - protein, 585 aa, Homo Sapiens
MAAAAAAVGPGAGGAGSAVPGGAGPCATVSVFPGARLLTIGDANGEIQRHAEQQALRLEVRAGPDSAGIALYSHEDVCVFKCSVSRETECSRVGKQSFIITLGCNSVLIQFATPNDFCSFYNILKTCRGHTLERSVFSERTEESSAVQYFQFYGYLSQQQNMMQDYVRTGTYQRAILQNHTDFKDKIVLDVGCGSGILSFFAAQAGARKIYAVEASTMAQHAEVLVKSNNLTDRIVVIPGKVEEVSLPEQVDIIISEPMGYMLFNERMLESYLHAKKYLKPSGNMFPTIGDVHLAPFTDEQLYMEQFTKANFWYQPSFHGVDLSALRGAAVDEYFRQPVVDTFDIRILMAKSVKYTVNFLEAKEGDLHRIEIPFKFHMLHSGLVHGLAFWFDVAFIGSIMTVWLSTAPTEPLTHWYQVRCLFQSPLFAKAGDTLSGTCLLIANKRQSYDISIVAQVDQTGSKSSNLLDLKNPFFRYTGTTPSPPPGSHYTSPSENMWNTGSTYNLSSGMAVAGMPTAYDLSSVIASGSSVGHNNLIPLGSSGAQGSGGGSTSAHYAVNSQFTMGGPAISMASPMSIPTNTMHYGS

SEQ ID NO: 2056 - protein, 161 aa, Homo Sapiens
MAAAAAAVGPGAGGAGSAVPGGAGPCATVSVFPGARLLTIGDANGEIQRHAEQQALRLEVRAGPDSAGIALYSHEDVCVFKCSVSRETECSRVGKQSFIITLGCNSVLIQFATPNDFCSFYNILKTCRGHTLERSVFSERTEESSAVQYFQMRKLRLREVK

SEQ ID NO: 2057 - protein, 120 aa, Homo Sapiens
MAAAAAAVGPGAGGAGSAVPGGAGPCATVSVFPGARLLTIGDANGEIQRHAEQQALRLEVRAGPDSAGIALYSHFCSFYNILKTCRGHTLERSVFSERTEESSAVQYFQFYGYLSQQQNM

SEQ ID NO: 2058 - protein, 343 aa, Homo Sapiens
  misc_feature (1)..(1): Xaa can be any naturally occurring amino acid
XANGEIQRHAEQQALRLEVRAGPDSAGIALYSHEDVCVFKCSVSRETECSRVGKQSFIITLGCNSVLIQFATPNDFCSFYNILKTCRGHTLERSVFSERTEESSAVQYFQFYGYLSQQQNMMQDYVRTGTYQRAILQNHTDFKDKIVLDVGCGSGILSFFAAQAGARKIYAVEASTMAQHAEVLVKSNNLTDRIVVIPGKVEEVSLPEQVDIIISEPMGYMLFNERMLESYLHAKKYLKPSGNMFPTIGDVHLAPFTDEQLYMEQFTKANFWYQPSFHGVDLSALRGAAVDEYFRQPVVDTFDIRILMAKSVKYTVNFLEAKEGDLHSACLASPAATALCLPG

SEQ ID NO: 2059 - protein, 827 aa, Homo Sapiens
MLLCLSPAWLMKVPAPGQPGEAALLVSKAVSFHPGGLTFLDDFVPPRRATYFLAGLGLGPGRGREAAELARDLTCPTGASAELARLLEDRLLTRQLLAQQGGVAVPATLAFTYKPPGLLRGGDASLGLRLVELSGKEGQETLVKEEVEAFLRSEALGDILQVAVKLSGWRWRGRQAWRLHPRAELGAVVDTVLALLEKLEEEESVLVEAVYPPAQLPCSDGPSPGPGLAVRICAVVCRTQGDRPLLSKVVCGVGRGDRPLRHHNSLPRTLEVALAQCGLGEEAQVAAVRQRVKAAAEAALAAVLALEAGLSAEQRGGRRAHTDFLGVDFALTAAGGVLTPVALELNGGLCLEACGALEGLWAAPRLGPAADEAVAAPLVETMLRRSARCLMEGKQLLVVGAGGVSKKFVWEAARDYGLQLHLVESDPNHFASQLVQTFIHFDMTEHRRDEENARLLAELVRARGLKLDGCFSYWDDCLVLTALLCQELGLPCSSPAAMRLAKQKSLTQLHLLHHHGPPWPAPSLHAVPCCPLESEADVERAVHQVPLPGVMKLEFGAGAVGVRLVEDAPQCHEHFSRITRDLQGEADHPGIGLGWGNAMLLMEFVEGTEHDVDLVLFGGRLLAAFVSDNGPTRLPGFTETAACMPTGLAPEQEAQMVQAAFRCCLGCGLLDGVFNVELKLTGAGPRLIEINPRMGGFYLRDWILELYGVDLLLAAVMVACGLRPALPTRPRARGHLVGVMCLVSQHLQALSSTASRETLQALHDRGLLRLNLLEEALVPGEYEEPYCSVACAGPSPTEARLRLLGLCQGLGIDGPSYPVAHFLSHFK

SEQ ID NO: 2060 - protein, 950 aa, Homo Sapiens
MLSLDPSGPEWDCPLGSKDLEEEGPWGGGSGLPPTGCFPGSWRQDVGLDCKGSPEGAEARAWTVYYYSLLQSCLQQAGLPETQDRGQVPRTGCPGAEVTLCVLGSPSTFLPVLLEGGVQSPGNMLLCLSPAWLMKVPAPGQPGEAALLVSKAVSFHPGGLTFLDDFVPPRRATYFLAGLGLGPGRGREAAELARDLTCPTGASAELARLLEDRLLTRQLLAQQGGVAVPATLAFTYKPPGLLRGGDASLGLRLVELSGKEGQETLVKEEVEAFLRSEALGDILQVAVKLSGWRWRGRQAWRLHPRAELGAVVDTVLALLEKLEEEESVLVEAVYPPAQLPCSDGPSPGPGLAVRICAVVCRTQGDRPLLSKVVCGVGRGDRPLRHHNSLPRTLEVALAQCGLGEEAQVAAVRQRVKAAAEAALAAVLALEAGLSAEQRGGRRAHTDFLGVDFALTAAGGVLTPVALELNGGLCLEACGALEGLWAAPRLGPAADEAVAAPLVETMLRRSARCLMEGKQLLVVGAGGVSKKFVWEAARDYGLQLHLVESDPNHFASQLVQTFIHFDMTEHRRDEENARLLAELVRARGLKLDGCFSYWDDCLVLTALLCQELGLPCSSPAAMRLAKQKSLTQLHLLHHHGPPWPAPSLHAVPCCPLESEADVERAVHQVPLPGVMKLEFGAGAVGVRLVEDAPQCHEHFSRITRDLQGEADHPGIGLGWGNAMLLMEFVEGTEHDVDLVLFGGRLLAAFVSDNGPTRLPGFTETAACMPTGLAPEQEAQMVQAAFRCCLGCGLLDGVFNVELKLTGAGPRLIEINPRMGGFYLRDWILELYGVDLLLAAVMVACGLRPALPTRPRARGHLVGVMCLVSQHLQALSSTASRETLQALHDRGLLRLNLLEEALVPGEYEEPYCSVACAGPSPTEARLRLLGLCQGLGIDGPSYPVAHFLSHFK

SEQ ID NO: 2061 - protein, 924 aa, Homo Sapiens
MLSLDPSGPEWDCPLGSKDLEEEGPWGGGSGLPPTGCFPGSWRQDVGLDCKGSPEGAEARAWTVYYYSLLQSCLQQAGLPETQDRGQVPRTGCPGAEVTLCVLGSPSTFLPVLLEGGVQSPGNMLLCLSPAWLMKVPAPGQPGEAALLVSKAVSFHPGGLTFLDDFVPPRRATYFLAGLGLGPGRGREAAELARDLTCPTGASAELARLLEDRLLTRQLLAQQGGVAVPATLAFTYKPPGLLRGGDASLGLRLVELSGKEGQETLVKEEVEAFLRSEALGDILQVAVKLSGWRWRGRQAWRLHPRAELGAVVDTVLALLEKLEEEESVLVEAVYPPAQLPCSDGPSPGPGLAVRICAVVCRTQGDRPLLSKVVCGVGRGDRPLRHHNSLPRTLEAALAAVLALEAGLSAEQRGGRRAHTDFLGVDFALTAAGGVLTPVALELNGGLCLEACGALEGLWAAPRLGPAADEAVAAPLVETMLRRSARCLMEGKQLLVVGAGGVSKKFVWEAARDYGLQLHLVESDPNHFASQLVQTFIHFDMTEHRRDEENARLLAELVRARGLKLDGCFSYWDDCLVLTALLCQELGLPCSSPAAMRLAKQKSLTQLHLLHHHGPPWPAPSLHAVPCCPLESEADVERAVHQVPLPGVMKLEFGAGAVGVRLVEDAPQCHEHFSRITRDLQGEADHPGIGLGWGNAMLLMEFVEGTEHDVDLVLFGGRLLAAFVSDNGPTRLPGFTETAACMPTGLAPEQEAQMVQAAFRCCLGCGLLDGVFNVELKLTGAGPRLIEINPRMGGFYLRDWILELYGVDLLLAAVMVACGLRPALPTRPRARGHLVGVMCLVSQHLQALSSTASRETLQALHDRGLLRLNLLEEALVPGEYEEPYCSVACAGPSPTEARLRLLGLCQGLGIDGPSYPVAHFLSHFK

SEQ ID NO: 2062 - protein, 116 aa, Homo Sapiens
MESSRVRLLPLLGAALLLMLPLLGTRAQEDAELQPRALDIYSAVDDASHEKELIEALQEVLKKLKSKRVPIYEKKYGQVPMCDAGEQCAVRKGARIGKLCDCPRGTSCNSFLLKCL

SEQ ID NO: 2063 - protein, 117 aa, Homo Sapiens
MDGIHIVAFAEEADPDGFEFLETLKAVAQDNTENPDLSIIWIDPDDFPLLVPYWEKTFDIDLSAPQIGVVNVTDADSVWMEMDDEEDLPSAEELEDWLEDVLEGEINTEDDDDDDDD

SEQ ID NO: 2064 - protein, 396 aa, Homo Sapiens
MSATDRMGPRAVPGLRLALLLLLVLGTPKSGVQGQEGLDFPEYDGVDRVINVNAKNYKNVFKKYEVLALLYHEPPEDDKASQRQFEMEELILELAAQVLEDKGVGFGLVDSEKDAAVAKKLGLTEVDSMYVFKGDEVIEYDGEFSADTIVEFLLDVLEDPVELIEGERELQAFENIEDEIKLIGYFKSKDSEHYKAFEDAAEEFHPYIPFFATFDSKVAKKLTLKLNEIDFYEAFMEEPVTIPDKPNSEEEIVNFVEEHRRSTLRKLKPESMYETWEDDMDGIHIVAFAEEADPDGFEFLETLKAVAQDNTENPDLSIIWIDPDDFPLLVPYWEKTFDIDLSAPQIGVVNVTDADSVWMEMDDEEDLPSAEELEDWLEDVLEGEINTEDDDDDDDD

SEQ ID NO: 2065 - protein, 399 aa, Homo Sapiens
MKRTHLFIVGIYFLSSCRAEEGLNFPTYDGKDRVVSLSEKNFKQVLKKYDLLCLYYHEPVSSDKVTQKQFQLKEIVLELVAQVLEHKAIGFVMVDAKKEAKLAKKLGFDEEGSLYILKGDRTIEFDGEFAADVLVEFLLDLIEDPVEIISSKLEVQAFERIEDYIKLIGFFKSEDSEYYKAFEEAAEHFQPYIKFFATFDKGVAKKLSLKMNEVDFYEPFMDEPIAIPNKPYTEEELVEFVKEHQRPTLRRLRPEEMFETWEDDLNGIHIVAFAEKSDPDGYEFLEILKQVARDNTDNPDLSILWIDPDDFPLLVAYWEKTFKIDLFRPQIGVVNVTDADSVWMEIPDDDDLPTAEELEDWIEDVLSGKINTEDDDEDDDDDDNSDEEDNDDSDDDDDE

SEQ ID NO: 2066 - protein, 1119 aa, Homo Sapiens
MCGPAMFPAGPPWPRVRVVQVLWALLAVLLASWRLWAIKDFQECTWQVVLNEFKRVGESGVSDSFFEQEPVDTVSSLFHMLVDSPIDPSEKYLGFPYYLKINYSCEEKPSEDLVRMGHLTGLKPLVLVTFQSPVNFYRWKIEQLQIQMEAAPFRSKEPCMAEEVCSMSWYTPMPIKKGSVVMRVDISSNGLGTFIPDKRFQMNINGFLKRDRDNNIQFTVGEELFNLMPQYFVGVSSRPLWHTVDQSPVLILGGIPNEKYVLMTDTSFKDFSLVELSIDSCWVGSFYCPHSGFTATIYDTIATESTLFIRQNQLVYYFTGTYTTLYERNRGSGSWIRVLASECIKKLCPVYFHSNGSEYIMALTTGKHEGYVHFGTIRDGQVSFEMLPRQWSVCEQIGASDDLELLYHIPEFIPEARGLEFLMILGTESYTSTAMAPKGIFCNPYNNLIFIWGNFLLQSSNKENFIYLADFPKELSIKYMARSFRGAVAIVTETEEIWYLLEGSYRVYQLFPSKGWQVHISLKLMQQSSLYASNETMLTLFYEDSKLYQLVYLMNNQKGQLVKRLVPVEQLLMYQQHTSHYDLERKGGYLMLSFIDFCPFSVMRLRSLPSPQRYTRQERYRARPPRVLERSGFHNENSLAIYQGLVYYLLWLHSVYDKPYADPVHDPTWRWWANNKQDQDYYFFLASNWRSAGGVSIEMDSYEKIYNLESAYELPERIFLDKGTEYSFAIFLSAQGHSFRTQSELGTAFQLHSQVDVGVVLADPGCIEASVKQEVLINRNSVLFSITLKDKKLCYDQGISGHHLMETSMTVNVVGSSGLCFQETHLGPHMQGNLMVPVFIGCPPGKRLAFDITYTLEYSRLKNKHYFDCVNVNPEMPCFLFRDIFYPFFLIQDLVTGDSGSFQGSYVLLVVGGGPTLDSLKDYSEDEIYRFNSPLDKTNSLIWTTRTTRTTKDSAFHIMSHESPGIEWLCLENAPCYDNVPQGIFAPEFFFKVLVSNRGVDTSTYCNYQLTFLLHIHGLPLSPKRALFIIMVSASVFVGLVIFYIAFCLLWPLVVKGCTMIRWKINNLIASESYYTYASISGISSMPSLRHSRMGSMFSSRMTEDRAEPKEAVERQLMT

SEQ ID NO: 2067 - protein, 661 aa, Homo Sapiens
MCGPAMFPAGPPWPRVRVVQVLWALLAVLLASWRLWAIKDFQECTWQVVLNEFKRVGESGVSDSFFEQEPVDTVSSLFHMLVDSPIDPSEKYLGFPYYLKINYSCEEKPSEDLVRMGHLTGLKPLVLVTFQSPVNFYRWKIEQLQIQMEAAPFRSKEPCMAEEVCSMSWYTPMPIKKGSVVMRVDISSNGLGTFIPDKRFQMNINGFLKRDRDNNIQFTVGEELFNLMPQYFVGVSSRPLWHTVDQSPVLILGGIPNEKYVLMTDTSFKDFSLVELSIDSCWVGSFYCPHSGFTATIYDTIATESTLFIRQNQLVYYFTGTYTTLYERNRGSGSWIRVLASECIKKLCPVYFHSNGSEYIMALTTGKHEGYVHFGTIRDGQVSFEMLPRQWSVCEQIGVTTCSIIWSEYIAGEYTLLLLVESGYGNASKRFQVVSYNTASDDLELLYHIPEFIPEARGLEFLMILGTESYTSTAMAPKGIFCNPYNNLIFIWGNFLLQSSNKENFIYLADFPKELSIKYMARSFRGAVAIVTETEEIWYLLEGSYRVYQLFPSKGWQVHISLKLMQQSSLYASNETMLTLFYEDSKLYQLVYLMNNQKGQLVKRLVPVEQLLMYQQHTSHYDLERKGGYLMLSFIDFCPFSVMRLRSLPSPQRYTRQERYR

SEQ ID NO: 2068 - protein, 1159 aa, Homo Sapiens
MCGPAMFPAGPPWPRVRVVQVLWALLAVLLASWRLWAIKDFQECTWQVVLNEFKRVGESGVSDSFFEQEPVDTVSSLFHMLVDSPIDPSEKYLGFPYYLKINYSCEEKPSEDLVRMGHLTGLKPLVLVTFQSPVNFYRWKIEQLQIQMEAAPFRSKEPCMAEEVCSMSWYTPMPIKKGSVVMRVDISSNGLGTFIPDKRFQMNINGFLKRDRDNNIQFTVGEELFNLMPQYFVGVSSRPLWHTVDQSPVLILGGIPNEKYVLMTDTSFKDFSLVELSIDSCWVGSFYCPHSGFTATIYDTIATESTLFIRQNQLVYYFTGTYTTLYERNRGSGSWIRVLASECIKKLCPVYFHSNGSEYIMALTTGKHEGYVHFGTIRDGQVSFEMLPRQWSVCEQIGVTTCSIIWSEYIAGEYTLLLLVESGYGNASKRFQVVSYNTASDDLELLYHIPEFIPEARGLEFLMILGTESYTSTAMAPKGIFCNPYNNLIFIWGNFLLQSSNKENFIYLADFPKELSIKYMARSFRGAVAIVTETEEIWYLLEGSYRVYQLFPSKGWQVHISLKLMQQSSLYASNETMLTLFYEDSKLYQLVYLMNNQKGQLVKRLVPVEQLLMYQQHTSHYDLERKGGYLMLSFIDFCPFSVMRLRSLPSPQRYTRQERYRARPPRVLERSGFHNENSLAIYQGLVYYLLWLHSVYDKPYADPVHDPTWRWWANNKQDQDYYFFLASNWRSAGGVSIEMDSYEKIYNLESAYELPERIFLDKGTEYSFAIFLSAQGHSFRTQSELGTAFQLHSQVDVGVVLADPGCIEASVKQEVLINRNSVLFSITLKDKKLCYDQGISGHHLMETSMTVNVVGSSGLCFQETHLGPHMQGNLMVPVFIGCPPGKRLAFDITYTLEYSRLKNKHYFDCVNVNPEMPCFLFRDIFYPFFLIQDLVTGDSGSFQGSYVLLVVGGGPTLDSLKDYSEDEIYRFNSPLDKTNSLIWTTRTTRTTKDSAFHIMSHESPGIEWLCLENAPCYDNVPQGIFAPEFFFKVLVSNRGVDTSTYCNYQLTFLLHIHGLPLSPKRALFIIMVSASVFVGLVIFYIAFCLLWPLVVKGCTMIRWKINNLIASESYYTYASISGISSMPSLRHSRMGSMFSSRMTEDRAEPKEAVERQLMT

SEQ ID NO: 2069 - protein, 292 aa, Homo Sapiens
MCGPAMFPAGPPWPRVRVVQVLWALLAVLLASWRLWAIKDFQECTWQVVLNEFKRVGESGVSDSFFEQEPVDTVSSLFHMLVDSPIDPSEKYLGFPYYLKINYSCEEKSPVNFYRWKIEQLQIQMEAAPFRSKEPCMAEEVCSMSWYTPMPIKKGSVVMRVDISSNGLGTFIPDKRFQMNINGFLKRDRDNNIQFTVGEELFNLMPQYFVGVSSRPLWHTVDQSPVLILGGIPNEKYVLMTDTSFKDFSLVEAPIPHSMRETAAVAVGFVSWPASASRSCALCISIAMALST

SEQ ID NO: 2070 - protein, 136 aa, Homo Sapiens
MCGPAMFPAGPPWPRVRVVQVLWALLAVLLASWRLWAIKDFQECTWQVVLNEFKRVGESGVSDSFFEQEPVDTVSSLFHMLVDSPIDPSEKYLGFPYYLKINYSCEEKSPVNFYRWKIEQLQIQMEAAPFRSKGSR

SEQ ID NO: 2071 - protein, 159 aa, Homo Sapiens
MCGPAMFPAGPPWPRVRVVQVLWALLAVLLASWRLWAIKDFQECTWQVVLNEFKRVGESGVSDSFFEQEPVDTVSSLFHMLVDSPIDPSEKYLGFPYYLKINYSCEEKTESCAVAQTGVQWRDLGSLQPPPPVFKRCSCLGLPSSWNYSPLRTWCAWAT

SEQ ID NO: 2072 - protein, 165 aa, Homo Sapiens
RWKIEQLQIQMEAAPFRSKEPCMAEEVCSMSWYTPMPIKKGSVVMRVDISSNGLGTFIPDKRFQMNINGFLKRDRDNNIQFTVGEELFNLMPQYFVGVSSRPLWHTVDQSPVLILGGIPNEKYVLMTDTSFKDFSLVEAVGFVSWPASASRSCALCISIAMALST

SEQ ID NO: 2073 - protein, 180 aa, Homo Sapiens
  misc_feature (1)..(1): Xaa can be any naturally occurring amino acid
XRNRGSGSWIRVLASECIKKLCPVYFHSNGSEYIMALTTGKHEGYVHFGTIRASDDLELLYHIPEFIPEARGLEFLMILGTESYTSTAMAPKGIFCNPYNNLIFIWGNFLLQSSNKENFIYLADFPKELSIKYMARSFRGAVAIVTETEEIWYLLEGSYRVYQLFPSKGWQVHISLKLMQ

SEQ ID NO: 2074 - protein, 193 aa, Homo Sapiens
MLGVLELLLLGAAWLAGPARGQNETEPIVLEGKCLVVCDSNPTSDPTGTALGISVRSGSAKVAFSAIRSTNHEPSEMSNRTMIIYFDQVLVNIGNNFDSERSTFIAPRKGIYSFNFHVVKVYNRQTIQVSLMLNGWPVISAFAGDQDVTREAASNGVLIQMEKGDRAYLKLERGNLMGGWKYSTFSGFLVFPL

SEQ ID NO: 2075 - protein, 193 aa, Homo Sapiens; identical to SEQ ID NO: 2074

SEQ ID NO: 2076 - protein, 140 aa, Homo Sapiens
MLGVLELLLLGAAWLAGPARGQNETEPIVLEGKCLVVCDSNPTSDPTGTALGISVRSGSAKVAFSAIRSTNHEPSEMSNRTMIIYFDQVSVPSSRGVQIGLVKEGWMEDRCPVLSKGSAEARGRQSGTDSCPLPFVPVSL

SEQ ID NO: 2077 - protein, 110 aa, Homo Sapiens
MDWDKVLVNIGNHFDLASSIFVAPRKGIYSFSFHVVKVYNRQTIQVSLMQNGYPVISAFAGDQDVTREAASNGVLLLMEREDKVHLKLERGNLMGGWKYSTFSGFLVFPL

SEQ ID NO: 2078 - protein, 108 aa, Homo Sapiens
MFQVLVNIGNHFDLASSIFVAPRKGIYSFSFHVVKVYNRQTIQVSLMQNGYPVISAFAGDQDVTREAASNGVLLLMEREDKVHLKLERGNLMGGWKYSTFSGFLVFPL

SEQ ID NO: 2079 - protein, 224 aa, Homo Sapiens
MQAPGRGPLGLRLMMPGRRGALREPGGCGSCLGVALALLLLLLPACCPVRAQNDTEPIVLEGKCLVVCDSSPSADGAVTSSLGISVRSGSAKVAFSATRSTNHEPSEMSNRTMTIYFDQVLVNIGNHFDLASSIFVAPRKGIYSFSFHVVKVYNRQTIQVSLMQNGYPVISAFAGDQDVTREAASNGVLLLMEREDKVHLKLERGNLMGGWKYSTFSGFLVFPL

SEQ ID NO: 2080 - protein, 224 aa, Homo Sapiens; identical to SEQ ID NO: 2079

SEQ ID NO: 2081 - protein, 205 aa, Homo Sapiens
MLGAKPHWLPGPLHSPGLPLVLVLLALGAGWAQEGSEPVLLEGECLVVCEPGRAAAGGPGGAALGEAPPGRVAFAAVRSHHHEPAGETGNGTSGAIYFDQVLVNEGGGFDRASGSFVAPVRGVYSFRFHVVKVYNRQTVQVSLMLNTWPVISAFANDPDVTREAATSSVLLPLDPGDRVSLRLRRGNLLGGWKYSSFSGFLIFPL

SEQ ID NO: 2082 - protein, 154 aa, Homo Sapiens
MWGLSGQSFGRTLTPTLKMRSTWGCCSRTLFSASADTAKRSGDAGRAPQVLVNEGGGFDRASGSFVAPVRGVYSFRFHVVKVYNRQTVQVSLMLNTWPVISAFANDPDVTREAATSSVLLPLDPGDRVSLRLRRGNLLGGWKYSSFSGFLIFPL

SEQ ID NO: 2083 - protein, 201 aa, Homo Sapiens
MGSGRRALSAVPAVLLVLTLPGLPVWAQNDTEPIVLEGKCLVVCDSNPATDSKGSSSSPLGISVRAANSKVAFSAVRSTNHEPSEMSNKTRIIYFDQILVNVGNFFTLESVFVAPRKGIYSFSFHVIKVYQSQTIQVNLMLNGKPVISAFAGDKDVTREAATNGVLLYLDKEDKVYLKLEKGNLVGGWQYSTFSGFLVFPL

SEQ ID NO: 2084 - protein, 46 aa, Homo Sapiens
MVKAGTCCATCKEFYQMKQTVLQLKQKIALLPNNAADLGKYITGDK

SEQ ID NO: 2085 - protein, 406 aa, Homo Sapiens
MVPPPPSRGGAARGQLGRSLGPLLLLLALGHTWTYREEPEDGDREICSESKIATTKYPCLKSSGELTTCYRKKCCKGYKFVLGQCIPEDYDVCAEAPCEQQCTDNFGRVLCTCYPGYRYDRERHRKREKPYCLDIDECASSNGTLCAHICINTLGSYRCECREGYIREDDGKTCTRGDKYPNDTGHEKSENMVKAGTCCATCKEFYQMKQTVLQLKQKIALLPNNAADLGKYITGDKVLASNTYLPGPPGLPGGQGPPGSPGPKGSPGFPGMPGPPGQPGPRGSMGPMGPSPDLSHIKQGRRGPVGPPGAPGRDGSKGERGAPGPRGSPGPPGSFDFLLLMLADIRNDITELQEKVFGHRTHSSAEEFPLPQEFPSYPEAMDLGSGDDHPRRTETRDLRAPRDFYP

SEQ ID NO: 2086 - protein, 336 aa, Homo Sapiens
RKKCCKGYKFVLGQCIPEDYDVCAEAPCEQQCTDNFGRVLCTCYPGYRYDRERHRKREKPYCLDIDECASSNGTLCAHICINTLGSYRCECREGYIREDDGKTCTRGDKYPNDTGHEKSENMVKAGTCCATCKEFYQMKQTVLQLKQKIALLPNNAADLGKYITGDKVLASNTYLPGPPGLPGGQGPPGSPGPKGSPGFPGMPGPPGQPGPRGSMGPMGPSPDLSHIKQGRRGPVGPPGAPGRDGSKGERGAPGPRGSPGPPGSFDFLLLMLADIRNDITELQEKVFGHRTHSSAEEFPLPQEFPSYPEAMDLGSGDDHPRRTETRDLRAPRDFYP

SEQ ID NO: 2087 - protein, 529 aa, Homo Sapiens
MAALTTVVVAAAATAVAGAVAGAGAATGTGVGATPAPQQSDGCFSTSGGIRPFHLQNWKQKVNQTKKAEFVRTAEKFKNQVINMEKDKHSHFYNQKSDFRIEHSMLEELENKLIHSRKTERAKIQQQLAKIHNNVKKLQHQLKDVKPTPDFVEKLREMMEEIENAINTFKEEQRLIYEELIKEEKTTNNELSAISRKIDTWALGNSETEKAFRAISSKVPVDKVTPSTLPEEVLDFEKFLQQTGGRQGAWDDYDHQNFVKVRNKHKGKPTFMEEVLEHLPGKTQDEVQQHEKWYQKFLALEERKKESIQIWKTKKQQKREEIFKLKEKADNTPVLFHNKQEDNQKQKEEQRKKQKLAVEAWKKQKSIEMSMKCASQLKEEEEKEKKHQKERQRQFKLKLLLESYTQQKKEQEEFLRLEKEIREKAEKAEKRKNAADEISRFQERDLHKLELKILDRQAKEDEKSQKQRRLAKLKEKVENNVSRDPSRLYKPTKGWEERTKKIGPTGSGPLLHIPHRAIPTWRQGIQRRV

SEQ ID NO: 2088 - protein, 446 aa, Homo Sapiens
MEKDKHSHFYNQKSDFRIEHSMLEELENKLIHSRKTERAKIQQQLAKIHNNVKKLQHQLKDVKPTPDFVEKLREMMEEIENAINTFKEEQRLIYEELIKEEKTTNNELSAISRKIDTWALGNSETEKAFRAISSKVPVDKVTPSTLPEEVLDFEKFLQQTGGRQGAWDDYDHQNFVKVRNKHKGKPTFMEEVLEHLPGKTQDEVQQHEKWYQKFLALEERKKESIQIWKTKKQQKREEIFKLKEKADNTPVLFHNKQEDNQKQKEEQRKKQKLAVEAWKKQKSIEMSMKCASQLKEEEEKEKKHQKERQRQFKLKLLLESYTQQKKEQEEFLRLEKEIREKAEKAEKRKNAADEISRFQERDLHKLELKILDRQAKEDEKSQKQRRLAKLKEKVENNVSRDPSRLYKPTKGWEERTKKIGPTGSGPLLHIPHRAIPTWRQGIQRRV

SEQ ID NO: 2089 - protein, 414 aa, Homo Sapiens
MEKDKHSHFYNQKSDFRIEHSMLEELENKLIHSRKTERAKIQQQLAKIHNNVKKLQHQLKDVKPTPDFVEKLREMMEEIENAINTFKEEQRLIYEELIKEEKTTNNELSAISRKIDTWALGNSETEKAFRAISSKVPVDKVTPSTLPEEVLDFEKFLQQTGGRQGAWDDYDHQNFVKVRNKHKGKPTFMEEVLEHLPGKTQDEVQQHEKWYQKFLALEERKKESIQIWKTKKQQKREEIFKLKEKADNTPVLFHNKQEDNQKQKEEQRKKQKLAVEAWKKQKSIEMSMKCASQLKEEEEKEKKHQKERQRQFKLKLLLESYTQQKKEQEEFLRLEKEIREKAEKAEKRKNAADEISRFQERVENNVSRDPSRLYKPTKGWEERTKKIGPTGSGPLLHIPHRAIPTWRQGIQRRV

SEQ ID NO: 2090 - protein, 446 aa, Homo Sapiens; identical to SEQ ID NO: 2088

SEQ ID NO: 2091 - protein, 142 aa, Homo Sapiens
MMAQKSQGSDNLQEGQEKSKREILKCTKSAWAPLDEWLPPDPEEESQSLTIPMLEDSKQESIQQWLDSGFFVSANENFQQVIDRTVSLYEQGMVQMTVKDYMRSLHQFSETPILSRGTSFNSCYSTASVPQSIPEWLEFWEI

SEQ ID NO: 2092 - protein, 163 aa, Homo Sapiens
MMAQKSQGSDNLQEGQEKSKREILKCTKSAWAPLDEWLPPDPEEESQSLTIPMLEDSKQESIQQWLDSGFFVSANENFQQVIDRTVSLYEQGMVQMTVKDYMRSLHQFSETPILSRGTSFNSCYSTASVPQSIPEWLEFWEIDPVEILLDLGFGADEPDICMQ

SEQ ID NO: 2093 - protein, 168 aa, Homo Sapiens
MMAQKSQGSDNLQEGQEKSKREILKCTKSAWAPLDEWLPPDPEEESQSLTIPMLEDSKQESIQQWLDSGFFVSANENFQQVIDRTVSLYEQGMVQMTVKDYMRSLHQFSETPILSRGTSFNSCYSTASVPQSIPEWLEFWEIDPVEILLDLGFGADEPDICMQIPARF

SEQ ID NO: 2094 - protein, 896 aa, Homo Sapiens
MMAQKSQGSDNLQEGQEKSKREILKCTKSAWAPLDEWLPPDPEEESQSLTIPMLEDSKQESIQQWLDSGFFVSANENFQQVIDRTVSLYEQGMVQMTVKDYMRSLHQFSETPILSRGTSFNSCYSTASVPQSIPEWLEFWEIDPVEILLDLGFGADEPDICMQIPARFLGCGSAARGINIRVFLEAQKQRMDIENPNLYGRFRQLEILDHVTNAFSSLLSDVSILPNRAEEKAGGESVQRTSVQSFEEETGNPLDMTSGTVGARVDRANSCQSDSSGFLEEPLEPLPLQMPSLPNSQSPAENGGRKPRDQSHSLVSSQDCQLESDGPDSKSRASMSFSSQEANALEQRASVSVMEEEFLLEAMEGPPELYIPDMACAKTTTRGECPRKDSHLWQLLPMPHAEYEVTRPTATSKYDHPLGFMVTHVTEMQDSFVRPEGAGKVQSHHNESQRSPGNDHTQDKFLHVDSEAPREEESSGFCPHTNHSLLVPESSSQCIPKHSEITPYATDLAQTSEKLIPHLHKLPGDPAQVKSRSGTLGQILPGTEAEMENLPLNTGSSRSVMTQMSSSLVSAAQRAVALGTGPRGTSLECTVCDPVTATETRLGTKARQLNDASIQTSALSNKTLTHGPQPLTKSVSLDSGFSSICPMGTCHAIPAHCCICCHHHPHCHGERQSPGPEPSVCRHCLCSLTGHQEAQFMTTLKALQDTTVRELCSCTVHEMEAMKTICQSFREYLEEIEQHLMGQQALFSRDMSEEEREEAEQLQTLREALRQQVAELEFQLGDRAQQIREGILLQLEVLTAEPPEHYSNLHQYNWIEESNGQTSCSKIHPGMAPRTVFPPDDGQEAPCSGGTQLAAFTPPTLENSTRMSPSSSAWAKLGPTPLSNCPVGEKDADVFL

SEQ ID NO: 2095 - protein, 1044 aa, Homo Sapiens
MMAQKSQGSDNLQEGQEKSKREILKCTKSAWAPLDEWLPPDPEEESQSLTIPMLEDSKQESIQQWLDSGFFVSANENFQQVIDRTVSLYEQGMVQMTVKDYMRSLHQFSETPILSRGTSFNSCYSTASVPQSIPEWLEFWEIDPVEILLDLGFGADEPDICMQIPARFLGCGSAARGINIRVFLEAQKQRMDIENPNLYGRFRQLEILDHVTNAFSSLLSDVSILPNRAEEKAGGESVQRTSVSAAKEHRRRMGKLLRRASKQNIRRDCNPEVSESFKVKDEVFVPFTKPWDCGAELAATSINHKQNHLSLSVEHQSLQACDDLLPYPPHGLLSKQWPCSSMPAKQAPPSCVSEGSVKGRTQKENLFQTNKLKSLSHLAGKGPDSFEMEEVQSFEEETGNPLDMTSGTVGARVDRANSCQSDSSGFLEEPLEPLPLQMPSLPNSQSPAENGGRKPRDQSHSLVSSQDCQLESDGPDSKSRASMSFSSQEANALEQRASVSVMEEEFLLEAMEGPPELYIPDMACAKTTTRGECPRKDSHLWQLLPMPHAEYEVTRPTATSKYDHPLGFMVTHVTEMQDSFVRPEGAGKVQSHHNESQRSPGNDHTQDKFLHVDSEAPREEESSGFCPHTNHSLLVPESSSQCIPKHSEITPYATDLAQTSEKLIPHLHKLPGDPAQVKSRSGTLGQILPGTEAEMENLPLNTGSSRSVMTQMSSSLVSAAQRAVALGTGPRGTSLECTVCDPVTATETRLGTKARQLNDASIQTSALSNKTLTHGPQPLTKSVSLDSGFSSICPMGTCHAIPAHCCICCHHHPHCHGERQSPGPEPSVCRHCLCSLTGHQEAQFMTTLKALQDTTVRELCSCTVHEMEAMKTICQSFREYLEEIEQHLMGQQALFSRDMSEEEREEAEQLQTLREALRQQVAELEFQLGDRAQQIREGILLQLEVLTAEPPEHYSNLHQYNWIEESNGQTSCSKIHPGMAPRTVFPPDDGQEAPCSGGTQLAAFTPPTLENSTRMSPSSSAWAKLGPTPLSNCPVGEKDADVFL

SEQ ID NO: 2096 - protein, 1062 aa, Homo Sapiens
MPTTASCKTISLLKLLYSVSLQNYSPMMAQKSQGSDNLQEGQEKSKREILKCTKSAWAPLDEWLPPDPEEESQSLTIPMLEDSKQESIQQWLDSGFFVSANENFQQVIDRTVSLYEQGMVQMTVKDYMRSLHQFSETPILSRGTSFNSCYSTASVPQSIPEWLEFWEIDPVEILLDLGFGADEPDICMQIPARFLGCGSAARGINIRVFLEAQKQRMDIENPNLYGRFRQLEILDHVTNAFSSLLSDVSILPNRAEEKAGGESVQRTSVSAAKEHRRRMGKLLRRASKQNIRRDCNPEVSESFKVKDEVFVPFTKPWDCGAELAATSINHKQNHLSLSVEHQSLQACDDLLPYPPHGLLSKQWPCSSMPAKQAPPSCVSEGSVKGRTQKENLFQTNKLKSLSHLAGKGPDSFEMEEVQSFEEETGNPLDMTSGTVGARVDRANSCQSDSSGFLEEPLEPLPLQMPSLPNSQSPAENGGRKPRDQSHSLVSSQDCQLESDGPDSKSRASMSFSSQEANALEQRASVSVMEEEFLLEAMEGPPELYIPDMACAKTTTRGECPRKDSHLWQLLPMPHAEYEVTRPTATSKYDHPLGFMVTHVTEMQDSFVRPEGAGKVQSHHNESQRSPGNDHTQDKFLHVDSEAPREEESSGFCPHTNHSLLVPESSSQCIPKHSEITPYATDLAQTSEKLIPHLHKLPGDPAQVKSRSGTLGQILPGTEAEMENLPLNTGSSRSVMTQMSSSLVSAAQRAVALGTGPRGTSLECTVCDPVTATETRLGTKARQLNDASIQTSALSNKTLTHGPQPLTKSVSLDSGFSSICPMGTCHAIPAHCCICCHHHPHCHGERQSPGPEPSVCRHCLCSLTGHQEAQFMTTLKALQDTTVRELCSCTVHEMEAMKTICQSFREYLEEIEQHLMGQQALFSRDMSEEEREEAEQLQTLREALRQQVAELEFQLGDRAQQIREGILLQLEVLTAEPPEHYSNLHQYNWIEESNGQTSCSKIHPGMAPRTVFPPDDGQEAPCSGELLSAELDPFFFSSKANNSAKDEKIKSKDFLKTQDSGLL

SEQ ID NO: 2097 - protein, 1054 aa, Homo Sapiens
MSVSLQNYSPMMAQKSQGSDNLQEGQEKSKREILKCTKSAWAPLDEWLPPDPEEESQSLTIPMLEDSKQESIQQWLDSGFFVSANENFQQVIDRTVSLYEQGMVQMTVKDYMRSLHQFSETPILSRGTSFNSCYSTASVPQSIPEWLEFWEIDPVEILLDLGFGADEPDICMQIPARFLGCGSAARGINIRVFLEAQKQRMDIENPNLYGRFRQLEILDHVTNAFSSLLSDVSILPNRAEEKAGGESVQRTSVSAAKEHRRRMGKLLRRASKQNIRRDCNPEVSESFKVKDEVFVPFTKPWDCGAELAATSINHKQNHLSLSVEHQSLQACDDLLPYPPHGLLSKQWPCSSMPAKQAPPSCVSEGSVKGRTQKENLFQTNKLKSLSHLAGKGPDSFEMEEVQSFEEETGNPLDMTSGTVGARVDRANSCQSDSSGFLEEPLEPLPLQMPSLPNSQSPAENGGRKPRDQSHSLVSSQDCQLESDGPDSKSRASMSFSSQEANALEQRASVSVMEEEFLLEAMEGPPELYIPDMACAKTTTRGECPRKDSHLWQLLPMPHAEYEVTRPTATSKYDHPLGFMVTHVTEMQDSFVRPEGAGKVQSHHNESQRSPGNDHTQDKFLHVDSEAPREEESSGFCPHTNHSLLVPESSSQCIPKHSEITPYATDLAQTSEKLIPHLHKLPGDPAQVKSRSGTLGQILPGTEAEMENLPLNTGSSRSVMTQMSSSLVSAAQRAVALGTGPRGTSLECTVCDPVTATETRLGTKARQLNDASIQTSALSNKTLTHGPQPLTKSVSLDSGFSSICPMGTCHAIPAHCCICCHHHPHCHGERQSPGPEPSVCRHCLCSLTGHQEAQFMTTLKALQDTTVRELCSCTVHEMEAMKTICQSFREYLEEIEQHLMGQQALFSRDMSEEEREEAEQLQTLREALRQQVAELEFQLGDRAQQIREGILLQLEVLTAEPPEHYSNLHQYNWIEESNGQTSCSKIHPGMAPRTVFPPDDGQEAPCSGGTQLAAFTPPTLENSTRMSPSSSAWAKLGPTPLSNCPVGEKDADVFL

SEQ ID NO: 2098 - protein, 952 aa, Homo Sapiens
MVQMTVKDYMRSLHQFSETPILSRGTSFNSCYSTASVPQSIPEWLEFWEIDPVEILLDLGFGADEPDICMQIPARFLGCGSAARGINIRVFLEAQKQRMDIENPNLYGRFRQLEILDHVTNAFSSLLSDVSILPNRAEEKAGGESVQRTSVSAAKEHRRRMGKLLRRASKQNIRRDCNPEVSESFKVKDEVFVPFTKPWDCGAELAATSINHKQNHLSLSVEHQSLQACDDLLPYPPHGLLSKQWPCSSMPAKQAPPSCVSEGSVKGRTQKENLFQTNKLKSLSHLAGKGPDSFEMEEVQSFEEETGNPLDMTSGTVGARVDRANSCQSDSSGFLEEPLEPLPLQMPSLPNSQSPAENGGRKPRDQSHSLVSSQDCQLESDGPDSKSRASMSFSSQEANALEQRASVSVMEEEFLLEAMEGPPELYIPDMACAKTTTRGECPRKDSHLWQLLPMPHAEYEVTRPTATSKYDHPLGFMVTHVTEMQDSFVRPEGAGKVQSHHNESQRSPGNDHTQDKFLHVDSEAPREEESSGFCPHTNHSLLVPESSSQCIPKHSEITPYATDLAQTSEKLIPHLHKLPGDPAQVKSRSGTLGQILPGTEAEMENLPLNTGSSRSVMTQMSSSLVSAAQRAVALGTGPRGTSLECTVCDPVTATETRLGTKARQLNDASIQTSALSNKTLTHGPQPLTKSVSLDSGFSSICPMGTCHAIPAHCCICCHHHPHCHGERQSPGPEPSVCRHCLCSLTGHQEAQFMTTLKALQDTTVRELCSCTVHEMEAMKTICQSFREYLEEIEQHLMGQQALFSRDMSEEEREEAEQLQTLREALRQQVAELEFQLGDRAQQIREGILLQLEVLTAEPPEHYSNLHQYNWIEESNGQTSCSKIHPGMAPRTVFPPDDGQEAPCSGGTQLAAFTPPTLENSTRMSPSSSAWAKLGPTPLSNCPVGEKDADVFL

SEQ ID NO: 2099 - protein, 116 aa, Homo Sapiens
MDLLQFLAFLFVLLLSGMGATGTLRTSLDPSLEIYKKMFEVKRREQLLALKNLAQLNDIHQQYKILDVMLKGLFKFIPSTDPFQKALREEEKRRKKEEKRKEIRKGPRISRSQSEL

SEQ ID NO: 2100 - protein, 229 aa, Homo Sapiens
MDLLQFLAFLFVLLLSGMGATGTLRTSLDPSLEIYKKMFEVKRREQLLALKNLAQLNDIHQQYKILDVMLKGLFKVLEDSRTVLTAADVLPDGPFPQDEKLKDAFSHVVENTAFFGDVVLRFPRIVHYYFDHNSNWNLLIRWGISFCNQTGVFNQGPHSPILSLMAQELGISEKDSNFQNPFKIDRTEFIPSTDPFQKALREEEKRRKKEEKRKEIRKGPRISRSQSEL

SEQ ID NO: 2101 - protein, 141 aa, Homo Sapiens
MEEEAMNGDRTESDWQGLVSEYLVCKRKLESKKEALLILSKELDTCQQERDQYKLMANQLRERHQSLKKKYRELIDGDPSLPPEKRKQANLAQLLRDSQDRNKHLGEEIKELQQRLGEVQGDNKGRLRSKKKMKVVPLLRR

SEQ ID NO: 2102 - protein, 529 aa, Homo Sapiens
MEEEAMNGDRTESDWQGLVSEYLVCKRKLESKKEALLILSKELDTCQQERDQYKLMANQLRERHQSLKKKYRELIDGDPSLPPEKRKQANLAQLLRDSQDRNKHLGEEIKELQQRLGEVQGDNKLLRMTIAKQRLGDEAIGVRHFAAHEREDLVQQLERAKEQIESLEHDLQASVDELQDVKEERSSYQDKVERLNQELNHILSGHENRIIDVDALCMENRYLQERLKQLHEEVNLLKSNIAKYKNALERRKNSKGQGKSSSSALTGVLSAKQVQDLLSEDHGCSLPATPQSISDLKSLATALLETIHEKNMVIQHQRQTNKILGNRVAELEKKLRTLEVSGLWSLPGGKDTILFSDPTLPSGQRSRSPLLKFVEQPTENKADPKDGEAQKQEEDESCAAAEALTAPEDAGRPAVNSPANQSRGNQCKLFHPSLPQLPSEEEVNSLGREIIKLTKEQAAAELEEVRRESPIEGQRSETGPAPPGLAIQGELPKSHLDSFEASRPAAKASTPEDGKGIPEGGGMRSTVKT

SEQ ID NO: 2103 - protein, 540 aa, Homo Sapiens
MEEEAMNGDRTESDWQGLVSEYLVCKRKLESKKEALLILSKELDTCQQERDQYKLMANQLRERHQSLKKKYRELIDGDPSLPPEKRKQANLAQLLRDSQDRNKHLGEEIKELQQRLGEVQGDNKLLRMTIAKQRLGDEAIGVRHFAAHEREDLVQQLERAKEQIESLEHDLQASVDELQDVKEERSSYQDKVERLNQELNHILSGHENRIIDVDALCMENRYLQERLKQLHEEVNLLKSNIAKYKNALERRKNSKGQGKSSSSALTGVLSAKQVQDLLSEDHGCSLPATPQSISDLKSLATALLETIHEKNMVIQHQRQTNKILGNRVAELEKKLRTLEVSGLWSLPGLSYNVSVGFGRGKDTILFSDPTLPSGQRSRSPLLKFVEQPTENKADPKDGEAQKQEEDESCAAAEALTAPEDAGRPAVNSPANQSRGNQCKLFHPSLPQLPSEEEVNSLGREIIKLTKEQAAAELEEVRRESPIEGQRSETGPAPPGLAIQGELPKSHLDSFEASRPAAKASTPEDGKGIPEGGGMRSTVKT

SEQ ID NO: 2104 - protein, 529 aa, Homo Sapiens
MVVIVVVIIIIIARAATWDSEYLVCKRKLESKKEALLILSKELDTCQQERDQYKLMANQLRERHQSLKKKYRELIDGDPSLPPEKRKQANLAQLLRDSQDRNKHLGEEIKELQQRLGEVQGDNKLLRMTIAKQRLGDEAIGVRHFAAHEREDLVQQLERAKEQIESLEHDLQASVDELQDVKEERSSYQDKVERLNQELNHILSGHENRIIDVDALCMENRYLQERLKQLHEEVNLLKSNIAKYKNALERRKNSKGQGKSSSSALTGVLSAKQVQDLLSEDHGCSLPATPQSISDLKSLATALLETIHEKNMVIQHQRQTNKILGNRVAELEKKLRTLEVSGLWSLPGGKDTILFSDPTLPSGQRSRSPLLKFVEQPTENKADPKDGEAQKQEEDESCAAAEALTAPEDAGRPAVNSPANQSRGNQCKLFHPSLPQLPSEEEVNSLGREIIKLTKEQAAAELEEVRRESPIEGQRSETGPAPPGLAIQGELPKSHLDSFEASRPAAKASTPEDGKGIPEGGGMRSTVKT

SEQ ID NO: 2105 - protein, 145 aa, Homo Sapiens
MDENYNLLPHGVNFQDAIFPDTQENRRMFSSLFQFSNCSQGQQLATFSSDWEIQEDSRLMCSSVQKALFEEEDHVKKLQQKVATLEKRNRQLRERVKKVKRSLRQARKKGRHLELANQKLSEKLAAGALPHINARGPVRPPYLRG

SEQ ID NO: 2106 - protein, 270 aa, Homo Sapiens
MLRQLLLAALCLAGPPAPARACQLPSEWRPLSEGCRAELAETIVYARVLALHPEAPGLYNHLPWQYHAGQGGLFYSAEVEMLCDQAWGSMLEVPAGSRLNLTGLGYFSCHSHTVVQDYSYFFFLRMDENYNLLPHGVNFQDAIFPDTQENRRMFSSLFQFSNCSQGQQLATFSSDWEIQEDSRLMCSSVQKALFEEEDHVKKLQQKVATLEKRNRQLRERVKKVKRSLRQARKKGRHLELANQKLSEKLAAGALPHINARGPVRPPYLRG

SEQ ID NO: 2107 - protein, 212 aa, Homo Sapiens
MALRSMGQFSVFFFFFFWAQKKIASLSHSGFLHWFLLFEAVSSNGVLLFFSRFRWRRRLLVISAPNDEDWAYSQQLSALSGQACNFGLRHITILKLLGVGEEVGGVLELFPINGSSVVEREDVPAHLVKDIRNYFQVSPEYFSMLLVGKDGNVKSWYPSPMWSMVIVYDLIDSMQLRRQEMAIQQSLGMRCPEDEYAGYGYHSYHQGYQDGY

SEQ ID NO: 2108 - protein, 950 aa, Homo Sapiens
MTWRMGPRFTMLLAMWLVCGSEPHPHATIRGSHGGRKVPLVSPDSSRPARFLRHTGRSRGIERSTLEEPNLQPLQRRRSVPVLRLARPTEPPARSDINGAAVRPEQRPAARGSPREMIRDEGSSARSRMLRFPSGSSSPNILASFAGKNRVWVISAPHASEGYYRLMMSLLKDDVYCELAERHIQQIVLFHQAGEEGGKVRRITSEGQILEQPLDPSLIPKLMSFLKLEKGKFGMVLLKKTLQVEERYPYPVRLEAMYEVIDQGPIRRIEKIRQKGFVQKCKASGVEGQVVAEGNDGGGGAGRPSLGSEKKKEDPRRAQVPPTRESRVKVLRKLAATAPALPQPPSTPRATTLPPAPATTVTRSTSRAVTVAARPMTTTAFPTTQRPWTPSPSHRPPTTTEVITARRPSVSENLYPPSRKDQHRERPQTTRRPSKATSLESFTNAPPTTISEPSTRAAGPGRFRDNRMDRREHGHRDPNVVPGPPKPAKEKPPKKKAQDKILSNEYEEKYDLSRPTASQLEDELQVGNVPLKKAKESKKHEKLEKPEKEKKKKMKNENADKLLKSEKQMKKSEKKSKQEKEKSKKKKGGKTEQDGYQKPTNKHFTQSPKKSVADLLGSFEGKRRLLLITAPKAENNMYVQQRDEYLESFCKMATRKISVITIFGPVNNSTMKIDHFQLDNEKPMRVVDDEDLVDQRLISELRKEYGMTYNDFFMVLTDVDLRVKQYYEVPITMKSVFDLIDTFQSRIKDMEKQKKEGIVCKEDKKQSLENFLSRFRWRRRLLVISAPNDEDWAYSQQLSALSGQACNFGLRHITILKLLGVGEEVGGVLELFPINGSSVVEREDVPAHLVKDIRNYFQVSPEYFSMLLVGKDGNVKSWYPSPMWSMVIVYDLIDSMQLRRQEMAIQQSLGMRCPEDEYAGYGYHSYHQGYQDGYQDDYRHHESYHHGYPY

SEQ ID NO: 2109 - protein, 950 aa, Homo Sapiens; identical to SEQ ID NO: 2108

SEQ ID NO: 2110 - protein, 261 aa, Homo Sapiens
  misc_feature (1)..(1): Xaa can be any naturally occurring amino acid
XFTQSPKKSVADLLGSFEGKRRLLLITAPKAENNMYVQQRDEYLESFCKMATRKISVITIFGPVNNSTMKIDHFQLDNEKPMRVVDDEDLVDQRLISELRKEYGMTYNDFFMVLTDVDLRVKQYYEVPITMKSVFDLIDTFQSRIKDMEKQKKEGIVCKEDKKQSLENFLSRFRWRRRLLVISAPNDEDWAYSQQLSALSGQACNFGSSVVEREDVPAHLVKDIRNYFQVSPEYFSMLLVGKDGNVKSWYPSPMWSMVIVY

SEQ ID NO: 2111 - protein, 553 aa, Homo Sapiens
MSKAAGGAAAAAAAAESCSPAPAGSSAAPPAPVEDLSKVSDEELLQWSKEELIRSLRRAEAEKVSAMLDHSNLIREVNRRLQLHLGEIRGLKDINQKLQEDNQELRDLCCFLDDDRQKGKRVSREWQRLGRYTAGVMHKEVALYLQKLKDLEVKQEEVVKENMELKELCVLLDEEKGAGCAGSRCSIDSQASLCQLTASTAPYVRDVGDGSSTSSTGSTDSPDHHKHHASSGSPEHLQKPRSEGSPEHSKHRSASPEHPQKPRACGTPDRPKALKGPSPEHHKPLCKGSPEQQRHPHPGSSPETLPKHVLSGSPEHFQKHRSGSSPEHARHSGGSPEHLQKHALGGSLEHLPRARGTSPEHLKQHYGGSPDHKHGGGSGGSGGSGGGSREGTLRRQAQEDGSPHHRNVYSGMNESTLSYVRQLEARVRQLEEENRMLPQASQNRRQPPTRNSSNMEKGWGSRARRVLQWWQGCRGIGRCLPTLPGSFRLSSGADGSNSSPNSAASFSGHATPSQQPEPVVHSLKVVWRKLGDAAGSCPGIRQHLSGNQYKGPM

SEQ ID NO: 2112 - protein, 712 aa, Homo Sapiens
MAGVAAHRAHPPFTAHMKNRGLREELEKAVVRGKELGDRLEHLQRELEQAALERQEFLREKESQHQRYQGLEQRLEAELQAAATSKEEALMELKTRALQLEEELFQLRQGPAGLGPKKRAEPQLVETQNVRLIEVERSNAMLVAEKAALQGQLQHLEGQLGSLQGRAQELLLQSQRAQEHSSRLQAEKSVLEIQGQELHRKLEVLEEEVRAARQSQEETRGQQQALLRDHKALAQLQRRQEAELEGLLVRHRDLKANMRALELAHRELQGRHEQLQAQRASVEAQEVALLAERERLMQDGHRQRGLEEELRRLQSEHDRAQMLLAELSRERGELQGERGELRGRLARLELERAQLEMQSQQLRESNQQLDLSACRLTTQCELLTQLRSAQEEENRQLLAEVQALSRENRELLERSLESRDHLHREQREYLDQLNALRREKQKLVEKIMDQYRVLEPVPLPRTKKGSWLADKGPLPRHPCAGPRAPSACGMRPWQAGSGGNSAQGSRWGEALSHSALGTPLGNDSDSAIQAPWGRPSPTAKDLVWDGRTPLRPCRNTKQMPTERALRYRNRRNVPSPHPSASDTVGTAGLGVQPSRHWSVSGGPRQPKSSGSQGPQGESLDKEAWALRSSTVSAGARRWSWDECVDRGDGWPPRAAPGWSSGSSRWLPLRQRSLGDPPAEGGWQELAREPPALSRWEAESQCWGTVAWADLEP

SEQ ID NO: 2113 - protein, 1476 aa, Homo Sapiens
MEGGKGPRLRDFLSGSLATWALGLAGLVGEAEDSEGEEEEEEEEPPLWLEKRFLRLSDGALLLRVLGIIAPSSRGGPRMLRGLDGPAAWRVWNLNHLWGRLRDFYQEELQLLILSPPPDLQTLGFDPLSEEAVEQLEGVLRLLLGASVQCEHRELFIRHIQGLSLEVQSELAAAIQEVTQPGAGVVLALSGPDPGELAPAELEMLSRSLMGTLSKLARERDLGAQRLAELLLEREPLCLRPEAPSRAPAEGPSHHLALQLANAKAQLRRLRQELEEKAELLLDSQAEVQGLEAEIRRLRQEAQALSGQAKRAELYREEAEALRERAGRLPRLQEELRRCRERLQAAEAYKSQLEEERVLSGVLEASKALLEEQLEAARERCARLHETQRENLLLRTRLGEAHAELDSLRHQVDQLAEENVELELELQRSLEPPPGSPGEAPLAGAAPSLQDEVREAEAGRLRTLERENRELRGLLQVLQGQPGGQHPLLEAPREDPVLPVLEEAPQTPVAFDHSPQGLVQKARDGGPQALDLAPPALDSVLEASAECPQAPDSDPQEAESPLQAAAMDPQASDWSPQESGSPVETQESPEKAGRRSSLQSPASVAPPQGPGTKIQAPQLLGGETEGREAPQGELVPEAWGLRQEGPEHKPGPSEPSSVQLEEQEGPNQGLDLATGQAEAREHDQRLEGTVRDPAWQKPQQKSEGALEVQVWEGPIPGESLASGVAEQEALREEVAQLRRKAEALGDELEAQARKLEAQNTEAARLSKELAQARRAEAEAHREAEAQAWEQARLREAVEAAGQELESASQEREALVEALAAAGRERRQWEREGSRLRAQSEAAEERMQVLESEGRQHLEEAERERREKEALQAELEKAVVRGKELGDRLEHLQRELEQAALERQEFLREKESQHQRYQGLEQRLEAELQAAATSKEEALMELKTRALQLEEELFQLRQGPAGLGPKKRAEPQLVETQNVRLIEVERSNAMLVAEKAALQGQLQHLEGQLGSLQGRAQELLLQSQRAQEHSSRLQAEKSVLEIQGQELHRKLEVLEEEVRAARQSQEETRGQQQALLRDHKALAQLQRRQEAELEGLLVRHRDLKANMRALELAHRELQGRHEQLQAQRASVEAQEVALLAERERLMQDGHRQRGLEEELRRLQSEHDRAQMLLAELSRERGELQGERGELRGRLARLELERAQLEMQSQQLRESNQQLDLSACRLTTQCELLTQLRSAQEEENRQLLAEVQALSRENRELLERSLESRDHLHREQREYLDQLNALRREKQKLVEKIMDQYRVLEPVPLPRTKKGSWLADKVKRLMRPRREGGPPGGLRLGADGAGSTESLGGPPETELPEGREADGTGSPSPAPMRRAQSSLCLRDETLAGGQRRKLSSRFPVGRSSESFSPGDTPRQRFRQRHPGPLGAPVSHSKGPGVGWENSAETLQEHETDANREGPEVQEPEKRPLTPSLSQ

SEQ ID NO: 2114 - protein, 139 aa, Homo Sapiens
MPCAARSRSSWRRSWTNTACWSLCPCPGPRSPSPAPMRRAQSSLCLRDETLAGGQRRKLSSRFPVGRSSESFSPGDTPRQRFRQRHPGPLGAPVSHSKGPGVGWENSAETLQEHETDANREGPEVQEPEKRPLTPSLSQ

SEQ ID NO: 2115 - protein, 122 aa, Homo Sapiens
EDEEEEKEERKRGPMETFEDLWQRHLENGGDLQKRVAEKASDKETAQFQAEEKGVRVLGGDRSLWQGAERGGGERREDLPHHHHHHHQPEAEPRQEKEEASEREEKEVEQLEHLRDELKKDC

SEQ ID NO: 2116 - protein, 266 aa, Homo Sapiens
MPPRGPASELLLLRLLLLGAATAAPLAPRPSKEELTRCLAEVVTEVLTVGQVQRGPCTALLHKELCGTEPHGCASTEEKGLLLGDFKKQEAGKMRSSQEVRDEEEEEVAERTHKSEVQEQAIRMQGHRQLHQEEDEEEEKEERKRGPMETFEDLWQRHLENGGDLQKRVAEKASDKETAQFQAEEKGVRVLGGDRSLWQGAERGGGERREDLPHHHHHHHQPEAEPRQEKEEASEREEKEVEQLEHLRDELKKVTETLGEQLRREG

SEQ ID NO: 2117 - protein, 115 aa, Homo Sapiens
MNSGVCLCVLMAVLAAGALTQPVPPADPAGSGLQRAEEAPRRQLRVSQRTDGESRAHLGALLARYIQQARKAPSGRMSIVKNLQNLDPSHRISDRDYMGWMDFGRRSAEEYEYPS

SEQ ID NO: 2118 - protein, 115 aa, Homo Sapiens; identical to SEQ ID NO: 2117

SEQ ID NO: 2119 - protein, 115 aa, Homo Sapiens; identical to SEQ ID NO: 2117

SEQ ID NO: 2120 - protein, 96 aa, Homo Sapiens
MQIITTALVCLLLAGMWPEDVDSKSMQVPFSRCCFSFAEQEIPLRAILCYRNTSSICSNEGLIFKLKRGKEACALDTVGWVQRHRKMLRHCPSKRK

SEQ ID NO: 2121 - protein, 97 aa, Homo Sapiens
MKVSAALLWLLLIAAAFSPQGLAGPASVPTTCCFNLANRKIPLQRLESYRRITSGKCPQKAVIFKTKLAKDICADPKKKWVQDSMKYLDQKSPTPKP

SEQ ID NO: 2122 - protein, 98 aa, Homo Sapiens
MKVSAVLLCLLLMTAAFNPQGLAQPDALNVPSTCCFTFSSKKISLQRLKSYVITTSRCPQKAVIFRTKLGKEICADPKEKWVQNYMKHLGRKAHTLKT

SEQ ID NO: 2123 - protein, 63 aa, Homo Sapiens
  misc_feature (1)..(1): Xaa can be any naturally occurring amino acid
XVPSTCCFTFSSKKISLQRLKSYVITTSSFRTKLGKEICADPKEKWVQNYMKHLGRKAHTLKT

SEQ ID NO: 2124 - protein, 109 aa, Homo Sapiens
MKISVAAIPFFLLITIALGTKTESSSQTGGKPKVVKIQLKLVGGPYHPSECCFTYTTYKIPRQRIMDYYETNSQCSKPGIVFITKRGHSVCTNPSDKWVQDYIKDMKEN

SEQ ID NO: 2125 - protein, 65 aa, Homo Sapiens
MKISVAAIPFFLLITIALGTKTESSSRGPYHPSECCFTYTTYKIPRQRIMDYYETNSQCSKPGIV

SEQ ID NO: 2126 - protein, 93 aa, Homo Sapiens
MKISVAAIPFFLLITIALGTKTESSSRGPYHPSECCFTYTTYKIPRQRIMDYYETNSQCSKPGIVFITKRGHSVCTNPSDKWVQDYIKDMKEN

SEQ ID NO: 2127 - protein, 115 aa, Homo Sapiens
MRKAYSPLQVLRGCLLLPSLLHALSLQEQPMVWPLTRGPSSASDALSSGGPYHPSECCFTYTTYKIPRQRIMDYYETNSQCSKPGIVFITKRGHSVCTNPSDKWVQDYIKDMKEN

SEQ ID NO: 2128 - protein, 113 aa, Homo Sapiens
MKVSVAALSCLMLVAVLGSQAQFTNDAETELMMSKLPLENPVVLNSFHFAADCCTSYISQSIPCSLMKSYFETSSECSKPGVIFLTKKGRQVCAKPSGPGVQDCMKKLKPYSI

SEQ ID NO: 2129 - protein, 61 aa, Homo Sapiens
  misc_feature (1)..(1): Xaa can be any naturally occurring amino acid
XCTSYISQSIPCSLMKSYFETSSECSKPGVIFLTKKGRQVCAKPSGPGVQDCMKKLKPYSI

SEQ ID NO: 2130 - protein, 120 aa, Homo Sapiens
MKVSEAALSLLVLILIITSASRSQPKVPEWVNTPSTCCLKYYEKVLPRRLVVGYRKALNCHLPAIIFVTKRNREVCTNPNDDWVQEYIKDPNLPLLPTRNLSTVKIITAKNGQPQLLNSQ

SEQ ID NO: 2131 - protein, 53 aa, Homo Sapiens
MKVSEAALSLLVLILIITSASRSQPSWSAVSRSRLTTTSASRVQVILLPQPPE

SEQ ID NO: 2132 - protein, 95 aa, Homo Sapiens
  misc_feature (1)..(1): Xaa can be any naturally occurring amino acid
XVPEWVNTPSTCCLKYYEKVLPRRLVVGYRKALNCHLPAIIFVTKRNREVCTNPNDDWVQEYIKDPNLPLLPTRNLSTVKIITAKNGQPQLLNSQ

SEQ ID NO: 2133 - protein, 94 aa, Homo Sapiens
MAPLKMLALVTLLLGASLQHIHAARGTNVGRECCLEYFKGAIPLRKLKTWYQTSEDCSRDAIVFVTVQGRAICSDPNNKRVKNAVKYLQSLERS

SEQ ID NO: 2134 - protein, 94 aa, Homo Sapiens; identical to SEQ ID NO: 2133

SEQ ID NO: 2135 - protein, 89 aa, Homo Sapiens
MKGLAAALLVLVCTMALCSCAQVGTNKELCCLVYTSWQIPQKFIVDYSETSPQCPKPGVILLTKRGRQICADPNKKWVQKYISDLKLNA

SEQ ID NO: 2136 - protein, 104 aa, Homo Sapiens
MALLLALSLLVLWTSPAPTLSGTNDAEDCCLSVTQKPIPGYIVRNFHYLLIKDGCRVPAVVFTTLRGRQLCAPPDQPWVERIIQRLQRTSAKASLALPGPVSSL

SEQ ID NO: 2137 - protein, 98 aa, Homo Sapiens
MALLLALSLLVLWTSPAPTLSGTNDAEDCCLSVTQKPIPGYIVRNFHYLLIKDGCRVPAVVFTTLRGRQLCAPPDQPWVERIIQRLQRTSAKMKRRSS

SEQ ID NO: 2138 - protein, 99 aa, Homo Sapiens
MKVSAALLCLLLIAATFIPQGLAQPDAINAPVTCCYNFTNRKISVQRLASYRRITSSKCPKEAVIFKTIVAKEICADPKQKWVQDSMDHLDKQTQTPKT

SEQ ID NO: 2139 - protein, 65 aa, Homo Sapiens
MKVSAALLCLLLIAATFIPQGLAQPDAINAPVTCCYNFTNRKISVQRLASYRRITSSKCPKEAVM

SEQ ID NO: 2140 - protein, 25 aa, Homo Sapiens
MCCTKSLLLAALMSVLLLHLCGESE

SEQ ID NO: 2141 - protein, 96 aa, Homo Sapiens
MCCTKSLLLAALMSVLLLHLCGESEAASNFDCCLGYTDRILHPKFIVGFTRQLANEGCDINAIIFHTKKKLSVCANPKQTWVKYIVRLLSKKVKNM

SEQ ID NO: 2142 - protein, 95 aa, Homo Sapiens
MCCTKSLLLAALMSVLLLHLCGESEASNFDCCLGYTDRILHPKFIVGFTRQLANEGCDINAIIFHTKKKLSVCANPKQTWVKYIVRLLSKKVKNM

SEQ ID NO: 2143 - protein, 124 aa, Homo Sapiens
MAQSLALSLLILVLAFGIPRTQGSDGGAQDCCLKYSQRKIPAKVVRSYRKQEPSLGCSIPAILFLPRKRSQAELCADPKELWVQQLMQHLDKTPSPQKPAQGCRKDRGASKTGKKGKGSKGCKR

SEQ ID NO: 2144 - protein, 134 aa, Homo Sapiens
MAQSLALSLLILVLAFGIPRTQGSDGGAQDCCLKYSQRKIPAKVVRSYRKQEPSLGCSIPAILFLPRKRSQAELCADPKELWVQQLMQHLDKTPSPQKPAQGCRKDRGASKTGKKGKGSKGCKRTERSQTPKGP

SEQ ID NO: 2145 - protein, 93 aa, Homo Sapiens
MDRLQTALLVVLVLLAVALQATEAGPYGANMEDSVCCRDYVRYRLPLRVVKHFYWTSDSCPRPGVVLLTFRDKEICADPRVPWVKMILNKLSQ

SEQ ID NO: 2146 - protein, 13 aa, Homo Sapiens
FETNSECSKPGVM

SEQ ID NO: 2147 - protein, 137 aa, Homo Sapiens
MKVSVAALSCLMLVTALGSQARVTKDAETEFMMSKLPLENPVLLDMLWRRKIGPQMTLSHAAGFHATSADCCISYTPRSIPCSLLESYFETNSECSKPGVIFLTKKGRRFCANPSDKQVQVCMRMLKLDTRIKTRKN

SEQ ID NO: 2148 - protein, 120 aa, Homo Sapiens
MKVSVAALSCLMLVTALGSQARVTKDAETEFMMSKLPLENPVLLDRFHATSADCCISYTPRSIPCSLLESYFETNSECSKPGVIFLTKKGRRFCANPSDKQVQVCMRMLKLDTRIKTRKN

SEQ ID NO: 2149 - protein, 119 aa, Homo Sapiens
MAGLMTIVTSLLFLGVCAHHIIPTGSVVIPSPCCMFFVSKRIPENRVVSYQLSSRSTCLKAGVIFTTKKGQQFCGDPKQEWVQRYMKNLDAKQKKASPRARAVAVKGPVQRYPGNQTTC

SEQ ID NO: 2150 - protein, 119 aa, Homo Sapiens; identical to SEQ ID NO: 2149

SEQ ID NO: 2151 - protein, 150 aa, Homo Sapiens
MNLWLLACLVAGFLGAWAPAVHTQGVFEDCCLAYHYPIGWAVLRRAWTYRIQEVSGSCNLPAAIFYLPKRHRKVCGNPKSREVQRAMKLLDARNKVFAKLHHNTQTFQAGPHAVKKLSSGNSKLSSSKFSNPISSSKRNVSLLISANSGK

SEQ ID NO: 2152 - protein, 150 aa, Homo Sapiens
MNLWLLACLVAGFLGAWAPAVHTQGVFEDCCLAYHYPIGWAVLRRAWTYRIQEVSGSCNLPAAIFYLPKRHRKVCGNPKSREVQRAMKLLDARNKVFAKLHHNTQTFQAGPHAVKKLSSGNSKLSSSKFSNPISSSKRNVSLLISANSGL

SEQ ID NO: 2153 - protein, 149 aa, Homo Sapiens
MNLWLLACLVAGFLGAWAPAVHTQGVFEDCCLAYHYPIGWAVLRRAWTYRIQEVSGSCNLPAAIFYLPKRHRKVCGNPKSREVQRAMKLLDARNKVFAKLHHNTQTFQGPHAVKKLSSGNSKLSSSKFSNPISSSKRNVSLLISANSGL

SEQ ID NO: 2154 - protein, 84 aa, Homo Sapiens
MNLWLLACLVAGFLGAWAPAVHTQGVFEDCCLAYHYPIGWAVLRRAWTYRIQEVSGSCNLPAAIRPSCCKEVEFWKLQVIIVQV

SEQ ID NO: 2155 - protein, 94 aa, Homo Sapiens
MMGLSLASAVLLASLLSLHLGTATRGSDISKTCCFQYSHKPLPWTWVRSYEFTSNSCSQRAVIFTTKRGKKVCTHPRKKWVQKYISLLKTPKQL

SEQ ID NO: 2156 - protein, 94 aa, Homo Sapiens; identical to SEQ ID NO: 2155

SEQ ID NO: 2157 - protein, 112 aa, Homo Sapiens
MKGPPTFCSLLLLSLLLSPDPTAAFLLPPSTACCTQLYRKPLSDKLLRKVIQVELQEADGDCHLQAFVLHLAQRSICIHPQNPSLSQWFEHQERKLHGTLPKLNFGMLRKMG

SEQ ID NO: 2158 - protein, 80 aa, Homo Sapiens
MCRIQRADGDCDLAAVILHVKRRRICVSPHNHTVKQWMKVQAAKKNGKGNVCHRKKHHGKRNSNRAHQGKHETYGHKTPY

SEQ ID NO: 2159 - protein, 127 aa, Homo Sapiens
MQQRGLAIVALAVCAALHASEAILPIASSCCTEVSHHISRRLLERVNMCRIQRADGDCDLAAVILHVKRRRICVSPHNHTVKQWMKVQAAKKNGKGNVCHRKKHHGKRNSNRAHQGKHETYGHKTPY

SEQ ID NO: 2160 - protein, 127 aa, Homo Sapiens; identical to SEQ ID NO: 2159

SEQ ID NO: 2161 - protein, 92 aa, Homo Sapiens
MQVSTAALAVLLCTMALCNQFSASLAADTPTACCFSYTSRQIPQNFIADYFETSSQCSKPGVIFLTKRSRQVCADPSEEWVQKYVSDLELSA

SEQ ID NO: 2162 - protein, 93 aa, Homo Sapiens
MQVSTAALAVLLCTMALCNQVLSAPLAADTPTACCFSYTSRQIPQNFIADYFETSSQCSKPSVIFLTKRGRQVCADPSEEWVQKYVSDLELSA

SEQ ID NO: 2163 - protein, 92 aa, Homo Sapiens
MKLCVTVLSLLMLVAAFCSPALSAPMGSDPPTACCFSYTARKLPRNFVVDYYETSSLCSQPAVVFQTKRSKQVCADPSESWVQEYVYDLELN

SEQ ID NO: 2164 - protein, 52 aa, Homo Sapiens
MKLCVTVLSLLMLVAAFCSPALSAPNSKPKEASKSVLIPVNPGSRSTCMTWN

SEQ ID NO: 2165 - protein, 47 aa, Homo Sapiens
MKLCVTVLSLLVLVAAFCSLALSAPKASKSALTPVSPGSRSTCMTWN

SEQ ID NO: 2166 - protein, 64 aa, Homo Sapiens
MKLCVTVLSLLVLVAAFCSLALSAPMGSDPPTACCFSYTARKLPRNFVVDYYETSSLCSQPAVV

SEQ ID NO: 2167 - protein, 64 aa, Homo Sapiens; identical to SEQ ID NO: 2166

SEQ ID NO: 2168 - protein, 96 aa, Homo Sapiens
MKLCVTVLSLLVLVAAFCSLALSAPMGSDPPTACCFSYTARKLPRNFVVDYYETSSLCSQPAVVAAPGRIPSTRAAPHGPWSGRGRCLPQARDKAR

SEQ ID NO: 2169 - protein, 86 aa, Homo Sapiens
MKLCVTVLSLLVLVAAFCSLALSAPMGSDPPTACCFSYTARKLPRNFVVDYYETSSLCSQPAVVAAPHGPWSGRGRCLPQARDKAR

SEQ ID NO: 2170 - protein, 103 aa, Homo Sapiens
MKLCVTVLSLLVLVAAFCSLALSAPMGSDPPTACCFSYTARKLPRNFVVDYYETSSLCSQPAVVEWKLQGVCFQCCSGKDPIHQSCPTWTMVRQRKMPTTGKG

SEQ ID NO: 2171 - protein, 92 aa, Homo Sapiens
MKLCVTVLSLLVLVAAFCSLALSAPMGSDPPTACCFSYTARKLPRNFVVDYYETSSLCSQPAVVFQTKRGKQVCADPSESWVQEYVYDLELN

SEQ ID NO: 2172 - protein, 87 aa, Homo Sapiens
MKLCVTVLSLLVLVAAFCSLALSAPMGSDPPTACCFSYTARKLPRNFVVDYYETSSLCSQPAVVGKQVCADPSESWVQEYVYDLELN

SEQ ID NO: 2173 - protein, 103 aa, Homo Sapiens
MKLCVTVLSLLVLVAAFCSLALSAPMGSDPPTACCFSYTARKLPRNFVVDYYETSSLCSQPAVVYRESASSAAPGRIPSTRAAPHGPWSGRGRCLPQARDKAR

SEQ ID NO: 2174 - protein, 68 aa, Homo Sapiens
MKLCVTVLSLLVLVAAFCSLALSAPTKSSEWKLQGVCFQCCSGKDPIHQSCPTWTMVRQRKMPTTGKG

SEQ ID NO: 2175 - protein, 91 aa, Homo Sapiens
MKVSAAALAVILIATALCAPASASPYSSDTTPCCFAYIARPLPRAHIKEYFYTSGKCSNPAVVFVTRKNRQVCANPEKKWVREYINSLEMS

SEQ ID NO: 2176 - protein, 91 aa, Homo Sapiens; identical to SEQ ID NO: 2175

SEQ ID NO: 2177 - protein, 150 aa, Homo Sapiens
  misc_feature (1)..(1): Xaa can be any naturally occurring amino acid
XAALAVILIATALCAPASASPYSSDTTPCCFAYIARPLPRAHIKEYFYTSGKCSNPAVVHRSRMPKREGQQVWQDFLYDSRLNKGKLCHPKEPPSVCQPREEMGSGVHQLFGDELGWRVLEPELTQICLFLLALVLAWEASPHYPTPPAP

SEQ ID NO: 2178 - protein, 47 aa, Homo Sapiens
MKASAALLCLLLTAAAFSPQGLAQPASRPNWTRRSVLTPHRSGSRTL

SEQ ID NO: 2179 - protein, 81 aa, Homo Sapiens
MKASAALLCLLLTAAAFSPQGLAQPERPRTHPQWTFLLVVSLQLGLILQLPAATDLSIRKSLSRGWRATEGPPVATVPGKL

SEQ ID NO: 2180 - protein, 99 aa, Homo Sapiens
MKASAALLCLLLTAAAFSPQGLAQPVGINTSTTCCYRFINKKIPKQRLESYRRTTSSHCPREAVIFKTKLDKEICADPTQKWVQDFMKHLDKKTQTPKL

SEQ ID NO: 2181 - protein, 99 aa, Homo Sapiens
MKVSAALLCLLLMAATFSPQGLAQPDSVSIPITCCFNVINRKIPIQRLESYTRITNIQCPKEAVIFKTKRGKEVCADPKERWVRDSMKHLDQIFQNLKP

SEQ ID NO: 2182 - protein, 68 aa, Homo Sapiens [sequence omitted]

SEQ ID NO: 2183 - protein, 4 aa, Homo Sapiens
MSLC

SEQ ID NO: 2184 - protein, 154 aa, Homo Sapiens
MSLCEDMLLCNYRKCRIKLSGYAWVTACSHIFCDQHGSGEFSRSPAICPACNSTLSGKLDIVRTELSPSEEYKAMVLAGLRPEIVLDISSRALAFWTYQVHQERLYQEYNFSKAEGHLKQMEKIYTQQIQSKDVELTSMKGEVTSMKKVLEEYK

SEQ ID NO: 2185 - protein, 277 aa, Homo Sapiens
MSLCEDMLLCNYRKCRIKLSGYAWVTACSHIFCDQHGSGEFSRSPAICPACNSTLSGKLDIVRTELSPSEEYKAMVLAGLRPEIVLDISSRALAFWTYQVHQERLYQEYNFSKAEGHLKQMEKIYTQQIQSKDVELTSMKGEVTSMKKVLEEYKKKFSDISEKLMERNRQYQKLQGLYDSLRLRNITIANHEGTLEPSMIAQSGVLGFPLGNNSKFPLDNTPVRNRGDGDGDFQFRPFFAGSPTAPEPSNSFFSFVSPSRELEQQQVSSRAFKVKRI

SEQ ID NO: 2186 - protein, 277 aa, Homo Sapiens; identical to SEQ ID NO: 2185

SEQ ID NO: 2187 - protein, 277 aa, Homo Sapiens; identical to SEQ ID NO: 2185

SEQ ID NO: 2188 - protein, 277 aa, Homo Sapiens; identical to SEQ ID NO: 2185

SEQ ID NO: 2189 - protein, 277 aa, Homo Sapiens; identical to SEQ ID NO: 2185

SEQ ID NO: 2190 - protein, 277 aa, Homo Sapiens; identical to SEQ ID NO: 2185

SEQ ID NO: 2191 - protein, 102 aa, Homo Sapiens
MSLCEDMLLCNYRKCRIKLSGYAWVTACSHIFCDQHGSGEFSRSPAICPACNSTLSGKLDIVRTELSPSEEYKAMVLAGLRPEIVLDISSRALAFWTYQYFL

SEQ ID NO: 2192 - protein, 64 aa, Homo Sapiens
  misc_feature (1)..(1): Xaa can be any naturally occurring amino acid
XEFSRSPAICPACNSTLSGKLDIVRTELSPSEEYKAMVLAGLRPEIVLDISSRALAFWTYQYFL

SEQ ID NO: 2193 - protein, 31 aa, Homo Sapiens
  misc_feature (1)..(1): Xaa can be any naturally occurring amino acid
XTLAPERWPSGHIRLVSNSWVQAILPPQPPE

SEQ ID NO: 2194 - protein, 526 aa, Homo Sapiens
MASGPHSTATAAAAASSAAPSAGGSSSGTTTTTTTTTGGILIGDRLYSEVSLTIDHSLIPEERLSPTPSMQDGLDLPSETDLRILGCELIQAAGILLRLPQVAMATGQVLFHRFFYSKSFVKHSFEIVAMACINLASKIEEAPRRIRDVINVFHHLRQLRGKRTPSPLILDQNYINTKNQVIKAERRVLKELGFCVHVKHPHKIIVMYLQVLECERNQTLVQTAWNYMNDSLRTNVFVRFQPETIACACIYLAARALQIPLPTRPHWFLLFGTTEEEIQEICIETLRLYTRKKPNYELLEKEVEKRKVALQEAKLKAKGLNPDGTPALSTLGGFSPASKPSSPREVKAEEKSPISINVKTVKKEPEDRQQASKSPYNGVRKDSKRSRNSRSASRSRSRTRSRSRSHTPRRHYNNRRSRSGTYSSRSRSRSRSHSESPRRHHNHGSPHLKAKHTRDDLKSSNRHGHKRKKSRSRSQSKSRDHSDAAKKHRHERGHHRDRRERSRSFERSHKSKHHGGSRSGHGRHRR

SEQ ID NO: 2195 - protein, 428 aa, Homo Sapiens
MASGPHSTATAAAAASSAAPSAGGSSSGTTTTTTTTTGGILIGDRLYSEVSLTIDHSLIPEERLSPTPSMQDGLDLPSETDLRILGCELIQAAGILLRLPQVAMATGQVLFHRFFYSKSFVKHSFEIVAMACINLASKIEEAPRRIRDVINVFHHLRQLRGKRTPSPLILDQNYINTKNQVIKAERRVLKELGFCVHVKHPHKIIVMYLQVLECERNQTLVQTAWNYMNDSLRTNVFVRFQPETIACACIYLAARALQIPLPTRPHWFLLFGTTEEEIQEICIETLRLYTRKKPNYELLEKEVEKRKVALQEAKLKAKGLNPDGTPALSTLGGFSPASKPSSPREVKAEEKSPISINVKTVKKEPEDRQQASKSPYNGVRKDSKRSRNSRSASRSRSRTRSRSRSHTPRRQDEVLLRCPGRSRTPGLK

SEQ ID NO: 2196 - protein, 232 aa, Homo Sapiens
MASGPHSTATAAAAASSAAPSAGGSSSGTTTTTTTTTGGILIGDRLYSEVSLTIDHSLIPEERLSPTPSMQDGLDLPSETDLRILGCELIQAAGILLRLPQVAMATGQVLFHRFFYSKSFVKHSFEIVAMACINLASKIEEAPRRIRDVINVFHHLRQLRGKRTPSPLILDQNYINTKNQVIKAERRVLKELGFCVHVKHPHKIIVMYLQVLECERNQTLVQTAWVVHDGKS

SEQ ID NO: 2197 - protein, 172 aa, Homo Sapiens
MASGPHSTATAAAAASSAAPSAGGSSSGTTTTTTTTTGGILIGDRLYSEVSLTIDHSLIPEERLSPTPSMQDGLDLPSETDLRILGCELIQAAGILLRLPQVAMATGQVLFHRFFYSKSFVKHSFEIVAMACINLASKIEEAPRRIRDVINVFHHLRQLRGKSDQLHLPKPG

SEQ ID NO: 2198 - protein, 172 aa, Homo Sapiens; identical to SEQ ID NO: 2197

SEQ ID NO: 2199 - protein, 172 aa, Homo Sapiens; identical to SEQ ID NO: 2197

SEQ ID NO: 2200 - protein, 172 aa, Homo Sapiens; identical to SEQ ID NO: 2197

SEQ ID NO: 2201 - protein, 172 aa, Homo Sapiens; identical to SEQ ID NO: 2197

SEQ ID NO: 2202 - protein, 59 aa, Homo Sapiens
  misc_feature (1)..(1): Xaa can be any naturally occurring amino acid
XRKKPNYELLEKEVEKRKVALQEAKLKAKGLNPDGTPALSTLGGFSPASKPCKMYLELK

SEQ ID NO: 2203 - protein, 520 aa, Homo Sapiens
MAAAAAAAGAAGSAAPAAAAGAPGSGGAPSGSQGVLIGDRLYSGVLITLENCLLPDDKLRFTPSMSSGLDTDTETDLRVVGCELIQAAGILLRLPQVAMATGQVLFQRFFYTKSFVKHSMEHVSMACVHLASKIEEAPRRIRDVINVFHRLRQLRDKKKPVPLLLDQDYVNLKNQIIKAERRVLKELGFCVHVKHPHKIIVMYLQVLECERNQHLVQTSWNYMNDSLRTDVFVRFQPESIACACIYLAARTLEIPLPNRPHWFLLFGATEEEIQEICLKILQLYARKKVDLTHLEGEVEKRKHAIEEAKAQARGLLPGGTQVLDGTSGFSPAPKLVESPKEGKGSKPSPLSVKNTKRRLEGAKKAKADSPVNGLPKGRESRSRSRSREQSYSRSPSRSASPKRRKSDSGSTSGGSKSQSRSRSRSDSPPRQAPRSAPYKGSEIRGSRKSKDCKYPQKPHKSRSRSSSRSRSRSRERADNPGKYKKKSHYYRDQRRERSRSYERTGRRYERDHPGHSRHRR

SEQ ID NO: 2204 - protein, 236 aa, Homo Sapiens
MAAAAAAAGAAGSAAPAAAAGAPGSGGAPSGSQGVLIGDRLYSGVLITLENCLLPDDKLRFTPSMSSGLDTDTETDLRVVGCELIQAAGILLRLPQVAMATGQVLFQRFFYTKSFVKHSMEHVSMACVHLASKIEEAPRRIRDVINVFHRLRQLRDKKKPVPLLLDQDYVNLKNQIIKAERRVLKELGFCVHVKHPHKIIVMYLQVLECERNQHLVQTSWVASEDPLLKWDSWQRL

SEQ ID NO: 2205 - protein, 227 aa, Homo Sapiens
MAAAAAAAGAAGSAAPAAAAGAPGSGGAPSGSQGVLIGDRLYSGVLITLENCLLPDDKLRFTPSMSSGLDTDTETDLRVVGCELIQAAGILLRLPQVAMATGQVLFQRFFYTKSFVKHSMEHVSMACVHLASKIEEAPRRIRDVINVFHRLRQLRDKKKPVPLLLDQDYVNLKNQIIKAERRVLKELGFCVHVKHPHKIIVMYLQVLECERNQHLVQTSWVASEGIT

SEQ ID NO: 2206 - protein, 226 aa, Homo Sapiens
MAAAAAAAGAAGSAAPAAAAGAPGSGGAPSGSQGVLIGDRLYSGVLITLENCLLPDDKLRFTPSMSSGLDTDTETDLRVVGCELIQAAGILLRLPQVAMATGQVLFQRFFYTKSFVKHSMEHVSMACVHLASKIEEAPRRIRDVINVFHRLRQLRDKKKPVPLLLDQDYVNLKNQIIKAERRVLKELGFCVHVKHPHKIIVMYLQVLECERNQHLVQTSWVASEGK

SEQ ID NO: 2207 - protein, 180 aa, Homo Sapiens
MAAAAAAAGAAGSAAPAAAAGAPGSGGAPSGSQGVLIGDRLYSGVLITLENCLLPDDKLRFTPSMSSGLDTDTETDLRVVGCELIQAAGILLRLPQVRARPRASGPGGHGYRAGVVPAVLLYQVLREALHGACVNGLCPPGFQDRRGPKTHTGRHQCVSPPSTAERQKEARASTTGSRLC

SEQ ID NO: 2208 - protein, 86 aa, Homo Sapiens
MATGQVLFQRFFYTKSFVKHSMEHVSMACVHLASKIEEAPRRIRDVINVFHRLRQLRDKKKPVPLLLDQDYVNLKNQIIKAERRVL

SEQ ID NO: 2209 - protein, 347 aa, Homo Sapiens [sequence omitted]

SEQ ID NO: 2210 - protein, 46 aa, Homo Sapiens
  misc_feature (1)..(1): Xaa can be any naturally occurring amino acid
XEEAPRRIRDVINVFHRLRQLRDKKPCALSLAGSPCLYYWIKIMLI

SEQ ID NO: 2211 - protein, 55 aa, Homo Sapiens
MERASCLLLLLLPLVHVSATTPEPCELDDEDFRCVCNFSEPQPDWSEAFQCVSAV

SEQ ID NO: 2212 - protein, 81 aa, Homo Sapiens
MERASCLLLLLLPLVHVSATTPEPCELDDEDFRCVCNFSEPQPDWSEAFQCVSAVEVEIHAGGLNLEPFLKRVDADADPRQ

SEQ ID NO: 2213 - protein, 213 aa, Homo Sapiens
MERASCLLLLLLPLVHVSATTPEPCELDDEDFRCVCNFSEPQPDWSEAFQCVSAVEVEIHAGGLNLEPFLKRVDADADPRQYADTVKALRVRRLTVGAAQVPAQLLVGALRVLAYSRLKELTLEDLKITGTMPPLPLEATGLALSSLRLRNVSWATGRSWLAELQQWLKPGLKVLSIAQAHSPAFSCEQVRAFPALTSLDLSDNPGLGERGLM

SEQ ID NO: 2214 - protein, 375 aa, Homo Sapiens
MERASCLLLLLLPLVHVSATTPEPCELDDEDFRCVCNFSEPQPDWSEAFQCVSAVEVEIHAGGLNLEPFLKRVDADADPRQYADTVKALRVRRLTVGAAQVPAQLLVGALRVLAYSRLKELTLEDLKITGTMPPLPLEATGLALSSLRLRNVSWATGRSWLAELQQWLKPGLKVLSIAQAHSPAFSCEQVRAFPALTSLDLSDNPGLGERGLMAALCPHKFPAIQNLALRNTGMETPTGVCAALAAAGVQPHSLDLSHNSLRATVNPSAPRCMWSSALNSLNLSFAGLEQVPKGLPAKLRVLDLSCNRLNRAPQPDELPEVDNLTLDGNPFLVPGTALPHEGSMNSGVVPACARSTLSVGVSGTLVLLQGARGFA

SEQ ID NO: 2215 - protein, 375 aa, Homo Sapiens; identical to SEQ ID NO: 2214

SEQ ID NO: 2216 - protein, 72 aa, Homo Sapiens
MLLEPGRGCCALAILLAIVDIQSGETGNYTVTGLKQRQHLEFSHNEGTLSSGFLQEKVWVMLVTSLVALQAL

SEQ ID NO: 2217 - protein, 125 aa, Homo Sapiens
MLLEPGRGCCALAILLAIVDIQSGETGNYTVTGLKQRQHLEFSHNEGTLSSGFLQEKVWVMLVTSLVALQGMSKRAVSTPSNEGAIIFLPPWLFSRRRRLERMSRGREKCYSSPGYPQESSNQFH

SEQ ID NO: 2218 - protein, 181 aa, Homo Sapiens
MLLEPGRGCCALAILLAIVDIQSGGCINITSSASQEGTRLNLICTVWHKKEEAEGFVVFLCKDRSGDCSPETSLKQLRLKRDPGIDGVGEISSQLMFTISQVTPLHSGTYQCCARSQKSGIRLQGHFFSILFTETGNYTVTGLKQRQHLEFSHNEGTLSSGFLQEKVWVMLVTSLVALQAL

SEQ ID NO: 2219 - protein, 181 aa, Homo Sapiens; identical to SEQ ID NO: 2218

SEQ ID NO: 2220 - protein, 234 aa, Homo Sapiens
MLLEPGRGCCALAILLAIVDIQSGGCINITSSASQEGTRLNLICTVWHKKEEAEGFVVFLCKDRSGDCSPETSLKQLRLKRDPGIDGVGEISSQLMFTISQVTPLHSGTYQCCARSQKSGIRLQGHFFSILFTETGNYTVTGLKQRQHLEFSHNEGTLSSGFLQEKVWVMLVTSLVALQGMSKRAVSTPSNEGAIIFLPPWLFSRRRRLERMSRGREKCYSSPGYPQESSNQFH

SEQ ID NO: 2221 - protein, 163 aa, Homo Sapiens
MRKGRKVPMYVPGVLRTYPKAKLEETCEGRNSCVSCFNVSVVNTTCFWIECKDESYCSHNSTVSDCQVGNTTDFCSVSTATPVPTANSTAKPTVQPSPSTTSKTVTTSGTTNNTVTPTSQPVRKSTFDAASFIGGIVLVLGVQAVIFFLYKFCKSKERNYHTL

SEQ ID NO: 2222 - protein, 184 aa, Homo Sapiens
MSRLSRSLLWAATCLGVLCVLSADKNTTQHPNVTTLAPISNVTSAPVTSLPLVTTPAPETCEGRNSCVSCFNVSVVNTTCFWIECKDESYCSHNSTVSDCQVGNTTDFCSAKPTVQPSPSTTSKTVTTSGTTNNTVTPTSQPVRKSTFDAASFIGGIVLVLGVQAVIFFLYKFCKSKERNYHTL

SEQ ID NO: 2223 - protein, 157 aa, Homo Sapiens
MSRLSRSLLWAATCLGVLCVLSADKNTTQHPNVTTLAPISNVTSAPVTSLPLVTTPAPETCEGRNSCVSCFNVSVVNTTCFWIECKDESYCSHNSTVSDCQVGNTTDFCSVSTATPVPTANSTAKPTVQPSPSTTSKTVTTSEIRCHTRNYIPDLKK

SEQ ID NO: 2224 - protein, 189 aa, Homo Sapiens
MSRLSRSLLWAATCLGVLCVLSADKNTTQHPNVTTLAPISNVTSAPVTSLPLVTTPAPETCEGRNSCVSCFNVSVVNTTCFWIECKDESYCSHNSTVSDCQVGNTTDFCSVSTATPVPTANSTAKPTVQPSPSTTSKTVTTSGTTNNTVTPTSQPVRKSTFDAASFIGGIVLVLEIRCHTRNYIPDLKK

SEQ ID NO: 2225 - protein, 197 aa, Homo Sapiens
MSRLSRSLLWAATCLGVLCVLSADKNTTQHPNVTTLAPISNVTSAPVTSLPLVTTPAPETCEGRNSCVSCFNVSVVNTTCFWIECKDESYCSHNSTVSDCQVGNTTDFCSVSTATPVPTANSTAKPTVQPSPSTTSKTVTTSGTTNNTVTPTSQPVRKSTFDAASFIGGIVLVLGVQAVIFFLYKFCKSKERNYHTL

SEQ ID NO: 2226 - protein, 178 aa, Homo Sapiens
MSRLSRSLLWAATCLGVLCVLSADKNTTQHPNVTTLAPISNVTSAPVTSLPLVTTPAPETCEGRNSCVSCFNVSVVNTTCFWIECKDESYCSHNSTVSDCQVGNTTDFCSVSTATPVPTANSTGTTNNTVTPTSQPVRKSTFDAASFIGGIVLVLGVQAVIFFLYKFCKSKERNYHTL

SEQ ID NO: 2227 - protein, 437 aa, Homo Sapiens
MSAVLLLALLGFILPLPGVQALLCQFGTVQHVWKVSDLPRQWTPKNTSCDSGLGCQDTLMLIESGPQVSLVLSKGCTEAKDQEPRVTEHRMGPGLSLISYTFVCRQEDFCNNLVNSLPLWAPQPPADPGSLRCPVCLSMEGCLEGTTEEICPKGTTHCYDGLLRLRGGGIFSNLRVQGCMPQPVCNLLNGTQEIGPVGMTENCDMKDFLTCHRGTTIMTHGNLAQEPTDWTTSNTEMCEVGQVCQETLLLLDVGLTSTLVGTKGCSTVGAQNSQKTTIHSAPPGVLVASYTHFCSSDLCNSASSSSVLLNSLPPQAAPVPGDRQCPTCVQPLGTCSSGSPRMTCPRGATHCYDGYIHLSGGGLSTKMSIQGCVAQPSSFLLNHTRQIGIFSAREKRDVQPPASQHEGGGAEGLESLTWGVGLALAPALWWGVVCPSC

SEQ ID NO: 2228 - protein, 145 aa, Homo Sapiens
MSAVLLLALLGFILPLPGVQALLCQFGTVQHVWKVSDLPRQWTPKNTSCDSGLGCQDTLMLIESGPQVSLVLSKGCTEAKDQEPRVTEHRMGPGLSLISYTFVCRQEDFCNNLVNSLPLWAPQPPADPMMGAAEGPFGKAEQVDS

SEQ ID NO: 2229 - protein, 139 aa, Homo Sapiens
MSAVLLLALLGFILPLPGVQALLCQFGTVQHVWKVSDLPRQWTPKNTSCDSGLGCQDTLMLIESGPQVSLVLSKGCTEAKDQEPRVTEHRMGPGLSLISYTFVCRQEDFCNNLVNSLPLWAPQPPAGACGRVGRRGRGC

SEQ ID NO: 2230 - protein, 286 aa, Homo Sapiens
MLLLFLLFEGLCCPGENTAAPQALQSYHLAAEEQLSFRMLQTSSFANHSWAHSEGSGWLGDLQTHGWDTVLGTIRFLKPWSHGNFSKQELKNLQSLFQLYFHSFIQIVQASAGQFQLELKPEAWLSCGPSPGPGRLQLVCHVSGFYPKPVWVMWMRGEQEQRGTQRGDVLPNADETWYLRATLDVAAGEAAGLSCRVKHSSLGGHDLIIHWGGYSIFLILICLTVIVTLVILVVVDSRLKKQSPVFLMGANTQDTKNSRHQFCLAQVSWIKNRVLKKWKTRLNQLW

SEQ ID NO: 2231 - protein, 298 aa, Homo Sapiens
MLLLFLLFEGLCCPGENTAAPQALQSYHLAAEEQLSFRMLQTSSFANHSWAHSEGSGWLGDLQTHGWDTVLGTIRFLKPWSHGNFSKQELKNLQSLFQLYFHSFIQIVQASAGQFQLELKPEAWLSCGPSPGPGRLQLVCHVSGFYPKPVWVMWMRGEQEQRGTQRGDVLPNADETWYLRATLDVAAGEAAGLSCRVKHSSLGGHDLIIHWGGYSIFLILICLTVIVTLVILVVVDSRLKKQSSNKNILSPHTPSPVFLMGANTQDTKNSRHQFCLAQVSWIKNRVLKKWKTRLNQLW

SEQ ID NO: 2232 - protein, 231 aa, Homo Sapiens
MLLLFLLFEGLCCPGENTAAPQALQSYHLAAEEQLSFRMLQTSSFANHSWAHSEGSGWLGDLQTHGWDTVLGTIRFLKPWSHGNFSKQELKNLQSLFQLYFHSFIQIVQASAGQFQLELKPEAWLSCGPSPGPGRLQLVCHVSGFYPKPVWVMWMRGGYSIFLILICLTVIVTLVILVVVDSRLKKQSPVFLMGANTQDTKNSRHQFCLAQVSWIKNRVLKKWKTRLNQLW

SEQ ID NO: 2233 - protein, 290 aa, Homo Sapiens
MLLLFLLFEGLCCPGENTAAPQALQSYHLAAEEQLSFRMLQTSSFANHSWAHSEGSGWLGDLQTHGWDTVLGTIRFLKPWSHGNFSKQELKNLQSLFQLYFHSFIQIVQASAGQFQLEYPFEIQILAGCRMNAPQIFLNMAYQGSDFLSFQGISWEPSPGAGIRAQNICKVLNRYLDIKEILQSLLGHTCPRFLAGLMEAGESELKRKVKPEAWLSCGPSPGPGRLQLVCHVSGFYPKPVWVMWMRGEQEQRGTQRGDVLPNADETWWIFHLSHPDLFDCDSYPGHIGCS

SEQ ID NO: 2234 - protein, 388 aa, Homo Sapiens
MLLLFLLFEGLCCPGENTAAPQALQSYHLAAEEQLSFRMLQTSSFANHSWAHSEGSGWLGDLQTHGWDTVLGTIRFLKPWSHGNFSKQELKNLQSLFQLYFHSFIQIVQASAGQFQLEYPFEIQILAGCRMNAPQIFLNMAYQGSDFLSFQGISWEPSPGAGIRAQNICKVLNRYLDIKEILQSLLGHTCPRFLAGLMEAGESELKRKVKPEAWLSCGPSPGPGRLQLVCHVSGFYPKPVWVMWMRGEQEQRGTQRGDVLPNADETWYLRATLDVAAGEAAGLSCRVKHSSLGGHDLIIHWGGYSIFLILICLTVIVTLVILVVVDSRLKKQSSNKNILSPHTPSPVFLMGANTQDTKNSRHQFCLAQVSWIKNRVLKKWKTRLNQLW

SEQ ID NO: 2235 - protein, 376 aa, Homo Sapiens
MLLLFLLFEGLCCPGENTAAPQALQSYHLAAEEQLSFRMLQTSSFANHSWAHSEGSGWLGDLQTHGWDTVLGTIRFLKPWSHGNFSKQELKNLQSLFQLYFHSFIQIVQASAGQFQLEYPFEIQILAGCRMNAPQIFLNMAYQGSDFLSFQGISWEPSPGAGIRAQNICKVLNRYLDIKEILQSLLGHTCPRFLAGLMEAGESELKRKVKPEAWLSCGPSPGPGRLQLVCHVSGFYPKPVWVMWMRGEQEQRGTQRGDVLPNADETWYLRATLDVAAGEAAGLSCRVKHSSLGGHDLIIHWGGYSIFLILICLTVIVTLVILVVVDSRLKKQSPVFLMGANTQDTKNSRHQFCLAQVSWIKNRVLKKWKTRLNQLW

SEQ ID NO: 2236 - protein, 321 aa, Homo Sapiens
MLLLFLLFEGLCCPGENTAAPQALQSYHLAAEEQLSFRMLQTSSFANHSWAHSEGSGWLGDLQTHGWDTVLGTIRFLKPWSHGNFSKQELKNLQSLFQLYFHSFIQIVQASAGQFQLEYPFEIQILAGCRMNAPQIFLNMAYQGSDFLSFQGISWEPSPGAGIRAQNICKVLNRYLDIKEILQSLLGHTCPRFLAGLMEAGESELKRKVKPEAWLSCGPSPGPGRLQLVCHVSGFYPKPVWVMWMRGGYSIFLILICLTVIVTLVILVVVDSRLKKQSPVFLMGANTQDTKNSRHQFCLAQVSWIKNRVLKKWKTRLNQLW

SEQ ID NO: 2237 - protein, 289 aa, Homo Sapiens
MLLLFLLFEGLCCPGENTADPFEIQILAGCRMNAPQIFLNMAYQGSDFLSFQGISWEPSPGAGIRAQNICKVLNRYLDIKEILQSLLGHTCPRFLAGLMEAGESELKRKVKPEAWLSCGPSPGPGRLQLVCHVSGFYPKPVWVMWMRGEQEQRGTQRGDVLPNADETWYLRATLDVAAGEAAGLSCRVKHSSLGGHDLIIHWGGYSIFLILICLTVIVTLVILVVVDSRLKKQSSNKNILSPHTPSPVFLMGANTQDTKNSRHQFCLAQVSWIKNRVLKKWKTRLNQLW

SEQ ID NO: 2238 - protein, 101 aa, Homo Sapiens
MLLLFLLFEGLCCPGENTAVKPEAWLSCGPSPGPGRLQLVCHVSGFYPKPVWVMWMRGEQEQRGTQRGDVLPNADETWWIFHLSHPDLFDCDSYPGHIGCS

SEQ ID NO: 2239 - protein, 187 aa, Homo Sapiens
MLLLFLLFEGLCCPGENTAVKPEAWLSCGPSPGPGRLQLVCHVSGFYPKPVWVMWMRGEQEQRGTQRGDVLPNADETWYLRATLDVAAGEAAGLSCRVKHSSLGGHDLIIHWGGYSIFLILICLTVIVTLVILVVVDSRLKKQSPVFLMGANTQDTKNSRHQFCLAQVSWIKNRVLKKWKTRLNQLW

SEQ ID NO: 2240 - protein, 199 aa, Homo Sapiens
MLLLFLLFEGLCCPGENTAVKPEAWLSCGPSPGPGRLQLVCHVSGFYPKPVWVMWMRGEQEQRGTQRGDVLPNADETWYLRATLDVAAGEAAGLSCRVKHSSLGGHDLIIHWGGYSIFLILICLTVIVTLVILVVVDSRLKKQSSNKNILSPHTPSPVFLMGANTQDTKNSRHQFCLAQVSWIKNRVLKKWKTRLNQLW

SEQ ID NO: 2241 - protein, 132 aa, Homo Sapiens
MLLLFLLFEGLCCPGENTAVKPEAWLSCGPSPGPGRLQLVCHVSGFYPKPVWVMWMRGGYSIFLILICLTVIVTLVILVVVDSRLKKQSPVFLMGANTQDTKNSRHQFCLAQVSWIKNRVLKKWKTRLNQLW

SEQ ID NO: 2242 - protein, 144 aa, Homo Sapiens
MLLLFLLFEGLCCPGENTAVKPEAWLSCGPSPGPGRLQLVCHVSGFYPKPVWVMWMRGGYSIFLILICLTVIVTLVILVVVDSRLKKQSSNKNILSPHTPSPVFLMGANTQDTKNSRHQFCLAQVSWIKNRVLKKWKTRLNQLW

SEQ ID NO: 2243 - protein, 60 aa, Homo Sapiens
  misc_feature (1)..(1): Xaa can be any naturally occurring amino acid
XVSGFYPKPVWVMWMRGEQEQRGTQRGDVLPNADETWWIFHLSHPDLFDCDSYPGHIGCS

SEQ ID NO: 2244 - protein, 351 aa, Homo Sapiens
MSFPCKFVASFLLIFNVSSKGAVSKEITNALETWGALGQDINLDIPSFQMSDDIDDIKWEKTSDKKKIAQFRKEKETFKEKDTYKLFKNGTLKIKHLKTDDQDIYKVSIYDTKGKNVLEKIFDLKIQERVSKPKISWTCINTTLTCEVMNGTDPELNLYQDGKHLKLSQRVITHKWTTSLSAKFKCTAGNKVSKESSVEPVSCPEKGLDIYLIIGICGGGSLLMVFVALLVFYITKRKKQRSRRNDEELETRAHRVATEERGRKPHQIPASTPQNPATSQHPPPPPGHRSQAPSHRPPPPGHRVQHQPQKRPPAPSGTQVHQQKGPPLPRPRVQPKPPHGAAENSLSPSSN

SEQ ID NO: 2245 - protein, 133 aa, Homo Sapiens
MSFPCKFVASFLLIFNVSSKGAVSKEITNALETWGALGQDINLDIPSFQMSDDIDDIKWEKTSDKKKIAQFRKEKETFKEKDTYKLFKNGTLKIKHLKTDDQDIYKVSIYDTKGKNVLEKIFDLKIQGKCSFP

SEQ ID NO: 2246 - protein, 294 aa, Homo Sapiens
MERLTLTRTIGGPLLTATLLGKTTINDYQVIRMPFSHLSTYSLVWVMAAVVLCTAQVQVVTQDEREQLYTPASLKCSLQNAQEALIVTWQKKKAVSPENMVTFSENHGVVIQPAYKDKINITQLGLQNSTITFWNITLEDEGCYMCLFNTFGFGKISGTACLTVYVQPIVSLHYKFSEDHLNITCSATARPAPMVFWKVPRSGIENSTVTLSHPNGTTSVTSILHIKDPKNQVGKEVICQVLHLGTVTDFKQTVNKGYWFSVPLLLSIVSLVILLVLISILLYWKRHRNQDREP

SEQ ID NO: 2247 - protein, 150 aa, Homo Sapiens
MERLVIRMPFSHLSTYSLVWVMAAVVLCTAQVQVVTQDEREQLYTPASLKCSLQNAQEALIVTWQKKKAVSPENMVTFSENHGVVIQPAYKDKINITQLGLQNSTITFWNITLEDEGCYMCLFNTFGFGKISGTACLTVYAHSIPSLQIL

SEQ ID NO: 2248 - protein, 269 aa, Homo Sapiens
MERLVIRMPFSHLSTYSLVWVMAAVVLCTAQVQVVTQDEREQLYTPASLKCSLQNAQEALIVTWQKKKAVSPENMVTFSENHGVVIQPAYKDKINITQLGLQNSTITFWNITLEDEGCYMCLFNTFGFGKISGTACLTVYVQPIVSLHYKFSEDHLNITCSATARPAPMVFWKVPRSGIENSTVTLSHPNGTTSVTSILHIKDPKNQVGKEVICQVLHLGTVTDFKQTVNKGYWFSVPLLLSIVSLVILLVLISILLYWKRHRNQDREP

SEQ ID NO: 2249 - protein, 202 aa, Homo Sapiens
MKVQVVTQDEREQLYTPASLKCSLQNAQEALIVTWQKKKAVSPENMVTFSENHGVVIQPAYKDKINITQLGLQNSTITFWNITLEDEGCYMCLFNTFGFGKISGTACLTVYVQPIVSLHYKFSEDHLNITCSATARPAPMVFWKVPRSGIENSTVTLSHPNGTTSVTSILHIKDPKNQVGKEVICQVLHLGTVTDFKQTVNK

SEQ ID NO: 2250 - protein, 62 aa, Homo Sapiens
MPFSHLSTYSLVWVMAAVVLCTAQVQVVTQDEREQLYTPASLKCSLQNAQEALIVTWQKKKA

SEQ ID NO: 2251 - protein, 76 aa, Homo Sapiens
MVTFSENHGVVIQPAYKDKINITQLGLQNSTITFWNITLEDEGCYMCLFNTFGFGKISGTACLTVYAHSIPSLQIL

SEQ ID NO: 2252 - protein, 195 aa, Homo Sapiens
MVTFSENHGVVIQPAYKDKINITQLGLQNSTITFWNITLEDEGCYMCLFNTFGFGKISGTACLTVYVQPIVSLHYKFSEDHLNITCSATARPAPMVFWKVPRSGIENSTVTLSHPNGTTSVTSILHIKDPKNQVGKEVICQVLHLGTVTDFKQTVNKGYWFSVPLLLSIVSLVILLVLISILLYWKRHRNQDREP

SEQ ID NO: 2253 - protein, 165 aa, Homo Sapiens
MLCPWRTANLGLLLILTIFLVAASSSLCMDEKQITQNYSKVLAEVNTSWPVKMATNAVLCCPPIALRNLIIITWEIILRGQPSCTKAYKKETNETKETNCTDERITWVSRPDQNSDLQIRTVAITHDGYYRCIMVTPDGNFHRGYHLQVLGKEHHILRYFTSPDL

SEQ ID NO: 2254 - protein, 325 aa, Homo Sapiens
MLCPWRTANLGLLLILTIFLVAASSSLCMDEKQITQNYSKVLAEVNTSWPVKMATNAVLCCPPIALRNLIIITWEIILRGQPSCTKAYKKETNETKETNCTDERITWVSRPDQNSDLQIRTVAITHDGYYRCIMVTPDGNFHRGYHLQVLVTPEVTLFQNRNRTAVCKAVAGKPAAHISWIPEGDCATKQEYWSNGTVTVKSTCHWEVHNVSTVTCHVSHLTGNKSLYIELLPVPGAKKSAKLYIPYIILTIIILTIVGFIWLLKVNGCRKYKLNKTESTPVVEEDEMQPYASYTEKNNPLYDTTNKVKASEALQSEVDTDLHTL

SEQ ID NO: 2255 - protein, 188 aa, Homo Sapiens
MLCPWRTANLGLLLILTIFLVAEAEGAAQPNNSLMLQTSKENHALASSSLCMDEKQITQNYSKVLAEVNTSWPVKMATNAVLCCPPIALRNLIIITWEIILRGQPSCTKAYKKETNETKETNCTDERITWVSRPDQNSDLQIRTVAITHDGYYRCIMVTPDGNFHRGYHLQVLGKEHHILRYFTSPDL

SEQ ID NO: 2256 - protein, 348 aa, Homo Sapiens
MLCPWRTANLGLLLILTIFLVAEAEGAAQPNNSLMLQTSKENHALASSSLCMDEKQITQNYSKVLAEVNTSWPVKMATNAVLCCPPIALRNLIIITWEIILRGQPSCTKAYKKETNETKETNCTDERITWVSRPDQNSDLQIRTVAITHDGYYRCIMVTPDGNFHRGYHLQVLVTPEVTLFQNRNRTAVCKAVAGKPAAHISWIPEGDCATKQEYWSNGTVTVKSTCHWEVHNVSTVTCHVSHLTGNKSLYIELLPVPGAKKSAKLYIPYIILTIIILTIVGFIWLLKVNGCRKYKLNKTESTPVVEEDEMQPYASYTEKNNPLYDTTNKVKASEALQSEVDTDLHTL

SEQ ID NO: 2257 - protein, 212 aa, Homo Sapiens
MLCPWRTANLGLLLILTIFLVAVNTSWPVKMATNAVLCCPPIALRNLIIITWEIILRGQPSCTKAYKKETNETKETNCTDERITWVSRPDQNSDLQIRTVAITHDGYYRCIMVTPDGNFHRGYHLQVLVTPEVTLFQNRNRTAVCKAVAGKPAAHISWIPEGDCATKQEYWSNGTVTVKSTCHWEVHNVSTVTCHVSHLTGNKSLYIELLPG

SEQ ID NO: 2258 - protein, 153 aa, Homo Sapiens
HIQLPPEIQESQEVTLTCLLNFSCYGYPIQLQWLLEGVPMRQAAVTSTSLTIKSVFTRSELKFSPQWSHHGKIVTCQLQDADGKFLSNDTVQLNVKRESPRHACGKGKVCVTFSPAPQGACTQGRGKPAQTAASSSPGHAALSALVFREKDLL

SEQ ID NO: 2259 - protein, 159 aa, Homo Sapiens [sequence omitted]

SEQ ID NO: 2260 - protein, 138 aa, Homo Sapiens
MHLLGPWLLLLEYLAFSDSSKWVFEHPETLYAWEGACVWIPCTYRALDGDLESFILFHNPEYNKNTSKFDGTRLYESTKDGKVPSEQKRVQFLGDKNKNCTLSIHPVHLNDSGQLGLRMESKTEKWMERIHLNVSERP

SEQ ID NO: 2261 - protein, 145 aa, Homo Sapiens
MHLLGPWLLLLEYLAFSDSSKWVFEHPETLYAWEGACVWIPCTYRALDGDLESFILFHNPEYNKNTSKFDGTRLYESTKDGKVPSEQKRVQFLGDKNKNCTLSIHPVHLNDSGQLGLRMESKTEKWMERIHLNVSERPFPPHIQL

SEQ ID NO: 2262 - protein, 191 aa, Homo Sapiens
MHLLGPWLLLLEYLAFSDSSKWVFEHPETLYAWEGACVWIPCTYRALDGDLESFILFHNPEYNKNTSKFDGTRLYESTKDGKVPSEQKRVQFLGDKNKNCTLSIHPVHLNDSGQLGLRMESKTEKWMERIHLNVSVAPRGGSNEAGCCHLDLLDHQVCLHPERAQVLPTVESPWEDCDLPASGCRWEVPLQ

SEQ ID NO: 2263 - protein, 106 aa, Homo Sapiens
MHLLGPWLLLLVLEYLAFSDSSKWVFEHPETLYAWEGACVWIPCTYRALDGDLESFILFHNPEYNKNTSKFDGTRLYESTKDGKVPSEQKRVQFLGDKNKNCTLSI

SEQ ID NO: 2264 - protein, 133 aa, Homo Sapiens
MHLLGPWLLLLVLEYLAFSDSSKWVFEHPETLYAWEGACVWIPCTYRALDGDLESFILFHNPEYNKNTSKFDGTRLYESTKDGKVPSEQKRVQFLGDKNKNCTLSIHPVHLNDSGQLGLRMESKTEKWMERIH

SEQ ID NO: 2265 - protein, 164 aa, Homo Sapiens
MHLLGPWLLLLVLEYLAFSDSSKWVFEHPETLYAWEGACVWIPCTYRALDGDLESFILFHNPEYNKNTSKFDGTRLYESTKDGKVPSEQKRVQFLGDKNKNCTLSIHPVHLNDSGQLGLRMESKTEKWMERIHLNVSDPPKKVTTVIQNPMPIREGDTVTLSCN

SEQ ID NO: 2266 - protein, 226 aa, Homo Sapiens
MHLLGPWLLLLVLEYLAFSDSSKWVFEHPETLYAWEGACVWIPCTYRALDGDLESFILFHNPEYNKNTSKFDGTRLYESTKDGKVPSEQKRVQFLGDKNKNCTLSIHPVHLNDSGQLGLRMESKTEKWMERIHLNVSERPFPPHIQLPPEIQESQEVTLTCLLNFSCYGYPIQLQWLLEGVPMRQAAVTSTSLTIKSVFTRSELKFSPQWSHHGKIVTCQLQDADG

SEQ ID NO: 2267 - protein, 670 aa, Homo Sapiens
MHLLGPWLLLLVLEYLAFSDSSKWVFEHPETLYAWEGACVWIPCTYRALDGDLESFILFHNPEYNKNTSKFDGTRLYESTKDGKVPSEQKRVQFLGDKNKNCTLSIHPVHLNDSGQLGLRMESKTEKWMERIHLNVSERPFPPHIQLPPEIQESQEVTLTCLLNFSCYGYPIQLQWLLEGVPMRQAAVTSTSLTIKSVFTRSELKFSPQWSHHGKIVTCQLQDADGKFLSNDTVQLNVKHPPKKVTTVIQNPMPIREGDTVTLSCNYNSSNPSVTRYEWKPHGAWEEPSLGVLKIQNVGWDNTTIACAACNSWCSWASPVALNVQYAPRDVRVRKIKPLSEIHSGNSVSLQCDFSSSHPKEVQFFWEKNGRLLGKESQLNFDSISPEDAGSYSCWVNNSIGQTASKAWTLEVLYAPRRLRVSMSPGDQVMEGKSATLTCESDANPPVSHYTWFDWNNQSLPYHSQKLRLEPVKVQHSGAYWCQGTNSVGKGRSPLSTLTVYYSPETIGRRVAVGLGSCLAILILAICGLKLQRRWKRTQSQQGLQENSSGQSFFVRNKKVRRAPLSEGPHSLGCYNPMMEDGISYTTLRFPEMNIPRTGDAESSEMQRPPPDCDDTVTYSALHKRQVGDYENVIPDFPEDEGIHYSELIQFGVGERPQAQENVDYVILKH

SEQ ID NO: 2268 - protein, 670 aa, Homo Sapiens; identical to SEQ ID NO: 2267

SEQ ID NO: 2269 - protein, 847 aa, Homo Sapiens
MHLLGPWLLLLVLEYLAFSDSSKWVFEHPETLYAWEGACVWIPCTYRALDGDLESFILFHNPEYNKNTSKFDGTRLYESTKDGKVPSEQKRVQFLGDKNKNCTLSIHPVHLNDSGQLGLRMESKTEKWMERIHLNVSERPFPPHIQLPPEIQESQEVTLTCLLNFSCYGYPIQLQWLLEGVPMRQAAVTSTSLTIKSVFTRSELKFSPQWSHHGKIVTCQLQDADGKFLSNDTVQLNVKHTPKLEIKVTPSDAIVREGDSVTMTCEVSSSNPEYTTVSWLKDGTSLKKQNTFTLNLREVTKDQSGKYCCQVSNDVGPGRSEEVFLQVQYAPEPSTVQILHSPAVEGSQVEFLCMSLANPLPTNYTWYHNGKEMQGRTEEKVHIPKILPWHAGTYSCVAENILGTGQRGPGAELDVQYPPKKVTTVIQNPMPIREGDTVTLSCNYNSSNPSVTRYEWKPHGAWEEPSLGVLKIQNVGWDNTTIACAACNSWCSWASPVALNVQYAPRDVRVRKIKPLSEIHSGNSVSLQCDFSSSHPKEVQFFWEKNGRLLGKESQLNFDSISPEDAGSYSCWVNNSIGQTASKAWTLEVLYAPRRLRVSMSPGDQVMEGKSATLTCESDANPPVSHYTWFDWNNQSLPYHSQKLRLEPVKVQHSGAYWCQGTNSVGKGRSPLSTLTVYYSPETIGRRVAVGLGSCLAILILAICGLKLQRRWKRTQSQQGLQENSSGQSFFVRNKKVRRAPLSEGPHSLGCYNPMMEDGISYTTLRFPEMNIPRTGDAESSEMQRPPPDCDDTVTYSALHKRQVGDYENVIPDFPEDEGIHYSELIQFGVGERPQAQENVDYVILKH

SEQ ID NO: 2270 - protein, 759 aa, Homo Sapiens
MHLLGPWLLLLVLEYLAFSDSSKWVFEHPETLYAWEGACVWIPCTYRALDGDLESFILFHNPEYNKNTSKFDGTRLYESTKDGKVPSEQKRVQFLGDKNKNCTLSIHPVHLNDSGQLGLRMESKTEKWMERIHLNVSERPFPPHIQLPPEIQESQEVTLTCLLNFSCYGYPIQLQWLLEGVPMRQAAVTSTSLTIKSVFTRSELKFSPQWSHHGKIVTCQLQDADGKFLSNDTVQLNVKHTPKLEIKVTPSDAIVREGDSVTMTCEVSSSNPEYTTVSWLKDGTSLKKQNTFTLNLREVTKDQSGKYCCQVSNDVGPGRSEEVFLQVQYPPKKVTTVIQNPMPIREGDTVTLSCNYNSSNPSVTRYEWKPHGAWEEPSLGVLKIQNVGWDNTTIACAACNSWCSWASPVALNVQYAPRDVRVRKIKPLSEIHSGNSVSLQCDFSSSHPKEVQFFWEKNGRLLGKESQLNFDSISPEDAGSYSCWVNNSIGQTASKAWTLEVLYAPRRLRVSMSPGDQVMEGKSATLTCESDANPPVSHYTWFDWNNQSLPYHSQKLRLEPVKVQHSGAYWCQGTNSVGKGRSPLSTLTVYYSPETIGRRVAVGLGSCLAILILAICGLKLQRRWKRTQSQQGLQENSSGQSFFVRNKKVRRAPLSEGPHSLGCYNPMMEDGISYTTLRFPEMNIPRTGDAESSEMQRPPPDCDDTVTYSALHKRQVGDYENVIPDFPEDEGIHYSELIQFGVGERPQAQENVDYVILKH

SEQ ID NO: 2271 - protein, 751 aa, Homo Sapiens
MHLLGPWLLLLVLEYLAFSDSSKWVFEHPETLYAWEGACVWIPCTYRALDGDLESFILFHNPEYNKNTSKFDGTRLYESTKDGKVPSEQKRVQFLGDKNKNCTLSIHPVHLNDSGQLGLRMESKTEKWMERIHLNVSERPFPPHIQLPPEIQESQEVTLTCLLNFSCYGYPIQLQWLLEGVPMRQAAVTSTSLTIKSVFTRSELKFSPQWSHHGKIVTCQLQDADGKFLSNDTVQLNVKHTPKLEIKVTPSDAIVREGDSVTMTCEVSSSNPEYTTVSWLKDGTSLKKQNTFTLNLREVTKDQSGKYCCQVSNDVGPGRSEEVFLQVQYAPEPSTVQILHSPAVEGSQVEFLCMSLANPLPTNYTWYHNGKEMQGRTEEKVHIPKILPWHAGTYSCVAENILGTGQRGPGAELDVQYPPKKVTTVIQNPMPIREGDTVTLSCNYNSSNPSVTRYEWKPHGAWEEPSLGVLKIQNVGWDNTTIACAACNSWCSWASPVALNVQYAPRDVRVRKIKPLSEIHSGNSVSLQCDFSSSHPKEVQFFWEKNGRLLGKESQLNFDSISPEDAGSYSCWVNNSIGQTASKAWTLEVLYAPRRLRVSMSPGDQVMEGKSATLTCESDANPPVSHYTWFDWNNQSLPYHSQKLRLEPVKVQHSGAYWCQGTNSVGKGRSPLSTLTVYYSPETIGRRVAVGLGSCLAILILAICGLKLQRRWKRTQSQQGLQENSSGQSFFVRNKKRCRVLRDAETSPGLR

SEQ ID NO: 2272 - protein, 38 aa, Homo Sapiens
MHLLGPWLLLLVNGFLSTLKPSTPGRGPASGSPAPTEP

SEQ ID NO: 2273 - protein, 675 aa, Homo Sapiens
MSLWLLEGVPMRQAAVTSTSLTIKSVFTRSELKFSPQWSHHGKIVTCQLQDADGKFLSNDTVQLNVKHTPKLEIKVTPSDAIVREGDSVTMTCEVSSSNPEYTTVSWLKDGTSLKKQNTFTLNLREVTKDQSGKYCCQVSNDVGPGRSEEVFLQVQYAPEPSTVQILHSPAVEGSQVEFLCMSLANPLPTNYTWYHNGKEMQGRTEEKVHIPKILPWHAGTYSCVAENILGTGQRGPGAELDVQYPPKKVTTVIQNPMPIREGDTVTLSCNYNSSNPSVTRYEWKPHGAWEEPSLGVLKIQNVGWDNTTIACAACNSWCSWASPVALNVQYAPRDVRVRKIKPLSEIHSGNSVSLQCDFSSSHPKEVQFFWEKNGRLLGKESQLNFDSISPEDAGSYSCWVNNSIGQTASKAWTLEVLYAPRRLRVSMSPGDQVMEGKSATLTCESDANPPVSHYTWFDWNNQSLPYHSQKLRLEPVKVQHSGAYWCQGTNSVGKGRSPLSTLTVYYSPETIGRRVAVGLGSCLAILILAICGLKLQRRWKRTQSQQGLQENSSGQSFFVRNKKVRRAPLSEGPHSLGCYNPMMEDGISYTTLRFPEMNIPRTGDAESSEMQRPPPDCDDTVTYSALHKRQVGDYENVIPDFPEDEGIHYSELIQFGVGERPQAQENVDYVILKH

SEQ ID NO: 2274 - protein, 145 aa, Homo Sapiens
NPLPTNYTWYHNGKEMQGRTEEKVHIPKILPWHAGTYSCVAENILGTGQRGPGAELDVQYPPKKVTTVIQNPMPIREGDTVTLSCNYNSSNPSVTRYEWKPHGAWEEPSLGVLKIQNVGWDNTTIACAACNSWCSWASPVALNVQ

SEQ ID NO: 2275 - protein, 148 aa, Homo Sapiens
VLEYLAFSDSSKWVFEHPETLYAWEGACVWIPCTYRALDGDLESFILFHNPEYNKNTSKFDGTRLYESTKDGKVPSEQKRVQFLGDKNKNCTLSIHPVHLNDSGQLGLRMESKTEKWMERIHLNVSVESPWEDCDLPASGCRWEVPLQ

SEQ ID NO: 2276 - protein, 37 aa, Homo Sapiens
IVIPDVTVSDSGLYRCYLQASAGENETFVMRLTVAEG

SEQ ID NO: 2277 - protein, 127 aa, Homo Sapiens
MDYPTLLLALLHVYRALCEEVLWHTSVPFAENMSLECVYPSMGILTQVEWFKIGTQQDSIAIFSPTHGMVIRKPYAERVYFLNSTMASNNMTLFFRNASEDDVGYYSCSLYTYPQGTWQKVIQVVQS

SEQ ID NO: 2278 - protein, 132 aa, Homo Sapiens
MDYPTLLLALLHVYRALCEEVLWHTSVPFAENMSLECVYPSMGILTQVEWFKIGTQQDSIAIFSPTHGMVIRKPYAERVYFLNSTMASNNMTLFFRNASEDDVGYYSCSLYTYPQGTWQKVIQVVQSDSFEA

SEQ ID NO: 2279 - protein, 336 aa, Homo Sapiens
MDYPTLLLALLHVYRALCEEVLWHTSVPFAENMSLECVYPSMGILTQVEWFKIGTQQDSIAIFSPTHGMVIRKPYAERVYFLNSTMASNNMTLFFRNASEDDVGYYSCSLYTYPQGTWQKVIQVVQSDSFEAAVPSNSHIVSEPGKNVTLTCQPQMTWPVQAVRWEKIQPRQIDLLTYCNLVHGRNFTSKFPRQIVSNCSHGRWSVIVIPDVTVSDSGLYRCYLQASAGENETFVMRLTVAEGKTDNQYTLFVAGGTVLLLLFVISITTIIVIFLNRRRRRERRDLFTESWDTQKAPNNYRSPISTSQPTNQSMDDTREDIYVNYPTFSRRPKTRV

SEQ ID NO: 2280 - protein, 276 aa, Homo Sapiens
MDYPTLLLALLHVYRALCEEVLWHTSVPFAENMSLECVYPSMGILTQVEWFKIGTQQDSIAIFSPTHGMVIRKPYAERVYFLNSTMASNNMTLFFRNASEDDVGYYSCSLYTYPQGTWQKVIQVVQSDSFEAAVPSNSHIVSEPGKNVTLTCQPQMTWPVQAVRWEKIQPRQIDLLTYCNLVHGRNFTSKFPRQIVSNCSHGRWSVIVIPDVTVSDSGLYRCYLQASAGENETFVMRLTVAEGKTDNQYTLFVAGGTVLLLLFVISITTIIVIFLN

SEQ ID NO: 2281 - protein, 336 aa, Homo Sapiens; identical to SEQ ID NO: 2279

SEQ ID NO: 2282 - protein, 181 aa, Homo Sapiens
MTWPVQAVRWEKIQPRQIDLLTYCNLVHGRNFTSKFPRQIVSNCSHGRWSVIVIPDVTVSDSGLYRCYLQASAGENETFVMRLTVAEGKTDNQYTLFVAGGTVLLLLFVISITTIIVIFLNRRRRRERRDLFTESWDTQKAPNNYRSPISTSQPTNQSMDDTREDIYVNYPTFSRRPKTRV

SEQ ID NO: 2283 - protein, 181 aa, Homo Sapiens; identical to SEQ ID NO: 2282

SEQ ID NO: 2284 - protein, 80 aa, Homo Sapiens
MGRAMVARLGLGLLLLALLLPTQIYSSETTTGTSSNSSQSTSNSGLAPNPTNATTKAAGGALQSTASLFVVSLSLLHLYS

SEQ ID NO: 2285 - protein, 80 aa, Homo Sapiens; identical to SEQ ID NO: 2284

SEQ ID NO: 2286 - protein, 80 aa, Homo Sapiens; identical to SEQ ID NO: 2284

SEQ ID NO: 2287 - protein, 37 aa, Homo Sapiens
MGRAMVARLGLGLLLLALLLPTQKMLRIPNLIDLKNM

SEQ ID NO: 2288 - protein, 129 aa, Homo Sapiens
MVGRFCPESPPGFVRVAATSAVSLDPPSGEPRPGCGYPGPRSAASRVYGCTAPARETGGWAWETLAGAGAKKIYSSETTTGTSSNSSQSTSNSGLAPNPTNATTKAAGGALQSTASLFVVSLSLLHLYS

SEQ ID NO: 2289 - protein, 88 aa, Homo Sapiens
  misc_feature (1)..(1): Xaa can be any naturally occurring amino acid
XDRSGPGHRLRGAPTSREGFALGGARVPSARIYSSETTTGTSSNSSQSTSNSGLAPNPTNATTKAAGGALQSTASLFVVSLSLLHLYS

SEQ ID NO: 2290 - protein, 122 aa, Homo Sapiens
  misc_feature (1)..(1): Xaa can be any naturally occurring amino acid
XLSSAAGREITLPEGSRRPPPTRSHWNSQPLSGPRGAFCSLSGNALAPGQAATPPQRRRGLFFWGIYSSETTTGTSSNSSQSTSNSGLAPNPTNATTKAAGGALQSTASLFVVSLSLLHLYS

SEQ ID NO: 2291 - protein, 38 aa, Homo Sapiens
MLRRRGSPGMGVHVGAALGALWFCLTADRYQTAGAQLC

SEQ ID NO: 2292 - protein, 38 aa, Homo Sapiens; identical to SEQ ID NO: 2291

SEQ ID NO: 2293 - protein, 51 aa, Homo Sapiens
MLRRRGSPGMGVHVGAALGALWFCLTGALEVQVPEDPVVALVGTDATLCCS

SEQ ID NO: 2294 - protein, 133 aa, Homo Sapiens
MLRRRGSPGMGVHVGAALGALWFCLTGALEVQVPEDPVVALVGTDATLCCSFSPEPGFSLAQLNLIWQLTDTKQLVHSFAEGQDQGSAYANRTALFPDLLAQGNASLRLQRVRVADEGSFTCFVSIRDFGSAA

SEQ ID NO: 2295 - protein, 133 aa, Homo Sapiens; identical to SEQ ID NO: 2294

SEQ ID NO: 2296 - protein, 136 aa, Homo Sapiens
MLRRRGSPGMGVHVGAALGALWFCLTGALEVQVPEDPVVALVGTDATLCCSFSPEPGFSLAQLNLIWQLTDTKQLVHSFAEGQDQGSAYANRTALFPDLLAQGNASLRLQRVRVADEGSFTCFVSIRDFGSAAVSL

SEQ ID NO: 2297 - protein, 156 aa, Homo Sapiens
MLRRRGSPGMGVHVGAALGALWFCLTGALEVQVPEDPVVALVGTDATLCCSFSPEPGFSLAQLNLIWQLTDTKQLVHSFAEGQDQGSAYANRTALFPDLLAQGNASLRLQRVRVADEGSFTCFVSIRDFGSAAVSLQVAAPYSKPSMTLEPNKDLR

SEQ ID NO: 2298 - protein, 165 aa, Homo Sapiens
MLRRRGSPGMGVHVGAALGALWFCLTGALEVQVPEDPVVALVGTDATLCCSFSPEPGFSLAQLNLIWQLTDTKQLVHSFAEGQDQGSAYANRTALFPDLLAQGNASLRLQRVRVADEGSFTCFVSIRDFGSAAVSLQVAAPYSKPSMTLEPNKDLRPGDTVTITC

SEQ ID NO: 2299 - protein, 534 aa, Homo Sapiens
MLRRRGSPGMGVHVGAALGALWFCLTGALEVQVPEDPVVALVGTDATLCCSFSPEPGFSLAQLNLIWQLTDTKQLVHSFAEGQDQGSAYANRTALFPDLLAQGNASLRLQRVRVADEGSFTCFVSIRDFGSAAVSLQVAAPYSKPSMTLEPNKDLRPGDTVTITCSSYQGYPEAEVFWQDGQGVPLTGNVTTSQMANEQGLFDVHSILRVVLGANGTYSCLVRNPVLQQDAHSSVTITPQRSPTGAVEVQVPEDPVVALVGTDATLRCSFSPEPGFSLAQLNLIWQLTDTKQLVHSFTEGRDQGSAYANRTALFPDLLAQGNASLRLQRVRVADEGSFTCFVSIRDFGSAAVSLQVAAPYSKPSMTLEPNKDLRPGDTVTITCSSYRGYPEAEVFWQDGQGVPLTGNVTTSQMANEQGLFDVHSVLRVVLGANGTYSCLVRNPVLQQDAHGSVTITGQPMTFPPEALWVTVGLSVCLIALLVALAFVCWRKIKQSCEEENAGAEDQDGEGEGSKTALQPLKHSDSKEDDGQEIA

SEQ ID NO: 2300 - protein, 533 aa, Homo Sapiens
MLRRRGSPGMGVHVGAALGALWFCLTGALEVQVPEDPVVALVGTDATLCCSFSPEPGFSLAQLNLIWQLTDTKQLVHSFAEGQDQGSAYANRTALFPDLLAQGNASLRLQRVRVADEGSFTCFVSIRDFGSAAVSLQVAAPYSKPSMTLEPNKDLRPGDTVTITCSSYQGYPEAEVFWQDGQGVPLTGNVTTSQMANEQGLFDVHSILRVVLGANGTYSCLVRNPVLQQDAHSSVTITPQRSPTGAVEVQVPEDPVVALVGTDATLRCSFSPEPGFSLAQLNLIWQLTDTKQLVHSFTEGRDQGSAYANRTALFPDLLAQGNASLRLQRVRVADEGSFTCFVSIRDFGSAAVSLQVAAPYSKPSMTLEPNKDLRPGDTVTITCSSYRGYPEAEVFWQDGQGVPLTGNVTTSQMANEQGLFDVHSVLRVVLGANGTYSCLVRNPVLQQDAHGSVTITGQPMTFPPEALWVTVGLSVCLIALLVALAFVCWRKIKQSCEEENAGAEDQDGEGEGSKTALQPLKHSDSKEGKDTWA

SEQ ID NO: 2301 - protein, 316 aa, Homo Sapiens
MLRRRGSPGMGVHVGAALGALWFCLTGALEVQVPEDPVVALVGTDATLCCSFSPEPGFSLAQLNLIWQLTDTKQLVHSFAEGQDQGSAYANRTALFPDLLAQGNASLRLQRVRVADEGSFTCFVSIRDFGSAAVSLQVAAPYSKPSMTLEPNKDLRPGDTVTITCSSYRGYPEAEVFWQDGQGVPLTGNVTTSQMANEQGLFDVHSVLRVVLGANGTYSCLVRNPVLQQDAHGSVTITGQPMTFPPEALWVTVGLSVCLIALLVALAFVCWRKIKQSCEEENAGAEDQDGEGEGSKTALQPLKHSDSKEDDGQEIA

SEQ ID NO: 2302 - protein, 316 aa, Homo Sapiens; identical to SEQ ID NO: 2301

SEQ ID NO: 2303 - protein, 146 aa, Homo Sapiens
MSLKAPMSSRKKKLYLQQHCEAGAAFHHGEPSCQPPHRKMLRRRGSPGMGVHVGAALGALWFCLTGALEVQVPEDPVVALVGTDATLCCSFSPEPGFSLAQLNLIWQLTDTKQLVHSFAEGQDQGSAYANRTALFPDLLAQGNASL

SEQ ID NO: 2304 - protein, 388 aa, Homo Sapiens
MTLEPNKDLRPGDTVTITCSSYQGYPEAEVFWQDGQGVPLTGNVTTSQMANEQGLFDVHSILRVVLGANGTYSCLVRNPVLQQDAHSSVTITPQRSPTGAVEVQVPEDPVVALVGTDATLRCSFSPEPGFSLAQLNLIWQLTDTKQLVHSFTEGRDQGSAYANRTALFPDLLAQGNASLRLQRVRVADEGSFTCFVSIRDFGSAAVSLQVAAPYSKPSMTLEPNKDLRPGDTVTITCSSYRGYPEAEVFWQDGQGVPLTGNVTTSQMANEQGLFDVHSVLRVVLGANGTYSCLVRNPVLQQDAHGSVTITGQPMTFPPEALWVTVGLSVCLIALLVALAFVCWRKIKQSCEEENAGAEDQDGEGEGSKTALQPLKHSDSKEDDGQEIA

SEQ ID NO: 2305 - protein, 199 aa, Homo Sapiens
  misc_feature (1)..(1): Xaa can be any naturally occurring amino acid
XRVRVADEGSFTCFVSIRDFGSAAVSLQVAAPYSKPSMTLEPNKDLRPGDTVTITCSSYRGYPEAEVFWQDGQGVPLTGNVTTSQMANEQGLFDVHSVLRVVLGANGTYSCLVRNPVLQQDAHGSVTITEALWVTVGLSVCLIALLVALAFVCWRKIKQSCEEENAGAEDQDGEGEGSKTALQPLKHSDSKEDDGQEIA

SEQ ID NO: 2306 - protein, 170 aa, Homo Sapiens
  misc_feature (1)..(1): Xaa can be any naturally occurring amino acid
XTLEPNKDLRPGDTVTITCSSYRGYPEAEVFWQDGQGVPLTGNVTTSQMANEQGLFDVHSVLRVVLGANGTYSCLVRNPVLQQDAHGSVTITGQPMTFPPEALWVTVGLSVCLIALLVALAFVCWRKIKQSCEEENAGAEDQDGEGEGSKTALQPLKHSDSKEDDGQEIA

SEQ ID NO: 2307 - protein, 169 aa, Homo Sapiens
MTPASITAAKTSTITTAFPPVSSTTLFAVGATHSASIQEETEEVVNSQLPLLLSLLALLLLLLVGASLLAWRMFQKWIKAGDHSELSQNPKQAATQSELHYANLELLMWPLQEKPAPPREVEVEYSTVASPREELHYASVVFDSNTNRIAAQRPREEEPDSDYSVIRKT

SEQ ID NO: 2308 - protein, 103 aa, Homo Sapiens
MWLPWALLLLWVPAGDHSELSQNPKQAATQSELHYANLELLMWPLQEKPAPPREVEVEYSTVASPREELHYASVVFDSNTNRIAAQRPREEEPDSDYSVIRKT

SEQ ID NO: 2309 - protein, 186 aa, Homo Sapiens
MWLPWALLLLWVPASTSMTPASITAAKTSTITTAFPPVSSTTLFAVGATHSASIQEETEEVVNSQLPLLLSLLALLLLLLVGASLLAWRMFQKWIKAGDHSELSQNPKQAATQSELHYANLELLMWPLQEKPAPPREVEVEYSTVASPREELHYASVVFDSNTNRIAAQRPREEEPDSDYSVIRKT

SEQ ID NO: 2310 - protein, 150 aa, Homo Sapiens
MWLPWALLLLWVPASTSMTPASITAAKTSTITTAFPPVSSTTLFAVGATHSASIQEETEEVVNSQLPLLLSLLALLLLLLVGASLLAWRMFQKWIKAGDHSELSQNPKQASPREELHYASVVFDSNTNRIAAQRPREEEPDSDYSVIRKT

SEQ ID NO: 2311 - protein, 299 aa, Homo Sapiens
MWLPWALLLLWVPGCFALSKCRTVAGPVGGSLSVQCPYEKEHRTLNKYWCRPPQIFLCDKIVETKGSAGKRNGRVSIRDSPANLSFTVTLENLTEEDAGTYWCGVDTPWLRDFHDPVVEVEVSVFPASTSMTPASITAAKTSTITTAFPPVSSTTLFAVGATHSASIQEETEEVVNSQLPLLLSLLALLLLLLVGASLLAWRMFQKWIKAGDHSELSQNPKQAATQSELHYANLELLMWPLQEKPAPPREVEVEYSTVASPREELHYASVVFDSNTNRIAAQRPREEEPDSDYSVIRKT

SEQ ID NO: 2312 - protein, 148 aa, Homo Sapiens
MWLPPALLLLSLSGCFSIQGPESVRAPEQGSLTVQCHYKQGWETYIKWWCRGVRWDTCKILIETRGSEQGEKSDRVSIKDNQKDRTFTVTMEGLRRDDADVYWCGIERRGPDLGTQVKVIVDPEGAASTTASSPTNSNMAVFIGSHKR

SEQ ID NO: 2313 - protein, 201 aa, Homo Sapiens
MWLPPALLLLSLSGCFSIQGPESVRAPEQGSLTVQCHYKQGWETYIKWWCRGVRWDTCKILIETRGSEQGEKSDRVSIKDNQKDRTFTVTMEGLRRDDADVYWCGIERRGPDLGTQVKVIVDPEGAASTTASSPTNSNMAVFIGSHKRNHYMLLVFVKVPILLILVTAILWLKGSQRVPEEPGEQPIYMNFSEPLTKDMAT

SEQ ID NO: 2314 - protein, 290 aa, Homo Sapiens
MPLLTLYLLLFWLSGYSIVTQITGPTTVNGLERGSLTVQCVYRSGWETYLKWWCRGAIWRDCKILVKTSGSEQEVKRDRVSIKDNQKNRTFTVTMEDLMKTDADTYWCGIEKTGNDLGVTVQVTIDPAPVTQEETSSSPTLTGHHLDNRHKLLKLSVLLPLIFTILLLLLVAASLLAWRMMKYQQKAAGMSPEQVLQPLEGDLCYADLTLQLAGTSPQKATTKLSSAQVDQVEVEYVTMASLPKEDISYASLTLGAEDQEPTYCNMGHLSSHLPGRGPEEPTEYSTISRP

SEQ ID NO: 2315 - protein, 244 aa, Homo Sapiens
MPLLTLYLLLFWLSGYSIVTQITGPTTVNGLERGSLTVQCVYRSGWETYLKWWCRGAIWRDCKILVKTSGSEQEVKRDRVSIKDNQKNRTFTVTMEDLMKTDADTYWCGIEKTGNDLGVTVQVTIDPAPVTQEETSSSPTLTGHHLDNRSEGSQAANYRPAAHQAQAPEAQCPPAPHLHHIAAAFGGRLTLGLEDDEVPAESSRDVPRAGTAAPGGRPLLCRPDPAAGRNLPAKGYHEAFLCPG

SEQ ID NO: 2316 - protein, 305 aa, Homo Sapiens
MPLLTLYLLLFWLSGYSIVTQITGPTTVNGLERGSLTVQCVYRSGWETYLKWWCRGAIWRDCKILVKTSGSEQEVKRDRVSIKDNQKNRTFTVTMEDLMKTDADTYWCGIEKTGNDLGVTVQVTIDPASTPAPTTPTSTTFTAPVTQEETSSSPTLTGHHLDNRHKLLKLSVLLPLIFTILLLLLVAASLLAWRMMKYQQKAAGMSPEQVLQPLEGDLCYADLTLQLAGTSPQKATTKLSSAQVDQVEVEYVTMASLPKEDISYASLTLGAEDQEPTYCNMGHLSSHLPGRGPEEPTEYSTISRP

SEQ ID NO: 2317 - protein, 293 aa, Homo Sapiens
MWLPQLDLMRVISAKSQGYSIVTQITGPTTVNGLERGSLTVQCVYRSGWETYLKWWCRGAIWRDCKILVKTSGSEQEVKRDRVSIKDNQKNRTFTVTMEDLMKTDADTYWCGIEKTGNDLGVTVQVTIDPAPVTQEETSSSPTLTGHHLDNRHKLLKLSVLLPLIFTILLLLLVAASLLAWRMMKYQQKAAGMSPEQVLQPLEGDLCYADLTLQLAGTSPQKATTKLSSAQVDQVEVEYVTMASLPKEDISYASLTLGAEDQEPTYCNMGHLSSHLPGRGPEEPTEYSTISRP

SEQ ID NO: 2318 - protein, 165 aa, Homo Sapiens
MWLPQLDLMRVISAKSQGYSIVTQITGPTTVNGLERGSLTVQCVYRSGWETYLKWWCRGAIWRDCKILVKTSGSEQEVKRDRVSIKDNQKNRTFTVTMEDLMKTDADTYWCGIEKTGNDLGVTVQVTIDPAPVTQEETSSSPTLTGHHLDNRYCSPWRATSAMQT

SEQ ID NO: 2319 - protein, 194 aa, Homo Sapiens
MWLPQLDLMRVISAKSQGYSIVTQITGPTTVNGLERGSLTVQCVYRSGWETYLKWWCRGAIWRDCKILVKTSGSEQEVKRDRVSIKDNQKNRTFTVTMEDLMKTDADTYWCGIEKTGNDLGVTVQVTIDPAPVTQEETSSSPTLTGHHLDNSSRDVPRAGTAAPGGRPLLCRPDPAAGRNLPAKGYHEAFLCPG

SEQ ID NO: 2320 - protein, 194 aa, Homo Sapiens; identical to SEQ ID NO: 2319

SEQ ID NO: 2321 - protein, 239 aa, Homo Sapiens
MWLPQLDLMRVISAKSQGYSIVTQITGPTTVNGLERGSLTVQCVYRSGWETYLKWWCRGAIWRDCKILVKTSGSEQEVKRDRVSIKDNQKNRTFTVTMEDLMKTDADTYWCGIEKTGNDLGVTVQVTIDPASTPAPTTPTSTTFTAPVTQEETSSSPTLTGHHLDNRHKLLKLSVLLPLIFTILLLLLVAASLLAWRMMKYQQKGTAAPGGRPLLCRPDPAAGRNLPAKGYHEAFLCPG

SEQ ID NO: 2322 - protein, 239 aa, Homo Sapiens; identical to SEQ ID NO: 2321

SEQ ID NO: 2323 - protein, 273 aa, Homo Sapiens
MRLLVLLWGCLLLPGYEALEGPEEISGFEGDTVSLQCTYREELRDHRKYWCRKGGILFSRCSGTIYAEEEGQETMKGRVSIRDSRQELSLIVTLWNLTLQDAGEYWCGVEKRGPDESLLISLFVFPASPGLYPAATTAKQGKTGAEAPPLPGTSQYGHERTSQYTGTSPHPATSPPAGSSRPPMQLDSTSAEDTSPALSSGSSKPRVSIPMVRILAPVLVLLSLLSAAGLIAFCSHLLLWRKEAQQATETQRNEKFCLSRLNSLMFSLSLPWL

SEQ ID NO: 2324 - protein, 150 aa, Homo Sapiens
MRLLVLLWGCLLLPGYEALEGPEEISGFEGDTVSLQCTYREELRDHRKYWCRKGGILFSRCSGTIYAEEEGQETMKGRVSIRDSRQELSLIVTLWNLTLQDAGEYWCGVEKRGPDESLLISLFVFPGNRYLSFPRLGTGAAEGRGRGGGA

SEQ ID NO: 2325 - protein, 332 aa, Homo Sapiens
MRLLVLLWGCLLLPGYEALEGPEEISGFEGDTVSLQCTYREELRDHRKYWCRKGGILFSRCSGTIYAEEEGQETMKGRVSIRDSRQELSLIVTLWNLTLQDAGEYWCGVEKRGPDESLLISLFVFPGPCCPPSPSPTFQPLATTRLQPKAKAQQTQPPGLTSPGLYPAATTAKQGKTGAEAPPLPGTSQYGHERTSQYTGTSPHPATSPPAGSSRPPMQLDSTSAEDTSPALSSGSSKPRVSIPMVRILAPVLVLLSLLSAAGLIAFCSHLLLWRKEAQQATETQRNEKFCLSRLTAEEKEAPSQAPEGDVISMPPLHTSEEELGFSKFVSA

SEQ ID NO: 2326 - protein, 307 aa, Homo Sapiens
MRLLVLLWGCLLLPGYEALEGPEEISGFEGDTVSLQCTYREELRDHRKYWCRKGGILFSRCSGTIYAEEEGQETMKGRVSIRDSRQELSLIVTLWNLTLQDAGEYWCGVEKRGPDESLLISLFVFPGPCCPPSPSPTFQPLATTRLQPKAKAQQTQPPGLTSPGLYPAATTAKQGKTGAEAPPLPGTSQYGHERTSQYTGTSPHPATSPPAGSSRPPMQLDSTSAEDTSPALSSGSSKPRVSIPMVRILAPVLVLLSLLSAAGLIAFCSHLLLWRKEAQQATETQRNEKFCLSRLNSLMFSLSLPWL

SEQ ID NO: 2327 - protein, 233 aa, Homo Sapiens
MRLLVLLWGCLLLPGYEALEGPEEISGFEGDTVSLQCTYREELRDHRKYWCRKGGILFSRCSGTIYAEEEGQETMKGRVSIRDSRQELSLIVTLWNLTLQDAGEYWCGVEKRGPDESLLISLFVFPGSSRPPMQLDSTSAEDTSPALSSGSSKPRVSIPMVRILAPVLVLLSLLSAAGLIAFCSHLLLWRKEAQQATETQRNEKFCLSRLNHRTSELDPDEAFEISSLTFLSV

SEQ ID NO: 2328 - protein, 222 aa, Homo Sapiens
MRLLVLLWGCLLLPGYEALEGPEEISGFEGDTVSLQCTYREELRDHRKYWCRKGGILFSRCSGTIYAEEEGQETMKGRVSIRDSRQELSLIVTLWNLTLQDAGEYWCGVEKRGPDESLLISLFVFPGSSRPPMQLDSTSAEDTSPALSSGSSKPRVSIPMVRILAPVLVLLSLLSAAGLIAFCSHLLLWRKEAQQATETQRNEKFCLSRLNSLMFSLSLPWL

SEQ ID NO: 2329 - protein, 98 aa, Homo Sapiens
MEHSTFLSGLVLATLLSQVCQSCVELDPATVAGIIVTDVIATLLLALGVFCFAGHETGRLSGAADTQALLRNDQVYQPLRDRDDAQYSHLGGNWARNK

SEQ ID NO: 2330 - protein, 171 aa, Homo Sapiens
MEHSTFLSGLVLATLLSQVSPFKIPIEELEDRVFVNCNTSITWVEGTVGTLLSDITRLDLGKRILDPRGIYRCNGTDIYKDKESTVQVHYRMCQSCVELDPATVAGIIVTDVIATLLLALGVFCFAGHETGRLSGAADTQALLRNDQVYQPLRDRDDAQYSHLGGNWARNK

SEQ ID NO: 2331 - protein, 127 aa, Homo Sapiens
MEHSTFLSGLVLATLLSQVSPFKIPIEELEDRVFVNCNTSITWVEGTVGTLLSDITRLDLGKRILDPRGIYRCNGTDIYKDKESTVQVHYRTADTQALLRNDQVYQPLRDRDDAQYSHLGGNWARNK

SEQ ID NO: 2332 - protein, 132 aa, Homo Sapiens
  misc_feature (1)..(1): Xaa can be any naturally occurring amino acid
XSRCFSGPCSPYSSSVVWIHFQEVSPFKIPIEELEDRVFVNCNTSITWVEGTVGTLLSDITRLDLGKRILDPRGIYRCNGTDIYKDKESTVQVHYRTADTQALLRNDQVYQPLRDRDDAQYSHLGGNWARNK

SEQ ID NO: 2333 - protein, 45 aa, Homo Sapiens
MNRGVPFRHLLLVLQLALLPAATQGKKVVLGKKGDTVELTCTASQ

SEQ ID NO: 2334 - protein, 458 aa, Homo Sapiens
MNRGVPFRHLLLVLQLALLPAATQGKKVVLGKKGDTVELTCTASQKKSIQFHWKNSNQIKILGNQGSFLTKGPSKLNDRADSRRSLWDQGNFPLIIKNLKIEDSDTYICEVEDQKEEVQLLVFGLTANSDTHLLQGQSLTLTLESPPGSSPSVQCRSPRGKNIQGGKTLSVSQLELQDSGTWTCTVLQNQKKVEFKIDIVVLAFQKASSIVYKKEGEQVEFSFPLAFTVEKLTGSGELWWQAERASSSKSWITFDLKNKEVSVKRVTQDPKLQMGKKLPLHLTLPQALPQYAGSGNLTLALEAKTGKLHQEVNLVVMRATQLQKNLTCEVWGPTSPKLMLSLKLENKEAKVSKREKAVWVLNPEAGMWQCLLSDSGQVLLESNIKVLPTWSTPVQPMALIVLGGVAGLLLFIGLGIFFCVRCRHRRRQAERMSQIKRLLSEKKTCQCPHRFQKTCSPI

SEQ ID NO: 2335 - protein, 148 aa, Homo Sapiens
MNRGVPFRHLLLVLQLGPSKLNDRADSRRSLWDQGNFPLIIKNLKIEDSDTYICEVEDQKEEVQLLVFGLTANSDTHLLQGQSLTLTLESPPGSSPSVQCRSPRGKNIQGGKTLSVSQLELQDSGTWTCTVLQNQKKVEFKIDIVVLG

SEQ ID NO: 2336 - protein, 203 aa, Homo Sapiens
MVRLPLQCVLWGCLLTAVHPEPPTACREKQYLINSQCCSLCQPGQKLVSDCTEFTETECLPCGESEFLDTWNRETHCHQHKYCDPNLGLRVQQKGTSETDTICTCEEGWHCTSEACESCVLHRSCSPGFGVKQIATGVSDTICEPCPVGFFSNVSSAFEKCHPWTRSPGSAESPGGDPHHLRDPVCHPLGAGLYQKGGQEANQ

SEQ ID NO: 2337 - protein, 277 aa, Homo Sapiens
MVRLPLQCVLWGCLLTAVHPEPPTACREKQYLINSQCCSLCQPGQKLVSDCTEFTETECLPCGESEFLDTWNRETHCHQHKYCDPNLGLRVQQKGTSETDTICTCEEGWHCTSEACESCVLHRSCSPGFGVKQIATGVSDTICEPCPVGFFSNVSSAFEKCHPWTSCETKDLVVQQAGTNKTDVVCGPQDRLRALVVIPIIFGILFAILLVLVFIKKVAKKPTNKAPHPKQEPQEINFPDDLPGSNTAAPVQETLHGCQPVTQEDGKESRISVQERQ

SEQ ID NO: 2338 - protein, 151 aa, Homo Sapiens
MVRLPLQCVLWGCLLTAVHPEPPTACREKQYLINSQCCSLCQPGQKLVSDCTEFTETECLPCGESEFLDTWNRETHCHQHKYCDPNLGLRVQQKGTSETDTICTCEEGWHCTSEACESCVLHRSCSPGFGVKQIDICQPHFPKDRGLNLLM

SEQ ID NO: 2339 - protein, 159 aa, Homo Sapiens
  misc_feature (1)..(1): Xaa can be any naturally occurring amino acid
XRLPLQCVLWGCLLTAVHPEPPTACREKQYLINSQCCSLCQPGQKLVSDCTEFTETECLPCGESEFLDTWNRETHCHQHKYCDPNLGLRVQQKGTSETDTICTCEEGWHCTSEACESCVLHRSCSPGFGVKQIAVRPKTWLCNRQAQTRLMLSVVPRIG

SEQ ID NO: 2340 - protein, 176 aa, Homo Sapiens
DTYCFNASAPPEEDCTSVTGPLSMTTQQSNSQSFSTSHEGLEEDKDHPTTSTLTSSNRNDVTGGRRDPNHSEGSTTLLEGYTSHYPHTKESRTFIPVTSAKTGSFGVTAVTVGDSNSNVNRSLSGDQDTFHPSGGSHTTHGSESDGHSHGSQEGGANTTSGPIRTPQIPEWLIILA

SEQ ID NO: 2341 - protein, 269 aa, Homo Sapiens
EDCTSVTDLPNAFDGPITITIVNRDGTRYVQKGEYRTNPEDIYPSNPTDDDVSSGSSSERSSTSGGYIFYTFSTVHPIPDEDSPWITDSTDRIPATIQATPSSTTEETATQKEQWFGNRWHEGYRQTPKEDSHSTTGTAAASAHTSHPMQGRTTPSPEDSSWTDFFNPISHPMGRGHQAGRRMDMDSSHSITLQPTANPNTGLVEDLDRTGPLSMTTQQSNSQSFSTSHEGLEEDKDHPTTSTLTSSNRNDVTGGRRDPNHSEGSTTLL

SEQ ID NO: 2342 - protein, 193 aa, Homo Sapiens
IYPSNPTDDDVSSGSSSERSSTSGGYIFYTFSTVHPIPDEDSPWITDSTDRIPATSTSSNTISAGWEPNEENEDERDRHLSFSGSGIDDDEDFISSTNMDSSHSITLQPTANPNTGLVEDLDRTGPLSMTTQQSNSQSFSTSHEGLEEDKDHPTTSTLTSSNRNDVTGGRRDPNHSEGSTTLLEGYTSHYPHT

SEQ ID NO: 2343 - protein, 78 aa, Homo Sapiens
MDKFWWHAAWGLCLVPLSLAQIDLNITCRFAGVFHVEKNGRYSISRTEAADLCKAFNSTLPTMAQMEKALSIGFETCR

SEQ ID NO: 2344 - protein, 493 aa, Homo Sapiens
MDKFWWHAAWGLCLVPLSLAQIDLNITCRFAGVFHVEKNGRYSISRTEAADLCKAFNSTLPTMAQMEKALSIGFETCRYGFIEGHVVIPRIHPNSICAANNTGVYILTSNTSQYDTYCFNASAPPEEDCTSVTDLPNAFDGPITITIVNRDGTRYVQKGEYRTNPEDIYPSNPTDDDVSSGSSSERSSTSGGYIFYTFSTVHPIPDEDSPWITDSTDRIPATNMDSSHSITLQPTANPNTGLVEDLDRTGPLSMTTQQSNSQSFSTSHEGLEEDKDHPTTSTLTSSNRNDVTGGRRDPNHSEGSTTLLEGYTSHYPHTKESRTFIPVTSAKTGSFGVTAVTVGDSNSNVNRSLSGDQDTFHPSGGSHTTHGSESDGHSHGSQEGGANTTSGPIRTPQIPEWLIILASLLALALILAVCIAVNSRRRCGQKKKLVINSGNGAVEDRKPSGLNGEASKSQEMVHLVNKESSETPDQFMTADETRNLQNVDMKIGV

SEQ ID NO: 2345 - protein, 429 aa, Homo Sapiens
MDKFWWHAAWGLCLVPLSLAQIDLNITCRFAGVFHVEKNGRYSISRTEAADLCKAFNSTLPTMAQMEKALSIGFETCRYGFIEGHVVIPRIHPNSICAANNTGVYILTSNTSQYDTYCFNASAPPEEDCTSVTDLPNAFDGPITITIVNRDGTRYVQKGEYRTNPEDIYPSNPTDDDVSSGSSSERSSTSGGYIFYTFSTVHPIPDEDSPWITDSTDRIPATNRNDVTGGRRDPNHSEGSTTLLEGYTSHYPHTKESRTFIPVTSAKTGSFGVTAVTVGDSNSNVNRSLSGDQDTFHPSGGSHTTHGSESDGHSHGSQEGGANTTSGPIRTPQIPEWLIILASLLALALILAVCIAVNSRRRCGQKKKLVINSGNGAVEDRKPSGLNGEASKSQEMVHLVNKESSETPDQFMTADETRNLQNVDMKIGV

SEQ ID NO: 2346 - protein, 361 aa, Homo Sapiens
MDKFWWHAAWGLCLVPLSLAQIDLNITCRFAGVFHVEKNGRYSISRTEAADLCKAFNSTLPTMAQMEKALSIGFETCRYGFIEGHVVIPRIHPNSICAANNTGVYILTSNTSQYDTYCFNASAPPEEDCTSVTDLPNAFDGPITITIVNRDGTRYVQKGEYRTNPEDIYPSNPTDDDVSSGSSSERSSTSGGYIFYTFSTVHPIPDEDSPWITDSTDRIPATRDQDTFHPSGGSHTTHGSESDGHSHGSQEGGANTTSGPIRTPQIPEWLIILASLLALALILAVCIAVNSRRRCGQKKKLVINSGNGAVEDRKPSGLNGEASKSQEMVHLVNKESSETPDQFMTADETRNLQNVDMKIGV

SEQ ID NO: 2347 - protein, 340 aa, Homo Sapiens
MDKFWWHAAWGLCLVPLSLAQIDLNITCRFAGVFHVEKNGRYSISRTEAADLCKAFNSTLPTMAQMEKALSIGFETCRYGFIEGHVVIPRIHPNSICAANNTGVYILTSNTSQYDTYCFNASAPPEEDCTSVTDLPNAFDGPITITIVNRDGTRYVQKGEYRTNPEDIYPSNPTDDDVSSGSSSERSSTSGGYIFYTFSTVHPIPDEDSPWITDSTDRIPATRHSHGSQEGGANTTSGPIRTPQIPEWLIILASLLALALILAVCIAVNSRRRCGQKKKLVINSGNGAVEDRKPSGLNGEASKSQEMVHLVNKESSETPDQFMTADETRNLQNVDMKIGV

SEQ ID NO: 2348 - protein, 699 aa, Homo Sapiens
MDKFWWHAAWGLCLVPLSLAQIDLNITCRFAGVFHVEKNGRYSISRTEAADLCKAFNSTLPTMAQMEKALSIGFETCRYGFIEGHVVIPRIHPNSICAANNTGVYILTSNTSQYDTYCFNASAPPEEDCTSVTDLPNAFDGPITITIVNRDGTRYVQKGEYRTNPEDIYPSNPTDDDVSSGSSSERSSTSGGYIFYTFSTVHPIPDEDSPWITDSTDRIPATSTSSNTISAGWEPNEENEDERDRHLSFSGSGIDDDEDFISSTISTTPRAFDHTKQNQDWTQWNPSHSNPEVLLQTTTRMTDVDRNGTTAYEGNWNPEAHPPLIHHEHHEEEETPHSTSTIQATPSSTTEETATQKEQWFGNRWHEGYRQTPKEDSHSTTGTAAASAHTSHPMQGRTTPSPEDSSWTDFFNPISHPMGRGHQAGRRMDMDSSHSITLQPTANPNTGLVEDLDRTGPLSMTTQQSNSQSFSTSHEGLEEDKDHPTTSTLTSSNRNDVTGGRRDPNHSEGSTTLLEGYTSHYPHTKESRTFIPVTSAKTGSFGVTAVTVGDSNSNVNRSLSGDQDTFHPSGGSHTTHGSESDGHSHGSQEGGANTTSGPIRTPQIPEWLIILASLLALALILAVCIAVNSRRRCGQKKKLVINSGNGAVEDRKPSGLNGEASKSQEMVHLVNKESSETPDQFMTADETRNLQNVDMKIGV

SEQ ID NO: 2349 - protein, 277 aa, Homo Sapiens
MDKFWWHAAWGLCLVPLSLAQIDLNITCRFAGVFHVEKNGRYSISRTEAADLCKAFNSTLPTMAQMEKALSIGFETCRYGFIEGHVVIPRIHPNSICAANNTGVYILTSNTSQYDTYCFNASAPPEEDCTSVTDLPNAFDGPITITIVNRDGTRYVQKGEYRTNPEDIYPSNPTDDDVSSGSSSERSSTSGGYIFYTFSTVHPIPDEDSPWITDSTDRIPATTASAHTSHPMQGRTTPSPEDSSWTDFFNPISHPMGRGHQAGRRMDMDSSHSITLQ

SEQ ID NO: 2350 - protein, 742 aa, Homo Sapiens
MDKFWWHAAWGLCLVPLSLAQIDLNITCRFAGVFHVEKNGRYSISRTEAADLCKAFNSTLPTMAQMEKALSIGFETCRYGFIEGHVVIPRIHPNSICAANNTGVYILTSNTSQYDTYCFNASAPPEEDCTSVTDLPNAFDGPITITIVNRDGTRYVQKGEYRTNPEDIYPSNPTDDDVSSGSSSERSSTSGGYIFYTFSTVHPIPDEDSPWITDSTDRIPATTLMSTSATATETATKRQETWDWFSWLFLPSESKNHLHTTTQMAGTSSNTISAGWEPNEENEDERDRHLSFSGSGIDDDEDFISSTISTTPRAFDHTKQNQDWTQWNPSHSNPEVLLQTTTRMTDVDRNGTTAYEGNWNPEAHPPLIHHEHHEEEETPHSTSTIQATPSSTTEETATQKEQWFGNRWHEGYRQTPKEDSHSTTGTAAASAHTSHPMQGRTTPSPEDSSWTDFFNPISHPMGRGHQAGRRMDMDSSHSITLQPTANPNTGLVEDLDRTGPLSMTTQQSNSQSFSTSHEGLEEDKDHPTTSTLTSSNRNDVTGGRRDPNHSEGSTTLLEGYTSHYPHTKESRTFIPVTSAKTGSFGVTAVTVGDSNSNVNRSLSGDQDTFHPSGGSHTTHGSESDGHSHGSQEGGANTTSGPIRTPQIPEWLIILASLLALALILAVCIAVNSRRRCGQKKKLVINSGNGAVEDRKPSGLNGEASKSQEMVHLVNKESSETPDQFMTADETRNLQNVDMKIGV

SEQ ID NO: 2351 - protein, 206 aa, Homo Sapiens
MDKFWWHAAWGLCLVPLSLAQIDLNITCRFAGVFHVEKNGRYSISRTEAADLCKAFNSTLPTMAQMEKALSIGFETCRYGFIEGHVVIPRIHPNSICGANTTSGPIRTPQIPEWLIILASLLALALILAVCIAVNSRRRCGQKKKLVINSGNGAVEDRKPSGLNGEASKSQEMVHLVNKESSETPDQFMTADETRNLQNVDMKIGV

SEQ ID NO: 2352 - protein, 139 aa, Homo Sapiens
MDKFWWHAAWGLCLVPLSLAQIDLNITCRFAGVFHVEKNGRYSISRTEAADLCKAFNSTLPTMAQMEKALSIGFETCSLHCSQQSKKVWAEEKASDQQWQWSCGGQKAKWTQRRGQQVSGNGAFGEQGVVRNSRPVYDS

SEQ ID NO: 2353 - protein, 80 aa, Homo Sapiens
MDKFWWHAAWGLCLVPLSLAQIDLNITCRFAGVFHVEKNGRYSISRTEAADLCKAFNSTLPTMAQMEKALSIGFETCSST

SEQ ID NO: 2354 - protein, 232 aa, Homo Sapiens
PEDIYPSNPTDDDVSSGSSSERSSTSGGYIFYTFSTVHPIPDEDSPWITDSTDRIPATNMDSSHSITLQPTANPNTGLVEDLDRTGPLSMTTQQSNSQSFSTSHEGLEEDKDHPTTSTLTSSRDQDTFHPSGGSHTTHGSESDGHSHGSQEGGANTTSGPIRTPQIPEWLIILASLLALALILAVCIAVNSRRRCGQKKKLVINSGNGAVEDRKPSGLNGEASKSQEMVHLV

SEQ ID NO: 2355 - protein, 195 aa, Homo Sapiens
RNGTTAYEGNWNPEAHPPLIHHEHHEEEETPHSTSTIQATPSSTTEETATQKEQWFGNRWHEGYRQTPKEDSHSTTGTADMDSSHSITLQPTANPNTGLVEDLDRTGPLSMTTQQSNSQSFSTSHEGLEEDKDHPTTSTLTSSNRNDVTGGRRDPNHSEGSTTLLEGYTSHYPHTKESRTFIPVTSAKTGSFGVT

SEQ ID NO: 2356 - protein, 187 aa, Homo Sapiens [sequence omitted]

SEQ ID NO: 2357 - protein, 287 aa, Homo Sapiens
RYSISRTEAADLCKAFNSTLPTMAQMEKALSIGFETCRYGFIEGHVVIPRIHPNSICAANNTGVYILTSNTSQYDTYCFNASAPPEEDCTSVTDLPNAFDGPITITIVNRDGTRYVQKGEYRTNPEDIYPSNPTDDDVSSGSSSERSSTSGGDQDTFHPSGGSHTTHGSESDGHSHGSQEGGANTTSGPIRTPQIPEWLIILASLLALALILAVCIAVNSRRRCGQKKKLVINSGNGAVEDRKPSGLNGEASKSQEMVHLVNKESSETPDQFMTADETRNLQNVDMK

SEQ ID NO: 2358 - protein, 82 aa, Homo Sapiens
SKHNLWSYKDTPNSRCGQKKKLVINSGNGAVEDRKPSGLNGEASKSQEMVHLVNKESSETPDQFMTADETRNLQNVDMKIGV

SEQ ID NO: 2359 - protein, 294 aa, Homo Sapiens
  misc_feature (1)..(1): Xaa can be any naturally occurring amino acid
XDKFWWHAAWGLCLVPLSLAQIDLNITCRFAGVFHVEKNGRYSISRTEAADLCKAFNSTLPTMAQMEKALSIGFETCRYGFIEGHVVIPRIHPNSICAANNTGVYILTSNTSQYDTYCFNASAPPEEDCTSVTDLPNAFDGPITITIVNRDGTRYVQKGEYRTNPEDIYPSNPTDDDVSSGSSSERSSTSGGYIFYTFSTVHPIPDEDSPWITDSTDRIPATRDQDTFHPSGGSHTTHGSESDGHSHGSQEGGANTTSGPIRTPQIPEWLIILASLLALALILAVCIAVNSRRS

SEQ ID NO: 2360 - protein, 243 aa, Homo Sapiens
  misc_feature (1)..(1): Xaa can be any naturally occurring amino acid
XDLPNAFDGPITITIVNRDGTRYVQKGEYRTNPEDIYPSNPTDDDVSSGSSSERSSTSGGYIFYTFSTVHPIPDEDSPWITDSTDRIPATTLMSTSATATETATKRQETWDWFSWLFLPSESKNHLHTTTQMAGTSSNTISAGWEPNEENEDERDRHLSFSGSGIDDDEDFISSTNMDSSHSITLQPTANPNTGLVEDLDRTGPLSMTTQQSNSQSFSTSHEGLEEDKDHPTTSTLTSSNRND

SEQ ID NO: 2361 - protein, 195 aa, Homo Sapiens
  misc_feature (1)..(1): Xaa can be any naturally occurring amino acid
XFIEGHVVIPRIHPNSICAANNTGVYILTSNTSQYDTYCFNASAPPEEDCTSVTDLPNAFDGPITITIVNRDGTRYVQKGEYRTNPEDIYPSNPTDDDVSSGSSSERSSTSGGYIFYTFSTVHPIPDEDSPWITDSTDRIPATKQSNSQSFSTSHEGLEEDKDHPTTSTLTSSNRNDVTGGRRDPNHSEGSTTLL

SEQ ID NO: 2362 - protein, 240 aa, Homo Sapiens
  misc_feature (1)..(1): Xaa can be any naturally occurring amino acid
XLNITCRFAGVFHVEKNGRYSISRTEAADLCKAFNSTLPTMAQMEKALSIGFETCRYGFIEGHVVIPRIHPNSICAANNTGVYILTSNTSQYDTYCFNASAPPEEDCTSVTDLPNAFDGPITITIVNRDGTRYVQKGEYRTNPEDIYPSNPTDDDVSSGSSSERSSTSGDRNDVTGGRRDPNHSEGSTTLLEGYTSHYPHTKESRTFIPVTSAKTGSFGVTAVTVGDSNSNVNRSLSGDQ

SEQ ID NO: 2363 - protein, 118 aa, Homo Sapiens
  misc_feature (1)..(1): Xaa can be any naturally occurring amino acid
XPDEDSPWITDSTDRIPATSWEPNEENEDERDRHLSFSGSGIDDDEDFISSTISTTPRAFDHTKQNQDWTQWNPSHSNPEVLLQTTTRMTDVDRNGTTAYEGNWNPEAHPPLIHHEHH

SEQ ID NO: 2364 - protein, 230 aa, Homo Sapiens
  misc_feature (1)..(1): Xaa can be any naturally occurring amino acid
XQMEKALSIGFETCRYGFIEGHVVIPRIHPNSICAANNTGVYILTSNTSQYDTYCFNASAPPEEDCTSVTDLPNAFDGPITITIVNRDGTRYVQKGEYRTNPEDIYPSNPTDDDVSSGSSSERSSTSGGYIFYTFSTVHPIPDEDSPWITDSTDRIPATISTTPRAFDHTKQNQDWTQWNPSHSNPEVLLQTTTRMTDVDRNGTTAYEGNWNPEAHPPLIHHEHHEEEET

SEQ ID NO: 2365 - protein, 183 aa, Homo Sapiens
  misc_feature (1)..(1): Xaa can be any naturally occurring amino acid
XRTEAADLCKAFNSTLPTMAQMEKALSIGFETCRYGFIEGHVVIPRIHPNSICAANNTGVYILTSNTSQYDTYCFNASAPPEEDCTSVTDLPNAFDGPITITIVNRDGTRYVQKGEYRTNPEDIYPSNPTDDDVSSGSSSERSSTSGDMDSSHSITLQPTANPNTGLVEDLDRTGPLSMTTQQ

SEQ ID NO: 2366 - protein, 191 aa, Homo Sapiens
  misc_feature (1)..(1): Xaa can be any naturally occurring amino acid
XSTTPRAFDHTKQNQDWTQWNPSHSNPEVLLQTTTRMTVQATPSSTTEETATQKEQWFGNRWHEGYRQTPKEDSHSTTGTAASAHTSHPMQGRTTPSPEDSSWTDFFNPISHPMGRGHQAGRRMDMDSSHSITLQPTANPNTGLVEDLDRTGPLSMTTQQSNSQSFSTSHEGLEEDKDHPTTSTLTSSNRN

SEQ ID NO: 2367 - protein, 243 aa, Homo Sapiens
MCSRGWDSCLALELLLLPLSLLVTSIQGHLVHMTVVSGSNVTLNISESLPENYKQLTWFYTFDQKIVEWDSRKSKYFESKFKGRVRLDPQSGALYISKVQKEDNSTYIMRVLKKTGNEQEWKIKLQVLDPVPKPVIKIEKIEDMDDNCYLKLSCVIPGESVNYTWYGDKRPFPKELQNSVLETTLMPHNYSRCYTCQVSNSVSSKNGTVCLSPPCTLARSFGVEWIASWLVVTVPTILGLLLT

SEQ ID NO: 2368 - protein, 252 aa, Homo Sapiens
MCSRGWDSCLALELLLLPLSLLVTSIQGHLVHMTVVSGSNVTLNISESLPENYKQLTWFYTFDQKIVEWDSRKSKYFESKFKGRVRLDPQSGALYISKVQKEDNSTYIMRVLKKTGNEQEWKIKLQVLDPVPKPVIKIEKIEDMDDNCYLKLSCVIPGESVNYTWYGDKRPFPKELQNSVLETTLMPHNYSRCYTCQVSNSVSSKNGTVCLSPPCTLGKKDPWELRGAQGNWSCFEQRKAGGPIQPPCTVWW

SEQ ID NO: 2369 - protein, 169 aa, Homo Sapiens
MCSRGWDSCLALELLLLPLSLLVTSIQGHLVHMTVVSGSNVTLNISESLPENYKQLTWFYTFDQKIVEWDSRKSKYFESKFKGRVRLDPQSGALYISKVQKEDNSTYIMRVLKKTGNEQEWKIKLQVLGESGEPKSKSPLQWPQMDHCRASWEAWGTLGEEERKTSGQV

SEQ ID NO: 2370 - protein, 165 aa, Homo Sapiens
MPMGSLQPLATLYLLGMLVASCLGRLSWYDPDFQARLTRSNSKCQGQLEVYLKDGWHMVCSQSWGRSSKQWEDPSQASKVCQRLNCGVPLSLGPFLVTYTPQSSIICYGQLGSFSNCSHSRNDMCHSLGLTCLEPQKTTPPTTRPPPTTTPEPTAMRPRTRPRTW

SEQ ID NO: 2371 - protein, 495 aa, Homo Sapiens
MPMGSLQPLATLYLLGMLVASCLGRLSWYDPDFQARLTRSNSKCQGQLEVYLKDGWHMVCSQSWGRSSKQWEDPSQASKVCQRLNCGVPLSLGPFLVTYTPQSSIICYGQLGSFSNCSHSRNDMCHSLGLTCLEPQKTTPPTTRPPPTTTPEPTAPPRLQLVAQSGGQHCAGVVEFYSGSLGGTISYEAQDKTQDLENFLCNNLQCGSFLKHLPETEAGRAQDPGEPREHQPLPIQWKIQNSSCTSLEHCFRKIKPQKSGRVLALLCSGFQPKVQSRLVGGSSICEGTVEVRQGAQWAALCDSSSARSSLRWEEVCREQQCGSVNSYRVLDAGDPTSRGLFCPHQKLSQCHELWERNSYCKKVFVTCQDPNPAGLAAGTVASIILALVLLVVLLVVCGPLAYKKLVKKFRQKKQRQWIGPTGMNQNMSFHRNHTATVRSHAENPTASHVDNEYSQPPRNSHLSAYPALEGALHRSSMQPDNSSDSDYDLHGAQRL

SEQ ID NO: 2372 - protein, 317 aa, Homo Sapiens
MTVARPSVPAALPLLGELPRLLLLVLLCLPAVWGDCGLPPDVPNAQPALEGRTSFPEDTVITYKCEESFVKIPGEKDSVICLKGSQWSDIEEFCNQKSCPNPGEIRNGQIDVPGGILFGATISFSCNTGYKLFGSTSSFCLISGSSVQWSDPLPECREIYCPAPPQIDNGIIQGERDHYGYRQSVTYACNKGFTMIGEHSIYCTVNNDEGEWSGPPPECRGKSLTSKVPPTVQKPTTVNVPTTEVSPTSQKTTTKTTTPNAQATRSTPVSRTTKHFHETTPNKGSGTTSGTTRLLSGHTCFTLTGLLGTLVTMGLLT

SEQ ID NO: 2373 - protein, 440 aa, Homo Sapiens
MTVARPSVPAALPLLGELPRLLLLVLLCLPAVWGDCGLPPDVPNAQPALEGRTSFPEDTVITYKCEESFVKIPGEKDSVICLKGSQWSDIEEFCNRSCEVPTRLNSASLKQPYITQNYFPVGTVVEYECRPGYRREPSLSPKLTCLQNLKWSTAVEFCKKKSCPNPGEIRNGQIDVPGGILFGATISFSCNTGYKLFGSTSSFCLISGSSVQWSDPLPECREIYCPAPPQIDNGIIQGERDHYGYRQSVTYACNKGFTMIGEHSIYCTVNNDEGEWSGPPPECRGKSLTSKVPPTVQKPTTVNVPTTEVSPTSQKTTTKTTTPNAQATRSTPVSRTTKHFHETTPNKGSGTTSGTTRLLSGSRPVTQAGMRWCDRSSLQSRTPGFKRSFHFSLPSSWYYRAHVFHVDRFAWDASNHGLADLAKEELRRKYTQVYRLFLVS

SEQ ID NO: 2374 - protein, 381 aa, Homo Sapiens
MTVARPSVPAALPLLGELPRLLLLVLLCLPAVWGDCGLPPDVPNAQPALEGRTSFPEDTVITYKCEESFVKIPGEKDSVICLKGSQWSDIEEFCNRSCEVPTRLNSASLKQPYITQNYFPVGTVVEYECRPGYRREPSLSPKLTCLQNLKWSTAVEFCKKKSCPNPGEIRNGQIDVPGGILFGATISFSCNTGYKLFGSTSSFCLISGSSVQWSDPLPECREIYCPAPPQIDNGIIQGERDHYGYRQSVTYACNKGFTMIGEHSIYCTVNNDEGEWSGPPPECRGKSLTSKVPPTVQKPTTVNVPTTEVSPTSQKTTTKTTTPNAQATRSTPVSRTTKHFHETTPNKGSGTTSGTTRLLSGHTCFTLTGLLGTLVTMGLLT

SEQ ID NO: 2375 - protein, 444 aa, Homo Sapiens
MTVARPSVPAALPLLGELPRLLLLVLLCLPAVWGDCGLPPDVPNAQPALEGRTSFPEDTVITYKCEESFVKIPGEKDSVICLKGSQWSDIEEFCNRSCEVPTRLNSASLKQPYITQNYFPVGTVVEYECRPGYRREPSLSPKLTCLQNLKWSTAVEFCKKKSCPNPGEIRNGQIDVPGGILFGATISFSCNTGYKLFGSTSSFCLISGSSVQWSDPLPECREIYCPAPPQIDNGIIQGERDHYGYRQSVTYACNKGFTMIGEHSIYCTVNNDEGEWSGPPPECRGKSLTSKVPPTVQKPTTVNVPTTEVSPTSQKTTTKTTTPNAQATRSTPVSRTTKHFHETTPNKGSGTTSGTTRLLSGSRPVTQAGMRWCDRSSLQSRTPGFKRSFHFSLPSSWYYRCVPRHPAKFLKFIFCRDRIFLCCPGWFQTPGRKRFFRPPKTLRL

SEQ ID NO: 2376 - protein, 550 aa, Homo Sapiens
MTVARPSVPAALPLLGELPRLLLLVLLCLPAVWGDCGLPPDVPNAQPALEGRTSFPEDTVITYKCEESFVKIPGEKDSVICLKGSQWSDIEEFCNRSCEVPTRLNSASLKQPYITQNYFPVGTVVEYECRPGYRREPSLSPKLTCLQNLKWSTAVEFCKKKSCPNPGEIRNGQIDVPGGILFGATISFSCNTGYKLFGSTSSFCLISGSSVQWSDPLPECREIYCPAPPQIDNGIIQGERDHYGYRQSVTYACNKGFTMIGEHSIYCTVNNDEGEWSGPPPECRGKSLTSKVPPTVQKPTTVNVPTTEVSPTSQKTTTKTTTPNAQGTETPSVLQKHTTENVSATRTPPTPQKPTTVNVPATIVTPTPKPTTINVPATGVSSTPQRHTIVNVSATGTLPTLQKPTRANDSATKSPAAAQTSFISKTLSTKTPSAAQNPMMTNASATQATLTAQKFTTAKVAFTQSPSAARKSTNVHSPVTNGLKSTQRFPSAHITATRSTPVSRTTKHFHETTPNKGSGTTSGTTRLLSGHTCFTLTGLLGTLVTMGLLT

SEQ ID NO: 2377 - protein, 439 aa, Homo Sapiens
MTVARPSVPAALPLLGELPRLLLLVLLCLPAVWGDCGLPPDVPNAQPALEGRTSFPEDTVITYKCEESFVKIPGEKDSVICLKGSQWSDIEEFCNRSCEVPTRLNSASLKQPYITQNYFPVGTVVEYECRPGYRREPSLSPKLTCLQNLKWSTAVEFCKKKSCPNPGEIRNGQIDVPGGILFGATISFSCNTGYKLFGSTSSFCLISGSSVQWSDPLPECREIYCPAPPQIDNGIIQGERDHYGYRQSVTYACNKGFTMIGEHSIYCTVNNDEGEWSGPPPECRGKSLTSKVPPTVQKPTTVNVPTTEVSPTSQKTTTKTTTPNAQATRSTPVSRTTKHFHETTPNKGSGTTSGTTRLLSETVFHRVIQDGLDLLASRSACLGLPKCWDYRREPPHLARAHVFHVDRFAWDASNHGLADLAKEELRRKYTQVYRLFLVS

SEQ ID NO: 2378 - protein, 384 aa, Homo Sapiens
MTVARPSVPAALPLLGELPRLLLLVLLCLPAVWGDCGLPPDVPNAQPALEGRTSFPEDTVITYKCEESFVKIPGEKDSVICLKGSQWSDIEEFCNRSCEVPTRLNSASLKQPYITQNYFPVGTVVEYECRPGYRREPSLSPKLTCLQNLKWSTAVEFCKKKSCPNPGEIRNGQIDVPGGILFGATISFSCNTGYKLFGSTSSFCLISGSSVQWSDPLPECREIYCPAPPQIDNGIIQGERDHYGYRQSVTYACNKGFTMIGEHSIYCTVNNDEGEWSGPPPECRGKSLTSKVPPTVQKPTTVNVPTTEVSPTSQKTTTKTTTPNAQATRSTPVSRTTKHFHETTPNKGSGTTSGTTRLLSALQVRPFEVSGSSHISSKKMMCIL

SEQ ID NO: 2379 - protein, 326 aa, Homo Sapiens
  misc_feature (1)..(1): Xaa can be any naturally occurring amino acid
XAALPLLGELPRLLLLVLLCLPAVWESSRVEHTMLQTCMSSLSGDCGLPPDVPNAQPALEGRTSFPEDTVITYKCEESFVKIPGEKDSVICLKGSQWSDIEEFCNRSCEVPTRLNSASLKQPYITQNYFPVGTVVEYECRPGYRREPSLSPKLTCLQNLKWSTAVEFCKKKSCPNPGEIRNGQIDVPGGILFGATISFSCNTGYKLFGSTSSFCLISGSSVQWSDPLPECREIYCPAPPQIDNGIIQGERDHYGYRQSVTYACNKGFTMIGEHSIYCTVNNDEGEWSGPPPECRGKSLTSKVPPTVQKPTTVNVPTTEVSPTSQKT

SEQ ID NO: 2380 - protein, 268 aa, Homo Sapiens
  misc_feature (1)..(1): Xaa can be any naturally occurring amino acid
XGEIRNGQIDVPGGILFGATISFSCNTGYKLFGSTSSFCLISGSSVQWSDPLPECREIYCPAPPQIDNGIIQGERDHYGYRQSVTYACNKGFTMIGEHSIYCTVNNDEGEWSGPPPECRGKSLTSKVPPTVQKPTTVNVPTTEVSPTSQKTTTKTTTPNAQATRSTPVSRTTKHFHETTPNKGSGTTSGTTRLLSESYSVTQAGVWWCDLRSLQPLPPEFKQFSCLSLRSSWDYRIITGHLLPGDFSVPSTIVDGIYFPTPLSPFFVG

SEQ ID NO: 2381 - protein, 194 aa, Homo Sapiens
  misc_feature (1)..(1): Xaa can be any naturally occurring amino acid
XREIYCPAPPQIDNGIIQGERDHYGYRQSVTYACNKGFTMIGEHSIYCTVNNDEGEWSGPPPECRGKSLTSKVPPTVQKPTTVNVPTTEVSPTSQKTTTKTTTPNAQATRSTPVSRTTKHFHETTPNKGSGTTSGTTRLLSESYSVTQAGVWWCDLRSLQPLPPEFKQFSCLSLRSSWDYRIEAADLHSECYSS

SEQ ID NO: 2382 - protein, 61 aa, Homo Sapiens
  misc_feature (1)..(1): Xaa can be any naturally occurring amino acid
XTTEVSPTSQKTTTKTTTPNAQATRSTPVSRTTKHFHETTPNKGSGTTSGTTRLLSAIFSC

SEQ ID NO: 2383 - protein, 119 aa, Homo Sapiens
MGIQGGSVLFGLLLVLAVFCHSGHSLQCYNCPNPTADCKTAVNCSSDFDACLITKAELGYHYVAQAGRRQSSHFSLLKCWDYRCEPSHWPHCPYFNWGYKCITSVGSLSIAISTTSQPA

SEQ ID NO: 2384 - protein, 119 aa, Homo Sapiens; identical to SEQ ID NO: 2383

SEQ ID NO: 2385 - protein, 120 aa, Homo Sapiens
MGIQGGSVLFGLLLVLAVFCHSGHSLQCYNCPNPTADCKTAVNCSSDFDACLITKAGLQVYNKCWKFEHCNFNDVTTRLRENELTYYCCKKDLCNFNEQLENGGTSLSEKTVLLLVTPFL

SEQ ID NO: 2386 - protein, 128 aa, Homo Sapiens
MGIQGGSVLFGLLLVLAVFCHSGHSLQCYNCPNPTADCKTAVNCSSDFDACLITKAGLQVYNKCWKFEHCNFNDVTTRLRENELTYYCCKKDLCNFNEQLENGGTSLSEKTVLLLVTPFLAAAWSLHP

SEQ ID NO: 2387 - protein, 128 aa, Homo Sapiens; identical to SEQ ID NO: 2386

SEQ ID NO: 2388 - protein, 128 aa, Homo Sapiens; identical to SEQ ID NO: 2386

SEQ ID NO: 2389 - protein, 128 aa, Homo Sapiens; identical to SEQ ID NO: 2386

SEQ ID NO: 2390 - protein, 128 aa, Homo Sapiens; identical to SEQ ID NO: 2386

SEQ ID NO: 2391 - protein, 128 aa, Homo Sapiens; identical to SEQ ID NO: 2386

SEQ ID NO: 2392 - protein, 128 aa, Homo Sapiens; identical to SEQ ID NO: 2386

SEQ ID NO: 2393 - protein, 128 aa, Homo Sapiens; identical to SEQ ID NO: 2386

SEQ ID NO: 2394 - protein, 347 aa, Homo Sapiens
MALLFSLILAICTRPGFLASPSGVRLVGGLHRCEGRVEVEQKGQWGTVCDDGWDIKDVAVLCRELGCGAASGTPSGILYEPPAEKEQKVLIQSVSCTGTEDTLAQCEQEEVYDCSHDEDAGASCENPESSFSPVPEGVRLADGPGHCKGRVEVKHQNQWYTVCQTGWSLRAAKVVCRQLGCGRAVLTQKRCNKHAYGRKPIWLSQMSCSGREATLQDCPSGPWGKNTCNHDEDTWVECEDPFDLRLVGGDNLCSGRLEVLHKGVWGSVCDDNWGEKEDQVVCKQLGCGKSLSPSFRDRKCYGPGVGRIWLDNVRCSGEEQSLEQCQHRFWGFHDCTHQEDVAVICSG

SEQ ID NO: 2395 - protein, 38 aa, Homo Sapiens
MWLFFGITGLLTAALSGCTVAKWIQLLGEICCFAGMGF

SEQ ID NO: 2396 - protein, 468 aa, Homo Sapiens
MWLFFGITGLLTAALSGHPSPAPPDQLNTSSAESELWEPGERLPVRLTNGSSSCSGTVEVRLEASWEPACGALWDSRAAEAVCRALGCGGAEAASQLAPPTPELPPPPAAGNTSVAANATLAGAPALLCSGAEWRLCEVVEHACRSDGRRARVTCAENRALRLVDGGGACAGRVEMLEHGEWGSVCDDTWDLEDAHVVCRQLGCGWAVQALPGLHFTPGRGPIHRDQVNCSGAEAYLWDCPGLPGQHYCGHKEDAGAVCSEHQSWRLTGGADRCEGQVEVHFRGVWNTVCDSEWYPSEAKVLCQSLGCGTAVERPKGLPHSLSGRMYYSCNGEELTLSNCSWRFNNSNLCSQSLAARVLCSASRSLHNLSTPEVPASVQTVTIESSVTVKIENKESRELMLLIPSIVLGILLLGSLIFIAFILLRIKGKYALPVMVNHQHLPTTIPAGSNSYQPVPITIPKEGPGPAP

SEQ ID NO: 2397 - protein, 668 aa, Homo Sapiens
MWLFFGITGLLTAALSGHPSPAPPDQLNTSSAESELWEPGERLPVRLTNGSSSCSGTVEVRLEASWEPACGALWDSRAAEAVCRALGCGGAEAASQLAPPTPELPPPPAAGNTSVAANATLAGAPALLCSGAEWRLCEVVEHACRSDGRRARVTCAENRALRLVDGGGACAGRVEMLEHGEWGSVCDDTWDLEDAHVVCRQLGCGWAVQALPGLHFTPGRGPIHRDQVNCSGAEAYLWDCPGLPGQHYCGHKEDAGAVCSEHQSWRLTGGADRCEGQVEVHFRGVWNTVCDSEWYPSEAKVLCQSLGCGTAVERPKGLPHSLSGRMYYSCNGEELTLSNCSWRFNNSNLCSQSLAARVLCSASRSLHNLSTPEVPASVQTVTIESSVTVKIENKESRELMLLIPSIVLGILLLGSLIFIAFILLRIKGKYALPVMVNHQHLPTTIPAGSNSYQPVPITIPKEVFMLPIQVQAPPPEDSDSGSDSDYEHYDFSAQPPVALTTFYNSQRHRVTDEEVQQSRFQMPPLEEGLEELHASHIPTANPGHCITDPPSLGPQYHPRSNSESSTSSGEDYCNSPKSKLPPWNPQVFSSERSSFLEQPPNLELAGTQPAFSAGPPADDSSSTSSGEWYQNFQPPPQPPSEEQFGCPGSPSPQPDSTDNDDYDDISAA

SEQ ID NO: 2398 - protein, 601 aa, Homo Sapiens
MWLFFGITGLLTAALSGHPSPAPPDQLNTSSAESELWEPGERLPVRLTNGSSSCSGTVEVRLEASWEPACGALWDSRAAEAVCRALGCGGAEAASQLAPPTPELPPPPAAGNTSVAANATLAGAPALLCSGAEWRLCEVVEHACRSDGRRARVTCAENRALRLVDGGGACAGRVEMLEHGEWGSVCDDTWDLEDAHVVCRQLGCGWAVQALPGLHFTPGRGPIHRDQVNCSGAEAYLWDCPGLPGQHYCGHKEDAGAVCSEHQSWRLTGGADRCEGQVEVHFRGVWNTVCDSEWYPSEAKVLCQSLGCGTAVERPKGLPHSLSGRMYYSCNGEELTLSNCSWRFNNSNLCSQSLAARVLCSASRSLHNLSTPEVPASVQTVTIESSVTVKIENKESRELMLLIPSIVLGILLLGSLIFIAFILLRIKGKYVFMLPIQVQAPPPEDSDSGSDSDYEHYDFSAQPPVALTTFYNSQRHRVTDEEVQQSRFQMPPLEEGLEELHASHIPTANPGHCITDPPSLGPQYHPRSNSESSTSSGEDYCNSPKSKLPPWNPQVFSSERSSFLEQPPNLELAGTQPAFSGSPSPQPDSTDNDDYDDISAA

SEQ ID NO: 2399 - protein, 592 aa, Homo Sapiens
MWLFFGITGLLTAALSGHPSPAPPDQLNTSSAESELWEPGERLPVRLTNGSSSCSGTVEVRLEASWEPACGALWDSRAAEAVCRALGCGGAEAASQLAPPTPELPPPPAAGNTSVAANATLAGAPALLCSGAEWRLCEVVEHACRSDGRRARVTCAENRALRLVDGGGACAGRVEMLEHGEWGSVCDDTWDLEDAHVVCRQLGCGWAVQALPGLHFTPGRGPIHRDQVNCSGAEAYLWDCPGLPGQHYCGHKEDAGAVCSEHQSWRLTGGADRCEGQVEVHFRGVWNTVCDSEWYPSEAKVLCQSLGCGTAVERPKGLPHSLSGRMYYSCNGEELTLSNCSWRFNNSNLCSQSLAARVLCSASRSLHNLSTPEVPASVQTVTIESSVTVKIENKESRELMLLIPSIVLGILLLGSLIFIAFILLRIKGKYALPVMVNHQHLPTTIPAGSNSYQPVPITIPKEDSQRHRVTDEEVQQSRFQMPPLEEGLEELHASHIPTANPGHCITDPPSLGPQYHPRSNSESSTSSGEDYCNSPKSKLPPWNPQVFSSERSSFLEQPPNLELAGTQPAFSGSPSPQPDSTDNDDYDDISAA

SEQ ID NO: 2400 - protein, 422 aa, Homo Sapiens
MWLFFGITGLLTAALSGHPSPAPPDQLNTSSAESELWEPGERLPVRLTNGSSSCSGTVEVRLEASWEPACGALWDSRAAEAVCRALGCGGAEAASQLAPPTPELPPPPAAGNTSVAANATLAGAPALLCSGAEWRLCEVVEHACRSDGRRARVTCAENRALRLVDGGGACAGRVEMLEHGEWGSVCDDTWDLEDAHVVCRQLGCGWAVQALPGLHFTPGRGPIHRDQVNCSGAEAYLWDCPGLPGQHYCGHKEDAGAVCSASRSLHNLSTPEVPASVQTVTIESSVTVKIENKESRELMLLIPSIVLGILLLGSLIFIAFILLRIKGKYVFMLPIQVQAPPPEDSDSGSDSDYEHYDFSAQPPVALTTFYNSQRHRVTDEEVQQSRFQMPPLEEGLEELHASHIPTANPGHCITDPPSLGPQ

SEQ ID NO: 2401 - protein, 278 aa, Homo Sapiens
MWLFFGITGLLTAALSGHPSPAPPDQLNTSSAESELWEPGERLPVRLTNGSSSCSGTVEVRLEASWEPACGALWDSRAAEAVCRALGCGGAEAASQLAPPTPELPPPPAAGNTSVAANATLAGAPALLCSGAEWRLCEVVEHACRSDGRRARVTCAENRALRLVDGGGACAGRVEMLEHGEWGSVCDDTWDLEDAHVVCRQLGCGWAVQALPGLHFTPGRGPIHRDQVNCSGAEAYLWDCPGLPGQHYCGHKEDAGAVCSESSVTVKIENKESRELML

SEQ ID NO: 2402 - protein, 186 aa, Homo Sapiens
  misc_feature (1)..(1): Xaa can be any naturally occurring amino acid
XNRALRLVDGGGACAGRVEMLEHGEWGSVCDDTWDLEDAHVVCRQLGCGWAVQALPGLHFTPGRGPIHRDQVNCSGAEAYLWDCPGLPGQHYCGHKEDAGAVCSASRSLHNLSTPEVPASVQTVTIESSVTVKIENKESRELMLLIPSIVLGILLLGSLIFIAFILLRIKGKYALPVMVNHQHLPT

SEQ ID NO: 2403 - protein, 354 aa, Homo Sapiens
MRLAVLFSGALLGLLAAQGTGNDCPHKKSATLLPSFTVTPTVTESTGTTSHRTTKSHKTTTHRTTTTGTTSHGPTTATHNPTTTSHGNVTVHPTSNSTATSQGPSTATHSPATTSHGNATVHPTSNSTATSPGFTSSAHPEPPPPSPSPSPTSKETIGDYTWTNGSQPCVHLQAQIQIRVMYTTQGGGEAWGISVLNPNKTKVQGSCEGAHPHLLLSFPYGHLSFGFMQDLQQKVVYLSYMAVEYNVSFPHAAQWTFSAQNASLRDLQAPLGQSFSCSNSSIILSPAVHLDLLSLRLQAAQLPHTGVFGQSFSCPSDRSILLPLIIGLILLGLLALVLIAFCIIRRRPSAYQAL

SEQ ID NO: 2404 - protein, 181 aa, Homo Sapiens [sequence omitted]

SEQ ID NO: 2405 - protein, 327 aa, Homo Sapiens
MRLAVLFSGALLGLLAESTGTTSHRTTKSHKTTTHRTTTTGTTSHGPTTATHNPTTTSHGNVTVHPTSNSTATSQGPSTATHSPATTSHGNATVHPTSNSTATSPGFTSSAHPEPPPPSPSPSPTSKETIGDYTWTNGSQPCVHLQAQIQIRVMYTTQGGGEAWGISVLNPNKTKVQGSCEGAHPHLLLSFPYGHLSFGFMQDLQQKVVYLSYMAVEYNVSFPHAAQWTFSAQNASLRDLQAPLGQSFSCSNSSIILSPAVHLDLLSLRLQAAQLPHTGVFGQSFSCPSDRSILLPLIIGLILLGLLALVLIAFCIIRRRPSAYQAL

SEQ ID NO: 2406 - protein, 121 aa, Homo Sapiens
  misc_feature (1)..(1): Xaa can be any naturally occurring amino acid
XKTKVQGSCEGAHPHLLLSFPYGHLSFGFMQDLQQKVVYLSYMAVEYNVSFPHAAQWTFSAQNASLRDLQAPLGQSFSCSNSSIILSPAVHLDLLSLRLQAAQLPHTGVFGQSKTYLLLPS

SEQ ID NO: 2407 - protein, 35 aa, Homo Sapiens
MAGPPRLLLLPLLLALARGLPGALAAQAGACVGST

SEQ ID NO: 2408 - protein, 240 aa, Homo Sapiens
MAGPPRLLLLPLLLALARGLPGALAAQEVQQSPHCTTVPVGASVNITCSTSGGLRGIYLRQLGPQPQDIIYYEDGVVPTTDRRFRGRIDFSGSQDNLTITMHRLQLSDTGTYTCQAITEVNVYGSGTLVLVTEEQSQGWHRCSDAPPRASALPAPPTGSALPDPQTASALPDPPAASALPAALAVISFLLGLGLGVACVLARTQIKKLCSWRDKNSAACVVYEDMSHSRCNTLSSPNQYQ

SEQ ID NO: 2409 - protein, 221 aa, Homo Sapiens
MAGPPRLLLLPLLLALARGLPGALAAQEVQQSPHCTTVPVGASVNITCSTSGGLRGIYLRQLGPQPQDIIYYEDGVVPTTDRRFRGRIDFSGSQDNLTITMHRLQLSDTGTYTCQAITEVNVYGSGTLVLVTEEQSQGWHRCSDAPPRASALPAPPTGSALPDPQTASALPDPPAASALPAALAVISFLLGLGLGVACVLARTQVSVSPSCHLHPKDCSLS

SEQ ID NO: 2410 - protein, 160 aa, Homo Sapiens
MAGPPRLLLLPLLLALARGLPGALAAQGRTFSVLLARLMVTAQVLPRGAAVSPLHDCPRGSLRQHHLLHQRGPAWDLPEAARATAPRHHLLRGRGGAHYGQTVPGPHRLLRVPGQPDYHHAPPAAVGHWHLHLPGHHGGQCLRLRHPGPGDRGTVPRMAQ

SEQ ID NO: 2411 - protein, 140 aa, Homo Sapiens
MHRLQLSDTGTYTCQAITEVNVYGSGTLVLVTEEQSQGWHRCSDAPPRASALPAPPTGSALPDPQTASALPDPPAASALPAALAVISFLLGLGLGVACVLARTQIKKLCSWRDKNSAACVVYEDMSHSRCNTLSSPNQYQ

SEQ ID NO: 2412 - protein, 121 aa, Homo Sapiens
MHRLQLSDTGTYTCQAITEVNVYGSGTLVLVTEEQSQGWHRCSDAPPRASALPAPPTGSALPDPQTASALPDPPAASALPAALAVISFLLGLGLGVACVLARTQVSVSPSCHLHPKDCSLS

SEQ ID NO: 2413 - protein, 188 aa, Homo Sapiens
MPGGPGVLQALPATIFLLFLLSAVYLGPGCQALWMHKVPASLMVSLGEDAHFQCPHNSSNNANVTWWRVLHGNYTWPPEFLGPGEDPNEPPPRPFLDMGEGTKNRIITAEGIILLFCAVVPGTLLLFRKRWQNEKLGLDAGDEYEDENLYEGLNLDDCSMYEDISRGLQGTYQDVGSLNIGDVQLEKP

SEQ ID NO: 2414 - protein, 226 aa, Homo Sapiens
MPGGPGVLQALPATIFLLFLLSAVYLGPGCQALWMHKVPASLMVSLGEDAHFQCPHNSSNNANVTWWRVLHGNYTWPPEFLGPGEDPNGTLIIQNVNKSHGGIYVCRVQEGNESYQQSCGTYLRVRQPPPRPFLDMGEGTKNRIITAEGIILLFCAVVPGTLLLFRKRWQNEKLGLDAGDEYEDENLYEGLNLDDCSMYEDISRGLQGTYQDVGSLNIGDVQLEKP

SEQ ID NO: 2415 - protein, 258 aa, Homo Sapiens
MPGGPGVLQALPATIFLLFLLSAVYLGPGCQALWMHKVPASLMVSLGEDAHFQCPHNSSNNANVTWWRVLHGNYTWPPEFLGPGEDPNGTLIIQNVNKSHGGIYVCRVQEGNESYQQSCGTYLRVRREWPSPGPYSHCPAGDTRFIFEVGIEPVPSMWVSNRLGQRDGHSPLQSGVSGGSGALQEVGGARRLGRARGARALSHTTSLQSRPPGPSWTWGRAPRTESSQPRGSSSCSARWCLGRCCCSGNDGRTRSSGW

SEQ ID NO: 2416 - protein, 256 aa, Homo Sapiens
MGHTRRQGTSPSKCPYLNFFQLLVLAGLSHFCSGVIHVTKEVKEVATLSCGHNVSVEELAQTRIYWQKEKKMVLTMMSGDMNIWPEYKNRTIFDITNNLSIVILALRPSDEGTYECVVLKYEKDAFKREHLAEVTLSVKADFPTPSISDFEIPTSNIRRIICSTSGGFPEPHLSWLENGEELNAINTTVSQDPETELYAVSSKLDFNMTTNHSFMCLIKYGHLRVNQTFNWNTSFAPRCRERRRNERLRRESVRPV

SEQ ID NO: 2417 - protein, 288 aa, Homo Sapiens
MGHTRRQGTSPSKCPYLNFFQLLVLAGLSHFCSGVIHVTKEVKEVATLSCGHNVSVEELAQTRIYWQKEKKMVLTMMSGDMNIWPEYKNRTIFDITNNLSIVILALRPSDEGTYECVVLKYEKDAFKREHLAEVTLSVKADFPTPSISDFEIPTSNIRRIICSTSGGFPEPHLSWLENGEELNAINTTVSQDPETELYAVSSKLDFNMTTNHSFMCLIKYGHLRVNQTFNWNTTKQEHFPDNLLPSWAITLISVNGIFVICCLTYCFAPRCRERRRNERLRRESVRPV

SEQ ID NO: 2418 - protein, 288 aa, Homo Sapiens; identical to SEQ ID NO: 2417

SEQ ID NO: 2419 - protein, 217 aa, Homo Sapiens
MDPQCTMGLSNILFVMAFLLSANFSQPEIVPISNITENVYINLTCSSIHGYPEPKKMSVLLRTKNSTIEYDGVMQKSQDNVTELYDVSISLSVSFPDVTSNMTIFCILETDKTRLLSSPFSIELEDPQPPPDHIPWITAVLPTVIICVMVFCLILWKWKKKKRPRNSYKCGTNTMEREESEQTKKREKIHIPERSDEAQRVFKSSKTSSCDKSDTCF

SEQ ID NO: 2420 - protein, 329 aa, Homo Sapiens
MDPQCTMGLSNILFVMAFLLSGAAPLKIQAYFNETADLPCQFANSQNQSLSELVVFWQDQENLVLNEVYLGKEKFDSVHSKYMGRTSFDSDSWTLRLHNLQIKDKGLYQCIIHHKKPTGMIRIHQMNSELSVLANFSQPEIVPISNITENVYINLTCSSIHGYPEPKKMSVLLRTKNSTIEYDGVMQKSQDNVTELYDVSISLSVSFPDVTSNMTIFCILETDKTRLLSSPFSIELEDPQPPPDHIPWITAVLPTVIICVMVFCLILWKWKKKKRPRNSYKCGTNTMEREESEQTKKREKIHIPERSDEAQRVFKSSKTSSCDKSDTCF

SEQ ID NO: 2421 - protein, 167 aa, Homo Sapiens
MGLSNILFVMAFLLSGAAPLKIQAYFNETADLPCQFANSQNQSLSELVVFWQDQENLVLNEVYLGKEKFDSVHSKYMGRTSFDSDSWTLRLHNLQIKDKGLYQCIIHHKKPTGMIRIHQMNSELSVLANFSQPEIVPISNITENVYINLTCSSIHGYPEPKKMSVLL

SEQ ID NO: 2422 - protein, 323 aa, Homo Sapiens
MGLSNILFVMAFLLSGAAPLKIQAYFNETADLPCQFANSQNQSLSELVVFWQDQENLVLNEVYLGKEKFDSVHSKYMGRTSFDSDSWTLRLHNLQIKDKGLYQCIIHHKKPTGMIRIHQMNSELSVLANFSQPEIVPISNITENVYINLTCSSIHGYPEPKKMSVLLRTKNSTIEYDGVMQKSQDNVTELYDVSISLSVSFPDVTSNMTIFCILETDKTRLLSSPFSIELEDPQPPPDHIPWITAVLPTVIICVMVFCLILWKWKKKKRPRNSYKCGTNTMEREESEQTKKREKIHIPERSDEAQRVFKSSKTSSCDKSDTCF

SEQ ID NO: 2423 - protein, 275 aa, Homo Sapiens
MGLSNILFVMAFLLSGAAPLKIQAYFNETADLPCQFANSQNQSLSELVVFWQDQENLVLNEVYLGKEKFDSVHSKYMGRTSFDSDSWTLRLHNLQIKDKGLYQCIIHHKKPTGMIRIHQMNSELSVLANFSQPEIVPISNITENVYINLTCSSIHGYPEPKKMSVLLRTKNSTIEYDGVMQKSQDNVTELYDVSISLSVSFPDVTSNMTIFCILETDKTRLLSSPFSIGTNTMEREESEQTKKREKIHIPERSDEAQRVFKSSKTSSCDKSDTCF

SEQ ID NO: 2424 - protein, 247 aa, Homo Sapiens
MGRTSFDSDSWTLRLHNLQIKDKGLYQCIIHHKKPTGMIRIHQMNSELSVLANFSQPEIVPISNITENVYINLTCSSIHGYPEPKKMSVLLRTKNSTIEYDGVMQKSQDNVTELYDVSISLSVSFPDVTSNMTIFCILETDKTRLLSSPFSIELEDPQPPPDHIPWITAVLPTVIICVMVFCLILWKWKKKKRPRNSYKCGTNTMEREESEQTKKREKIHIPERSDEAQRVFKSSKTSSCDKSDTCF

SEQ ID NO: 2425 - protein, 277 aa, Homo Sapiens
  misc_feature (1)..(1): Xaa can be any naturally occurring amino acid
XTMGLSNILFVMAFLLSGAAPLKIQAYFNETADLPCQFANSQNQSLSELVVFWQDQENLVLNEVYLGKEKFDSVHSKYMGRTSFDSDSWTLRLHNLQIKDKGLYQCIIHHKKPTGMIRIHQMNSELSVLANFSQPEIVPISNITENVYINLTCSSIHGYPEPKKMSVLLRTKNSTIEYDGVMQKSQDNVTELYDVSISLSVSFPDVTSNMTIFCILETDKTRLLSSPFSIGTNTMEREESEQTKKREKIHIPERSDEAQRVFKSSKTSSCDKSDTCF

SEQ ID NO: 2426 - protein, 198 aa, Homo Sapiens
MALPVTALLLPLALLLHAARPSQFRVSPLDRTWNLGETVELKCQVLLSNPTSGCSWLFQPRGAAASPTFLLYLSQNKPKAAEGLDTQRFSGKRLGDTFVLTLSDFRRENEGYYFCSALSNSIMYFSHFVPVFLPAKPTTTPAPRPPTPAPTIASQPLSLRPEACRPAAGGAGNRRRVCKCPRPVVKSGDKPSLSARYV

SEQ ID NO: 2427 - protein, 235 aa, Homo Sapiens
MALPVTALLLPLALLLHAARPSQFRVSPLDRTWNLGETVELKCQVLLSNPTSGCSWLFQPRGAAASPTFLLYLSQNKPKAAEGLDTQRFSGKRLGDTFVLTLSDFRRENEGYYFCSALSNSIMYFSHFVPVFLPAKPTTTPAPRPPTPAPTIASQPLSLRPEACRPAAGGAVHTRGLDFACDIYIWAPLAGTCGVLLLSLVITLYCNHRNRRRVCKCPRPVVKSGDKPSLSARYV

SEQ ID NO: 2428 - protein, 235 aa, Homo Sapiens; identical to SEQ ID NO: 2427

SEQ ID NO: 2429 - protein, 198 aa, Homo Sapiens
MALPVTALLLPLALLLHAARPSQFRVSPLDRTWNLGETVELKCQVLLSNPTSGCSWLFQPRGAAASPTFLLYLSQNKPKAAEGLDTQRFSGKRLGDTFVLTLSDFRRENEGYYFCSALSNSIMYFSHFVPVFLPVHTRGLDFACDIYIWAPLAGTCGVLLLSLVITLYCNHRNRRRVCKCPRPVVKSGDKPSLSARYV

SEQ ID NO: 2430 - protein, 198 aa, Homo Sapiens
MRPRLWLLLAAQLTVLHGNSVLQQTPAYIKVQTNKMVMLSCEAKISLSNMRIYWLRQRQAPSSDSHHEFLALWDSAKGTIHGEEVEQEKIAVFRDASRFILNLTSVKPEDSGIYFCMIVGSPELTFGKGTQLSVVDFLPTTAQPTKKSTLKKRVCRLPRPETQKGLKGKVYQEPLSPNACMDTTAILQPHRSCLTHGS

SEQ ID NO: 2431 - protein, 210 aa, Homo Sapiens
MRPRLWLLLAAQLTVLHGNSVLQQTPAYIKVQTNKMVMLSCEAKISLSNMRIYWLRQRQAPSSDSHHEFLALWDSAKGTIHGEEVEQEKIAVFRDASRFILNLTSVKPEDSGIYFCMIVGSPELTFGKGTQLSVVDFLPTTAQPTKKSTLKKRVCRLPRPETQKGPLCSPITLGLLVAGVLVLLVSLGVAIHLCCRRRRARLRFMKQFYK

SEQ ID NO: 2432 - protein, 221 aa, Homo Sapiens
MRPRLWLLLAAQLTVLHGNSVLQQTPAYIKVQTNKMVMLSCEAKISLSNMRIYWLRQRQAPSSDSHHEFLALWDSAKGTIHGEEVEQEKIAVFRDASRFILNLTSVKPEDSGIYFCMIVGSPELTFGKGTQLSVVDFLPTTAQPTKKSTLKKRVCRLPRPETQKGPLCSPITLGLLVAGVLVLLVSLGVAIHLCCRRRRARLRFMKQLRLHPLEKCSRMDY

SEQ ID NO: 2433 - protein, 210 aa, Homo Sapiens
MRPRLWLLLAAQLTVLHGNSVLQQTPAYIKVQTNKMVMLSCEAKISLSNMRIYWLRQRQAPSSDSHHEFLALWDSAKGTIHGEEVEQEKIAVFRDASRFILNLTSVKPEDSGIYFCMIVGSPELTFGKGTQLSVVDFLPTTAQPTKKSTLKKRVCRLPRPETQKGPLCSPITLGLLVAGVLVLLVSLGVAIHLCCRRRRARLRFMKQLYK

SEQ ID NO: 2434 - protein, 243 aa, Homo Sapiens
MRPRLWLLLAAQLTVLHGNSVLQQTPAYIKVQTNKMVMLSCEAKISLSNMRIYWLRQRQAPSSDSHHEFLALWDSAKGTIHGEEVEQEKIAVFRDASRFILNLTSVKPEDSGIYFCMIVGSPELTFGKGTQLSVVDFLPTTAQPTKKSTLKKRVCRLPRPETQKGPLCSPITLGLLVAGVLVLLVSLGVAIHLCCRRRRARLRFMKQPQGEGISGTFVPQCLHGYYSNTTTSQKLLNPWILKT

SEQ ID NO: 2435 - protein, 213 aa, Homo Sapiens
MRPRLWLLLAAQLTVLHGNSVLQQTPAYIKVQTNKMVMLSCEAKISLSNMRIYWLRQRQAPSSDSHHEFLALWDSAKGTIHGEEVEQEKIAVFRDASRFILNLTSVKPEDSGIYFCMIVGSPELTFGKGTQLSVVDFLPTTAQPTKKSTLKKRVCRLPRPETQKGRRRRARLRFMKQPQGEGISGTFVPQCLHGYYSNTTTSQKLLNPWILKT

SEQ ID NO: 2436 - protein, 185 aa, Homo Sapiens
MARGAALALLLFGLLGVLVAAPDGGFDLSDALPDNENKKPTAIPKKPSAGDDFDLGDAVVDGENDDPRPPNPPKPMPNPNPNHPSSSGSFSDADLADGVSGGEGKGGSDGGGSHRKEGEEADAPGVIPGIVGAVVVAVAGAISSFIAYQKKKLCFKENAEQGEVDMESHRNANAEPAVQRTLLEK

SEQ ID NO: 2437 - protein, 160 aa, Homo Sapiens
MARGAALALLLFGLLGVLVAAPDGGFDLSDALPDNENKKPTAIPKKPSAGDDFDLGDAVVDGENDDPRPPNPPKPMPNPNPNHPSSSGSFSDADLADGVSGGEGKGGSDGGGSHRKEGEEADAPGVIPGIVGAVVVAVAGAISSFIAYQKKKLCFKENDG

SEQ ID NO: 2438 - protein, 160 aa, Homo Sapiens; identical to SEQ ID NO: 2437

SEQ ID NO: 2439 - protein, 160 aa, Homo Sapiens; identical to SEQ ID NO: 2437

SEQ ID NO: 2440 - protein, 184 aa, Homo Sapiens
MARGAALALLLFGLLGVLVAAPDGGFDLSDALPDNENKKPTAIPKKPSAGDDFDLGDAVVDGENDDPRPPNPPKPMPNPNPNHPSSSGSFSDADLADGVSGGEGKGGSDGGGSHRKEGEEADAPGVIPGIVGAVVVAVAGAISSFIAYQKKKLCFKENEQGEVDMESHRNANAEPAVQRTLLEK

SEQ ID NO: 2441 - protein, 177 aa, Homo Sapiens
MARGAALALLLFGLLGVLVAAPDGGFDLSDALPDNENKKPTAIPKKPSAGDDFDLGDAVVDGENDDPRPPNPPKPMPNPNPNHPSSSGSFSDADLADGVSGGEGKGGSDGGGSHRKEGEEADAPGVIPGIVGAVVVAVAGAISSFIAYQKKKLCFKENGQLAGSLGPCIGIRREADG

SEQ ID NO: 2442 - protein, 169 aa, Homo Sapiens
MARGAALALLLFGLLGVLVAAPDGGFDLSDALPGDDFDLGDAVVDGENDDPRPPNPPKPMPNPNPNHPSSSGSFSDADLADGVSGGEGKGGSDGGGSHRKEGEEADAPGVIPGIVGAVVVAVAGAISSFIAYQKKKLCFKENAEQGEVDMESHRNANAEPAVQRTLLEK

SEQ ID NO: 2443 - protein, 76 aa, Homo Sapiens
MARGAALALLLFGLLGVLVAAPGFGDLRLQAARGGRPGVACHSHALRPGPKFGIARSLRPGWWGEGKEKLEKNFEP

SEQ ID NO: 2444 - protein, 22 aa, Homo Sapiens
  misc_feature (1)..(1): Xaa can be any naturally occurring amino acid
XQKKKLCFKENERASMCVFLSV

SEQ ID NO: 2445 - protein, 109 aa, Homo Sapiens
MAASTSMVPVAVTAAVAPVLSINSDFSDLREIKKQLLLIAGLTRERGLLHSSKWKMPRIWMPIPWPRPTLTLKSMIGQHISCMAAIARKPIFCICIPDIWPPGKRTSEK

SEQ ID NO: 2446 - protein, 597 aa, Homo Sapiens
MAASTSMVPVAVTAAVAPVLSINSDFSDLREIKKQLLLIAGLTRERGLLHSSKWSAELAFSLPALPLAELQPPPPITEEDAQDMDAYTLAKAYFDVKEYDRAAHFLHGCNSKKAYFLYMYSRYLSGEKKKDDETVDSLGPLEKGQVKNEALRELRVELSKKHQARELDGFGLYLYGVVLRKLDLVKEAIDVFVEATHVLPLHWGAWLELCNLITDKEMLKFLSLPDTWMKEFFLAHIYTELQLIEEALQKYQNLIDVGFSKSSYIVSQIAVAYHNIRDIDKALSIFNELRKQDPYRIENMDTFSNLLYVRSMKSELSYLAHNLCEIDKYRVETCCVIGNYYSLRSQHEKAALYFQRALKLNPRYLGAWTLMGHEYMEMKNTSAAIQAYRHAIEVNKRDYRAWYGLGQTYEILKMPFYCLYYYRRAHQLRPNDSRMLVALGECYEKLNQLVEAKKCYWRAYAVGDVEKMALVKLAKLHEQLTESEQAAQCYIKYIQDIYSCGEIVEHLEESTAFRYLAQYYFKCKLWDEASTCAQKCCAFNDTREEGKALLRQILQLRNQGETPTTEVPAPFFLPASLSANNTPTRRVSPLNLSSVTP

SEQ ID NO: 2447 - protein, 151 aa, Homo Sapiens
MAASTSMVPVAVTAAVAPVLSINSDFSDLREIKKQLLLIAGLTRERGLLHSSKWSAELAFSLPALPLAELQPPPPITEEDAQDMDAYTLAKAYFDVKEYDRAAHFLHGCNSKKAYFLYMYSRYLVRAILKCHSAFSETSIFRTNGKVKSFK

SEQ ID NO: 2448 - protein, 123 aa, Homo Sapiens
MAASTSMVPVAVTAAVAPVLSINSDFSDLREIKKQLLLIAGLTRERGLLHSSKWSAELAFSLPALPLAELQPPPPITEMPRIWMPIPWPRPTLTLKSMIGQHISCMAAIARKPIFCICIPDIW

SEQ ID NO: 2449 - protein, 134 aa, Homo Sapiens
  misc_feature (1)..(1): Xaa can be any naturally occurring amino acid
XSTSMVPVAVTAAVAPVLSINSDFSDLREIKKQLLLIAGLTRERGLLHSSKWSAELAFSLPALPLAELQPPPPITEMPRIWMPIPWPRPTLTLKSMIGQHISCMAAIARKPIFCICIPDICLEKKRRTMKQLIA

SEQ ID NO: 2450 - protein, 579 aa, Homo Sapiens
MSAAIAALAASYGSGSGSESDSDSESSRCPLPAADSLMHLTKSPSSKPSLAVAVDSAPEVAVKEDLETGVHLDPAVKEVQYNPTYETMFAPEFGPENPFRTQQMAAPRNMLSGYAEPAHINDFMFEQQRRTFATYGYALDPSLDNHQVSAKYIGSVEEAEKNQGLTVFETGQKKTEKRKKFKENDASNIDGFLGPWAKYVDEKDVAKPSEEEQKELDEITAKRQKKGKQEEEKPGEEKTILHVKEMYDYQGRSYLHIPQDVGVNLRSTMPPEKCYLPKKQIHVWSGHTKGVSAVRLFPLSGHLLLSCSMDCKIKLWEVYGERRCLRTFIGHSKAVRDICFNTAGTQFLSAAYDRYLKLWDTETGQCISRFTNRKVPYCVKFNPDEDKQNLFVAGMSDKKIVQWDIRSGEIVQEYDRHLGAVNTIVFVDENRRFVSTSDDKSLRVWEWDIPVDFKYIAEPSMHSMPAVTLSPNGKWLACQSMDNQILIFGAQNRFRLNKKKIFKGHMVAGYACQVDFSPDMSYVISGDGNGKLNIWDWKTTKLYSRFKAHDKVCIGAVWHPHETSKVITCGWDGLIKLWD

SEQ ID NO: 2451 - protein, 539 aa, Homo Sapiens
MSAAIAALAASYGSGSGSESDSDSESSRCPLPAADSLMHLTKSPSSKPSLAVAVDSAPEVAVKEDLETGVHLDPAVKEVQYNPTYETMFAPEFGPENPFRTQQMAAPRNMLSGYAEPAHINDFMFEQQRRTFATYGYALDPSLDNHQVSAKYIGSVEEAEKNQGLTVFETGQKKTEKRKKFKENDASNIDGFLGPWAKYVDEKDVAKPSEEEQKELDEITAKRQKKGKQEEEKPGEEKTILHVKEMYDYQGRSYLHIPQDVGVNLRSTMPPEKCYLPKKQIHVWSGHTKGVSAVRLFPLSGHLLLSCSMDCKIKLWEVYGERRCLRTFIGHSKAVRDICFNTAGTQFLSAAYDRYLKLWDTETGQCISRFTNRKVPYCVKFNPDEDKQNLFVAGMSDKKIVQWDIRSGEIVQEYDRHLGAVNTIVFVDENRRFVSTSDDKSLRVWEWDIPVDFKYIAEPSMHSMPAVTLSPNGKWLACQSMDNQILIFGAQNRFRLNKKKIFKGHMVAGYACQVDFSPDMRVPQSFQNLKEVTAGPQEG

SEQ ID NO: 2452 - protein, 579 aa, Homo Sapiens; identical to SEQ ID NO: 2450

SEQ ID NO: 2453 - protein, 112 aa, Homo Sapiens
MFVSDFRKEFYEVVQSQRVLLFVASDVDALCACKILQALFQCDHVQYTLVPVSGWQELETAFLEHKEQFHYFILINCGANVDLLDILQPDEDTIFFVCDTHRPVNVVNVYND

SEQ ID NO: 2454 - protein, 566 aa, Homo Sapiens
MFVSDFRKEFYEVVQSQRVLLFVASDVDALCACKILQALFQCDHVQYTLVPVSGWQELETAFLEHKEQFHYFILINCGANVDLLDILQPDEDTIFFVCDTHRPVNVVNVYNDTQIKLLIKQDDDLEVPAYEDIFRDEEEDEEHSGNDSDGSEPSEKRTRLEEEIVEQTMRRRQRREWEARRRDILFDYEQYEYHGTSSAMVMFELAWMLSKDLNDMLWWAIVGLTDQWVQDKITQMKYVTDVGVLQRHVSRHNHRNEDEENTLSVDCTRISFEYDLRLVLYQHWSLHDSLCNTSYTAARFKLWSVHGQKRLQEFLADMGLPLKQVKQKFQAMDISLKENLREMIEESANKFGMKDMRVQTFSIHFGFKHKFLASDVVFATMSLMESPEKDGSGTDHFIQALDSLSRSNLDKLYHGLELAKKQLRATQQTIASCLCTNLVISQGPFLYCSLMEGTPDVMLFSRPASLSLLSKHLLKSFVCSTKNRRCKLLPLVMAAPLSMEHGTVTVVGIPPETDSSDRKNFFGRAFEKAAESTSSRMLHNHFDLSVIELKAEDRSKFLDALISLLS

SEQ ID NO: 2455 - protein, 566 aa, Homo Sapiens; identical to SEQ ID NO: 2454

SEQ ID NO: 2456 - protein, 598 aa, Homo Sapiens
MFVSDFRKEFYEVVQSQRVLLFVASDVDALCACKILQALFQCDHVQYTLVPVSGWQELETAFLEHKEQFHYFILINCGANVDLLDILQPDEDTIFFVCDTHRPVNVVNVYNDTQIKLLIKQDDDLEVPAYEDIFRDEEEDEEHSGNDSDGSEPSEKRTRLEEEIVEQTMRRRQRREWEARSGSGSEPVAAALEKSSRLFAGPMSDRTAPRSPRRDILFDYEQYEYHGTSSAMVMFELAWMLSKDLNDMLWWAIVGLTDQWVQDKITQMKYVTDVGVLQRHVSRHNHRNEDEENTLSVDCTRISFEYDLRLVLYQHWSLHDSLCNTSYTAARFKLWSVHGQKRLQEFLADMGLPLKQVKQKFQAMDISLKENLREMIEESANKFGMKDMRVQTFSIHFGFKHKFLASDVVFATMSLMESPEKDGSGTDHFIQALDSLSRSNLDKLYHGLELAKKQLRATQQTIASCLCTNLVISQGPFLYCSLMEGTPDVMLFSRPASLSLLSKHLLKSFVCSTKNRRCKLLPLVMAAPLSMEHGTVTVVGIPPETDSSDRKNFFGRAFEKAAESTSSRMLHNHFDLSVIELKAEDRSKFLDALISLLS

SEQ ID NO: 2457 - protein, 520 aa, Homo Sapiens
MFVSDFRKEFYEVVQSQRVLLFVASDVDALCACKILQALFQCDHVQYTLVPVSGWQELETAFLEHKEQIKLLIKQDDDLEVPAYEDIFRDEEEDEEHSGNDSDGSEPSEKRTRLEEEIVEQTMRRRQRREWEARRRDILFDYEQYEYHGTSSAMVMFELAWMLSKDLNDMLWWAIVGLTDQWVQDKITQMKYVTDVGVLQRHVSRHNHRNEDEENTLSVDCTRISFEYDLRLVLYQHWSLHDSLCNTSYTAARFKLWSVHGQKRLQEFLADMGLPLKQVKQKFQAMDISLKENLREMIEESANKFGMKDMRVQTFSIHFGFKHKFLASDVVFATMSLMESPEKDGSGTDHFIQALDSLSRSNLDKLYHGLELAKKQLRATQQTIASCLCTNLVISQGPFLYCSLMEGTPDVMLFSRPASLSLLSKHLLKSFVCSTKNRRCKLLPLVMAAPLSMEHGTVTVVGIPPETDSSDRKNFFGRAFEKAAESTSSRMLHNHFDLSVIELKAEDRSKFLDALISLLS

SEQ ID NO: 2458 - protein, 159 aa, Homo Sapiens
MLPHWRVLLFVASDVDALCACKILQALFQCDHVQYTLVPVSGWQELETAFLEHKEQFHYFILINCGANVDLLDILQPDEDTIFFVCDTHRPVNVVNVYNDTQIKLLIKQDDDLEVPAYEDIFRDEEEDEEHSGNDSDGSEPSEKRTRLEEEIVEQTMRR

SEQ ID NO: 2459 - protein, 96 aa, Homo Sapiens
  misc_feature (1)..(1): Xaa can be any naturally occurring amino acid
XDEDTIFFVCDTHRPVNVVNVYNDTQIKLLIKQDDDLEVPAYEDIFRDEEEDEEHSGNDSDGSEPSEKRTRLEEEIVEQTMRRRQRREWEARRIIY

SEQ ID NO: 2460 - protein, 836 aa, Homo Sapiens
MAGLNCGVSIALLGVLLLGAARLPRGAEAFEIALPRESNITVLIKLGTPTLLAKPCYIVISKRHITMLSIKSGERIVFTFSCQSPENHFVIEIQKNIDCMSGPCPFGEVQLQPSTSLLPTLNRTFIWDVKAHKSIGLELQFSIPRLRQIGPGESCPDGVTHSISGRIDATVVRIGTFCSNGTVSRIKMQEGVKMALHLPWFHPRNVSGFSIANRSSIKRLCIIESVFEGEGSATLMSANYPEGFPEDELMTWQFVVPAHLRASVSFLNFNLSNCERKEERVEYYIPGSTTNPEVFKLEDKQPGNMAGNFNLSLQGCDQDAQSPGILRLQFQVLVQHPQNESNKIYVVDLSNERAMSLTIEPRPVKQSRKFVPGCFVCLESRTCSSNLTLTSGSKHKISFLCDDLTRLWMNVEKTISCTDHRYCQRKSYSLQVPSDILHLPVELHDFSWKLLVPKDRLSLVLVPAQKLQQHTHEKPCNTSFSYLVASAIPSQDLYFGSFCPGGSIKQIQVKQNISVTLRTFAPSFQQEASRQGLTVSFIPYFKEEGVFTVTPDTKSKVYLRTPNWDRGLPSLTSVSWNISVPRDQVACLTFFKERSGVVCQTGRAFMIIQEQRTRAEEIFSLDEDVLPKPSFHHHSFWVNISNCSPTSGKQLDLLFSVTLTPRTVDLTVILIAAVGGGVLLLSALGLIICCVKKKKKKTNKGPAVGIYNDNINTEMPRQPKKFQKGRKDNDSHVYAVIEDTMVYGHLLQDSSGSFLQPEVDTYRPFQGTMGVCPPSPPTICSRAPTAKLATEEPPPRSPPESESEPYTFSHPNNGDVSSKDTDIPLLNTQEPMEPAE

SEQ ID NO: 2461 - protein, 343 aa, Homo Sapiens
MAGLNCGVSIALLGVLLLGAARLPRGAEAFEIALPRESNITVLIKLGTPTLLAKPCYIVISKRHITMLSIKSGERIVFTFSCQSPENHFVIEIQKNIDCMSGPCPFGEVQLQPSTSLLPTLNRTFIWDVKAHKSIGLELQFSIPRLRQIGPGESCPDGVTHSISGRIDATVVRIGTFCSNGTVSRIKMQEGVKMALHLPWFHPRNVSGFSIANRSSIKRLCIIESVFEGEGSATLMSANYPEGFPEDELMTWQFVVPAHLRASVSFLNFNLSNCERKEERVEYYIPGSTTNPEVFKLEDKQPGNMAGNFNLSLQGCDQDAQSPGILRLQFQVLVQHPQNESSE

SEQ ID NO: 2462 - protein, 449 aa, Homo Sapiens
MLAEWGACLLLAVALLGPGLQAQAMEGVKCGGVLSAPSGNFSSPNFPRLYPYNTECSWLIVVAEGSSVLLTFHAFDLEYHDTCSFDFLEIYNGASPDKGNLLGRFCGKVPPPPFTSSWHVMSVIFHSDKHVASHGFSAGYQKDVCGGVLTGLSGVLTSPEYPNNYPNSMECHWVIRAAGPAHVKLVFVDFQVEGNEECTYDYVAVLGGPGPTRGHHYCGSTRPPTLVSLGHELQVVFKSDFNIGGRGFKAYYFSGECQEVYMAMRGNFSSPQYPSSYPNNIRCHWTIRLPPGYQVKVFFLDLDLEEPNSLTKTCDFDHLAAFDGASEEAPLLGNWCGHHLPPPVTSSHNQLLLLLHTDRSTTRRGFSVAYIGGQLGCGSGSTEGEGEALQPQSLQSPSSIPPVCPAPPMNGLLQLLLHWLHPCPLSGPLRLDGTAPACFHYCRASFPSF

SEQ ID NO: 2463 - protein, 540 aa, Homo Sapiens
MLAEWGACLLLAVALLGPGLQAQAMEGVKCGGVLSAPSGNFSSPNFPRLYPYNTECSWLIVVAEGSSVLLTFHAFDLEYHDTCSFDFLEIYNGASPDKGNLLGRFCGKVPPPPFTSSWHVMSVIFHSDKHVASHGFSAGYQKDVCGGVLTGLSGVLTSPEYPNNYPNSMECHWVIRAAGPAHVKLVFVDFQVEGNEECTYDYVAVLGGPGPTRGHHYCGSTRPPTLVSLGHELQVVFKSDFNIGGRGFKAYYFSGECQEVYMAMRGNFSSPQYPSSYPNNIRCHWTIRLPPGYQVKVFFLDLDLEEPNSLTKTCDFDHLAAFDGASEEAPLLGNWCGHHLPPPVTSSHNQLLLLLHTDRSTTRRGFSVAYIGVVPMNVSCSRTDFQILISTQALAPLERTKVYLGSRSCAAQEVGGNLRIQARFDTCGTESQRRNNTSVIVSVLYIDFSAAGREDIHEYEVRCEPRRKEASVHLLSGSHWLGPYAATAEHLQEAPPMDEAEALEGPVSMVAQDTSDIVFLGLCILAGILMVIAIVVLMLL

SEQ ID NO: 2464 - protein, 882 aa, Homo Sapiens
MGPWSRSLSALLLLLQVSSWLCQEPEPCHPGFDAESYTFTVPRRHLERGRVLGRVNFEDCTGRQRTAYFSLDTRFKVGTDGVITVKRPLRFHNPQIHFLVYAWDSTYRKFSTKVTLNTVGHHHRPPPHQASVSGIQAELLTFPNSSPGLRRQKRDWVIPPISCPENEKGPFPKNLVQIKSNKDKEGKVFYSITGQGADTPPVGVFIIERETGWLKVTEPLDRERIATYTLFSHAVSSNGNAVEDPMEILITVTDQNDNKPEFTQEVFKGSVMEGALPGTSVMEVTATDADDDVNTYNAAIAYTILSQDPELPDKNMFTINRNTGVISVVTTGLDRESFPTYTLVVQAADLQGEGLSTTATAVITVTDTNDNPPIFNPTTYKGQVPENEANVVITTLKVTDADAPNTPAWEAVYTILNDDGGQFVVTTNPVNNDGILKTAKGLDFEAKQQYILHVAVTNVVPFEVSLTTSTATVTVDVLDVNEAPIFVPPEKRVEVSEDFGVGQEITSYTAQEPDTFMEQKITYRIWRDTANWLEINPDTGAISTRAELDREDFEHVKNSTYTALIIATDNGSPVATGTGTLLLILSDVNDNAPIPEPRTIFFCERNPKPQVINIIDADLPPNTSPFTAELTHGASANWTIQYNDPTQESIILKPKMALEVGDYKINLKLMDNQNKDQVTTLEVSVCDCEGAAGVCRKAQPVEAGLQIPAILGILGGILALLILILLLLLFLRRRAVVKEPLLPPEDDTRDNVYYYDEEGGGEEDQDFDLSQLHRGLDARPEVTRNDVAPTLMSVPRYLPRPANPDEIGNFIDENLKAADTDPTAPPYDSLLVFDYEGSGSEAASLSSLNSSESDKDQDYDYLNEWGNRFKKLADMYGGGEDD

SEQ ID NO: 2465 - protein, 821 aa, Homo Sapiens
MGPWSRSLSALLLLLQVSSWLCQEPEPCHPGFDAESYTFTVPRRHLERGRVLGRVNFEDCTGRQRTAYFSLDTRFKVGTDGVITVKRPLRFHNPQIHFLVYAWDSTYRKFSTKVTLNTVGHHHRPPPHQASVSGIQAELLTFPNSSPGLRRQKRDWVIPPISCPENEKGPFPKNLVQIKSNKDKEGKVFYSITGQGADTPPVGVFIIERETGWLKVTEPLDRERIATYTLFSHAVSSNGNAVEDPMEILITVTDQNDNKPEFTQEVFKGSVMEGALPGTSVMEVTATDADDDVNTYNAAIAYTILSQDPELPDKNMFTINRNTGVISVVTTGLDRESFPTYTLVVQAADLQGEGLSTTATAVITVTDTNDNPPIFNPTTGLDFEAKQQYILHVAVTNVVPFEVSLTTSTATVTVDVLDVNEAPIFVPPEKRVEVSEDFGVGQEITSYTAQEPDTFMEQKITYRIWRDTANWLEINPDTGAISTRAELDREDFEHVKNSTYTALIIATDNGSPVATGTGTLLLILSDVNDNAPIPEPRTIFFCERNPKPQVINIIDADLPPNTSPFTAELTHGASANWTIQYNDPTQESIILKPKMALEVGDYKINLKLMDNQNKDQVTTLEVSVCDCEGAAGVCRKAQPVEAGLQIPAILGILGGILALLILILLLLLFLRRRAVVKEPLLPPEDDTRDNVYYYDEEGGGEEDQDFDLSQLHRGLDARPEVTRNDVAPTLMSVPRYLPRPANPDEIGNFIDENLKAADTDPTAPPYDSLLVFDYEGSGSEAASLSSLNSSESDKDQDYDYLNEWGNRFKKLADMYGGGEDD

SEQ ID NO: 2466 - protein, 537 aa, Homo Sapiens
MGPWSRSLSALLLLLQVSSWLCQEPEPCHPGFDAESYTFTVPRRHLERGRVLGRVNFEDCTGRQRTAYFSLDTRFKVGTDGVITVKRPLRFHNPQIHFLVYAWDSTYRKFSTKVTLNTVGHHHRPPPHQASVSGIQAELLTFPNSSPGLRRQKRDWVIPPISCPENEKGPFPKNLVQIKSNKDKEGKVFYSITGQGADTPPVGVFIIERETGWLKVTEPLDRERIATYTLFSHAVSSNGNAVEDPMEILITVTDQNDNKPEFTQEVFKGSVMEGALPGTSVMEVTATDADDDVNTYNAAIAYTILSQDPELPDKNMFTINRNTGVISVVTTGLDRESFPTYTLVVQAADLQGEGLSTTATAVITVTDTNDNPPIFNPTTYKGQVPENEANVVITTLKVTDADAPNTPAWEAVYTILNDDGGQFVVTTNPVNNDGILKTAKGLDFEAKQQYILHVAVTNVVPFEVSLTTSTATVTVDVLDVNEAPIFVPPEKRVEVSEDFGVGQEITSYTAQEPDTFMEQKITFSSCYWNRDTSADPV

SEQ ID NO: 2467 - protein, 647 aa, Homo Sapiens
MGPWSRSLSALLLLLQVSSWLCQEPEPCHPGFDAESYTFTVPRRHLERGRVLGRVNFEDCTGRQRTAYFSLDTRFKVGTDGVITVKRPLRFHNPQIHFLVYAWDSTYRKFSTKVTLNTVGHHHRPPPHQASVSGIQAELLTFPNSSPGLRRQKRDWVIPPISCPENEKGPFPKNLVQIKSNKDKEGKVFYSITGQGADTPPVGVFIIERETGWLKVTEPLDRERIATYTLFSHAVSSNGNAVEDPMEILITVTDQNDNKPEFTQEVFKGSVMEGALPGTSVMEVTATDADDDVNTYNAAIAYTILSQDPELPDKNMFTINRNTGVISVVTTGLDRESFPTYTLVVQAADLQGEGLSTTATAVITVTDTNDNPPIFNPTTYKGQVPENEANVVITTLKVTDADAPNTPAWEAVYTILNDDGGQFVVTTNPVNNDGILKTAKGLDFEAKQQYILHVAVTNVVPFEVSLTTSTATVTVDVLDVNEAPIFVPPEKRVEVSEDFGVGQEITSYTAQEPDTFMEQKITYRIWRDTANWLEINPDTGAISTRAELDREDFEHVKNSTYTALIIATDNGSPVATGTGTLLLILSDVNDNAPIPEPRTIFFCERNPKPQVINIIDADLPPNLASQSIGITDMSHCTCPAPQLPAIF

SEQ ID NO: 2468 - protein, 903 aa, Homo Sapiens
MGPWSRSLSALLLLLQVSSWLCQEPEPCHPGFDAESYTFTVPRRHLERGRVLGRVNFEDCTGRQRTAYFSLDTRFKVGTDGVITVKRPLRFHNPQIHFLVYAWDSTYRKFSTKVTLNTVGHHHRPPPHQASVSGIQAELLTFPNSSPGLRRQKRDWVIPPISCPENEKGPFPKNLVQIKSNKDKEGKVFYSITGQGADTPPVGVFIIERETGWLKVTEPLDRERIATYTLFSHAVSSNGNAVEDPMEILITVTDQNDNKPEFTQEVFKGSVMEGALPGTSVMEVTATDADDDVNTYNAAIAYTILSQDPELPDKNMFTINRNTGVISVVTTGLDRESFPTYTLVVQAADLQGEGLSTTATAVITVTDTNDNPPIFNPTTYKGQVPENEANVVITTLKVTDADAPNTPAWEAVYTILNDDGGQFVVTTNPVNNDGILKTAKVWYLARCRNWHPHSCSYPCPLGLDFEAKQQYILHVAVTNVVPFEVSLTTSTATVTVDVLDVNEAPIFVPPEKRVEVSEDFGVGQEITSYTAQEPDTFMEQKITYRIWRDTANWLEINPDTGAISTRAELDREDFEHVKNSTYTALIIATDNGSPVATGTGTLLLILSDVNDNAPIPEPRTIFFCERNPKPQVINIIDADLPPNTSPFTAELTHGASANWTIQYNDPTQESIILKPKMALEVGDYKINLKLMDNQNKDQVTTLEVSVCDCEGAAGVCRKAQPVEAGLQIPAILGILGGILALLILILLLLLFLRRRAVVKEPLLPPEDDTRDNVYYYDEEGGGEEDQDFDLSQLHRGLDARPEVTRNDVAPTLMSVPRYLPRPANPDEIGNFIDENLKAADTDPTAPPYDSLLVFDYEGSGSEAASLSSLNSSESDKDQDYDYLNEWGNRFKKLADMYGGGEDD

SEQ ID NO: 2469 - protein, 647 aa, Homo Sapiens [sequence omitted]

SEQ ID NO: 2470 - protein, 414 aa, Homo Sapiens
MGPWSRSLSALLLLLQVSSWLCQEPEPCHPGFDAESYTFTVPRRHLERGRVLGRVNFEDCTGRQRTAYFSLDTRFKVGTDGVITVKRPLRFHNPQIHFLVYAWDSTYRKFSTKVTLNTVGHHHRPPPHQASVSGIQAELLTFPNSSPGLRRQKRDWVIPPISCPENEKGPFPKNLVQLFSHAVSSNGNAVEDPMEILITVTDQNDNKPEFTQEVFKGSVMEGALPGTSVMEVTATDADDDVNTYNAAIAYTILSQDPELPDKNMFTINRNTGVISVVTTGLDRESFPTYTLVVQAADLQGEGLSTTATAVITVTDTNDNPPIFNPTTYKGQVPENEANVVITTLKVTDADAPNTPAWEAVYTILNDDGGQFVVTTNPVNNDGILKTAKVCMVPGKMQKLASSQLFIPLSPGLGF

SEQ ID NO: 2471 - protein, 155 aa, Homo Sapiens
  misc_feature (1)..(1): Xaa can be any naturally occurring amino acid
XTDGVITVKRPLRFHNPQIHFLVYAWDSTYRKFSTKVTLNTVGHHHRPPPHQASVSGIQAELLTFPNSSPGLRRQKRDWVIPPISCPENEKGPFPKNLVQIKSNKDKEGKVFYSITGQGADTPPVGVFIIERETGWLKVTEPLDRERIATYTEPL

SEQ ID NO: 2472 - protein, 670 aa, Homo Sapiens
MAQAVDRDTNRPLEPPSEFIVKVQDINDNPPEFLHETYHANVPERSNVGTSVIQVTASDADDPTYGNSAKLVYSILEGQPYFSVEAQTGIIRTALPNMDREAKEEYHVVIQAKDMGGHMGGLSGTTKVTITLTDVNDNPPKFPQSVYQMSVSEAAVPGEEVGRVKAKDPDIGENGLVTYNIVDGDGMESFEITTDYETQEGVIKLKKPVDFETKRAYSLKVEAANVHIDPKFISNGPFKDTVTVKISVEDADEPPMFLAPSYIHEVQENAAAGTVVGRVHAKDPDAANSPIRYSIDRHTDLDRFFTINPEDGFIKTTKPLDREETAWLNITVFAAEIHNRHQEAKVPVAIRVLDVNDNAPKFAAPYEGFICESDQTKPLSNQPIVTISADDKDDTANGPRFIFSLPPEIIHNPNFTVRDNRDNTAGVYARRGGFSRQKQDLYLLPIVISDGGIPPMSSTNTLTIKVCGCDVNGALLSCNAEAYILNAGLSTGALIAILACIVILLVIVVLFVTLRRQKKEPLIVFEEEDVRENIITYDDEGGGEEDTEAFDIATLQNPDGINGFIPRKDIKPEYQYMPRPGLRPAPNSVDVDDFINTRIQEADNDPTAPPYDSIQIYGYEGRGSVAGSLSSLESATTDSDLDYDYLQNWGPRFKKLADLYGSKDTFDDDS

SEQ ID NO: 2473 - protein, 22 aa, Homo Sapiens
MKENYCLQAALVCLGMLCHSHA

SEQ ID NO: 2474 - protein, 34 aa, Homo Sapiens
MKENYCLQAALVCLGMLCHSHAFAPERRGHLRPS

SEQ ID NO: 2475 - protein, 54 aa, Homo Sapiens
MKENYCLQAALVCLGMLCHSHAFAPERRGHLRPSFHGHHEKGKEGQVLQRSKRG

SEQ ID NO: 2476 - protein, 65 aa, Homo Sapiens
MKENYCLQAALVCLGMLCHSHAFAPERRGHLRPSFHGHHEKGKEGQVLQRSKRGWVWNQFFVIEE

SEQ ID NO: 2477 - protein, 70 aa, Homo Sapiens
MKENYCLQAALVCLGMLCHSHAFAPERRGHLRPSFHGHHEKGKEGQVLQRSKRGWVWNQFFVIEEYTGPD

SEQ ID NO: 2478 - protein, 222 aa, Homo Sapiens
MKENYCLQAALVCLGMLCHSHAFAPERRGHLRPSFHGHHEKGKEGQVLQRSKRGWVWNQFFVIEEYTGPDPVLVGRLHSDIDSGDGNIKYILSGEGAGTIFVIDDKSGNIHATKTLDREERAQYTLMAQAVDRDTNRPLEPPSEFIVKVQDINDNPPEFLHETYHANVPERSNVGTSVIQVTASDADDPTYGNSAKLVYSILEGQPYFSVEAQTGIIRTALP

SEQ ID NO: 2479 - protein, 796 aa, Homo Sapiens
MKENYCLQAALVCLGMLCHSHAFAPERRGHLRPSFHGHHEKGKEGQVLQRSKRGWVWNQFFVIEEYTGPDPVLVGRLHSDIDSGDGNIKYILSGEGAGTIFVIDDKSGNIHATKTLDREERAQYTLMAQAVDRDTNRPLEPPSEFIVKVQDINDNPPEFLHETYHANVPERSNVGTSVIQVTASDADDPTYGNSAKLVYSILEGQPYFSVEAQTGIIRTALPNMDREAKEEYHVVIQAKDMGGHMGGLSGTTKVTITLTDVNDNPPKFPQSVYQMSVSEAAVPGEEVGRVKAKDPDIGENGLVTYNIVDGDGMESFEITTDYETQEGVIKLKKPVDFETKRAYSLKVEAANVHIDPKFISNGPFKDTVTVKISVEDADEPPMFLAPSYIHEVQENAAAGTVVGRVHAKDPDAANSPIRYSIDRHTDLDRFFTINPEDGFIKTTKPLDREETAWLNITVFAAEIHNRHQEAKVPVAIRVLDVNDNAPKFAAPYEGFICESDQTKPLSNQPIVTISADDKDDTANGPRFIFSLPPEIIHNPNFTVRDNRDNTAGVYARRGGFSRQKQDLYLLPIVISDGGIPPMSSTNTLTIKVCGCDVNGALLSCNAEAYILNAGLSTGALIAILACIVILLVIVVLFVTLRRQKKEPLIVFEEEDVRENIITYDDEGGGEEDTEAFDIATLQNPDGINGFIPRKDIKPEYQYMPRPGLRPAPNSVDVDDFINTRIQEADNDPTAPPYDSIQIYGYEGRGSVAGSLSSLESATTDSDLDYDYLQNWGPRFKKLADLYGSKDTFDDDS

SEQ ID NO: 2480 - protein, 693 aa, Homo Sapiens
MKENYCLQAALVCLGMLCHSHAFAPERRGHLRPSFHGHHEKGKEGQVLQRSKRGWVWNQFFVIEEYTGPDPVLVGRLHSDIDSGDGNIKYILSGEGAGTIFVIDDKSGNIHATKTLDREERAQYTLMAQAVDRDTNRPLEPPSEFIVKVQDINDNPPEFLHETYHANVPERSNVGTSVIQVTASDADDPTYGNSAKLVYSILEGQPYFSVEAQTGIIRTALPNMDREAKEEYHVVIQAKDMGGHMGGLSGTTKVTITLTDVNDNPPKFPQSVYQMSVSEAAVPGEEVGRVKAKDPDIGENGLVTYNIVDGDGMESFEITTDYETQEGVIKLKKPVDFETKRAYSLKVEAANVHIDPKFISNGPFKDTVTVKISVEDADEPPMFLAPSYIHEVQENAAAGTVVGRVHAKDPDAANSPIRYSIDRHTDLDRFFTINPEDGFIKTTKPLDREETAWLNITVFAAEIHNRHQEAKVPVAIRVLDVNDNAPKFAAPYEGFICESDQTKPLSNQPIVTISADDKDDTANGPRFIFSLPPEIIHNPNFTVRDNRDNTAGVYARRGGFSRQKQDLYLLPIVISDGGIPPMSSTNTLTIKVCGCDVNGALLSCNAEAYILNAGLSTGALIAILACIVILLGCPSLMEPPSPREDMRLLYLGFQLMLFSYVKVNRRFCLLGVFIKLPFLYVVATESPTTLTSL

SEQ ID NO: 2481 - protein, 62 aa, Homo Sapiens
  misc_feature (1)..(1): Xaa can be any naturally occurring amino acid
XMSVSEAAVPGEEVGRVKAKDPDIGENGLVTYNIVDGDGMESFEITTDYETQEGVIKLKKVS

SEQ ID NO: 2482 - protein, 760 aa, Homo Sapiens
MKTPPGASSRTKCSRELRSFCAFSCPRAKQPTCTAWFPQQEHPSENGPQMPGRDPPAASTMQVLLLTSAEDLDCTPGFQQKVFHINQPAEFIEDQSILNLTFSDCKGNDKLRYEVSSPYFKVNSDGGLVALRNITAVGKTLFVHARTPHAEDMAELVIVGGKDIQGSLQDIFKFARTSPVPRQKRSIVVSPILIPENQRQPFPRDVGKVVDSDRPERSKFRLTGKGVDQEPKGIFRINENTGSVSVTRTLDREVIAVYQLFVETTDVNGKTLEGPVPLEVIVIDQNDNRPIFREGPYIGHVMEGSPTGTTVMRMTAFDADDPATDNALLRYNIRQQTPDKPSPNMFYIDPEKGDIVTVVSPALLDRETLENPKYELIIEAQDMAGLDVGLTGTATATIMIDDKNDHSPKFTKKEFQATVEEGAVGVIVNLTVEDKDDPTTGAWRAAYTIINGNPGQSFEIHTNPQTNEGMLSVVKPLDYEISAFHTLLIKVENEDPLVPDVSYGPSSTATVHITVLDVNEGPVFYPDPMMVTRQEDLSVGSVLLTVNATDPDSLQHQTIRYSVYKDPAGWLNINPINGTVDTTAVLDRESPFVDNSVYTALFLAIDSGNPPATGTGTLLITLEDVNDNAPFIYPTVAEVCDDAKNLSVVILGASDKDLHPNTDPFKFEIHKQAVPDKVWKISKINNTHALVSLLQNLNKANYNLPIMVTDSGKPPMTNITDLRVQVCSCRNSKVDCNAAGALRFSLPSVLLLSLFSLACL

SEQ ID NO: 2483 - protein, 37 aa, Homo Sapiens
MQPRTPLVLCVLLSQSGGPVCKSQFQALPLAVQWLGV

SEQ ID NO: 2484 - protein, 67 aa, Homo Sapiens
MQPRTPLVLCVLLSQTPVRPTIYLCQNLQFIKNKARDSNSLADHKGKRIQVNRLLPGLLFHDELSGI

SEQ ID NO: 2485 - protein, 52 aa, Homo Sapiens
MQPRTPLVLCVLLSQVLLLTSAEDLDCTPGFQQKVFHINQPAEFIEDQSILN

SEQ ID NO: 2486 - protein, 67 aa, Homo Sapiens
MQPRTPLVLCVLLSQVLLLTSAEDLDCTPGFQQKVFHINQPAEFIEDQSILNCKQCHSKMLLDSSHI

SEQ ID NO: 2487 - protein, 175 aa, Homo Sapiens
MQPRTPLVLCVLLSQVLLLTSAEDLDCTPGFQQKVFHINQPAEFIEDQSILNLTFSDCKGNDKLRYEVSSPYFKVNSDGGLVALRNITAVGKTLFVHARTPHAEDMAELVIVGGKDIQGSLQDIFKFARTSPVPRQKRSIVVSPILIPENQRQPFPRDVGKMKIWQVLCLARWLT

SEQ ID NO: 2488 - protein, 190 aa, Homo Sapiens
MQPRTPLVLCVLLSQVLLLTSAEDLDCTPGFQQKVFHINQPAEFIEDQSILNLTFSDCKGNDKLRYEVSSPYFKVNSDGGLVALRNITAVGKTLFVHARTPHAEDMAELVIVGGKDIQGSLQDIFKFARTSPVPRQKRSIVVSPILIPENQRQPFPRDVGKRTHNPINSELLLNEGITADLNPCITILAI

SEQ ID NO: 2489 - protein, 713 aa, Homo Sapiens
MQPRTPLVLCVLLSQVLLLTSAEDLDCTPGFQQKVFHINQPAEFIEDQSILNLTFSDCKGNDKLRYEVSSPYFKVNSDGGLVALRNITAVGKTLFVHARTPHAEDMAELVIVGGKDIQGSLQDIFKFARTSPVPRQKRSIVVSPILIPENQRQPFPRDVGKVVDSDRPERSKFRLTGKGVDQEPKGIFRINENTGSVSVTRTLDREVIAVYQLFVETTDVNGKTLEGPVPLEVIVIDQNDNRPIFREGPYIGHVMEGSPTGTTVMRMTAFDADDPATDNALLRYNIRQQTPDKPSPNMFYIDPEKGDIVTVVSPALLDRETLENPKYELIIEAQDMAGLDVGLTGTATATIMIDDKNDHSPKFTKKEFQATVEEGAVGVIVNLTVEDKDDPTTGAWRAAYTIINGNPGQSFEIHTNPQTNEGMLSVVKPLDYEISAFHTLLIKVENEDPLVPDVSYGPSSTATVHITVLDVNEGPVFYPDPMMVTRQEDLSVGSVLLTVNATDPDSLQHQTIRYSVYKDPAGWLNINPINGTVDTTAVLDRESPFVDNSVYTALFLAIDSGNPPATGTGTLLITLEDVNDNAPFIYPTVAEVCDDAKNLSVVILGASDKDLHPNTDPFKFEIHKQAVPDKVWKISKINNTHALVSLLQNLNKANYNLPIMVTDSGKPPMTNITDLRVQVCSCRNSKVDCNAAGALRFSLPSVLLLSLFSLACL

SEQ ID NO: 2490 - protein, 674 aa, Homo Sapiens
MQPRTPLVLCVLLSQVLLLTSAEDLDCTPGFQQKVFHINQPAEFIEDQSILNLTFSDCKGNDKLRYEVSSPYFKVNSDGGLVALRNITAVGKTLFVHARTPHAEDMAELVIVGGKDIQGSLQVVDSDRPERSKFRLTGKGVDQEPKGIFRINENTGSVSVTRTLDREVIAVYQLFVETTDVNGKTLEGPVPLEVIVIDQNDNRPIFREGPYIGHVMEGSPTGTTVMRMTAFDADDPATDNALLRYNIRQQTPDKPSPNMFYIDPEKGDIVTVVSPALLDRETLENPKYELIIEAQDMAGLDVGLTGTATATIMIDDKNDHSPKFTKKEFQATVEEGAVGVIVNLTVEDKDDPTTGAWRAAYTIINGNPGQSFEIHTNPQTNEGMLSVVKPLDYEISAFHTLLIKVENEDPLVPDVSYGPSSTATVHITVLDVNEGPVFYPDPMMVTRQEDLSVGSVLLTVNATDPDSLQHQTIRYSVYKDPAGWLNINPINGTVDTTAVLDRESPFVDNSVYTALFLAIDSGNPPATGTGTLLITLEDVNDNAPFIYPTVAEVCDDAKNLSVVILGASDKDLHPNTDPFKFEIHKQAVPDKVWKISKINNTHALVSLLQNLNKANYNLPIMVTDSGKPPMTNITDLRVQVCSCRNSKVDCNAAGALRFSLPSVLLLSLFSLACL

SEQ ID NO: 2491 - protein, 56 aa, Homo Sapiens
MQPRTPLVLCVLLSQVLLLTSAEDLDCTPGFQQKVFHINQPAEFIEDQSILNYVFY

SEQ ID NO: 2492 - protein, 147 aa, Homo Sapiens
MILQAHLHSLCLLMLYLATGYGQEGKFSGPLKPMTFSIYEGQEPSQIIFQFKANPPAVTFELTGETDNIFVIEREGLLYYNRALDRETRSTHNLQVAALDANGIIVEGPVPITIKVKDINDNRPTFLQSKYEGSVRQNSRPGKPFLY

SEQ ID NO: 2493 - protein, 832 aa, Homo Sapiens
MILQAHLHSLCLLMLYLATGYGQEGKFSGPLKPMTFSIYEGQEPSQIIFQFKANPPAVTFELTGETDNIFVIEREGLLYYNRALDRETRSTHNLQVAALDANGIIVEGPVPITIKVKDINDNRPTFLQSKYEGSVRQNSRPGKPFLYVNATDLDDPATPNGQLYYQIVIQLPMINNVMYFQINNKTGAISLTREGSQELNPAKNPSYNLVISVKDMGGQSENSFSDTTSVDIIVTENIWKAPKPVEMVENSTDPHPIKITQVRWNDPGAQYSLVDKEKLPRFPFSIDQEGDIYVTQPLDREEKDAYVFYAVAKDEYGKPLSYPLEIHVKVKDINDNPPTCPSPVTVFEVQENERLGNSIGTLTAHDRDEENTANSFLNYRIVEQTPKLPMDGLFLIQTYAGMLQLAKQSLKKQDTPQYNLTIEVSDKDFKTLCFVQINVIDINDQIPIFEKSDYGNLTLAEDTNIGSTILTIQATDADEPFTGSSKILYHIIKGDSEGRLGVDTDPHTNTGYVIIKKPLDFETAAVSNIVFKAENPEPLVFGVKYNASSFAKFTLIVTDVNEAPQFSQHVFQAKVSEDVAIGTKVGNVTAKDPEGLDISYSLRGDTRGWLKIDHVTGEIFSVAPLDREAGSPYRVQVVATEVGGSSLSSVSEFHLILMDVNDNPPRLAKDYTGLFFCHPLSAPGSLIFEATDDDQHLFRGPHFTFSLGSGSLQNDWEVSKINGTHARLSTRHTEFEEREYVVLIRINDGGRPPLEGIVSLPVTFCSCVEGSCFRPAGHQTGIPTVGMAVGILLTTLLVIGIILAVVFIRIKKDKGKDNVESAQASEVKPLRS

SEQ ID NO: 2494 - protein, 832 aa, Homo Sapiens; identical to SEQ ID NO: 2493

SEQ ID NO: 2495 - protein, 580 aa, Homo Sapiens
MILQAHLHSLCLLMLYLATGYGQEGKFSGPLKPMTFSIYEGQEPSQIIFQFKANPPAVTFELTGETDNIFVIEREGLLYYNRALDRETRSTHNLQVAALDANGIIVEGPVPITIKVKDINDNRPTFLQSKYEGSVRQNSRPGNSIGTLTAHDRDEENTANSFLNYRIVEQTPKLPMDGLFLIQTYAGMLQLAKQSLKKQDTPQYNLTIEVSDKDFKTLCFVQINVIDINDQIPIFEKSDYGNLTLAEDTNIGSTILTIQATDADEPFTGSSKILYHIIKGDSEGRLGVDTDPHTNTGYVIIKKPLDFETAAVSNIVFKAENPEPLVFGVKYNASSFAKFTLIVTDVNEAPQFSQHVFQAKVSEDVAIGTKVGNVTAKDPEGLDISYSLRGDTRGWLKIDHVTGEIFSVAPLDREAGSPYRVQVVATEVGGSSLSSVSEFHLILMDVNDNPPRLAKDYTGLFFCHPLSAPGSLIFEATDDDQHLFRGPHFTFSLGSGSLQNDWEVSKINGTHARLSTRHTEFEEREYVVLIRINDGGRPPLEGIVSLPGIILAVVFIRIKKDKGKDNVESAQASEVKPLRS

SEQ ID NO: 2496 - protein, 90 aa, Homo Sapiens
  misc_feature (1)..(1): Xaa can be any naturally occurring amino acid
XIDINDQIPIFEKSDYGNLTLAEDTNIGSTILTIQATDADEPFTGSSKILYHIIKGDSEGRLGVDTDPHTNTGYVIIKKLFTEGRHKRLA

SEQ ID NO: 2497 - protein, 790 aa, Homo Sapiens
MKITSTSCICPVLVCLCFVQRCYGTAHHSSIKVMRNQTKHIEGETEVHHRPKRGWVWNQFFVLEEHMGPDPQYVGKLHSNSDKGDGSVKYILTGEGAGTIFIIDDTTGDIHSTKSLDREQKTHYVLHAQAIDRRTNKPLEPESEFIIKVQDINDNAPKFTDGPYIVTVPEMSDMGTSVLQVTATDADDPTYGNSARVVYSILQGQPYFSVDPKTGVIRTALHNMDREAREHYSVVIQAKDMAGQVGGLSGSTTVNITLTDVNDNPPRFPQKHYQLYVPESAQVGSAVGKIKANDADTGSNADMTYSIINGDGMGIFSISTDKETREGILSLKKPLNYEKKKSYTLNIEGANTHLDFRFSHLGPFKDATMLKIIVGDVDEPPLFSMPSYLMEVYENAKIGTVVGTVLAQDPDSTNSLVRYFINYNVEDDRFFNIDANTGTIRTTKVLDREETPWYNITVTASEIDNPDLLSHVTVGIRVLDVNDNPPELAREYDIIVCENSKPGQVIHTISATDKDDFANGPRFNFFLDERLPVNPNFTLKDNEDNTASILTRRRRFSRTVQDVYYLPIMISDGGIPSLSSSSTLTIRVCACERDGRVRTCHAEAFLSSAGLSTGALIAILLCVLILLAIVVLFITLRRSKKEPLIISEEDVRENVVTYDDEGGGEEDTEAFDITALRNPSAAEELKYRRDIRPEVKLTPRHQTSSTLESIDVQEFIKQRLAEADLDPSVPPYDSLQTYAYEGQRSEAGSISSLDSATTQSDQDYHYLGDWGPEFKKLAELYGEIESERTT

SEQ ID NO: 2498 - protein, 790 aa, Homo Sapiens; identical to SEQ ID NO: 2497

SEQ ID NO: 2499 - protein, 590 aa, Homo Sapiens
MKITSTSCICPVLVCLCFVQRCYGTAHHSSIKVMRNQTKHIEGETEVHHRPKRGWVWNQFFVLEEHMGPDPQYVGKLHSNSDKGDGSVKYILTGEGAGTIFIIDDTTGDIHSTKSLDREQKTHYVLHAQAIDRRTNKPLEPESEFIIKVQDINDNAPKFTDGPYIVTVPEMSDMGTSVLQVTATDADDPTYGNSARVVYSILQGQPYFSVDPKTGVIRTALHNMDREAREHYSVVIQAKDMAGQVGGLSGSTTVNITLTDVNDNPPRFPQKHYQLYVPESAQVGSAVGKIKANDADTGSNADMTYSIINGDGMGIFSISTDKETREGILSLKKPLNYEKKKSYTLNIEGANTHLDFRFSHLGPFKDATMLKIIVGDVDEPPLFSMPSYLMEVYENAKIGTVVGTVLAQDPDSTNSLVRYFINYNVEDDRFFNIDANTGTIRTTKVLDREETPWYNITVTASEIDNPDLLSHVTVGIRVLDVNDNPPELAREYDIIVCENSKPGQVIHTISATDKDDFANGPRFNFFLDERLPVNPNFTLKDNEGEHIYTYLFIYVVSALTLYVIGFILIYTQTSCKSAFKVSLMLLCYDL

SEQ ID NO: 2500 - protein, 575 aa, Homo Sapiens
MKITSTSCICPVLVCLCFVQRCYGTAHHSSIKVMRNQTKHIEGETEVHHRPKRGWVWNQFFVLEEHMGPDPQYVGKLHSNSDKGDGSVKYILTGEGAGTIFIIDDTTGDIHSTKSLDREQKTHYVLHAQAIDRRTNKPLEPESEFIIKVQDINDNAPKFTDGPYIVTVPEMSDMGTSVLQVTATDADDPTYGNSARVVYSILQGQPYFSVDPKTGVIRTALHNMDREAREHYSVVIQAKDMAGQVGGLSGSTTVNITLTDVNDNPPRFPQKHYQLYVPESAQVGSAVGKIKANDADTGSNADMTYSIINGDGMGIFSISTDKETREGILSLKKPLNYEKKKSYTLNIEGANTHLDFRFSHLGPFKDATMLKIIVGDVDEPPLFSMPSYLMEVYENAKIGTVVGTVLAQDPDSTNSLVRYFINYNVEDDRFFNIDANTGTIRTTKVLDREETPWYNITVTASEIDNPDLLSHVTVGIRVLDVNDNPPELAREYDIIVCENSKPGQVIHTISATDKDDFANGPRFNFFLDERLPVNPNFTLKDNEAAAAPSPSGFVHAREMGVCGPAMQKPSCPRLV

SEQ ID NO: 2501 - protein, 790 aa, Homo Sapiens; identical to SEQ ID NO: 2497

SEQ ID NO: 2502 - protein, 574 aa, Homo Sapiens
MKITSTSCICPVLVCLCFVQRCYGTAHHSSIKVMRNQTKHIEGETEVHHRPKRGWVWNQFFVLEEHMGPDPQYVGKLHSNSDKGDGSVKYILTGEGAGTIFIIDDTTGDIHSTKSLDREQKTHYVLHAQAIDRRTNKPLEPESEFIIKVQDINDNAPKFTDGPYIVTVPEMSDMGTSVLQVTATDADDPTYGNSARVVYSILQGQPYFSVDPKTGVIRTALHNMDREAREHYSVVIQAKDMAGQVGGLSGSTTVNITLTDVNDNPPRFPQKHYQLYVPESAQVGSAVGKIKANDADTGSNADMTYSIINGDGMGIFSISTDKETREGILSLKKPLNYEKKKSYTLNIEGANTHLDFRFSHLGPFKDATMLKIIVGDVDEPPLFSMPSYLMEVYENAKIGTVVGTVLAQDPDSTNSLVRYFINYNVEDDRFFNIDANTGTIRTTKVLDREETPWYNITVTASEIDNPDLLSHVTVGIRVLDVNDNPPELAREYDIIVCENSKPGQVIHTISATDKDDFANGPRFNFFLDERLPVNPNFTLKDNEAAAPSPSGFVHAREMGVCGPAMQKPSCPRLV

SEQ ID NO: 2503 - protein, 441 aa, Homo Sapiens
WVWNQFFVLEEHMGPDPQYVGKLHSNSDKGDGSVKYILTGEGAGTIFIIDDTTGDIHSTKSLDREQKTHYVLHAQAIDRRTNKPLEPESEFIIKVQDINDNAPKFTDGPYIVTVPEMSDMGTSVLQVTATDADDPTYGNSARVVYSILQGQPYFSVDPKTGVIRTALHNMDREAREHYSVVIQAKDMAGQVGGLSGSTTVNITLTDVNDNPPRFPQKHYQLYVPESAQVGSAVGKIKANDADTGSNADMTYSIINGDGMGIFSISTDKETREGILSLKKPLNYEKKKSYTLNIEGANTHLDFRFSHLGPFKDATMLKIIVGDVDEPPLFSMPSYLMEVYENAKIGTVVGTVLAQDPDSTNSLVRYFINYNVEDDRFFNIDANTGTIRTTKVLDREETPWYNITVTASEIAAAAPSPSGFVHAREMGVCGPAMQKPSCPRLV

SEQ ID NO: 2504 - protein, 434 aa, Homo Sapiens
GIPLLWPCLGATENSQTKKVKQPVRSHLRVKRGWVWNQFFVPEEMNTTSHHIGQLRSDLDNGNNSFQYKLLGAGAGSTFIIDERTGDIYAIQKLDREERSLYILRAQVIDIATGRAVEPESEFVIKVSDINDNEPKFLDEPYEAIVPEMSPEGTLVIQVTASDADDPSSGNNARLLYSLLQGQPYFSVEPTTGVIRISSKMDRELQDEYWVIIQAKDMIGQPGALSGTTSVLIKLSDVNDNKPIFKESLYRLTVSESAPTGTSIGTIMAYDNDIGENAEMDYSIEEDDSQTFDIITNHETQEGIVILKKKVDFEHQNHYGIRAKVKNHHVPEQLMKYHTEASTTFIKIQVEDVDEPPLFLLPYYVFEVFEETPQGSFVGVVSATDPDNRKSPIRYSITRSKVFNINDNGTITTSNSLDREISAWYNLSITATEK

SEQ ID NO: 2505 - protein, 65 aa, Homo Sapiens
MNCYLLLRFMLGIPLLWPCLGATENSQTKKVKQPVRSHLRVKRGWVWNQFFVPEEMNTTSHHIGQ

SEQ ID NO: 2506 - protein, 772 aa, Homo Sapiens
MNCYLLLRFMLGIPLLWPCLGATENSQTKKVKQPVRSHLRVKRGWVWNQFFVPEEMNTTSHHIGQLRSDLDNGNNSFQYKLLGAGAGSTFIIDERTGDIYAIQKLDREERSLYILRAQVIDIATGRAVEPESEFVIKVSDINDNEPKFLDEPYEAIVPEMSPEGTLVIQVTASDADDPSSGNNARLLYSLLQGQPYFSVEPTTGVIRISSKMDRELQDEYWVIIQAKDMIGQPGALSGTTSVLIKLSDVNDNKPIFKESLYRLTVSESAPTGTSIGTIMAYDNDIGENAEMDYSIEEDDSQTFDIITNHETQEGIVILKKKVDFEHQNHYGIRAKVKNHHVPEQLMKYHTEASTTFIKIQVEDVDEPPLFLLPYYVFEVFEETPQGSFVGVVSATDPDNRKSPIRYSITRSKVFNINDNGTITTSNSLDREISAWYNLSITATEKYNIEQISSIPLYVQVLNINDHAPEFSQYYETYVCENAGSGQVIQTISAVDRDESIEEHHFYFNLSVEDTNNSSFTIIDNQDNTAVILTNRTGFNLQEEPVFYISILIADNGIPSLTSTNTLTIHVCDCGDSGSTQTCQYQELVLSMGFKTEVIIAILICIMIIFGFIFLTLGLKQRRKQILFPEKSEDFRENIFQYDDEGGGEEDTEAFDIAELRSSTIMRERKTRKTTSAEIRSLYRQSLQVGPDSAIFRKFILEKLEEANTDPCAPPFDSLQTYAFEGTGSLAGSLSSLESAVSDQDESYDYLNELGPRFKRLACMFGSAVQSNN

SEQ ID NO: 2507 - protein, 490 aa, Homo Sapiens
MNCYLLLRFMLGIPLLWPCLGATENSQTKKVKQPVRSHLRVKRGWVWNQFFVPEEMNTTSHHIGQLRSDLDNGNNSFQYKLLGAGAGSTFIIDERTGDIYAIQKLDREERSLYILRAQVIDIATGRAVEPESEFVIKVSDINDNEPKFLDEPYEAIVPEMSPEGTLVIQVTASDADDPSSGNNARLLYSLLQGQPYFSVEPTTGVIRISSKMDRELQDEYWVIIQAKDMIGQPGALSGTTSVLIKLSDVNDNKPIFKESLYRLTVSESAPTGTSIGTIMAYDNDIGENAEMDYSIEEDDSQTFDIITNHETQEGIVILKKKVDFEHQNHYGIRAKVKNHHVPEQLMKYHTEASTTFIKIQVEDVDEPPLFLLPYYVFEVFEETPQGSFVGVVSATDPDNRKSPIRYSITRSKVFNINDNGTITTSNSLDREISAWYNLSITATEKYNIEQISSIPLYVQVLNINDHAPEFSQYYETYVCENAGSGQGLFF

SEQ ID NO: 2508 - protein, 541 aa, Homo Sapiens
MNCYLLLRFMLGIPLLWPCLGATENSQTKKVKQPVRSHLRVKRGWVWNQFFVPEEMNTTSHHIGQLRSDLDNGNNSFQYKLLGAGAGSTFIIDERTGDIYAIQKLDREERSLYILRAQVIDIATGRAVEPESEFVIKVSDINDNEPKFLDEPYEAIVPEMSPEGTLVIQVTASDADDPSSGNNARLLYSLLQGQPYFSVEPTTGVIRISSKMDRELQDEYWVIIQAKDMIGQPGALSGTTSVLIKLSDVNDNKPIFKESLYRLTVSESAPTGTSIGTIMAYDNDIGENAEMDYSIEEDDSQTFDIITNHETQEGIVILKKKVDFEHQNHYGIRAKVKNHHVPEQLMKYHTEASTTFIKIQVEDVDEPPLFLLPYYVFEVFEETPQGSFVGVVSATDPDNRKSPIRYSITRSKVFNINDNGTITTSNSLDREISAWYNLSITATEKYNIEQISSIPLYVQVLNINDHAPEFSQYYETYVCENAGSGQVIQTISAVDRDESIEEHHFYFNLSVEDTNNSSFTIIDNQELVLTFKKNLSSTSPS

SEQ ID NO: 2509 - protein, 445 aa, Homo Sapiens
MDNDPLVFGVSGEEASRFFAVEPDTGVVWLRQPLDRETKSEFTVEFSVSDHQGVITRKVNIQVGDVNDNAPTFHNQPYSVRIPENTPVGTPIFIVNATDPDLGAGGSVLYSFQPPSQFFAIDSARGIVTVIRELDYETTQAYQLTVNALAIIITNLPYSTNIYEHSPPGTTVRIITAIDQDKGRPRGIGYTIVSGNTNSIFALDYISGVLTLNGLLDRENPLYSHGFILTVKGTELNDDRTPSDATVTTTFNILVIDINDNAPEFNSSEYSVAITELAQVGFALPLFIQVVDKDEGLNSMFEVYLVGNNSHHFIISPTSVQGKADIRIRVAIPLDYETVDRYDFDLFANESVPDHVGYAKVKITLINENDNRPIFSQPLYNISLYENVTVGTSVLTVLVSPRFTAGPLSSPGPTVVRHPEGFCPRDLSNQGRRHPQIPELCLLVY

SEQ ID NO: 2510 - protein, 3354 aa, Homo Sapiens
MGRHVATSCHVAWLLVLISGCWGQVNRLPFFTNHFFDTYLLISEDTPVGSSVTQLLAQDMDNDPLVFGVSGEEASRFFAVEPDTGVVWLRQPLDRETKSEFTVEFSVSDHQGVITRKVNIQVGDVNDNAPTFHNQPYSVRIPENTPVGTPIFIVNATDPDLGAGGSVLYSFQPPSQFFAIDSARGIVTVIRELDYETTQAYQLTVNATDQDKTRPLSTLANLAIIITDVQDMDPIFINLPYSTNIYEHSPPGTTVRIITAIDQDKGRPRGIGYTIVSGNTNSIFALDYISGVLTLNGLLDRENPLYSHGFILTVKGTELNDDRTPSDATVTTTFNILVIDINDNAPEFNSSEYSVAITELAQVGFALPLFIQVVDKDENLGLNSMFEVYLVGNNSHHFIISPTSVQGKADIRIRVAIPLDYETVDRYDFDLFANESVPDHVGYAKVKITLINENDNRPIFSQPLYNISLYENVTVGTSVLTVLATDNDAGTFGEVSYFFSDDPDRFSLDKDTGLIMLIARLDYELIQRFTLTIIARDGGGEETTGRVRINVLDVNDNVPTFQKDAYVGALRENEPSVTQLVRLRATDEDSPPNNQITYSIVSASAFGSYFDISLYEGYGVISVSRPLDYEQISNGLIYLTVMAMDAGNPPLNSTVPVTIEVFDENDNPPTFSKPAYFVSVVENIMAGATVLFLNATDLDRSREYGQESIIYSLEGSTQFRINARSGEITTTSLLDRETKSEYILIVRAVDGGVGHNQKTGIATVNITLLDINDNHPTWKDAPYYINLVEMTPPDSDVTTVVAVDPDLGENGTLVYSIQPPNKFYSLNSTTGKIRTTHAMLDRENPDPHEAELMRKIVVSVTDCGRPPLKATSSATVFVNLLDLNDNDPTFQNLPFVAEVLEGIPAGVSIYQVVAIDLDEGLNGLVSYRMPVGMPRMDFLINSSSGVVVTTTELDRERIAEYQLRVVASDAGTPTKSSTSTLTIHVLDVNDETPTFFPAVYNVSVSEDVPREFRVVWLNCTDNDVGLNAELSYFITGGNVDGKFSVGYRDAVVRTVVGLDRETTAAYMLILEAIDNGPVGKRHTGTATVFVTVLDVNDNRPIFLQSSYEASVPEDIPEGHSILQLKATDADEGEFGRVWYRILHGNHGNNFRIHVSNGLLMRGPRPLDRERNSSHVLIVEAYNHDLGPMRSSVRVIVYVEDINDEAPVFTQQQYSRLGLRETAGIGTSVIVVQATDRDSGDGGLVNYRILSGAEGKFEIDESTGLIITVNYLDYETKTSYMMNVSATDQAPPFNQGFCSVYITLLNELDEAVQFSNASYEAAILENLALGTEIVRVQAYSIDNLNQITYRFNAYTSTQAKALFKIDAITGVITVQGLVDREKGDFYTLTVVADDGGPKVDSTVKVYITVLDENDNSPRFDFTSDSAVSIPEDCPVGQRVATVKAWDPDAGSNGQVVFSLASGNIAGAFEIVTTNDSIGEVFVARPLDREELDHYILQVVASDRGTPPRKKDHILQVTILDINDNPPVIESPFGYNVSVNENVGGGTAVVQVRATDRDIGINSVLSYYITEGNKDMAFRMDRISGEIATRPAPPDRERQSFYHLVATVEDEGTPTLSATTHVYVTIVDENDNAPMFQQPHYEVLLDEGPDTLNTSLITIQALDLDEGPNGTVTYAIVAGNIVNTFRIDRHMGVITAAKELDYEISHGRYTLIVTATDQCPILSHRLTSTTTVLVNVNDINDNVPTFPRDYEGPFEVTEGQPGPRVWTFLAHDRDSGPNGQVEYSIMDGDPLGEFVISPVEGVLRVRKDVELDRETIAFYNLTICARDRGMPPLSSTMLVGIRVLDINDNDPVLLNLPMNITISENSPVSSFVAHVLASDADSGCNARLTFNITAGNRERAFFINATTGIVTVNRPLDRERIPEYKLTISVKDNPENPRIARRDYDLLLIFLSDENDNHPLFTKSTYQAEVMENSPAGTPLTVLNGPILALDADQDIYAVVTYQLLGAQSGLFDINSSTGVVTVRSGVIIDREAFSPPILELLLLAEDIGLLNSTAHLLITILDDNDNRPTFSPATLTVHLLENCPPGFSVLQVTATDEDSGLNGELVYRIEAGAQDRFLIHLVTGVIRVGNATIDREEQESYRLTVVATDRGTVPLSGTAIVTILIDDINDSRPEFLNPIQTVSVLESAEPGTVIANITAIDHDLNPKLEYHIVGIVAKDDTDRLVPNQEDAFAVNINTGSVMVKSPMNRELVATYEVTLSVIDNASDLPERSVSVPNAKLTVNVLDVNDNTPQFKPFGITYYMERILEGATPGTTLIAVAAVDPDKGLNGLVTYTLLDLVPPGYVQLEDSSAGKVIANRTVDYEEVHWLNFTVRASDNGSPPRAAEIPVYLEIVDINDNNPIFDQPSYQEAVFEDVPVGTIILTVTATDADSGNFALIEYSLGDGESKFAINPTTGDIYVLSSLDREKKDHYILTALAKDNPGDVASNRRENSVQVVIQVLDVNDCRPQFSKPQFSTSVYENEPAGTSVITMMATDQDEGPNGELTYSLEGPGVEAFHVDMDSGLVTTQRPLQSYEKFSLTVVATDGGEPPLWGTTMLLVEVIDVNDNRPVFVRPPNGTILHIREEIPLRSNVYEVYATDKDEGLNGAVRYSFLKTAGNRDWEFFIIDPISGLIQTAQRLDRESQAVYSLILVASDLGQPVPYETMQPLQVALEDIDDNEPLFVRPPKGSPQYQLLTVPEHSPRGTLVGNVTGAVDADEGPNAIVYYFIAAGNEEKNFHLQPDGCLLVLRDLDREREAIFSFIVKASSNRSWTPPRGPSPTLDLVADLTLQEVRVVLEDINDQPPRFTKAEYTAGVATDAKVGSELIQVLALDADIGNNSLVFYSILAIHYFRALANDSEDVGQVFTMGSMDGILRTFDLFMAYSPGYFVVDIVARDLAGHNDTAIIGIYILRDDQRVKIVINEIPDRVRGFEEEFIHLLSNITGAIVNTDNVQFHVDKKGRVNFAQTELLIHVVNRDTNRILDVDRVIQMIDENKEQLRNLFRNYNVLDVQPAISVRLPDDMSALQMAIIVLAILLFLAAMLFVLMNWYYRTVHKRKLKAIVAGSAGNRGFIDIMDMPNTNKYSFDGANPVWLDPFCRNLELAAQAEHEDDLPENLSEIADLWNSPTRTHGTFGREPAAVKPDDDRYLRAAIQEYDNIAKLGQIIREGPIKGSLLKVVLEDYLRLKKLFAQRMVQKASSCHSSISELIQTELDEEPGDHSPGQGSLRFRHKPPVELKGPDGIHVVHGSTGTLLATDLNSLPEEDQKGLGRSLETLTAAEATAFERNARTESAKSTPLHKLRDVIMETPLEITEL

SEQ ID NO: 2511 - protein, 1061 aa, Homo Sapiens
MGRHVATSCHVAWLLVLISGCWGQVNRLPFFTNHFFDTYLLISEDTPVGSSVTQLLAQDMDNDPLVFGVSGEEASRFFAVEPDTGVVWLRQPLDRETKSEFTVEFSVSDHQGVITRKVNIQVGDVNDNAPTFHNQPYSVRIPENTPVGTPIFIVNATDPDLGAGGSVLYSFQPPSQFFAIDSARGIVTVIRELDYETTQAYQLTVNATDQDKTRPLSTLANLAIIITDVQDMDPIFINLPYSTNIYEHSPPGTTVRIITAIDQDKGRPRGIGYTIVSGNTNSIFALDYISGVLTLNGLLDRENPLYSHGFILTVKGTELNDDRTPSDATVTTTFNILVIDINDNAPEFNSSEYSVAITELAQVGFALPLFIQVVDKDENLGLNSMFEVYLVGNNSHHFIISPTSVQGKADIRIRVAIPLDYETVDRYDFDLFANESVPDHVGYAKVKITLINENDNRPIFSQPLYNISLYENVTVGTSVLTVLATDNDAGTFGEVSYFFSDDPDRFSLDKDTGLIMLIARLDYELIQRFTLTIIARDGGGEETTGRVRINVLDVNDNVPTFQKDAYVGALRENEPSVTQLVRLRATDEDSPPNNQITYSIVSASAFGSYFDISLYEGYGVISVSRPLDYEQISNGLIYLTVMAMDAGNPPLNSTVPVTIEVFDENDNPPTFSKPAYFVSVVENIMAGATVLFLNATDLDRSREYGQESIIYSLEGSTQFRINARSGEITTTSLLDRETKSEYILIVRAVDGGVGHNQKTGIATVNITLLDINDNHPTWKDAPYYINLVEMTPPDSDVTTVVAVDPDLGENGTLVYSIQPPNKFYSLNSTTGKIRTTHAMLDRENPDPHEAELMRKIVVSVTDCGRPPLKATSSATVFVNLLDLNDNDPTFQNLPFVAEVLEGIPAGVSIYQVVAIDLDEGLNGLVSYRMPVGMPRMDFLINSSSGVVVTTTELDRERIAEYQLRVVASDAGTPTKSSTSTLTIHVLDVNDETPTFFPAVYNVSVSEDVPREFRVVWLNCTDNDVGLNAELSYFITGAAPASAHLCRPPGALPPPLPDGQPD

SEQ ID NO: 2512 - protein, 1380 aa, Homo Sapiens
MGRHVATSCHVAWLLVLISGCWGQVNRLPFFTNHFFDTYLLISEDTPVGSSVTQLLAQDMDNDPLVFGVSGEEASRFFAVEPDTGVVWLRQPLDRETKSEFTVEFSVSDHQGVITRKVNIQVGDVNDNAPTFHNQPYSVRIPENTPVGTPIFIVNATDPDLGAGGSVLYSFQPPSQFFAIDSARGIVTVIRELDYETTQAYQLTVNATDQDKTRPLSTLANLAIIITDVQDMDPIFINLPYSTNIYEHSPPGTTVRIITAIDQDKGRPRGIGYTIVSGNTNSIFALDYISGVLTLNGLLDRENPLYSHGFILTVKGTELNDDRTPSDATVTTTFNILVIDINDNAPEFNSSEYSVAITELAQVGFALPLFIQVVDKDENLGLNSMFEVYLVGNNSHHFIISPTSVQGKADIRIRVAIPLDYETVDRYDFDLFANESVPDHVGYAKVKITLINENDNRPIFSQPLYNISLYENVTVGTSVLTVLATDNDAGTFGEVSYFFSDDPDRFSLDKDTGLIMLIARLDYELIQRFTLTIIARDGGGEETTGRVRINVLDVNDNVPTFQKDAYVGALRENEPSVTQLVRLRATDEDSPPNNQITYSIVSASAFGSYFDISLYEGYGVISVSRPLDYEQISNGLIYLTVMAMDAGNPPLNSTVPVTIEVFDENDNPPTFSKPAYFVSVVENIMAGATVLFLNATDLDRSREYGQESIIYSLEGSTQFRINARSGEITTTSLLDRETKSEYILIVRAVDGGVGHNQKTGIATVNITLLDINDNHPTWKDAPYYINLVEMTPPDSDVTTVVAVDPDLGENGTLVYSIQPPNKFYSLNSTTGKIRTTHAMLDRENPDPHEAELMRKIVVSVTDCGRPPLKATSSATVFVNLLDLNDNDPTFQNLPFVAEVLEGIPAGVSIYQVVAIDLDEGLNGLVSYRMPVGMPRMDFLINSSSGVVVTTTELDRERIAEYQLRVVASDAGTPTKSSTSTLTIHVLDVNDETPTFFPAVYNVSVSEDVPREFRVVWLNCTDNDVGLNAELSYFITGGNVDGKFSVGYRDAVVRTVVGLDRETTAAYMLILEAIDNGPVGKRHTGTATVFVTVLDVNDNRPIFLQSSYEASVPEDIPEGHSILQAATDADEGEFGRVWYRILHGNHGNNFRIHVSNGLLMRGPRPLDRERNSSHVLIVEAYNHDLGPMRSSVRVIVYVEDINDEAPVFTQQQYSRLGLRETAGIGTSVIVVQATDRDSGDGGLVNYRILSGAEGKFEIDESTGLIITVNYLDYETKTSYMMNVSATDQAPPFNQGFCSVYITLLNELDEAVQFSNASYEAAILENLALGTEIVRVQAYSIDNLNQITYRFNAYTSTQAKALFKIDAITVRGWGQGAPFLPI

SEQ ID NO: 2513 - protein, 1211 aa, Homo Sapiens
MGRHVATSCHVAWLLVLISGCWGQVNRLPFFTNHFFDTYLLISEDTPVGSSVTQLLAQDMDNDPLVFGVSGEEASRFFAVEPDTGVVWLRQPLDRETKSEFTVEFSVSDHQGVITRKVNIQVGDVNDNAPTFHNQPYSVRIPENTPVGTPIFIVNATDPDLGAGGSVLYSFQPPSQFFAIDSARGIVTVIRELDYETTQAYQLTVNATDQDKTRPLSTLANLAIIITDVQDMDPIFINLPYSTNIYEHSPPGTTVRIITAIDQDKGRPRGIGYTIVSGNTNSIFALDYISGVLTLNGLLDRENPLYSHGFILTVKGTELNDDRTPSDATVTTTFNILVIDINDNAPEFNSSEYSVAITELAQVGFALPLFIQVVDKDENLGLNSMFEVYLVGNNSHHFIISPTSVQGKADIRIRVAIPLDYETVDRYDFDLFANESVPDHVGYAKVKITLINENDNRPIFSQPLYNISLYENVTVGTSVLTVLATDNDAGTFGEVSYFFSDDPDRFSLDKDTGLIMLIARLDYELIQRFTLTIIARDGGGEETTGRVRINVLDVNDNVPTFQKDAYVGALRENEPSVTQLVRLRATDEDSPPNNQITYSIVSASAFGSYFDISLYEGYGVISVSRPLDYEQISNGLIYLTVMAMDAGNPPLNSTVPVTIEVFDENDNPPTFSKPAYFVSVVENIMAGATVLFLNATDLDRSREYGQESIIYSLEGSTQFRINARSGEITTTSLLDRETKSEYILIVRAVDGGVGHNQKTGIATVNITLLDINDNHPTWKDAPYYINLVEMTPPDSDVTTVVAVDPDLGENGTLVYSIQPPNKFYSLNSTTGKIRTTHAMLDRENPDPHEAELMRKIVVSVTDCGRPPLKATSSATVFVNLLDLNDNDPTFQNLPFVAEVLEGIPAGVSIYQVVAIDLDEGLNGLVSYRMPVGMPRMDFLINSSSGVVVTTTELDRERIAEYQLRVVASDAGTPTKSSTSTLTIHVLDVNDETPTFFPAVYNVSVSEDVPREFRVVWLNCTDNDVGLNAELSYFITGGNVDGKFSVGYRDAVVRTVVGLDRETTAAYMLILEAIDNGPVGKRHTGTATVFVTVLDVNDNRPIFLQSSYEASVPEDIPEGHSILQEDLASPCISPAPPRRAFQSSGEKETSQFPGKELRREPGPSKAQNRAAFTEPLAEAPLLGSKQAQEERAPLPREQAQQLQGSEGEKGGP

SEQ ID NO: 2514 - protein, 530 aa, Homo Sapiens
MGRHVATSCHVAWLLVLISGCWGQVNRLPFFTNHFFDTYLLISEDTPVGSSVTQLLAQDMDNDPLVFGVSGEEASRFFAVEPDTGVVWLRQPLDRETKSEFTVEFSVSDHQGVITRKVNIQVGDVNDNAPTFHNQPYSVRIPENTPVGTPIFIVNATDPDLGAGGSVLYSFQPPSQFFAIDSARGIVTVIRELDYETTQAYQLTVNATDQDKTRPLSTLANLAIIITDVQDMDPIFINLPYSTNIYEHSPPGTTVRIITAIDQDKGRPRGIGYTIVSGNTNSIFALDYISGVLTLNGLLDRENPLYSHGFILTVKGTELNDDRTPSDATVTTTFNILVIDINDNAPEFNSSEYSVAITELAQVGFALPLFIQVVDKDENLGLNSMFEVYLVGNNSHHFIISPTSVQGKADIRIRVAIPLDYETVDRYDFDLFANESVPDHVGYAKVKITLINENDNRPIFSQPLYNISLYENVTVGTSVLTVLVSPRFTAGPLSSPGPTVVRHPEGFCPRDLSNQGRRHPQIPELCLLVY

SEQ ID NO: 2515 - protein, 3354 aa, Homo Sapiens
MGRHVATSCHVAWLLVLISGCWGQVNRLPFFTNHFFDTYLLISEDTPVGSSVTQLLAQDMDNDPLVFGVSGEEASRFFAVEPDTGVVWLRQPLDRETKSEFTVEFSVSDHQGVITRKVNIQVGDVNDNAPTFHNQPYSVRIPENTPVGTPIFIVNATDPDLGAGGSVLYSFQPPSQFFAIDSARGIVTVIRELDYETTQAYQLTVNATDQDKTRPLSTLANLAIIITDVQDMDPIFINLPYSTNIYEHSPPGTTVRIITAIDQDKGRPRGIGYTIVSGNTNSIFALDYISGVLTLNGLLDRENPLYSHGFILTVKGTELNDDRTPSDATVTTTFNILVIDINDNAPEFNSSEYSVAITELAQVGFALPLFIQVVDKDETQGLNSMFEVYLVGNNSHHFIISPTSVQGKADIRIRVAIPLDYETVDRYDFDLFANESVPDHVGYAKVKITLINENDNRPIFSQPLYNISLYENVTVGTSVLTVLATDNDAGTFGEVSYFFSDDPDRFSLDKDTGLIMLIARLDYELIQRFTLTIIARDGGGEETTGRVRINVLDVNDNVPTFQKDAYVGALRENEPSVTQLVRLRATDEDSPPNNQITYSIVSASAFGSYFDISLYEGYGVISVSRPLDYEQISNGLIYLTVMAMDAGNPPLNSTVPVTIEVFDENDNPPTFSKPAYFVSVVENIMAGATVLFLNATDLDRSREYGQESIIYSLEGSTQFRINARSGEITTTSLLDRETKSEYILIVRAVDGGVGHNQKTGIATVNITLLDINDNHPTWKDAPYYINLVEMTPPDSDVTTVVAVDPDLGENGTLVYSIQPPNKFYSLNSTTGKIRTTHAMLDRENPDPHEAELMRKIVVSVTDCGRPPLKATSSATVFVNLLDLNDNDPTFQNLPFVAEVLEGIPAGVSIYQVVAIDLDEGLNGLVSYRMPVGMPRMDFLINSSSGVVVTTTELDRERIAEYQLRVVASDAGTPTKSSTSTLTIHVLDVNDETPTFFPAVYNVSVSEDVPREFRVVWLNCTDNDVGLNAELSYFITGGNVDGKFSVGYRDAVVRTVVGLDRETTAAYMLILEAIDNGPVGKRHTGTATVFVTVLDVNDNRPIFLQSSYEASVPEDIPEGHSILQLKATDADEGEFGRVWYRILHGNHGNNFRIHVSNGLLMRGPRPLDRERNSSHVLIVEAYNHDLGPMRSSVRVIVYVEDINDEAPVFTQQQYSRLGLRETAGIGTSVIVVQATDRDSGDGGLVNYRILSGAEGKFEIDESTGLIITVNYLDYETKTSYMMNVSATDQAPPFNQGFCSVYITLLNELDEAVQFSNASYEAAILENLALGTEIVRVQAYSIDNLNQITYRFNAYTSTQAKALFKIDAITGVITVQGLVDREKGDFYTLTVVADDGGPKVDSTVQVYITVLDENDNSPRFDFTSDSAVSIPEDCPVGQRVATVKAWDPDAGSNGQVVFSLASGNIAGAFEIVTTNDSIGEVFVARPLDREELDHYILQVVASDRGTPPRKKDHILQVTILDINDNPPVIESPFGYNVSVNENVGGGTAVVQVRATDRDIGINSVLSYYITEGNKDMAFRMDRISGEIATRPAPPDRERQSFYHLVATVEDEGTPTLSATTHVYVTIVDENDNAPMFQQPHYEVLLDEGPDTLNTSLITIQALDLDEGPNGTVTYAIVAGNIVNTFRIDRHMGVITAAKELDYEISHGRYTLIVTATDQCPILSHRLTSTTTVLVNVNDINDNVPTFPRDYEGPFEVTEGQPGPRVWTFLAHDRDSGPNGQVEYSIMDGDPLGEFVISPVEGVLRVRKDVELDRETIAFYNLTICARDRGMPPLSSTMLVGIRVLDINDNDPVLLNLPMNITISENSPVSSFVAHVLASDADSGCNARLTFNITAGNRERAFFINATTGIVTVNRPLDRERIPEYKLTISVKDNPENPRIARRDYDLLLIFLSDENDNHPLFTKSTYQAEVMENSPAGTPLTVLNGPILALDADQDIYAVVTYQLLGAQSGLFDINSSTGVVTVRSGVIIDREAFSPPILELLLLAEDIGLLNSTAHLLITILDDNDNRPTFSPATLTVHLLENCPPGFSVLQVTATDEDSGLNGELVYRIEAGAQDRFLIHLVTGVIRVGNATIDREEQESYRLTVVATDRGTVPLSGTAIVTILIDDINDSRPEFLNPIQTVSVLESAEPGTVIANITAIDHDLNPKLEYHIVGIVAKDDTDRLVPNQEDAFAVNINTGSVMVKSPMNRELVATYEVTLSVIDNASDLPERSVSVPNAKLTVNVLDVNDNTPQFKPFGITYYMERILEGATPGTTLIAVAAVDPDKGLNGLVTYTLLDLVPPGYVQLEDSSAGKVIANRTVDYEEVHWLNFTVRASDNGSPPRAAEIPVYLEIVDINDNNPIFDQPSYQEAVFEDVPVGTIILTVTATDADSGNFALIEYSLGDGESKFAINPTTGDIYVLSSLDREKKDHYILTALAKDNPGDVASNRRENSVQVVIQVLDVNDCRPQFSKPQFSTSVYENEPAGTSVITMMATDQDEGPNGELTYSLEGPGVEAFHVDMDSGLVTTQRPLQSYEKFSLTVVATDGGEPPLWGTTMLLVEVIDVNDNRPVFVRPPNGTILHIREEIPLRSNVYEVYATDKDEGLNGAVRYSFLKTAGNRDWEFFIIDPISGLIQTAQRLDRESQAVYSLILVASDLGQPVPYETMQPLQVALEDIDDNEPLFVRPPKGSPQYQLLTVPEHSPRGTLVGNVTGAVDADEGPNAIVYYFIAAGNEEKNFHLQPDGCLLVLRDLDREREAIFSFIVKASSNRSWTPPRGPSPTLDLVADLTLQEVRVVLEDINDQPPRFTKAEYTAGVATDAKVGSELIQVLALDADIGNNSLVFYSILAIHYFRALANDSEDVGQVFTMGSMDGILRTFDLFMAYSPGYFVVDIVARDLAGHNDTAIIGIYILRDDQRVKIVINEIPDRVRGFEEEFIHLLSNITGAIVNTDNVQFHVDKKGRVNFAQTELLIHVVNRDTNRILDVDRVIQMIDENKEQLRNLFRNYNVLDVQPAISVRLPDDMSALQMAIIVLAILLFLAAMLFVLMNWYYRTVHKRKLKAIVAGSAGNRGFIDIMDMPNTNKYSFDGANPVWLDPFCRNLELAAQAEHEDDLPENLSEIADLWNSPTRTHGTFGREPAAVKPDDDRYLRAAIQEYDNIAKLGQIIREGPIKGSLLKVVLEDYLRLKKLFAQRMVQKASSCHSSISELIQTELDEEPGDHSPGQGSLRFRHKPPVELKGPDGIHVVHGSTGTLLATDLNSLPEEDQKGLGRSLETLTAAEATAFERNARTESAKSTPLHKLRDVIMETPLEITEL

SEQ ID NO: 2516 - protein, 1381 aa, Homo Sapiens
MGRHVATSCHVAWLLVLISGCWGQVNRLPFFTNHFFDTYLLISEDTPVGSSVTQLLAQDMDNDPLVFGVSGEEASRFFAVEPDTGVVWLRQPLDRETKSEFTVEFSVSDHQGVITRKVNIQVGDVNDNAPTFHNQPYSVRIPENTPVGTPIFIVNATDPDLGAGGSVLYSFQPPSQFFAIDSARGIVTVIRELDYETTQAYQLTVNATDQDKTRPLSTLANLAIIITDVQDMDPIFINLPYSTNIYEHSPPGTTVRIITAIDQDKGRPRGIGYTIVSGNTNSIFALDYISGVLTLNGLLDRENPLYSHGFILTVKGTELNDDRTPSDATVTTTFNILVIDINDNAPEFNSSEYSVAITELAQVGFALPLFIQVVDKDENLGLNSMFEVYLVGNNSHHFIISPTSVQGKADIRIRVAIPLDYETVDRYDFDLFANESVPDHVGYAKVKITLINENDNRPIFSQPLYNISLYENVTVGTSVLTVLATDNDAGTFGEVSYFFSDDPDRFSLDKDTGLIMLIARLDYELIQRFTLTIIARDGGGEETTGRVRINVLDVNDNVPTFQKDAYVGALRENEPSVTQLVRLRATDEDSPPNNQITYSIVSASAFGSYFDISLYEGYGVISVSRPLDYEQISNGLIYLTVMAMDAGNPPLNSTVPVTIEVFDENDNPPTFSKPAYFVSVVENIMAGATVLFLNATDLDRSREYGQESIIYSLEGSTQFRINARSGEITTTSLLDRETKSEYILIVRAVDGGVGHNQKTGIATVNITLLDINDNHPTWKDAPYYINLVEMTPPDSDVTTVVAVDPDLGENGTLVYSIQPPNKFYSLNSTTGKIRTTHAMLDRENPDPHEAELMRKIVVSVTDCGRPPLKATSSATVFVNLLDLNDNDPTFQNLPFVAEVLEGIPAGVSIYQVVAIDLDEGLNGLVSYRMPVGMPRMDFLINSSSGVVVTTTELDRERIAEYQLRVVASDAGTPTKSSTSTLTIHVLDVNDETPTFFPAVYNVSVSEDVPREFRVVWLNCTDNDVGLNAELSYFITGGNVDGKFSVGYRDAVVRTVVGLDRETTAAYMLILEAIDNGPVGKRHTGTATVFVTVLDVNDNRPIFLQSSYEASVPEDIPEGHSILQLKATDADEGEFGRVWYRILHGNHGNNFRIHVSNGLLMRGPRPLDRERNSSHVLIVEAYNHDLGPMRSSVRVIVYVEDINDEAPVFTQQQYSRLGLRETAGIGTSVIVVQATDRDSGDGGLVNYRILSGAEGKFEIDESTGLIITVNYLDYETKTSYMMNVSATDQAPPFNQGFCSVYITLLNELDEAVQFSNASYEAAILENLALGTEIVRVQAYSIDNLNQITYRFNAYTSTQAKALFKIDAITVRGWGQGAPFLPI

SEQ ID NO: 2517 - protein, 115 aa, Homo Sapiens
MSLRAGGKTRRWPGPEQAARGGRSGGEQSPRRGEARRRCTHAHGSSVTQLLAQDMDNDPLVFGVSGEEASRFFAVEPDTGVVWLRQPLDRETKSEFTVEFSVSDHQGVITRKVNI

SEQ ID NO: 2518 - protein, 1114 aa, Homo Sapiens
MVKSPMNRELVATYEVTLSVIDNASDLPERSVSVPNAKLTVNVLDVNDNTPQFKPFGITYYMERILEGATPGTTLIAVAAVDPDKGLNGLVTYTLLDLVPPGYVQLEDSSAGKVIANRTVDYEEVHWLNFTVRASDNGSPPRAAEIPVYLEIVDINDNNPIFDQPSYQEAVFEDVPVGTIILTVTATDADSGNFALIEYSLGDGESKFAINPTTGDIYVLSSLDREKKDHYILTALAKDNPGDVASNRRENSVQVVIQVLDVNDCRPQFSKPQFSTSVYENEPAGTSVITMMATDQDEGPNGELTYSLEGPGVEAFHVDMDSGLVTTQRPLQSYEKFSLTVVATDGGEPPLWGTTMLLVEVIDVNDNRPVFVRPPNGTILHIREEIPLRSNVYEVYATDKDEGLNGAVRYSFLKTAGNRDWEFFIIDPISGLIQTAQRLDRESQAVYSLILVASDLGQPVPYETMQPLQVALEDIDDNEPLFVRPPKGSPQYQLLTVPEHSPRGTLVGNVTGAVDADEGPNAIVYYFIAAGNEEKNFHLQPDGCLLVLRDLDREREAIFSFIVKASSNRSWTPPRGPSPTLDLVADLTLQEVRVVLEDINDQPPRFTKAEYTAGVATDAKVGSELIQVLALDADIGNNSLVFYSILAIHYFRALANDSEDVGQVFTMGSMDGILRTFDLFMAYSPGYFVVDIVARDLAGHNDTAIIGIYILRDDQRVKIVINEIPDRVRGFEEEFIHLLSNITGAIVNTDNVQFHVDKKGRVNFAQTELLIHVVNRDTNRILDVDRVIQMIDENKEQLRNLFRNYNVLDVQPAISVRLPDDMSALQMAIIVLAILLFLAAMLFVLMNWYYRTVHKRKLKAIVAGSAGNRGFIDIMDMPNTNKYSFDGANPVWLDPFCRNLELAAQAEHEDDLPENLSEIADLWNSPTRTHGTFGREPAAVKPDDDRYLRAAIQEYDNIAKLGQIIREGPIKGSLLKVVLEDYLRLKKLFAQRMVQKASSCHSSISELIQTELDEEPGDHSPGQGSLRFRHKPPVELKGPDGIHVVHGSTGTLLATDLNSLPEEDQKGLGRSLETLTAAEATAFERNARTESAKSTPLHKLRDVIMETPLEITEL

SEQ ID NO: 2519 - protein, 1079 aa, Homo Sapiens
MVKSPMNRELVATYEVTLSVIDNASDLPERSVSVPNAKLTVNVLDVNDNTPQFKPFGITYYMERILEGATPGTTLIAVAAVDPDKGLNGLVTYTLLDLVPPGYVQLEDSSAGKVIANRTVDYEEVHWLNFTVRASDNGSPPRAAEIPVYLEIVDINDNNPIFDQPSYQEAVFEDVPVGTIILTVTATDADSGNFALIEYSLGDGESKFAINPTTGDIYVLSSLDREKKDHYILTALAKDNPGDVASNRRENSVQVVIQVLDVNDCRPQFSKPQFSTSVYENEPAGTSVITMMATDQDEGPNGELTYSLEGPGVEAFHVDMDSGLVTTQRPLQSYEKFSLTVVATDGGEPPLWGTTMLLVEVIDVNDNRPVFVRPPNGTILHIREEIPLRSNVYEVYATDKDEGLNGAVRYSFLKTAGNRDWEFFIIDPISGLIQTAQRLDRESQAVYSLILVASDLGQPVPYETMQPLQVALEDIDDNEPLFVRPPKGSPQYQLLTVPEHSPRGTLVGNVTGAVDADEGPNAIVYYFIAAGNEEKNFHLQPDGCLLVLRDLDREREAIFSFIVKASSNRSWTPPRGPSPTLDLVADLTLQEVRVVLEDINDQPPRFTKAEYTAGVATDAKVGSELIQVLALDADIGNNSLVFYSILAIHYFRALANDSEDVGQVFTMGSMDGILRTFDLFMAYSPGYFVVDIVARDLAGHNDTAIIGIYILRDDQRVKIVINEIPDRVRGFEEEFIHLLSNITGAIVNTDNVQFHVDKKGRVNFAQTELLIHVVNRDTNRILDVDRVIQMIDENKEQLRNLFRNYNVLDVQPAISVRLPDDMSALQMAIIVLAILLFLAAMLFVLMNWYYRTVHKRKLKAIVAGSAGNRGFIDIMDMPNTNKYSFDGANPVWLDPFCRNLELAAQAEHEDDLPENLSEIADLWNSPTRTHGTFGREPAAVKPDDDRYLRAAIQEYDNIAKLGQIIREGPIKLIQTELDEEPGDHSPGQGSLRFRHKPPVELKGPDGIHVVHGSTGTLLATDLNSLPEEDQKGLGRSLETLTAAEATAFERNARTESAKSTPLHKLRDVIMETPLEITEL

SEQ ID NO: 2520 - protein, 6 aa, Homo Sapiens
PCCTLN

SEQ ID NO: 2521 - protein, 29 aa, Homo Sapiens
TGKGHGADTCTSWKAQRNDRRINMAVTKH

SEQ ID NO: 2522 - protein, 396 aa, Homo Sapiens
VITRKVNIQVGDVNDNAPTFHNQPYSVRIPENTPVGTPIFIVNATDPDLGAGGSVLYSFQPPSQFFAIDSARGIVTVIRELDYETTQAYQLTVNATDQDKTRPLSTLANLAIIITDVQDMDPIFINLPYSTNIYEHSPPGTTVRIITAIDQDKGRPRGIGYTIVSGNTNSIFALDYISGVLTLNGLLDRENPLYSHGFILTVKGTELNDDRTPSDATVTTTFNILVIDINDNAPEFNSSEYSVAITELAQVGFALPLFIQVVDKDENLGLNSMFEVYLVGNNSHHFIISPTSVQGKADIRIRVAIPLDYETVDRYDFDLFANESVPDHVGYAKVKITLINENDNRPIFSQPLYNISLYENVTVGTSVLTVLWEKFFCSNSSRFSSAQLVVSSWNQL

SEQ ID NO: 2523 - protein, 1035 aa, Homo Sapiens
  misc_feature (1)..(1): Xaa can be any naturally occurring amino acid
XDKTRPLSTLANLAIIITDVQDMDPIFINLPYSTNIYEHSPPGTTVRIITAIDQDKGRPRGIGYTIVSGNTNSIFALDYISGVLTLNGLLDRENPLYSHGFILTVKGTELNDDRTPSDATVTTTFNILVIDINDNAPEFNSSEYSVAITELAQVGFALPLFIQVVDKDEENGGWLQGRPEGVGEGLHVQNLGLNSMFEVYLVGNNSHHFIISPTSVQGKADIRIRVAIPLDYETVDRYDFDLFANESVPDHVGYAKVKITLINENDNRPIFSQPLYNISLYENVTVGTSVLTVLATDNDAGTFGEVSYFFSDDPDRFSLDKDTGLIMLIARLDYELIQRFTLTIIARDGGGEETTGRVRINVLDVNDNVPTFQKDAYVGALRENEPSVTQLVRLRATDEDSPPNNQITYSIVSASAFGSYFDISLYEGYGVISVSRPLDYEQISNGLIYLTVMAMDAGNPPLNSTVPVTIEVFDENDNPPTFSKPAYFVSVVENIMAGATVLFLNATDLDRSREYGQESIIYSLEGSTQFRINARSGEITTTSLLDRETKSEYILIVRAVDGGVGHNQKTGIATVNITLLDINDNHPTWKDAPYYINLVEMTPPDSDVTTVVAVDPDLGENGTLVYSIQPPNKFYSLNSTTGKIRTTHAMLDRENPDPHEAELMRKIVVSVTDCGRPPLKATSSATVFVNLLDLNDNDPTFQNLPFVAEVLEGIPAGVSIYQVVAIDLDEGLNGLVSYRMPVGMPRMDFLINSSSGVVVTTTELDRERIAEYQLRVVASDAGTPTKSSTSTLTIHVLDVNDETPTFFPAVYNVSVSEDVPREFRVVWLNCTDNDVGLNAELSYFITGGNVDGKFSVGYRDAVVRTVVGLDRETTAAYMLILEAIDNGPVGKRHTGTATVFVTVLDVNDNRPIFLQSSYEASVPEDIPEGHSILQHPPWPLKGASSIIFNPFLIDPNVGALKRGHQDGCQDHAWRALFAPPPSWHPGICSTRREAAAPTGHQADAGSTRETQGREPRGFAPALGQHRCQDSVLAPV

SEQ ID NO: 2524 - protein, 165 aa, Homo Sapiens
  misc_feature (1)..(1): Xaa can be any naturally occurring amino acid
XDNAPEFNSSEYSVAITELAQVGFALPLFIQVVDKDEGLNSMFEVYLVGNNSHHFIISPTSVQGKADIRIRVAIPLDYETVDRYDFDLFANESVPDHVGYAKVKITLINENDNRPIFSQPLYNISLYENVTVGTSVLTVLWEKFFCSNSSRFSSAQLVVSSWNQL

SEQ ID NO: 2525 - protein, 223 aa, Homo Sapiens
MPSRTGTSTLTVAVCKCNEQGEFTFCEDMAAQVGVSIQAVVAILLCILTITVITLLIFLRRRLRKQARAHGKSVPEIHEQLVTYDEEGGGEMDTTSYDVSVLNSVRRGGAKPPRPALDARPSLYAQVQKPPRHAPGAHGGPGEMAAMIEVKKDEADHDGDGPPYDTLHIYGYEGSESIAESLSSLGTDSSDSDVDYDFLNDWGPRFKMLAELYGSDPREELLY

SEQ ID NO: 2526 - protein, 17 aa, Homo Sapiens
MQRLMMLLATSGACLGL

SEQ ID NO: 2527 - protein, 76 aa, Homo Sapiens
MQRLMMLLATSGACLGLLAVAAVAAAGANPAQRDTHSLLPTHRRQKRDWIWNQMHIDEEKNTSLPHHVGKIKSSVS

SEQ ID NO: 2528 - protein, 131 aa, Homo Sapiens
MQRLMMLLATSGACLGLLAVAAVAAAGANPAQRDTHSLLPTHRRQKRDWIWNQMHIDEEKNTSLPHHVGKIKSSVSRKNAKYLLKGEYVGKVFRVDAETGDVFAIERLDRENISEYHLTAVIVDKDTGENL

SEQ ID NO: 2529 - protein, 784 aa, Homo Sapiens
MQRLMMLLATSGACLGLLAVAAVAAAGANPAQRDTHSLLPTHRRQKRDWIWNQMHIDEEKNTSLPHHVGKIKSSVSRKNAKYLLKGEYVGKVFRVDAETGDVFAIERLDRENISEYHLTAVIVDKDTGENLETPSSFTIKVHDVNDNWPVFTHRLFNASVPESSAVGTSVISVTAVDADDPTVGDHASVMYQILKGKEYFAIDNSGRIITITKSLDREKQARYEIVVEARDAQGLRGDSGTATVLVTLQDINDNFPFFTQTKYTFVVPEDTRVGTSVGSLFVEDPDEPQNRMTKYSILRGDYQDAFTIETNPAHNEGIIKPMKPLDYEYIQQYSFIVEATDPTIDLRYMSPPAGNRAQVIINITDVDEPPIFQQPFYHFQLKENQKKPLIGTVLAMDPDAARHSIGYSIRRTSDKGQFFRVTKKGDIYNEKELDREVYPWYNLTVEAKELDSTGTPTGKESIVQVHIEVLDENDNAPEFAKPYQPKVCENAVHGQLVLQISAIDKDITPRNVKFKFILNTENNFTLTDNHDNTANITVKYGQFDREHTKVHFLPVVISDNGMPSRTGTSTLTVAVCKCNEQGEFTFCEDMAAQVGVSIQAVVAILLCILTITVITLLIFLRRRLRKQARAHGKSVPEIHEQLVTYDEEGGGEMDTTSYDVSVLNSVRRGGAKPPRPALDARPSLYAQVQKPPRHAPGAHGGPGEMAAMIEVKKDEADHDGDGPPYDTLHIYGYEGSESIAESLSSLGTDSSDSDVDYDFLNDWGPRFKMLAELYGSDPREELLY

SEQ ID NO: 2530 - protein, 406 aa, Homo Sapiens
MQRLMMLLATSGACLGLLAVAAVAAAGANPAQRDTHSLLPTHRRQKRDWIWNQMHIDEEKNTSLPHHVGKIKSSVSRKNAKYLLKGEYVGKVFRVDAETGDVFAIERLDRENISEYHLTAVIVDKDTGENLETPSSFTIKVHDVNDNWPVFTHRLFNASVPESSAVGTSVISVTAVDADDPTVGDHASVMYQILKGKEYFAIDNSGRIITITKSLDREKQARYEIVVEARDAQGLRGDSGTATVLVTLQDINDNFPFFTQTKYTFVVPEDTRVGTSVGSLFVEDPDEPQNRMTKYSILRGDYQDAFTIETNPAHNEGIIKPMKPLDYEYIQQYSFIVEATDPTIDLRYMSPPAGNRAQVIINITDVDEPPIFQQPFYHFQLKENQKKPLIGTVLAMDPDAARHSIG

SEQ ID NO: 2531 - protein, 669 aa, Homo Sapiens
MQRLMMLLATSGACLGLLAVAAVAAAGANPAQRDTHSLLPTHRRQKRDWIWNQMHIDEEKNTSLPHHVGKIKSSVSRKNAKYLLKGEYVGKVFRVDAETGDVFAIERLDRENISEYHLTAVIVDKDTGENLETPSSFTIKVHDVNDNWPVFTHRLFNASVPESSAVGTSVISVTAVDADDPTVGDHASVMYQILKGKEYFAIDNSGRIITITKSLDREKQARYEIVVEARDAQGLRGDSGTATVLVTLQDINDNFPFFTQTKYTFVVPEDTRVGTSVGSLFVEDPDEPQNRMTKYSILRGDYQDAFTIETNPAHNEGIIKPMKPLDYEYIQQYSFIVEATDPTIDLRYMSPPAGNRAQVIINITDVDEPPIFQQPFYHFQLVLQISAIDKDITPRNVKFKFILNTENNFTLTDNHDNTANITVKYGQFDREHTKVHFLPVVISDNGMPSRTGTSTLTVAVCKCNEQGEFTFCEDMAAQVGVSIQAVVAILLCILTITVITLLIFLRRRLRKQARAHGKSVPEIHEQLVTYDEEGGGEMDTTSYDVSVLNSVRRGGAKPPRPALDARPSLYAQVQKPPRHAPGAHGGPGEMAAMIEVKKDEADHDGDGPPYDTLHIYGYEGSESIAESLSSLGTDSSDSDVDYDFLNDWGPRFKMLAELYGSDPREELLY

SEQ ID NO: 2532 - protein, 110 aa, Homo Sapiens
MQRLMMLLATSGACLGLLAVAAVAAAGANPAQRDTHSLLPTHRRQKRDWIWNQMHIDEEKNTSLPHHVGKIKSSVSRKNAKYLLKGEYVGKVFRVDAETGDVTQMSPRTG

SEQ ID NO: 2533 - protein, 745 aa, Homo Sapiens
MRRCRWAALALGLLRLCLAQANFAPHFFDNGVGSTNGNMALFSLPEDTPVGSHVYTLNGTDPEGDPISYHISFDPSTRSVFSVDPTFGNITLVEELDREREDEIEAIISISDGLNLVAEKVVILVTDANDEAPRFIQEPYVALVPEDIPAGSIIFKVHAVDRDTGSGGSVTYFLQNLHSPFAVDRHSGVLRLQAGATLDYERSRTHYITVVAKDGGGRLHGADVVFSATTTVTVNVEDVQDMAPVFVGTPYYGYVYEDTLPGSEVLKVVAMDGDRGKPNRILYSLVNGNDGAFEINETSGAISITQSPAQLQREVYELHVQVTEMSPAGSPAAQATVPVTIRIVDLNNHPPTFYGESGPQNRFELSMNEHPPQGEILRGLKITVNDSDQGANAKFNLQLVGPRGIFRVVPQTVLNEAQVTIIVENSAAIDFEKSKVLTFKLLAVEVNTPEKFSSTADVVIQLLDTNDNVPKFDSLYYVARIPENAPGGSSVVAVTAVDPDTGPWGEVKYSTYGTGADLFLIHPSTGLIYTQPWASLDAEATARYNFYVKAEDMEGKYSVAEVFITLLDVNDHPPQFGKSVQKKTMVLGTPVKIEAIDEDAEEPNNLVDYSITHAEPANVFDINSHTGEIWLKNSIRSLDALHNITPGRDCLWSLEVQAKDRGSPSFSTTALLKIDITDAEVRRLRYMKNSNFPGTTKSVRKPKFKPKKPHSSQGLFLHPHCEIALFNLSNVNLYSRVFQGAAQAS

SEQ ID NO: 2534 - protein, 859 aa, Homo Sapiens
MRRCRWAALALGLLRLCLAQANFAPHFFDNGVGSTNGNMALFSLPEDTPVGSHVYTLNGTDPEGDPISYHISFDPSTRSVFSVDPTFGNITLVEELDREREDEIEAIISISDGLNLVAEKVVILVTDANDEAPRFIQEPYVALVPEDIPAGSIIFKVHAVDRDTGSGGSVTYFLQNLHSPFAVDRHSGVLRLQAGATLDYERSRTHYITVVAKDGGGRLHGADVVFSATTTVTVNVEDVQDMAPVFVGTPYYGYVYEDTLPGSEVLKVVAMDGDRGKPNRILYSLVNGNDGAFEINETSGAISITQSPAQLQREVYELHVQVTEMSPAGSPAAQATVPVTIRIVDLNNHPPTFYGESGPQNRFELSMNEHPPQGEILRGLKITVNDSDQGANAKFNLQLVGPRGIFRVVPQTVLNEAQVTIIVENSAAIDFEKSKVLTFKLLAVEVNTPEKFSSTADVVIQLLDTNDNVPKFDSLYYVARIPENAPGGSSVVAVTAVDPDTGPWGEVKYSTYGTGADLFLIHPSTGLIYTQPWASLDAEATARYNFYVKAEDMEGKYSVAEVFITLLDVNDHPPQFGKSVQKKTMVLGTPVKIEAIDEDAEEPNNLVDYSITHAEPANVFDINSHTGEIWLKNSIRSLDALHNITPGRDCLWSLEVQAKDRGSPSFSTTALLKIDITDAETLSRSPMAAFLIQTKDNPMKAVGVLAGTMATVVAITVLISTATFWRNKKSNKVLPMRRVLRKRPSPAPRTIRIEWLKSKSTKAATKFMLKEKPPNENCNNNSPESSLLPRAPALPPPPSVAPSTGAAQWTVPTVSGSLTPQPTQPPPKPKTMGSPVQSTLISELKQKFEKKSVHNKAYF

SEQ ID NO: 2535 - protein, 135 aa, Homo Sapiens
  misc_feature (1)..(1): Xaa can be any naturally occurring amino acid
XENSAAIDFEKSKVLTFKLLAVEVNTPEKFSSTADVVIQLLDTNDNVPKFDSLYYVARIPENAPGGSSVVAVTAVDPDTGPWGEVKYSTYGTGADLFLIHPSTGLIYTQPWASLDAEATARYNFYVKAEDMEGKP

SEQ ID NO: 2536 - protein, 78 aa, Homo Sapiens
  misc_feature (1)..(1): Xaa can be any naturally occurring amino acid
XITHAEPANVFDINSHTGEIWLKNSIRSLDALHNITPGRDCLWSLEVQAKDRGSPSFSTTALLKIDITDAEVRRLRSN

SEQ ID NO: 2537 - protein, 598 aa, Homo Sapiens
  misc_feature (1)..(1): Xaa can be any naturally occurring amino acid
XITVVAKDGGGRLHGADVVFSATTTVTVNVEDVQDMAPVFVGTPYYGYVYEDTLPGSEVLKVVAMDGDRGKPNRILYSLVNGNDGAFEINETSGAISITQSPAQLQREVYELHVQVTEMSPAGSPAAQATVPVTIRIVDLNNHPPTFYGESGPQNRFELSMNEHPPQGEILRGLKITVNDSDQGANAKFNLQLVGPRGIFRVVPQTVLNEAQVTIIVENSAAIDFEKSKVLTFKAVDPDTGPWGEVKYSTYGTGADLFLIHPSTGLIYTQPWASLDAEATARYNFYVKAEDMEGKYSVAEVFITLLDVNDHPPQFGKSVQKKTMVLGTPVKIEAIDEDAEEPNNLVDYSITHAEPANVFDINSHTGEIWLKNSIRSLDALHNITPGRDCLWSLEVQAKDRGSPSFSTTALLKIDITDAETLSRSPMAAFLIQTKDNPMKAVGVLAGTMATVVAITVLISTATFWRNKKSNKVLPMRRVLRKRPSPAPRTIRIEWLKSKSTKAATKFMLKEKPPNENCNNNSPESSLLPRAPALPPPPSVAPSTGAAQWTVPTVSGSLTPQPTQPPPKPKTMGSPVQSTLISELKQKFEKKSVHNKAYF

SEQ ID NO: 2538 - protein, 48 aa, Homo Sapiens
  misc_feature (1)..(1): Xaa can be any naturally occurring amino acid
XMDGDRGKPNRILYSLVNDFPRQCRTILWHDSPAPPCGPVQNFRVHLP

SEQ ID NO: 2539 - protein, 788 aa, Homo Sapiens
MVLLRLLVFLFAPVVSDLCSLPCFINVSESQGPGTVLQFLSFNCSSYTPTPTLELLNVQPPTTFFNPPSLARWQGTYVGKLTLSSSAQLDALMVNHYKVQLKFTCGNHVMEGSLSVDVQRDLSHIQCAGQFASPAGEMIQVPETVTPGARLYTLLLPGLELHGAQMSIISAQDLPHFPGPFSINEQGWLQAPSQGLLGQAQKVFQLQISVSFGQRQSCQGMVIVKVLPVPSSQVSFLEQAQNITIPENLAPGSEVVQVQARGVDLRYEILSPVPSPLFSIGRADGVVRTTTPLELARTSGTAVSRLQVKAFEQGQLWASAKLNLTMNVQLVNLWPPRCLPALLVSQIPETAPVGTVLNTLTCEDPDSVGATLDYKLWFRSSSNPASLCLYDRVLEVNATLDCDTPGACFQHAASILVLDGGQPQMTTEVPVLVMVTPINEFSPACAPRTFRVQEDAAPHTLLGSVVGTDMDYPHDNIEYYTSGGPTTFAVDRLSGEVHLLGPLDYEQQRLYRLTVLVIDHGQDQNPNHHLSGSCTITIEVEDVNDHAPECEPPFQELTIYAPLGRSVEVTKMSCQIPQEPQRLIYSYSIVGGNSQNRFILQGAILVHSDLVLGPFWPEQPRTYELLICVADAGPSTPHLSTTATIIVHLVPRRASTVATSTHRTTVPSTMTPMLVTDTEAFWQPQPWFVVVLTATGALLLLALGWLLGRLLQGLAQLLQAPSKPAQALLLNSIQGTEGSIEGFLEAPKMEMSQAPSSVMSLHFDGRAQDSRTGRDYLFNTHTGARRWL

SEQ ID NO: 2540 - protein, 184 aa, Homo Sapiens
MVLLRLLVFLFAPVVSDLCSLPCFINVSESQGPGTVLQFLSFNCSSYTPTPTLELLNVQPPTTFFNPPSLARWQGTYVGKLTLSSSAQLDALMVNHYKVQLKFTCGNHVMEGSLSVDVQRDLSHIQCAGQFASPAGEMIQVPETVTPGARLYTLLLPGLELHGAQVSPEHGTVGDRMGVGGWRE

SEQ ID NO: 2541 - protein, 199 aa, Homo Sapiens
MVLLRLLVFLFAPVVSDLCSLPCFINVSESQGPGTVLQFLSFNCSSYTPTPTLELLNVQPPTTFFNPPSLARWQGTYVGKLTLSSSAQLDALMVNHYKVQLKFTCGNHVMEGSLSVDVQRDLSHIQCAGQFASPGEARGSRQGGGRHGLSRSSLTSTLASWGNDSGARDSHTWGSAVHSAPPRPRTPRSAGKPRTWDGG

SEQ ID NO: 2542 - protein, 134 aa, Homo Sapiens
QELTIYAPLGRSVEVTKMSCQIPQEPQRLIYSYSIVGGNSQNRFILQGAILVHSDLVLGPFWPEQPRTYELLICVADAGPSTPHLSTTATIIVHLVPRRASTVATSTHRTTVGPAAASTQQTSPGFAAKQHPGN

SEQ ID NO: 2543 - protein, 151 aa, Homo Sapiens
  misc_feature (1)..(1): Xaa can be any naturally occurring amino acid
XSTTATIIVHLVPRRASTVATSTHRTTVPSTMTPMLVTDTEAFWQPQPWFVVVLTATGALLLLALGWLLGRLLQGLAQLLQAPSKPAQALLLNSIQGTEGSIEGFLEAPKMEMSQAPSSVMSLQHFDGRAQDSRTGRDYLFNTHTGARRWL

SEQ ID NO: 2544 - protein, 190 aa, Homo Sapiens
MGSWALLWPPLLFTGLLVRPPGTMAQAQYCSVNKDIFEVEENTNVTEPLVDIHVPEGQEVTLGALSTPFAFRIQGNQLFLNVTPDYEEKSLLEAQLLCQSGGTLDTKVNSTVIPETQLQAEDRDKDDILFYTLQEMTAGASDYFSLVSVNRPALRLDRPLDFYERPNMTFWLLVRPSVAGHSGGECGTQP

SEQ ID NO: 2545 - protein, 166 aa, Homo Sapiens [sequence omitted]

SEQ ID NO: 2546 - protein, 651 aa, Homo Sapiens
MGSWALLWPPLLFTGLLVRPPGTMAQAQYCSVNKDIFEVEENTNVTEPLVDIHVPEGQEVTLGALSTPFAFRIQGNQLFLNVTPDYEEKSLLEAQLLCQSGGTLVTQLRVFVSVLDVNDNAPEFPFKTKEIRVEEDTKVNSTVIPETQLQAEDRDKDDILFYTLQEMTAGASDYFSLVSVNRPALRLDRPLDFYERPNMTFWLLVRDTPGENVEPSHTATATLVLNVVPADLRPPWFLPCTFSDGYVCIQAQYHGAVPTGHILPSPLVLRPGPIYAEDGDRGINQPIIYSIFRGNVNGTFIIHPDSGNLTVARSVPSPMTFLLLVKGQQADLARYSVTQVTVEAVAAAGSPPRFPQRLYRGTVARGAGAGVVVKDAAAPSQPLRIQAQDPEFSDLNSAITYRITNHSHFRMEGEVVLTTTTLAQAGAFYAEVEAHNTVTSGTATTVIEIQVSEQEPPSTGGGPSEDKRFSVVDMAALGGVLGALLLLALLGLAVLVHKHYGPRLKCCCGKAPEPQPQGFDNQAFLPDHKANWAPVPSPTHDPKPAEAPMPAEPAPPGPASPGGAPEPPAAARAGGSPTAVRSILTKERRPEGGYKAVWFGEDIGTEADVVVLNAPTLDVDGASDSGSGDEGEGAGRGGGPYDAPGGDDSYI

SEQ ID NO: 2547 - protein, 845 aa, Homo Sapiens
MGSWALLWPPLLFTGLLVRPPGTMAQAQYCSVNKDIFEVEENTNVTEPLVDIHVPEGQEVTLGALSTPFAFRIQGNQLFLNVTPDYEEKSLLEAQLLCQSGGTLVTQLRVFVSVLDVNDNAPEFPFKTKEIRVEEDTKVNSTVIPETQLQAEDRDKDDILFYTLQEMTAGASDYFSLVSVNRPALRLDRPLDFYERPNMTFWLLVRDTPGENVEPSHTATATLVLNVVPADLRPPWFLPCTFSDGYVCIQAQYHGAVPTGHILPSPLVLRPGPIYAEDGDRGINQPIIYSIFRGNVNGTFIIHPDSGNLTVARSVPSPMTFLLLVKGQQADLARYSVTQVTVEAVAAAGSPPRFPQRLYRGTVARGAGAGVVVKDAAAPSQPLRIQAQDPEFSDLNSAITYRITNHSHFRMEGEVVLTTTTLAQAGAFYAEVEAHNTVTSGTATTVIEIQVSEQEPPSTDVPPSPEAGGTTGPWTSTTSEVPRPPEPSQGPSTTSSGGGTGPHPPSGTTLRPPTSSTPGGPPGAENSTSHQPATPGGDTAQTPKPGTSQPMPPGVGTSTSHQPATPSGGTAQTPEPGTSQPMPPSMGTSTSHQPATPGGGTAQTPEAGTSQPMPPGMGTSTSHQPTTPGGGTAQTPEPGTSQPMPLSKSTPSSGGGPSEDKRFSVVDMAALGGVLGALLLLALLGLAVLVHKHYGPRLKCCCGKAPEPQPQGFDNQAFLPDHKANWAPVPSPTHDPKPAEAPMPAEPAPPGPASPGGAPEPPAAARAGGSPTAVRSILTKERRPEGGYKAVWFGEDIGTEADVVVLNAPTLDVDGASDSGSGDEGEGAGRGGGPYDAPGGDDSYI

SEQ ID NO: 2548 - protein, 845 aa, Homo Sapiens; identical to SEQ ID NO: 2547

SEQ ID NO: 2549 - protein, 106 aa, Homo Sapiens
MGSWALLWPPLLFTGLLVRPPGTMAQAQYCSVNKDIFEVEENTNVTEPLVDIHVPEGQEVTLGALSTPFAFRIQGNQLFLNVTPDYEKAGPFRDEAAWAHTLSTDH

SEQ ID NO: 2550 - protein, 15 aa, Homo Sapiens
MTAGASDYFSLVSVN

SEQ ID NO: 2551 - protein, 116 aa, Homo Sapiens
MEPAAGSSMEPSADWLATAAARGRVEEVRALLEAGALPNAPNSYGRRPIQVGRGSAAGAGDGGRLWRTKFAGELESGSASILRKKGRLPGEFSEGVCNHRPPPGDALGAWEAKEEE

SEQ ID NO: 2552 - protein, 138 aa, Homo Sapiens
MEPAAGSSMEPSADWLATAAARGRVEEVRALLEAGALPNAPNSYGRRPIQVMMMGSARVAELLLLHGAEPNCADPATLTRPVHDAAREGFLDTLVVLHRAGARLDVRDAWGRLPVDLAEELGHRDVARHPRLKEPERL

SEQ ID NO: 2553 - protein, 156 aa, Homo Sapiens
MEPAAGSSMEPSADWLATAAARGRVEEVRALLEAGALPNAPNSYGRRPIQVMMMGSARVAELLLLHGAEPNCADPATLTRPVHDAAREGFLDTLVVLHRAGARLDVRDAWGRLPVDLAEELGHRDVARYLRAAAGGTRGSNHARIDAAEGPSDIPD

SEQ ID NO: 2554 - protein, 167 aa, Homo Sapiens
MEPAAGSSMEPSADWLATAAARGRVEEVRALLEAGALPNAPNSYGRRPIQVMMMGSARVAELLLLHGAEPNCADPATLTRPVHDAAREGFLDTLVVLHRAGARLDVRDAWGRLPVDLAEELGHRDVARYLRAAAGGTRGSNHARIDAAEGPSEMIGNHLWVCRSRHA

SEQ ID NO: 2555 - protein, 105 aa, Homo Sapiens
MMMGSARVAELLLLHGAEPNCADPATLTRPVHDAAREGFLDTLVVLHRAGARLDVRDAWGRLPVDLAEELGHRDVARYLRAAAGGTRGSNHARIDAAEGPSDIPD

SEQ ID NO: 2556 - protein, 105 aa, Homo Sapiens; identical to SEQ ID NO: 2555

SEQ ID NO: 2557 - protein, 105 aa, Homo Sapiens; identical to SEQ ID NO: 2555

SEQ ID NO: 2558 - protein, 104 aa, Homo Sapiens
MMMGSARVAELLLLHGAEPNCADPATLTRPVHDAAREGFLDTLVVLHRAGARLDVRDAWGRLPVDLAEELGHRDVARYLRAAAGGTRGSNHARIDAAEGPSGED

SEQ ID NO: 2559 - protein, 121 aa, Homo Sapiens
MMMGSARVAELLLLHGAEPNCADPATLTRPVHDAAREGFLDTLVVLHRAGARLDVRDAWGRLPVDLAEELGHRDVARYLRAAAGGTRGSNHARIDAAEGPSVTASIQVPGGEEGDFGSSYS

SEQ ID NO: 2560 - protein, 132 aa, Homo Sapiens
MVRRFLVTLRIRRACGPPRVRVFVVHIPRLTGEWAAPGAPAAVALVLMLLRSQRLGQQPLPRRPGHDDGQRPSGGAAAAPRRGAQLRRPRHSHPTRARRCPGGLPGHAGGAAPGRGAAGRARCLGPSARGPG

SEQ ID NO: 2561 - protein, 132 aa, Homo Sapiens; identical to SEQ ID NO: 2560

SEQ ID NO: 2562 - protein, 85 aa, Homo Sapiens
MSVHMPAMKICEKLKKLDSQICELKYEKTLDLASVDLRKMRVAELKQILHSWGEECRACAEKTDYVNLIQELAPKYAATHPKTEL

SEQ ID NO: 2563 - protein, 187 aa, Homo Sapiens
MWCASPVAVVAFCAGLLVSHPVLTQGQEAGGRPGADCEVCKEFLNRFYKSLIDRGVNFSLDTIEKELISFCLDTKGKENRLCYYLGATKDAATKILSEVTRPMSVHMPAMKICEKLKKLDSQICELKYEKTLDLASVDLRKMRVAELKQILHSWGEECRACAEKTDYVNLIQELAPKYAATHPKTEL

SEQ ID NO: 2564 - protein, 111 aa, Homo Sapiens
MHPDLGPLCTLLYVTLTILCSSVSSDLAPYFTSEPLSAVQKLGGPVVLHCSAQPVTTRISWLHNGKTLDGNLEHVKIHQGTLTILSLNSSLLGYYQCLANNSIGAIVSGPA

SEQ ID NO: 2565 - protein, 143 aa, Homo Sapiens
MHPDLGPLCTLLYVTLTILCSSVSSDLAPYFTSEPLSAVQKLGGPVVLHCSAQPVTTRISWLHNGKTLDGNLEHVKIHQGTLTILSLNSSLLGYYQCLANNSIGAIVSGPATVSVAVLGDFGSSTKHVITAEEKSAGFIGCRV

SEQ ID NO: 2566 - protein, 165 aa, Homo Sapiens
MHPDLGPLCTLLYVTLTILCSSVSSDLAPYFTSEPLSAVQKLGGPVVLHCSAQPVTTRISWLHNGKTLDGNLEHVKIHQGTLTILSLNSSLLGYYQCLANNSIGAIVSGPATVSVAVLGDFGSSTKHVITAEEKSAGFIGCRVPESNPKAEVRYKIRGKWLEHST

SEQ ID NO: 2567 - protein, 1264 aa, Homo Sapiens
MHPDLGPLCTLLYVTLTILCSSVSSDLAPYFTSEPLSAVQKLGGPVVLHCSAQPVTTRISWLHNGKTLDGNLEHVKIHQGTLTILSLNSSLLGYYQCLANNSIGAIVSGPATVSVAVLGDFGSSTKHVITAEEKSAGFIGCRVPESNPKAEVRYKIRGKWLEHSTENYLILPSGNLQILNVSLEDKGSYKCAAYNPVTHQLKVEPIGRKLLVSRPSSDDVHILHPTHSQALAVLSRSPVTLECVVSGVPAPQVYWLKDGQDIAPGSNWRRLYSHLATDSVDPADSGNYSCMAGNKSGDVKYVTYMVNVLEHASISKGLQDQIVSLGATVHFTCDVHGNPAPNCTWFHNAQPIHPSARHLTAGNGLKISGVTVEDVGMYQCVADNGIGFMHSTGRLEIENDGGFKPVIITAPVSAKVADGDFVTLSCNASGLPVPVIRWYDSHGLITSHPSQVLRSKSRKSQLSRPEGLNLEPVYFVLSQAGASSLHIQAVTQEHAGKYICEAANEHGTTQAEASLMVVPFETNTKAETVTLPDAAQNDDRSKRDGSETGLLSSFPVKVHPSAVESAPEKNASGISVPDAPIILSPPQTHTPDTYNLVWRAGKDGGLPINAYFVKYRKLDDGVGMLGSWHTVRVPGSENELHLAELEPSSLYEVLMVARSAAGEGQPAMLTFRTSKEKTASSKNTQASSPPVGIPKYPVVSEAANNNFGVVLTDSSRHSGVPEAPDRPTISTASETSVYVTWIPRANGGSPITAFKVEYKRMRTSNWLVAAEDIPPSKLSVEVRSLEPGSTYKFRVIAINHYGESFRSSASRPYQVVGFPNRFSSRPITGPHIAYTEAVSDTQIMLKWTYIPSSNNNTPIQGFYIYYRPTDSDNDSDYKRDVVEGSKQWHMIGHLQPETSYDIKMQCFNEGGESEFSNVMICETKVKRVPGASEYPVKDLSTPPNSLGSGGNVGPATSPARSSDMLYLIVGCVLGVMVLILMVFIAMCLWKNRQQNTIQKYDPPGYLYQGSDMNGQMVDYTTLSGASQINGNVHGGFLTNGGLSSGYSHLHHKVPNAVNGIVNGSLNGGLYSGHSNSLTRTHVDFEHPHHLVNGGGMYTAVPQIDPLECVNCRNCRNNNRCFTKTNSTFSSSPPPVVPVVAPYPQDGLEMKPLSHVKVPVCLTSAVPDCGQLPEESVKDNVEPVPTQRTCCQDIVNDVSSDGSEDPAEFSRGDSCAHSETEINIVSWNALILPPVPEGCAEKTMWSPPGIPLDSPTEVLQQPRET

SEQ ID NO: 2568 - protein, 1287 aa, Homo Sapiens
MHPDLGPLCTLLYVTLTILCSSVSSDLAPYFTSEPLSAVQKLGGPVVLHCSAQPVTTRISWLHNGKTLDGNLEHVKIHQGTLTILSLNSSLLGYYQCLANNSIGAIVSGPATVSVAVLGDFGSSTKHVITAEEKSAGFIGCRVPESNPKAEVRYKIRGKWLEHSTENYLILPSGNLQILNVSLEDKGSYKCAAYNPVTHQLKVEPIGRKLLVSRPSSDDVHILHPTHSQALAVLSRSPVTLECVVSGVPAPQVYWLKDGQDIAPGSNWRRLYSHLATDSVDPADSGNYSCMAGNKSGDVKYVTYMVNVLEHASISKGLQDQIVSLGATVHFTCDVHGNPAPNCTWFHNAQPIHPSARHLTAGNGLKISGVTVEDVGMYQCVADNGIGFMHSTGRLEIENDGGFKPVIITAPVSAKVADGDFVTLSCNASGLPVPVIRWYDSHGLITSHPSQVLRSKSRKSQLSRPEGLNLEPVYFVLSQAGASSLHIQAVTQEHAGKYICEAANEHGTTQAEASLMVVPFETNTKAETVTLPDAAQNDDRSKRDGSETGLLSSFPVKVHPSAVESAPEKNASGISVPDAPIILSPPQTHTPDTYNLVWRAGKDGGLPINAYFVKYRKLDDGVGMLGSWHTVRVPGSENELHLAELEPSSLYEVLMVARSAAGEGQPAMLTFRTSKEKTASSKNTQASSPPVGIPKYPVVSEAANNNFGVVLTDSSRHSGVPEAPDRPTISTASETSVYVTWIPRANGGSPITAFKVEYKRMRTSNWLVAAEDIPPSKLSVEVRSLEPGSTYKFRVIAINHYGESFRSSASRPYQVVGFPNRFSSRPITGPHIAYTEAVSDTQIMLKWTYIPSSNNNTPIQGFYIYYRPTDSDNDSDYKRDVVEGSKQWHMIGHLQPETSYDIKMQCFNEGGESEFSNVMICETKVKRVPGASEYPVKDLSTPPNSLGSGGNVGPATSPARSSDMLYLIVGCVLGVMVLILMVFIAMCLWKNRQQNTIQKYDPPGYLYQGSDMNGQMVDYTTLSGASQINGNVHGGFLTNGGLSSGYSHLHHKVPNAVNGIVNGSLNGGLYSGHSNSLTRTHVDFEHPHHLVNGGGMYTAVPQIDPLECVNCRNCRNNNRCFTKTNSTFSSSPPPVVPVVAPYPQDGLEMKPLSHVKVPVCLTSAVPDCGQLPEESVKDNVEPVPTQRTCCQDIVNDVSSDGSEDPAEFSRGQEGMINLRIPDHLQLAKSCVWEGDSCAHSETEINIVSWNALILPPVPEGCAEKTMWSPPGIPLDSPTEVLQQPRET

SEQ ID NO: 2569 - protein, 641 aa, Homo Sapiens
MLGSWHTVRVPGSENELHLAELEPSSLYEVLMVARSAAGEGQPAMLTFRTSKEKTASSKNTQASSPPVGIPKYPVVSEAANNNFGVVLTDSSRHSGVPEAPDRPTISTASETSVYVTWIPRANGGSPITAFKVEYKRMRTSNWLVAAEDIPPSKLSVEVRSLEPGSTYKFRVIAINHYGESFRSSASRPYQVVGFPNRFSSRPITGPHIAYTEAVSDTQIMLKWTYIPSSNNNTPIQGFYIYYRPTDSDNDSDYKRDVVEGSKQWHMIGHLQPETSYDIKMQCFNEGGESEFSNVMICETKVKRVPGASEYPVKDLSTPPNSLGSGGNVGPATSPARSSDMLYLIVGCVLGVMVLILMVFIAMCLWKNRQQNTIQKYDPPGYLYQGSDMNGQMVDYTTLSGASQINGNVHGGFLTNGGLSSGYSHLHHKVPNAVNGIVNGSLNGGLYSGHSNSLTRTHVDFEHPHHLVNGGGMYTAVPQIDPLECVNCRNCRNNNRCFTKTNSTFSSSPPPVVPVVAPYPQDGLEMKPLSHVKVPVCLTSAVPDCGQLPEESVKDNVEPVPTQRTCCQDIVNDVSSDGSEDPAEFSRGDSCAHSETEINIVSWNALILPPVPEGCAEKTMWSPPGIPLDSPTEVLQQPRET

SEQ ID NO: 2570 - protein, 650 aa, Homo Sapiens
  misc_feature (1)..(1): Xaa can be any naturally occurring amino acid
XDLAPYFTSEPLSAVQKLGGPVVLHCSAQPVTTRISWLHNGKTLDGNLEHVKIHQGTLTILSLNSSLLGYYQCLANNSIGAIVSGPATVSVAVLGDFGSSTKHVITAEEKSAGFIGCRVPESNPKAEVRYKIRGKWLEHSTENYLILPSGNLQILNVSLEDKGSYKCAAYNPVTHQLKVEPIGRKLLVSRPSSDDVHILHPTHSQALAVLSRSPVTLECVVSGVPAPQVYWLKDGQDIAPGSNWRRLYSHLATDSVDPADSGNYSCMAGNKSGDVKYVTYMVNVLEHASISKGLQDQIVSLGATVHFTCDVHGNPAPNCTWFHNAQPIHPSARHLTAGNGLKISGVTVEDVGMYQCVADNGIGFMHSTGRLEIENDGGFKPVIITAPVSAKVADGDFVTLSCNASGLPVPVIRWYDSHGLITSHPSQVLRSKSRKSQLSRPEGLNLEPVYFVLSQAGASSLHIQAVTQEHAGKYICEAANEHGTTQAEASLMVVPFETNTKAETVTLPDAAQNDDRSKRDGSETGLLSSFPVKVHPSAVESAPEKNASGISVPDAPIILSPPQTHTPDTYNLVWRAGKDGGLPINAYFVKYRKLDDGVGMLGSWHTVRVPGSENELHLAELEPSSLYEVLMVARSAAGEGQPAMLTFRTS

SEQ ID NO: 2571 - protein, 243 aa, Homo Sapiens
  misc_feature (1)..(1): Xaa can be any naturally occurring amino acid
XNYLILPSGNLQILNVSLEDKGSYKCAAYNPVTHQLKVEPIGRKLLVSRPSSDDVHILHPTHSQALAVLSRSPVTLECVVSGVPAPQVYWLKDGQDIAPGSNWRRLYSHLATDSVDPADSGNYSCMAGNKSGDVKYVTYMVNVLEHASISKGLQDQIVSLGATVHFTCDVHGNPAPNCTWFHNAQPIHPSARHLTAGNGLKISGVTVEDVGMYQCVADNGIGFMHSTGRLEIENGQEIYVGNV

SEQ ID NO: 2572 - protein, 529 aa, Homo Sapiens
MGSSRAPWMGRVGGHGMMALLLAGLLLPGTLAKSIGTFSDPCKDPTRITSPNDPCLTGKGDSSGFSSYSGSSSSGSSISSARSSGGGSSGSSSGSSIAQGGSAGSFKPGTGYSQVSYSSGSGSSLQGASGSSQLGSSSSHSGNSGSHSGSSSSHSSSSSSFQFSSSSFQVGNGSALPTNDNSYRGILNPSQPGQSSSSSQTFGVSSSGQSVSSNQRPCSSDIPDSPCSGGPIVSHSGPYIPSSHSVSGGQRPVVVVVDQHGSGAPGVVQGPPCSNGGLPGKPCPPITSVDKSYGGYEVVGGSSDSYLVPGMTYSKGKIYPVGYFTKENPVKGSPGVPSFAAGPPISEGKYFSSNPIIPSQSAASSAIAFQPVGTGGVQLCGGGSTGSKGPCSPSSSRVPSSSSISSSSGLPYHPCGSASQSPCSPPGTGSFSSSSSSQSSGKIILQPCGSKSSSSGHPCMSVSSLTLTGGPDGSPHPDPSAGAKPCGSSSAGKIPCRSIRDILAQVKPLGPQLADPEVFLPQGELLNSP

SEQ ID NO: 2573 - protein, 425 aa, Homo Sapiens
MALTGYSWLLLSATFLNVGAEISITLEPAQPSEGDNVTLVVHGLSGELLAYSWYAGPTLSVSYLVASYIVSTGDETPGPAHTGREAVRPDGSLDIQGILPRHSGTYILQTFNRQLQTEVGYGHVQVHEILAQPTVLANSTALVERRDTLRLMCSSPSPTAEVRWFFNGGALPVALRLGLSPDGRVLARHGIRREEAGAYQCEVWNPVSVSRSEPINLTVYFGPERVAILQDSTTRTGCTIKVDFNTSLTLWCVSRSCPEPEYVWTFNGQALKNGQDHLNISSMTAAQEGTYTCIAKNTKTLLSGSASVVVKLSAAAVATMIVPVPTKPTEGQDVTLTVQGYPKDLLVYAWYRGPASEPNRLLSQLPSGTWIAGPAHTGREVGFPNCSLLVQKLNLTDTGRYTLKTVTVQGKTETLEVELQVAPLG

SEQ ID NO: 2574 - protein, 425 aa, Homo Sapiens; identical to SEQ ID NO: 2573

SEQ ID NO: 2575 - protein, 384 aa, Homo Sapiens
MDLSRPRWSLWRRVFLMASLLACGICQASGQIFITQTLGIKGYRTVVALDKVPEDVQEYSWYWGANDSAGNMIISHKPPSAQQPGPMYTGRERVNREGSLLIRPTALNDTGNYTVRVVAGNETQRATGWLEVLELGSNLGISVNASSLVENMDSVAADCLTNVTNITWYVNDVPTSSSDRMTISPDGKTLVILRVSRYDRTIQCMIESFPEIFQRSERISLTVAYGPDYVLLRSNPDDFNGIVTAEIGSQVEMECICYSFLDLKYHWIHNGSLLNFSDAKMNLSSLAWEQMGRYRCTVENPVTQLIMYMDVRIQAPHEDLTCCPQRFLHLRIHGDVPHHADSAGWRLHLWSPDPCSDQPLLNQDKSGSMSVHPRPEDKTRRASR

SEQ ID NO: 2576 - protein, 55 aa, Homo Sapiens
MEIPMGTQGCFSKSLLLSASILVLWMLQGSQAALYIQKIPEQPQKNQDLLLSVQG

SEQ ID NO: 2577 - protein, 56 aa, Homo Sapiens
MEIPMGTQGCFSKSLLLSASILVLWMLQGSQAALYIQKIPEQPQKNQDLLLSVQGV

SEQ ID NO: 2578 - protein, 56 aa, Homo Sapiens; identical to SEQ ID NO: 2577

SEQ ID NO: 2579 - protein, 56 aa, Homo Sapiens; identical to SEQ ID NO: 2577

SEQ ID NO: 2580 - protein, 56 aa, Homo Sapiens; identical to SEQ ID NO: 2577

SEQ ID NO: 2581 - protein, 299 aa, Homo Sapiens
MEIPMGTQGCFSKSLLLSASILVLWMLQGSQAALYIQKIPEQPQKNQDLLLSVQGVPDTFQDFNWYLGEETYGGTRLFTYIPGIQRPQRDGSAMGQRDIVGFPNGSMLLRRAQPTDSGTYQVAITINSEWTMKAKTEVQVAEKNKELPSTHLPTNAGILAATIIGSLAAGALLISCIAYLLVTRNWRGQSHRLPAPRGQGSLSILCSAVSPVPSVTPSTWMATTEKPELGPAHDAGDNNIYEVMPSPVLLVSPISDTRSINPARPLPTPPHLQAEPENHQYQDLLNPDPAPYCQLVPTS

SEQ ID NO: 2582 - protein, 300 aa, Homo Sapiens
MEIPMGTQGCFSKSLLLSASILVLWMLQGSQAALYIQKIPEQPQKNQDLLLSVQGVPDTFQDFNWYLGEETYGGTRLFTYIPGIQRPQRDGSAMGQRDIVGFPNGSMLLRRAQPTDSGTYQVAITINSEWTMKAKTEVQVAEKNKELPSTHLPTNAGILAATIIGSLAAGALLISCIAYLLVTRNWRGQSHRLPAPRGQGSLSILCSAVSPVPSVTPSTWMATTEKPELGPAHDAGDNNIYEVMPSPVLLVSPISDTRSINPARPLPTPPHLQAEPENHQYQQDLLNPDPAPYCQLVPTS

SEQ ID NO: 2583 - protein, 346 aa, Homo Sapiens
MESPSAPPHRWCIPWQRLLLTASLLTFWNPPTTAKLTIESTPFNVAEGKEVLLLVHNLPQHLFGYSWYKGERVDGNRQIIGYVIGTQQATPGPAYSGREIIYPNASLLIQNIIQNDTGFYTLHVIKSDLVNEEATGQFRVYPELPKPSISSNNSKPVEDKDAVAFTCEPETQDATYLWWVNNQSLPVSPRLQLSNGNRTLTLFNVTRNDARAYVCGIQNSVSANRSDPVTLDVLYGPDTPIISPPDSSYLSGANLNLSCHSASNPSPQYSWRINGIPQQHTQVLFIAKITPNNNGTYACFVSNLATGRNNSIVKSITVSASGTSPGLSAGATVGIMIGVLVGVALI

SEQ ID NO: 2584 - protein, 702 aa, Homo Sapiens
MESPSAPPHRWCIPWQRLLLTASLLTFWNPPTTAKLTIESTPFNVAEGKEVLLLVHNLPQHLFGYSWYKGERVDGNRQIIGYVIGTQQATPGPAYSGREIIYPNASLLIQNIIQNDTGFYTLHVIKSDLVNEEATGQFRVYPELPKPSISSNNSKPVEDKDAVAFTCEPETQDATYLWWVNNQSLPVSPRLQLSNGNRTLTLFNVTRNDTASYKCETQNPVSARRSDSVILNVLYGPDAPTISPLNTSYRSGENLNLSCHAASNPPAQYSWFVNGTFQQSTQELFIPNITVNNSGSYTCQAHNSDTGLNRTTVTTITVYAEPPKPFITSNNSNPVEDEDAVALTCEPEIQNTTYLWWVNNQSLPVSPRLQLSNDNRTLTLLSVTRNDVGPYECGIQNELSVDHSDPVILNVLYGPDDPTISPSYTYYRPGVNLSLSCHAASNPPAQYSWLIDGNIQQHTQELFISNITEKNSGLYTCQANNSASGHSRTTVKTITVSAELPKPSISSNNSKPVEDKDAVAFTCEPEAQNTTYLWWVNGQSLPVSPRLQLSNGNRTLTLFNVTRNDARAYVCGIQNSVSANRSDPVTLDVLYGPDTPIISPPDSSYLSGANLNLSCHSASNPSPQYSWRINGIPQQHTQVLFIAKITPNNNGTYACFVSNLATGRNNSIVKSITVSASGTSPGLSAGATVGIMIGVLVGVALI

SEQ ID NO: 2585 - protein, 701 aa, Homo Sapiens
MESPSAPPHRWCIPWQRLLLTASLLTFWNPPTTAKLTIESTPFNVAEGKEVLLLVHNLPQHLFGYSWYKGERVDGNRQIIGYVIGTQQATPGPAYSGREIIYPNASLLIQNIIQNDTGFYTLHVIKSDLVNEEATGQFRVYPELPKPSISSNNSKPVEDKDAVAFTCEPETQDATYLWWVNNQSLPVSPRLQLSNGNRTLTLFNVTRNDTASYKCETQNPVSARRSDSVILNVLYGPDAPTISPLNTSYRSGENLNLSCHAASNPPAQYSWFVNGTFQQSTQELFIPNITVNNSGSYTCQAHNSDTGLNRTTVTTITVYEPPKPFITSNNSNPVEDEDAVALTCEPEIQNTTYLWWVNNQSLPVSPRLQLSNDNRTLTLLSVTRNDVGPYECGIQNELSVDHSDPVILNVLYGPDDPTISPSYTYYRPGVNLSLSCHAASNPPAQYSWLIDGNIQQHTQELFISNITEKNSGLYTCQANNSASGHSRTTVKTITVSAELPKPSISSNNSKPVEDKDAVAFTCEPEAQNTTYLWWVNGQSLPVSPRLQLSNGNRTLTLFNVTRNDARAYVCGIQNSVSANRSDPVTLDVLYGPDTPIISPPDSSYLSGANLNLSCHSASNPSPQYSWRINGIPQQHTQVLFIAKITPNNNGTYACFVSNLATGRNNSIVKSITVSASGTSPGLSAGATVGIMIGVLVGVALI

SEQ ID NO: 2586 - protein, 702 aa, Homo Sapiens; identical to SEQ ID NO: 2584

SEQ ID NO: 2587 - protein, 702 aa, Homo Sapiens; identical to SEQ ID NO: 2584

SEQ ID NO: 2588 - protein, 524 aa, Homo Sapiens
MESPSAPPHRWCIPWQRLLLTASLLTFWNPPTTAKLTIESTPFNVAEGKEVLLLVHNLPQHLFGYSWYKGERVDGNRQIIGYVIGTQQATPGPAYSGREIIYPNASLLIQNIIQNDTGFYTLHVIKSDLVNEEATGQFRVYPEPPKPFITSNNSNPVEDEDAVALTCEPEIQNTTYLWWVNNQSLPVSPRLQLSNDNRTLTLLSVTRNDVGPYECGIQNELSVDHSDPVILNVLYGPDDPTISPSYTYYRPGVNLSLSCHAASNPPAQYSWLIDGNIQQHTQELFISNITEKNSGLYTCQANNSASGHSRTTVKTITVSAELPKPSISSNNSKPVEDKDAVAFTCEPEAQNTTYLWWVNGQSLPVSPRLQLSNGNRTLTLFNVTRNDARAYVCGIQNSVSANRSDPVTLDVLYGPDTPIISPPDSSYLSGANLNLSCHSASNPSPQYSWRINGIPQQHTQVLFIAKITPNNNGTYACFVSNLATGRNNSIVKSITVSASGTSPGLSAGATVGIMIGVLVGVALI

SEQ ID NO: 2589 - protein, 194 aa, Homo Sapiens
  misc_feature (1)..(1): Xaa can be any naturally occurring amino acid
XIYPNASLLIQNIIQNDTGFYTLHVIKSDLVNEEATGQFRVYPELPKPSISSNNSKPVEDKDAVAFTCEPETQDATYLWWVNNQSLPVSPRLQLSNGNRTLTLFNVTRNDTASYKCETQNPVSARRSDSVILNVLSEPPKPFITSNNSNPVEDEDAVALTCEPEIQNTTYLWWVNNQSLPVSPRLQLSNDNRTL

SEQ ID NO: 2590 - protein, 141 aa, Homo Sapiens
  misc_feature (1)..(1): Xaa can be any naturally occurring amino acid
XKLTIESTPFNVAEGKEVLLLVHNLPQHLFGYSWYKGERVDGNRQIIGYVIGTQQATPGPAYSGREIIYPNASLLIQNIIQNDTGFYTLHVIKSDLVNEEATGQFRVYPELPKPSISSNNSKPVEDKDAVAFTCEPEAQNT

SEQ ID NO: 2591 - protein, 265 aa, Homo Sapiens
MGSPSACPYRVCIPWQGLLLTASLLTFWNLPNSAQTNIDVVPFNVAEGKEVLLVVHNESQNLYGYNWYKGERVHANYRIIGYVKNISQENAPGPAHNGRETIYPNGTLLIQNVTHNDAGIYTLHVIKENLVNEEVTRQFYVFSEPPKPSITSNNFNPVENKDIVVLTCQPETQNTTYLWWVNNQSLLVSPRLLLSTDNRTLVLLSATKNDIGPYECEIQNPVGASRSDPVTLNVRYESVQASSPDLSAGTAVSIMIGVLAGMALI

SEQ ID NO: 2592 - protein, 265 aa, Homo Sapiens; identical to SEQ ID NO: 2591

SEQ ID NO: 2593 - protein, 172 aa, Homo Sapiens
MGSPSACPYRVCIPWQGLLLTASLLTFWNLPNSAQTNIDVVPFNVAEGKEVLLVVHNESQNLYGYNWYKGERVHANYRIIGYVKNISQENAPGPAHNGRETIYPNGTLLIQNVTHNDAGIYTLHVIKENLVNEEVTRQFYVFYESVQASSPDLSAGTAVSIMIGVLAGMALI

SEQ ID NO: 2594 - protein, 349 aa, Homo Sapiens
MGPISAPSCRWRIPWQGLLLTASLFTFWNPPTTAQLTIEAVPSNAAEGKEVLLLVHNLPQDPRGYNWYKGETVDANRRIIGYVISNQQITPGPAYSNRETIYPNASLLMRNVTRNDTGSYTLQVIKLNLMSEEVTGQFSVHPETPKPSISSNNSNPVEDKDAVAFTCEPETQNTTYLWWVNGQSLPVSPRLQLSNGNRTLTLLSVTRNDVGPYECEIQNPASANFSDPVTLNVLYGPDAPTISPSDTYYHAGVNLNLSCHAASNPPSQYSWSVNGTFQQYTQKLFIPNITTKNSGSYACHTTNSATGRNRTTVRMITVSDALVQGSSPGLSARATVSIMIGVLARVALI

SEQ ID NO: 2595 - protein, 51 aa, Homo Sapiens
MGPISAPSCRWRIPWQGLLLTDALVQGSSPGLSARATVSIMIGVLARVALI

SEQ ID NO: 2596 - protein, 756 aa, Homo Sapiens
MLTMGRLQLVVLGLTCCWAVASAAKLGAVYTEGGFVEGVNKKLGLLGDSVDIFKGIPFAAPTKALENPQPHPGWQGTLKAKNFKKRCLQATITQDSTYGDEDCLYLNIWVPQGRKQVSRDLPVMIWIYGGAFLMGSGHGANFLNNYLYDGEEIATRGNVIVVTFNYRVGPLGFLSTGDANLPGNYGLRDQHMAIAWVKRNIAAFGGDPNNITLFGESAGGASVSLQTLSPYNKGLIRRAISQSGVALSPWVIQKNPLFWAKKVAEKVGCPVGDAARMAQCLKVTDPRALTLAYKVPLAGLEYPMLHYVGFVPVIDGDFIPADPINLYANAADIDYIAGTNNMDGHIFASIDMPAINKGNKKVTEEDFYKLVSEFTITKGLRGAKTTFDVYTESWAQDPSQENKKKTVVDFETDVLFLVPTEIALAQHRANAKSAKTYAYLFSHPSRMPVYPKWVGADHADDIQYVFGKPFATPTGYRPQDRTVSKAMIAYWTNFAKTGDPNMGDSAVPTHWEPYTTENSGYLEITKKMGSSSMKRSLRTNFLRYWTLTYLALPTVTDQEATPVPPTGDSEATPVPPTGDSETAPVPPTGDSGAPPVPPTGDSGAPPVPPTGDSGAPPVPPTGDSGAPPVPPTGDSGAPPVPPTGDSGAPPVPPTGDSGAPPVPPTGDSGAPPVPPTGDAGPPPVPPTGDSGAPPVPPTGDSGAPPVTPTGDSETAPVPPTGDSGAPPVPPTGDSEAAPVPPTDDSKEAQMPAVIRF

SEQ ID NO: 2597 - protein, 269 aa, Homo Sapiens
MIRTLLLSTLVAGALSCGDPTYPPYVTRVVGGEEARPNSWPWQVSLQYSSNGKWYHTCGGSLIANSWVLTAAHCISSSRTYRVGLGRHNLYVAESGSLAVSVSKIVVHKDWNSNQISKGNDIALLKLANPVSLTDKIQLACLPPAGTILPNNYPCYVTGWGRLQTNGAVPDVLQQGRLLVVDYATCSSSAWWGSSVKTSMICAGGDGVISSCNGDSGGPLNCQASDGRWQVHGIVSFGSRLGCNYYHKPSVFTRVSNYIDWINSVIANN

SEQ ID NO: 2598 - protein, 126 aa, Homo Sapiens [sequence omitted]

SEQ ID NO: 2599 - protein, 269 aa, Homo Sapiens
MIRTLLLSTLVAGALSCGVSTYAPDMSRMLGGEEARPNSWPWQVSLQYSSNGQWYHTCGGSLIANSWVLTAAHCISSSGIYRVMLGQHNLYVAESGSLAVSVSKIVVHKDWNSDQVSKGNDIALLKLANPVSLTDKIQLACLPPAGTILPNNYPCYVTGWGRLQTNGALPDDLKQGQLLVVDYATCSSSGWWGSTVKTNMICAGGDGVICTCNGDSGGPLNCQASDGRWEVHGIGSLTSVLGCNYYYKPSIFTRVSNYNDWINSVIANN

SEQ ID NO: 2600 - protein, 121 aa, Homo Sapiens
MMLRLLSSLLLVAVASGYGPPSSHSSSRVVHGEDAVPYSWPWQVSLQYEKSGSFYHTCGGSLIAPDWVVTAGHCISRDLTYQVVLGEYNLAVKEGPEQVIPINSEELFVHPLWNRSCVACG

SEQ ID NO: 2601 - protein, 270 aa, Homo Sapiens
MMLRLLSSLLLVAVASGYGPPSSHSSSRVVHGEDAVPYSWPWQVSLQYEKSGSFYHTCGGSLIAPDWVVTAGHCISRDLTYQVVLGEYNLAVKEGPEQVIPINSEELFVHPLWNRSCVACGNDIALIKLSRSAQLGDAVQLASLPPAGDILPNKTPCYITGWGRLYTNGPLPDKLQQARLPVVDYKHCSRWNWWGSTVKKTMVCAGGYIRSGCNGDSGGPLNCPTEDGGWQVHGVTSFVSAFGCNFIWKPTVFTRVSAFIDWIEETIASH

SEQ ID NO: 2602 - protein, 75 aa, Homo Sapiens
WWGSTVKKTMVCAGGYIRSGCNGDSGGPLNCPTEDGGWQVHGVTSFVSAFGCNFIWKPTVFTRVSAFIDWIEEGG

SEQ ID NO: 2603 - protein, 270 aa, Homo Sapiens
MMLRLLSSLLLVAVASGYGPPSSRPSSRVVNGEDAVPYSWPWQVSLQYEKSGSFYHTCGGSLIAPDWVVTAGHCISSSRTYQVVLGEYDRAVKEGPEQVIPINSGDLFVHPLWNRSCVACGNDIALIKLSRSAQLGDAVQLASLPPAGDILPNETPCYITGWGRLYTNGPLPDKLQEALLPVVDYEHCSRWNWWGSSVKKTMVCAGGDIRSGCNGDSGGPLNCPTEDGGWQVHGVTSFVSAFGCNTRRKPTVFTRVSAFIDWIEETIASH

SEQ ID NO: 2604 - protein, 164 aa, Homo Sapiens
MRSCYVAQAGLKLPGSSDPPASASQSTRITASGYGPPSSRPSSRVVNGEDAVPYSWPWQVSLQYEKSGSFYHTCGGSLIAPDWVVTAGHCISSSRTYQVVLGEYDRAVKEGPEQVIPINSGDLFVHPLWNRSCVACGNDIALIKLSRSAQLGDAVQLASLPPAG

SEQ ID NO: 2605 - protein, 180 aa, Homo Sapiens
QVIPINSGDLFVHPLWNRSCVACGNDIALIKLSRSAQLGDAVQLASLPPAGDILPNETPCYITGWGRLYTNGPLPDKLQEALLPVVDYEHCSRWNWWGSSVKKTMVCAGGDIRSGCNGDSGGPLNCPTEDGGWQVHGVTSFVSAFGCNTRRKPTVFTRVSAFIDWIEEKLQGNKAPESRT

SEQ ID NO: 2606 - protein, 1361 aa, Homo Sapiens
MGAAGRQDFLFKAMLTISWLTLTCFPGATSTVAAGCPDQSPELQPWNPGHDQDHHVHIGQGKTLLLTSSATVYSIHISEGGKLVIKDHDEPIVLRTRHILIDNGGELHAGSALCPFQGNFTIILYGRADEGIQPDPYYGLKYIGVGKGGALELHGQKKLSWTFLNKTLHPGGMAEGGYFFERSWGHRGVIVHVIDPKSGTVIHSDRFDTYRSKKESERLVQYLNAVPDGRILSVAVNDEGSRNLDDMARKAMTKLGSKHFLHLGFRHPWSFLTVKGNPSSSVEDHIEYHGHRGSAAARVFKLFQTEHGEYFNVSLSSEWVQDVEWTEWFDHDKVSQTKGGEKISDLWKAHPGKICNRPIDIQATTMDGVNLSTEVVYKKGQDYRFACYDRGRACRSYRVRFLCGKPVRPKLTVTIDTNVNSTILNLEDNVQSWKPGDTLVIASTDYSMYQAEEFQVLPCRSCAPNQVKVAGKPMYLHIGEEIDGVDMRAEVGLLSRNIIVMGEMEDKCYPYRNHICNFFDFDTFGGHIKFALGFKAAHLEGTELKHMGQQLVGQYPIHFHLAGDVDERGGYDPPTYIRDLSIHHTFSRCVTVHGSNGLLIKDVVGYNSLGHCFFTEDGPEERNTFDHCLGLLVKSGTLLPSDRDSKMCKMITEDSYPGYIPKPRQDCNAVSTFWMANPNNNLINCAAAGSEETGFWFIFHHVPTGPSVGMYSPGYSEHIPLGKFYNNRAHSNYRAGMIIDNGVKTTEASAKDKRPFLSIISARYSPHQDADPLKPREPAIIRHFIAYKNQDHGAWLRGGDVWLDSCRFADNGIGLTLASGGTFPYDDGSKQEIKNSLFVGESGNVGTEMMDNRIWGPGGLDHSGRTLPIGQNFPIRGIQLYDGPINIQNCTFRKFVALEGRHTSALAFRLNNAWQSCPHNNVTGIAFEDVPITSRVFFGEPGPWFNQLDMDGDKTSVFHDVDGSVSEYPGSYLTKNDNWLVRHPDCINVPDWRGAICSGCYAQMYIQAYKTSNLRMKIIKNDFPSHPLYLEGALTRSTHYQQYQPVVTLQKGYTIHWDQTAPAELAIWLINFNKGDWIRVGLCYPRGTTFSILSDVHNRLLKQTSKTGVFVRTLQMDKVEQSYPGRSHYYWDEDSGLLFLKLKAQNEREKFAFCSMKGCERIKIKALIPKNAGVSDCTATAYPKFTERAVVDVPMPKKLFGSQLKTKDHFLEVKMESSKQHFFHLWNDFAYIEVDGKKYPSSEDGIQVVVIDGNQGRVVSHTSFRNSILQGIPWQLFNYVATIPDNSIVLMASKGRYVSRGPWTRVLEKLGADRGLKLKEQMAFVGFKGSFRPIWVTLDTEDHKAKIFQVVPIPVVKKKKL

SEQ ID NO: 2607 - protein, 1361 aa, Homo Sapiens; identical to SEQ ID NO: 2606

SEQ ID NO: 2608 - protein, 1361 aa, Homo Sapiens; identical to SEQ ID NO: 2606

SEQ ID NO: 2609 - protein, 76 aa, Homo Sapiens
  misc_feature (1)..(1): Xaa can be any naturally occurring amino acid
XINFNKGDWIRVGLCYPRGTTFSILSDVHNRLLKQTSKTGVFVRTLQMDKVEQSYPGRSHYYWDEDSGKQRTISWR

SEQ ID NO: 2610 - protein, 145 aa, Homo Sapiens
  misc_feature (1)..(1): Xaa can be any naturally occurring amino acid
XRGAICSGCYAQMYIQAYKTSNLRMKIIKNDFPSHPLYLEGALTRSTHYQQYQPVVTLQKGYTIHWDQTAPAELAIWLINFNKGDWIRVGLCYPRGTTFSILSDVHNRLLKQTSKTGVFVRTLQMDKVEQSYPGRSHYYWDEDSG

SEQ ID NO: 2611 - protein, 173 aa, Homo Sapiens
EQDSFIEPYATTSQLRPRPNWQSEMGRRSSLPSFETLDYGDEEDIETQLSSSGKELGDVSAREDRGGHSDDLYAVPHRNQVPLLHEVNSEDDENISHQDGFPGSPPAPQRTQQKDGKHPVLNLKDEKPPLCEKPPPSPGPTLLQDLWGVAFLVGNVCGASVPLPEFLSCVQEE

SEQ ID NO: 2612 - protein, 783 aa, Homo Sapiens
MLLGFRRGRRSHFKHIIHGLLPAASVAPKAAVPRTPPPRSPNPSPERPRSALAAAILATTLTGRTVAIPQPRQRSRSESDVSSVEQDSFIEPYATTSQLRPRPNWQSEMGRRSSLPSFETLDYGDEEDIETQLSSSGKELGDVSAREDRGGHSDDLYAVPHRNQVPLLHEVNSEDDENISHQDGFPGSPPAPQRTQQKDGKHPVLNLKDEKPPLCEKPPPSPDITGRARQRYTEITREKFEALKEENMDLNNMNQSLTLELNTMKQAMKELQLKLKGMEKEKRKLKEAEKASSQEVAAPELLYLRKQAQELVDENDGLKMTVHRLNVELSRYQTKFRHLSKEESLNIEGLPSKGPIPPWLLDIKYLSPLLLAYEDMMKEKDELNATLKEEMRMFRMRVQEVVKENEELHQELNKSSAVTSEEWRQLQTQAKLVLEENKLLLEQLEIQQRKAKDSHQERLQEVSKLTKQLMLLEAKTHGQEKELAENREQLEILRAKCQELKTHSDGKIAVEVHKSIVNELKSQLQKEEEKERAEMEELMEKLTVLQAQKKSLLLEKNSLTEQNKALEAELERAQKINRKSQKKIEVLKKQVEKAMGNEMSAHQYLANLVGLAENITQERDSLMCLAKCLESEKDGVLNKVIKSNIRLGKLEEKVKGYKKQAALKLGDISHRLLEQQEDFAGKTAQYRQEMRHLHQVLKDKQEVLDQALQQNREMEGELEVIWESTFRENRRIRELLQDTLTRTGVQDNPRALVAPSLNGVSQADLLDGCDVCSYDLKSHAPTC

SEQ ID NO: 2613 - protein, 428 aa, Homo Sapiens
MLLGFRRGRRSHFKHIIHGLLPAASVAPKAAVPRTPPPRSPNPSPERPRSALAAAILATTLTGRTVAIPQPRQRSRSESDVSSVEQDSFIEPYATTSQLRPRPNWQSEMGRRSSLPSFETLDYGDEEDIETQLSSSGKELGDVSAREDRGGHSDDLYAVPHRNQVPLLHEVNSEDDENISHQDGFPGSPPAPQRTQQKDGKHPVLNLKDEKPPLCEKPPPSPDITGRARQRYTEITREKFEALKEENMDLNNMNQSLTLELNTMKQAMKELQLKLKGMEKEKRKLKEAEKASSQEVAAPELLYLRKQAQELVDENDGLKMTVHRLNVELSRYQTKFRHLSKEESLNIEGLPSKGPIPPWLLDIKYLSPLLLAYEDMMKEKDELNATLKASASDSSKTGFRGKQVVAGAVGDSAKESQGQPPGAPPRSF

SEQ ID NO: 2614 - protein, 356 aa, Homo Sapiens
MLLGFRRGRRSHFKHIIHGLLPAASVAPKAAVPRTPPPRSPNPSPERPRSALAAAILATTLTGRTVAIPQPRQRSRSESDVSSVEQDSFIEPYATTSQLRPRPNWQSEMGRRSSLPSFETLDYGDEEDIETQLSSSGKELGDVSAREDRGGHSDDLYAVPHRNQVPLLHEVNSEDDENISHQDGFPGSPPAPQRTQQKDGKHPVLNLKDEKPPLCEKPPPSPDITGRARQRYTEITREKFEALKEENMDLNNMNQSLTLELNTMKQAMKELQLKLKGMEKEKRKLKEAEKASSQEVAAPELLYLRKQAQELVDENDGLKMTVHRLNVELSRYQTKFRHLSKEEVTFPIVKISFSDF

SEQ ID NO: 2615 - protein, 80 aa, Homo Sapiens
MLLGFRRGRRSHFKQGLALSPRLECSGAIIAHCILELLGSSDLPTPASRGAETTGARHYSRLIVQYFCGNRDLAMFLWWS

SEQ ID NO: 2616 - protein, 217 aa, Homo Sapiens
  misc_feature (1)..(1): Xaa can be any naturally occurring amino acid
XAAVPRTPPPRSPNPSPERPRSALAAAILATTLTGRTVAIPQPRQRSRSESDVSSVEQDSFIEPYATTSQLRPRPNWQSEMGRRSSLPSFETLDYGDEEDIETQLSSSGKELGDVSAREDRGGHSDDLYAVPHRNQVPLLHEVNSEDDENISHQDGFPGSPPAPQRTQQKDGKHPVLNLKDEKPPLCEKPPPSPGICLLNYIMIEKLVLENIQINFI

SEQ ID NO: 2617 - protein, 267 aa, Homo Sapiens
MHLLLFQLLVLLPLGKTTRHQDGRQNQSSLSPVLLPRNQRELPTGNHEEAEEKPDLFVAVPHLVATSPAGEGQRQREKMLSRFGRFWKKPEREMHPSRDSDSEPFPPGTQSLIQPIDGMKMEKSPLREEAKKFWHHFMFRKTPASQGVILPIKSHEVHWETCRTVPFSQTITHEGCEKVVVQNNLCFGKCGSVHFPGAAQHSHTSCSHCLPAKFTTMHLPLNCTELSSVIKVVMLVEECQCKVKTEHEDGHILHAGSQDSFIPGVSA

SEQ ID NO: 2618 - protein, 64 aa, Homo Sapiens
MLQEWLAAVGDDYAAVVWRPEGEPRFYPDEEGPKHWTKERHQFLMELKQEALTFARNWGADYIL

SEQ ID NO: 2619 - protein, 79 aa, Homo Sapiens
MLQEWLAAVGDDYAAVVWRPEGEPRFYPDEEGPKHWTKERHQFLMELKQEALTFARNWGADYILFADTDNILTNNQTLR

SEQ ID NO: 2620 - protein, 109 aa, Homo Sapiens
MLQEWLAAVGDDYAAVVWRPEGEPRFYPDEEGPKHWTKERHQFLMELKQEALTFARNWGADYILFADTDNILTNNQTLRLLMGQGLPVVAPMLDSQTYYSNFWCGITPQ

SEQ ID NO: 2621 - protein, 218 aa, Homo Sapiens
MLQEWLAAVGDDYAAVVWRPEGEPRFYPDEEGPKHWTKERHQFLMELKQEALTFARNWGADYILFADTDNILTNNQTLRLLMGQGLPVVAPMLDSQTYYSNFWCGITPQGYYRRTAEYFPTKNRQRRGCFRVPMVHSTFLASLRAEGADQLAFYPPHPNYTWPFDDIIVFAYACQAAGVSVHVCNEHRYGYMNVPVKSHQGLEDERVNFIHLILEALG

SEQ ID NO: 2622 - protein, 517 aa, Homo Sapiens
MLQEWLAAVGDDYAAVVWRPEGEPRFYPDEEGPKHWTKERHQFLMELKQEALTFARNWGADYILFADTDNILTNNQTLRLLMGQGLPVVAPMLDSQTYYSNFWCGITPQGYYRRTAEYFPTKNRQRRGCFRVPMVHSTFLASLRAEGADQLAFYPPHPNYTWPFDDIIVFAYACQAAGVSVHVCNEHRYGYMNVPVKSHQGLEDERVNFIHLILEALVDGPRMQASAHVTRPSKRPSKIGFDEVFVISLARRPDRRERMLASLWEMEISGRVVDAVDGWMLNSSAIRNLGVDLLPGYQDPYSGRTLTKGEVGCFLSHYSIWEEVVARGLARVLVFEDDVRFESNFRGRLERLMEDVEAEKLSWDLIYLGRKQVNPEKETAVEGLPGLVVAGYSYWTLAYALRLAGARKLLASQPLRRMLPVDEFLPIMFDQHPNEQYKAHFWPRDLVAFSAQPLLAAPTHYAGDAEWLSDTETSSPWDDDSGRLISWSGSQKTLRSPRLDLTGSSGHSLQPQPRDEL

SEQ ID NO: 2623 - protein, 517 aa, Homo Sapiens [sequence omitted]

SEQ ID NO: 2624 - protein, 595 aa, Homo Sapiens
MRAARAAPLLQLLLLLGPWLEAAGVAESPLPAVVLAILARNAEHSLPHYLGALERLDYPRARMALWCATDHNVDNTTEMLQEWLAAVGDDYAAVVWRPEGEPRFYPDEEGPKHWTKERHQFLMELKQEALTFARNWGADYILFADTDNILTNNQTLRLLMGQGLPVVAPMLDSQTYYSNFWCGITPQGYYRRTAEYFPTKNRQRRGCFRVPMVHSTFLASLRAEGADQLAFYPPHPNYTWPFDDIIVFAYACQAAGVSVHVCNEHRYGYMNVPVKSHQGLEDERVNFIHLILEALVDGPRMQASAHVTRPSKRPSKIGFDEVFVISLARRPDRRERMLASLWEMEISGRVVDAVDGWMLNSSAIRNLGVDLLPGYQDPYSGRTLTKGEVGCFLSHYSIWEEVVARGLARVLVFEDDVRFESNFRGRLERLMEDVEAEKLSWDLIYLGRKQVNPEKETAVEGLPGLVVAGYSYWTLAYALRLAGARKLLASQPLRRMLPVDEFLPIMFDQHPNEQYKAHFWPRDLVAFSAQPLLAAPTHYAGDAEWLSDTETSSPWDDDSGRLISWSGSQKTLRSPRLDLTGSSGHSLQPQPRDEL

SEQ ID NO: 2625 - protein, 155 aa, Homo Sapiens
MTAKQCPGAGHYCPESRGGGCWQGLQILSDLATTLGMATLPSGPVFHREKPLRDGSHSLKVSQQRSRTPRPLYPAWPDSGPCGPQLVSSWADPRIPSLPKDSAEGPLCPFYLHLSTLPQLDVWVSPAPSSLAGAKYREVKQDPCRHVAQHTVGPQ

SEQ ID NO: 2626 - protein, 337 aa, Homo Sapiens
MAAAGPAAGPTGPEPMPSYAQLVQRGWGSALAAARGCTDCGWGLARRGLAEHAHLAPPELLLLALGALGWTALRSAATARLFRPLAKRCCLQPRDAAKMPESAWKFLFYLGSWSYSAYLLFGTDYPFFHDPPSVFYDWTPGMAVPRDIAAAYLLQGSFYGHSIYATLYMDTWRKDSVVMLLHHVVTLILIVSSYAFRYHNVGILVLFLHDISDVQLEFTKLNIYFKSRGGSYHRLHALAADLGCLSFGFSWFWFRLYWFPLKVLYATSHCSLRTVPDIPFYFFFNALLLLLTLMNLYWFLYIVAFAAKVLTGQVHELKDLREYDTAEAQSLKPSKAE

SEQ ID NO: 2627 - protein, 350 aa, Homo Sapiens
MAAAGPAAGPTGPEPMPSYAQLVQRGWGSALAAARGCTDCGWGLARRGLAEHAHLAPPELLLLALGALGWTALRSAATARLFRPLAKRCCLQPRDAAKMPESAWKFLFYLGSWSYSAYLLFGTDYPFFHDPPSVFYDWTPGMAVPRDIAAAYLLQGSFYGHSIYATLYMDTWRKDSVVMLLHHVVTLILIVSSYAFRYHNVGILVLFLHDISDVQLEFTKLNIYFKSRGGSYHRLHALAADLGCLSFGFSWFWFRLYWFPLKVLYATSHCSLRTVPDIPFYFFFNALLLLLTLMNLYWFLYIVAFAAKVLTGQVHELKDLREYDTAEAQSLKPSKAEKPLRNGLVKDKRF

SEQ ID NO: 2628 - protein, 239 aa, Homo Sapiens
MPESAWKFLFYLGSWSYSAYLLFGTDYPFFHDPPSVFYDWTPGMAVPRDIAAAYLLQGSFYGHSIYATLYMDTWRKDSVVMLLHHVVTLILIVSSYAFRYHNVGILVLFLHDISDVQLEFTKLNIYFKSRGGSYHRLHALAADLGCLSFGFSWFWFRLYWFPLKVLYATSHCSLRTVPDIPFYFFFNALLLLLTLMNLYWFLYIVAFAAKVLTGQVHELKDLREYDTAEAQSLKPSKAE

SEQ ID NO: 2629 - protein, 372 aa, Homo Sapiens
MPPPQQGPCGHHLLLLLALLLPSLPLTRAPVPPGPAAALLQALGLRDEPQGAPRLRPVPPVMWRLFRRRDPQETRSGSRRTSPGVTLQPCHVEELGVAGNIVRHIPDRGAPTRASEPASAAGHCPEWTVVFDLSAVEPAERPSRARLELRFAAAAAAAPEGGWELSVAQAGQGAGADPGPVLLRQLVPALGPPVRAELLGAAWARNASWPRSLRLALALRPRAPAACARLAEASLLLVTLDPRLCHPLARPRRDAEPVLGGGPGGACRARRLYVSFREVGWHRWVIAPRGFLANYCQGQCALPVALSGSGGPPALNHAVLRALMHAAAPGAADLPCCVPARLSPISVLFFDNSDNVVLRQYEDMVVDECGCR

SEQ ID NO: 2630 - protein, 216 aa, Homo Sapiens
  misc_feature (1)..(1): Xaa can be any naturally occurring amino acid
XAAAYLLQGSFYGHSIYATLYMDTWRKDSVVMLLHHVVTLILIVSSYAFRYHNVGILVLFLHDISDVQLEFTKLNIYFKSRGGSYHRLHALAADLGCLSFGFSWFWFRLYWFPLKVLYATSHCSLRTVPDIPFYFFFNALLLLLTLMNLYWFLYIVAFAAKVLTGQVHELKDLREYDTAEAQSLKPSKAEEAVAQSSVTFFGTGGARCRHLTHPGL

SEQ ID NO: 2631 - protein, 44 aa, Homo Sapiens
ERNFHTVPYMVGINKQEFGWLIPMMLEHPPTCMSFSTVQASHQT

SEQ ID NO: 2632 - protein, 131 aa, Homo Sapiens
KELIPEATEKYLGGTDDTVKKKDLFLDLIADVMFGVPSVIVARNHREGASEEEIRLSKMVMKFWANFARNGNPNGEGLPHWPEYNQKEGYLQIGANTQAAQKLKDKEVAFWTNLFAKKAVEKPPQTEHIEL

SEQ ID NO: 2633 - protein, 568 aa, Homo Sapiens
MWLRAFILATLSASAAWAGHPSSPPVVDTVHGKVLGKFVSLEGFAQPVAIFLGIPFAKPPLGPLRFTPPQPAEPWSFVKNATSYPPMCTQDPKAGQLLSELFTNRKENIPLKLSEDCLYLNIYTPADLTKKNRLPVMVWIHGGGLMVGAASTYDGLALAAHENVVVVTIQYRLGIWGFFSTGDEHSRGNWGHLDQVAALRWVQDNIASFGGNPGSVTIFGESAGGESVSVLVLSPLAKNLFHRAISESGVALTSVLVKKGDVKPLAEQIAITAGCKTTTSAVMVHCLRQKTEEELLETTLKMKFLSLDLQGDPRESQPLLGTVIDGMLLLKTPEELQAERNFHTVPYMVGINKQEFGWLIPMQLMSYPLSEGQLDQKTAMSLLWKSYPLVCIAKELIPEATEKYLGGTDDTVKKKDLFLDLIADVMFGVPSVIVARNHRDAGAPTYMYEFQYRPSFSSDMKPKTVIGDHGDELFSVFGAPFLKEGASEEEIRLSKMVMKFWANFARNGNPNGEGLPHWPEYNQKEGYLQIGANTQAAQKLKDKEVAFWTNLFAKKAVEKPPQTEHIEL

SEQ ID NO: 2634 - protein, 567 aa, Homo Sapiens
MWLRAFILATLSASAAWGHPSSPPVVDTVHGKVLGKFVSLEGFAQPVAIFLGIPFAKPPLGPLRFTPPQPAEPWSFVKNATSYPPMCTQDPKAGQLLSELFTNRKENIPLKLSEDCLYLNIYTPADLTKKNRLPVMVWIHGGGLMVGAASTYDGLALAAHENVVVVTIQYRLGIWGFFSTGDEHSRGNWGHLDQVAALRWVQDNIASFGGNPGSVTIFGESAGGESVSVLVLSPLAKNLFHRAISESGVALTSVLVKKGDVKPLAEQIAITAGCKTTTSAVMVHCLRQKTEEELLETTLKMKFLSLDLQGDPRESQPLLGTVIDGMLLLKTPEELQAERNFHTVPYMVGINKQEFGWLIPMQLMSYPLSEGQLDQKTAMSLLWKSYPLVCIAKELIPEATEKYLGGTDDTVKKKDLFLDLIADVMFGVPSVIVARNHRDAGAPTYMYEFQYRPSFSSDMKPKTVIGDHGDELFSVFGAPFLKEGASEEEIRLSKMVMKFWANFARNGNPNGEGLPHWPEYNQKEGYLQIGANTQAAQKLKDKEVAFWTNLFAKKAVEKPPQTEHIEL

SEQ ID NO: 2635 - protein, 566 aa, Homo Sapiens
MWLRAFILATLSASAAWGHPSSPPVVDTVHGKVLGKFVSLEGFAQPVAIFLGIPFAKPPLGPLRFTPPQPAEPWSFVKNATSYPPMCTQDPKAGQLLSELFTNRKENIPLKLSEDCLYLNIYTPADLTKKNRLPVMVWIHGGGLMVGAASTYDGLALAAHENVVVVTIQYRLGIWGFFSTGDEHSRGNWGHLDQVAALRWVQDNIASFGGNPGSVTIFGESAGGESVSVLVLSPLAKNLFHRAISESGVALTSVLVKKGDVKPLAEQIAITAGCKTTTSAVMVHCLRQKTEEELLETTLKMKFLSLDLQGDPRESQPLLGTVIDGMLLLKTPEELQAERNFHTVPYMVGINKQEFGWLIPMLMSYPLSEGQLDQKTAMSLLWKSYPLVCIAKELIPEATEKYLGGTDDTVKKKDLFLDLIADVMFGVPSVIVARNHRDAGAPTYMYEFQYRPSFSSDMKPKTVIGDHGDELFSVFGAPFLKEGASEEEIRLSKMVMKFWANFARNGNPNGEGLPHWPEYNQKEGYLQIGANTQAAQKLKDKEVAFWTNLFAKKAVEKPPQTEHIEL

SEQ ID NO: 2636 - protein, 84 aa, Homo Sapiens
  misc_feature (1)..(1): Xaa can be any naturally occurring amino acid
XRQKTEEELLETTLKMKFLSLDLQGDPRESQPLLGTVIDGMLLLKTPEELQAERNFHTVPYMVGINKQEFGWLIPMGTADISVY

SEQ ID NO: 2637 - protein, 210 aa, Homo Sapiens
MEQMSREDMLAISTPVLTSLDVPPEMMPTVIDEYLGSNSDAQAKCQAFQEFMGDVFINVPTVSFSRYLRDSGSPVFFYEFQHRPSSFAKIKPAWVKADHGAEGAFVFGGPFLMDESSRLAFPEATEEEKQLSLTMMAQWTHFARTGDPNSKALPPWPQFNQAEQYLEINPVPRAGQKFREAWMQFWSETLPSKIQQWHQKQKNRKAQEDL

SEQ ID NO: 2638 - protein, 571 aa, Homo Sapiens
MERAVRVESGVLVGVVCLLLACPATATGPEVAQPEVDTTLGRVRGRQVGVKGTDRLVNVFLGIPFAQPPLGPDRFSAPHPAQPWEGVRDASTAPPMCLQDVESMNSSRFVLNGKQQIFSVSEDCLVLNVYSPAEVPAGSGRPVMVWVHGGALITGAATSYDGSALAAYGDVVVVTVQYRLGVLGFFSTGDEHAPGNQGFLDVVAALRWVQENIAPFGGDLNCVTVFGGSAGGSIISGLVLSPVAAGLFHRAITQSGVITTPGIIDSHPWPLAQKIANTLACSSSSPAEMVQCLQQKEGEELVLSKKLKNTIYPLTVDGTVFPKSPKELLKEKPFHSVPFLMGVNNHEFSWLIPRGWGLLDTMEQMSREDMLAISTPVLTSLDVPPEMMPTVIDEYLGSNSDAQAKCQAFQEFMGDVFINVPTVSFSRYLRDSGSPVFFYEFQHRPSSFAKIKPAWVKADHGAEGAFVFGGPFLMDESSRLAFPEATEEEKQLSLTMMAQWTHFARTGDPNSKALPPWPQFNQAEQYLEINPVPRAGQKFREAWMQFWSETLPSKIQQWHQKQKNRKAQEDL

SEQ ID NO: 2639 - protein, 568 aa, Homo Sapiens
MERAVRVESGVLVGVVCLLLACPATATGPEVAQPEVDTTLGRVRGRQVGVKGTDRLVNVFLGIPFAQPPLGPDRFSAPHPAQPWEGVRDASTAPPMCLQDVESMNSSRFVLNGKQQIFSVSEDCLVLNVYSPAEVPAGSGRPVMVWVHGGALITGAATSYDGSALAAYGDVVVVTVQYRLGVLGFFSTGDEHAPGNQGFLDVVAALRWVQENIAPFGGDLNCVTVFGGSAGGSIISGLVLSPVAAGLFHRAITQSGVITTPGIIDSHPWPLAQKIANTLACSSSSPAEMVQCLQQKEGEELVLSKKLKNTIYPLTVDGTVFPKSPKELLKEKPFHSVPFLMGVNNHEFSWLIPRGWGLLDTMEQMSREDMLAISTPVLTSLDVPPEMMPTVIDEYLGSNSDAQAKCQAFQEFMGDVFINVPTVSFSRYLRDSGSPVFFYEFQHRPSSFAKIKPAWVKADHGAEGAFVFGGPFLMDESSRLEATEEEKQLSLTMMAQWTHFARTGDPNSKALPPWPQFNQAEQYLEINPVPRAGQKFREAWMQFWSETLPSKIQQWHQKQKNRKAQEDL

SEQ ID NO: 2640 - protein, 379 aa, Homo Sapiens
MERAVRVESGVLVGVVCLLLACPATATGPEVAQPEVDTTLGRVRGRQVGVKGTDRLVNVFLGIPFAQPPLGPDRFSAPHPAQPWEGVRDASTAPPMCLQDVESMNSSRFVLNGKQQIFSVSEDCLVLNVYSPAEVPAGSGRPVMVWVHGGALITGAATSYDGSALAAYGDVVVVTVQYRLGVLGFFSTGDEHAPGNQGFLDVVAALRWVQENIAPFGGDLNCVTVFGGSAGGSIISGLVLSPVAAGLFHRAITQSGVITTPGIIDSHPWPLAQKIANTLACSSSSPAEMVQCLQQKEGEELVLSKKLKNTIYPLTVDGTVFPKSPKELLKEKPFHSVPFLMGVNNHEFSWLIPRILEALSFSMSSSIDPVLLRRSNLPG

SEQ ID NO: 2641 - protein, 40 aa, Homo Sapiens
MERAVRVESGVLVGVVCLLLACPATATGYQDAVWARSCSA

SEQ ID NO: 2642 - protein, 454 aa, Homo Sapiens
GKQMHVGKTPIQVFLGVPFSRPPLGILRFAPPEPPEPWKGIRDATTYPPGCLQESWGQLASMYVSTRERYKWLRFSEDCLYLNVYAPARAPGDPQLPVMVWFPGGAFIVGAASSYEGSDLAAREKVVLVFLQHRLGIFGFLSTDDSHARGNWGLLDQMAALRWVQENIAAFGGDPGNVTLFGQSAGAMSISGLMMSPLASGLFHRAISQSGTALFRLFITSNPLKVAKKVAHLAGCNHNSTQILVNCLRALSGTKVMRVSNKMRFLQLNFQRDPEEIIWSMSPVVDGVVIPDDPLVLLTQGKVSSVPYLLGVNNLEFNWLLPYNITKEQVPLVVEEYLDNVNEHDWKMLRNRMMDIVQDATFVYATLQTAHYHRGLSMGKEKALSLQMMKYWANFARTGNPNDGNLPCWPRYNKDEKYLQLDFTTRVGMKLKEKKMAFWMSLYQSQRPEKQRQF

SEQ ID NO: 2643 - protein, 468 aa, Homo Sapiens
MRWILCWSLTLCLMAQTALGALHTKRPQVVTKYGTLQGKQMHVGKTPIQVFLGVPFSRPPLGILRFAPPEPPEPWKGIRDATTYPPGCLQESWGQLASMYVSTRERYKWLRFSEDCLYLNVYAPARAPGDPQLPVMVWFPGGAFIVGAASSYEGSDLAAREKVVLVFLQHRLGIFGFLSTDDSHARGNWGLLDQMAALRWVQENIAAFGGDPGNVTLFGQSAGAMSISGLMMSPLASGLFHRAISQSGTALFRLFITSNPLKVAKKVAHLAGCNHNSTQILVNCLRALSGTKVMRVSNKMRFLQLNFQRDPEEIIWSMSPVVDGVVIPDDPLVLLTQGKVSSVPYLLGVNNLEFNWLLPYIMKFPLNRQAMRKETITKMLWSTRTLLNITKEQVPLVVEEYLDNVNEHDWKMLRNRMMDIVQDATFVYATLQTAHYHRETPMMGICPAGHATTRMKSTCSWILPQEWA

SEQ ID NO: 2644 - protein, 374 aa, Homo Sapiens
MYVSTRERYKWLRFSEDCLYLNVYAPARAPGDPQLPVMVWFPGGAFIVGAASSYEGSDLAAREKVVLVFLQHRLGIFGFLRWRGRTDDSHARGNWGLLDQMAALRWVQENIAAFGGDPGNVTLFGQSAGAMSISGLMMSPLASGLFHRAISQSGTALFRLFITSNPLKVAKKVAHLAGCNHNSTQILVNCLRALSGTKVMRVSNKMRFLQLNFQRDPEEIIWSMSPVVDGVVIPDDPLVLLTQGKVSSVPYLLGVNNLEFNWLLPYIMKFPLNRQAMRKETITKMLWSTRTLLNITKEQVPLVVEEYLDNVNEHDWKMLRNRMMDIVQDATFVYATLQTAHYHRETPMMGICPAGHATTRMKSTCSWILPQEWA

SEQ ID NO: 2645 - protein, 135 aa, Homo Sapiens
MYVSTRERYKWLRFSEDCLYLNVYAPARAPGDPQLPVMVWFPGGAFIVGAASSYEGSDLAAREKVVLVFLQHRLGIFGFLRWRGRYPLGPQLWPERRGLARTTATRAGTGGCWTRWRLCAGCRRTSQPSGETQEM

SEQ ID NO: 2646 - protein, 463 aa, Homo Sapiens
MYVSTRERYKWLRFSEDCLYLNVYAPARAPGDPQLPVMVWFPGGAFIVGAASSYEGSDLAAREKVVLVFLQHRLGIFGFLSTDDSHARGNWGLLDQMAALRWVQENIAAFGGDPGNVTLFGQSAGAMSISGLMMSPLASGLFHRAISQSGTALFRLFITSNPLKVAKKVAHLAGCNHNSTQILVNCLRALSGTKVMRVSNKMRFLQLNFQRDPEEIIWSMSPVVDGVVIPDDPLVLLTQGKVSSVPYLLGVNNLEFNWLLPYIMKFPLNRQAMRKETITKMLWSTRTLLNITKEQVPLVVEEYLDNVNEHDWKMLRNRMMDIVQDATFVYATLQTAHYHRDAGLPVYLYEFEHHARGIIVKPRTDGADHGDEMYFLFGGPFATGLSMGKEKALSLQMMKYWANFARTGNPNDGNLPCWPRYNKDEKYLQLDFTTRVGMKLKEKKMAFWMSLYQSQRPEKQRQF

SEQ ID NO: 2647 - protein, 177 aa, Homo Sapiens
  misc_feature (1)..(1): Xaa can be any naturally occurring amino acid
XALHTKRPQVVTKYGTLQGKQMHVGKTPIQVFLGVPFSRPPLGILRFAPPEPPEPWKGIRDATTYPPGWSLALSPGWSAVARSRLTATSASRVQASLLPQPLSIWGYRCLQESWGQLASMYVSTRERYKWLRFSEDCLYLNVYAPARAPGDPQLPVSDGLVPGRRLHRGRCFFVRGL

SEQ ID NO: 2648 - protein, 604 aa, Homo Sapiens
MAVLVCPASCHGLKEFRIRRGMWRLCLVYYFYPASSTLYVLRIDVLNYTSKDEGPSAEGPQRNTRLGWIQGKQVTVLGSPVPVNVFLGVPFAAPPLGSLRFTNPQPASPWDNLREATSYPNLCLQNSEWLLLDQHMLKVHYPKFGVSEDCLYLNIYAPAHADTGSKLPVLVWFPGGAFKTGSASIFDGSALAAYEDVLVVVVQYRLGIFGFFTTWDQHAPGNWAFKDQVAALSWVQKNIEFFGGDPSSVTIFGESAGAISVSSLILSPMAKGLFHKAIMESGVAIIPYLEAHDYEKSEDLQVVAHFCGNNASDSEALLRCLRTKPSKELLTLSQKTKSFTRVVDGAFFPNEPLDLLSQKAFKAIPSIIGVNNHECGFLLPMKEAPEILSGSNKSLALHLIQNILHIPPQYLHLVANEYFHDKHSLTEIRDSLLDLLGDVFFVVPALITARYHRDAGAPVYFYEFRHRPQCFEDTKPAFVKADHADEVRFVFGGAFLKGDIVMFEGATEEEKLLSRKMMKYWATFARTGNPNGNDLSLWPAYNLTEQYLQLDLNMSLGQRLKEPRVDFWTSTIPLILSASDMLHSPLSSLTFLSLLQPFFFFCAP

SEQ ID NO: 2649 - protein, 355 aa, Homo Sapiens
MEDDLSWRSWSLLCMEILSPMAKGLFHKAIMESGVAIIPYLEAHDYEKSEDLQVVAHFCGNNASDSEALLRCLRTKPSKELLTLSQKTKSFTRVVDGAFFPNEPLDLLSQKAFKAIPSIIGVNNHECGFLLPMEAPEILSGSNKSLALHLIQNILHIPPQYLHLVANEYFHDKHSLTEIRDSLLDLLGDVFFVVPALITARYHRDAGAPVYFYEFRHRPQCFEDTKPAFVKADHADEVRFVFGGAFLKGDIVMFEGATEEEKLLSRKMMKYWATFARTGNPNGNDLSLWPAYNLTEQYLQLDLNMSLGQRLKEPRVDFWTSTIPLILSASDMLHSPLSSLTFLSLLQPFFFFCAP

SEQ ID NO: 2650 - protein, 75 aa, Homo Sapiens
MLKVHYPKFGVSEDCLYLNIYAPAHADTGSKLPVLVWFPGGAFKTGSASIFDGSALAAYEDVLVVVVQYRLGIFG

SEQ ID NO: 2651 - protein, 78 aa, Homo Sapiens
MLKVHYPKFGVSEDCLYLNIYAPAHADTGSKLPVLVWFPGGAFKTGSASIFDGSALAAYEDVLVVVVQYRLGIFGFFT

SEQ ID NO: 2652 - protein, 469 aa, Homo Sapiens
MLKVHYPKFGVSEDCLYLNIYAPAHADTGSKLPVLVWFPGGAFKTGSASIFDGSALAAYEDVLVVVVQYRLGIFGFFTTWDQHAPGNWAFKDQVAALSWVQKNIEFFGGDPSSVTIFGESAGAISVSSLILSPMAKGLFHKAIMESGVAIIPYLEAHDYEKSEDLQVVAHFCGNNASDSEALLRCLRTKPSKELLTLSQKTKSFTRVVDGAFFPNEPLDLLSQKAFKAIPSIIGVNNHECGFLLPMKEAPEILSGSNKSLALHLIQNILHIPPQYLHLVANEYFHDKHSLTEIRDSLLDLLGDVFFVVPALITARYHRDAGAPVYFYEFRHRPQCFEDTKPAFVKADHADEVRFVFGGAFLKGDIVMFEGATEEEKLLSRKMMKYWATFARTGNPNGNDLSLWPAYNLTEQYLQLDLNMSLGQRLKEPRVDFWTSTIPLILSASDMLHSPLSSLTFLSLLQPFFFFCAP

SEQ ID NO: 2653 - protein, 575 aa, Homo Sapiens
MSGNWVHPGQILIWAIWVLAAPTKGPSAEGPQRNTRLGWIQGKQVTVLGSPVPVNVFLGVPFAAPPLGSLRFTNPQPASPWDNLREATSYPNLCLQNSEWLLLDQHMLKVHYPKFGVSEDCLYLNIYAPAHADTGSKLPVLVWFPGGAFKTGSASIFDGSALAAYEDVLVVVVQYRLGIFGFFTTWDQHAPGNWAFKDQVAALSWVQKNIEFFGGDPSSVTIFGESAGAISVSSLILSPMAKGLFHKAIMESGVAIIPYLEAHDYEKSEDLQVVAHFCGNNASDSEALLRCLRTKPSKELLTLSQKTKSFTRVVDGAFFPNEPLDLLSQKAFKAIPSIIGVNNHECGFLLPMKEAPEILSGSNKSLALHLIQNILHIPPQYLHLVANEYFHDKHSLTEIRDSLLDLLGDVFFVVPALITARYHRDAGAPVYFYEFRHRPQCFEDTKPAFVKADHADEVRFVFGGAFLKGDIVMFEGATEEEKLLSRKMMKYWATFARTGNPNGNDLSLWPAYNLTEQYLQLDLNMSLGQRLKEPRVDFWTSTIPLILSASDMLHSPLSSLTFLSLLQPFFFFCAP

SEQ ID NO: 2654 - protein, 525 aa, Homo Sapiens
MSGNWVHPGQILIWAIWVLAAPTKGPSAEGPQRNTRLGWIQGKQVTVLGSPVPVNVFLGVPFAAPPLGSLRFTNPQPASPWDNLREATSYPNLCLQNSEWLLLDQHMLKVHYPKFGVSEDCLYLNIYAPAHADTGSKLPVLVWFPGGAFKTGSASIFDGSALAAYEDVLVVVVQYRLGIFGFFTTWDQHAPGNWAFKDQVAALSWVQKNIEFFGGDPSSVTIFGESAGAISVSSLILSPMAKGLFHKAIMESGVAIIPYLEAHDYEKSEDLQVVAHFCGNNASDSEALLRCLRTKPSKELLTLSQKTKSFTRVVDGAFFPNEPLDLLSQKAFKAIPSIIGVNNHECGFLLPMKEAPEILSGSNKSLALHLIQNILHIPPQYLHLVANEYFHDKHSLTEIRDSLLDLLGDVFFVVPALITARYHREGATEEEKLLSRKMMKYWATFARTGNPNGNDLSLWPAYNLTEQYLQLDLNMSLGQRLKEPRVDFWTSTIPLILSASDMLHSPLSSLTFLSLLQPFFFFCAP

SEQ ID NO: 2655 - protein, 545 aa, Homo Sapiens
MSGNWVHPGQILIWAIWVLAAPTKGPSAEGPQRNTRLGWIQGKQVTVLGSPVPVNVFLGVPFAAPPLGSLRFTNPQPASPWDNLREATSYPNLCLQNSEWLLLDQHMLKVLVWFPGGAFKTGSASIFDGSALAAYEDVLVVVVQYRLGIFGFFTTWDQHAPGNWAFKDQVAALSWVQKNIEFFGGDPSSVTIFGESAGAISVSSLILSPMAKGLFHKAIMESGVAIIPYLEAHDYEKSEDLQVVAHFCGNNASDSEALLRCLRTKPSKELLTLSQKTKSFTRVVDGAFFPNEPLDLLSQKAFKAIPSIIGVNNHECGFLLPMKEAPEILSGSNKSLALHLIQNILHIPPQYLHLVANEYFHDKHSLTEIRDSLLDLLGDVFFVVPALITARYHRDAGAPVYFYEFRHRPQCFEDTKPAFVKADHADEVRFVFGGAFLKGDIVMFEGATEEEKLLSRKMMKYWATFARTGNPNGNDLSLWPAYNLTEQYLQLDLNMSLGQRLKEPRVDFWTSTIPLILSASDMLHSPLSSLTFLSLLQPFFFFCAP

SEQ ID NO: 2656 - protein, 433 aa, Homo Sapiens
MLAATVLTLALLGNAHACSKGTSHEAGIVCRITKPALLVLNHETAKVIQTAFQRASYPDITGEKAMMLLGQVKYGLHNIQISHLSIASSQVELVEAKSIDVSIQNVSVVFKGTLKYGYTTAWWLGIDQSIDFEIDSAIDLQINTQLTCDSGRVRTDAPDCYLSFHKLLLHLQGEREPGWIKQLFTNFISFTLKLVLKGQICKEINVISNIMADFVQTRAASILSDGDIGVDISLTGDPVITASYLESHHKAVLETWGFNTNQEIFQEVVGGFPSQAQVTVHCLKMPKISCQNKGVVVNSSVMVKFLFPRPDQQHSVAYTFEEDIVTTVQASYSKKKLFLSLLDFQITPKTVSNLTESSSESVQSFLQSMITAVGIPEVMSRLEVVFTALMNSKGVSLFDIINPEIITRDGFLLLQMDFGFPEHLLVDFLQSLS

SEQ ID NO: 2657 - protein, 493 aa, Homo Sapiens [sequence omitted]

SEQ ID NO: 2658 - protein, 428 aa, Homo Sapiens
MMLLGQVKYGLHNIQISHLSIASSQVELVEAKSIDVSIQNVSVVFKGTLKYGYTTAWWLGIDQSIDFEIDSAIDLQINTQLTCDSGRVRTDAPDCYLSFHKLLLHLQGEREPGWIKQLFTNFISFTLKLVLKGQICKEINVISNIMADFVQTRAASILSDGDIGVDISLTGDPVITASYLESHHKGHFIYKNVSEDLPLPTFSPTLLGDSRMLYFWFSERVFHSLAKVAFQDGRLMLSLMGDEFKAVLETWGFNTNQEIFQEVVGGFPSQAQVTVHCLKMPKISCQNKGVVVNSSVMVKFLFPRPDQQHSVAYTFEEDIVTTVQASYSKKKLFLSLLDFQITPKTVSNLTESSSESVQSFLQSMITAVGIPEVMSRLEVVFTALMNSKGVSLFDIINPEIITRDGFLLLQMDFGFPEHLLVDFLQSLS

SEQ ID NO: 2659 - protein, 784 aa, Homo Sapiens
METAIWRRSYISLISSERPVHNWRGKSVQKKQAESKSQIKLHTQSAPFGLCPKDMMLTQAPSSVVRSRNSRNHTVNSGGSCLSASTVAIPAINDSSAAMSACSTISAQPASSMDTQMHSPKKQERVNKRVIWGIEVAEELHWKGWELGKETTRNLVLKNRSLKLQKMKYRPPKTKFFFTVIPQPIFLSPGITLTLPIVFRPLEAKEYMDQLWFEKAEGMFCVGLRATLPCHRLICRPPSLQLPMCAVGDTTEAFFCLDNVGDLPTFFTWEFSSPFQMLPATGLLEPGQASQIKVTFQPLTAVIYEVQATCWYGAGSRQRSSIQLQAVAKCAQLLVSIKHKCPEDQDAEGFQKLLYFGSVAVGCTSERQIRLHNPSAVNAPFRIEISPDELAEDQAFSCPTAHGIVLPGEKKCVSVFFHPKTLDTRTVDYCSIMPSGCASKTLLKVVGFCRGPAVSLQHYCVNFSWVNLGERSEQPLWIENQSDCTAHFQFAIDCLESVFTIRPAFGTLVGKARMTLHCAFQPTHPIICFRRVACLIHHQDPLFLDLMGTCHSDSTKPAILKPQHLTWYRTHLARGLTLYPPDILDAMLKEKKLAQDQNGALMIPIQDLEDMPAPQYPYIPPMTEFFFDGTSDITIFPPPISVEPVEVDFGACPGPEAPNPVPLCLMNHTKGKIMVVWTRRSDCPFWVTPESCDVPPLKSMAMRLHFQPPHPNCLYTVELEAFAIYKVCARNEREECGVSARSLSGLVGWQEVTEGSFRLHPLRARLSLGWTVTPMSLSPPKLLA

SEQ ID NO: 2660 - protein, 234 aa, Homo Sapiens
METAIWRRSYISLISSERPVHNWRGKSVQKKQAESKSQIKLHTQSAPFGLCPKDMMLTQAPSSVVRSRNSRNHTVNSGGSCLSASTVAIPAINDSSAAMSACSTISAQPASSMDTQMHSPKKQERVNKRVIWGIEVAEELHWKGWELGKETTRNLVLKNRSLKLQKMKYRPPKTKFFFTVIPQPIFLSPGITLTLPIVFRPLEAPLTAVIYEVQATCWYGAGSRQRSSIQLQAV

SEQ ID NO: 2661 - protein, 1925 aa, Homo Sapiens
MFTLTGCRLVEKTQKVENPSVSFASSFPLIPLLLRGKSVQKKQAESKSQIKLHTQSAPFGLCPKDMMLTQAPSSVVRSRNSRNHTVNSGGSCLSASTVAIPAINDSSAAMSACSTISAQPASSMDTQMHSPKKQERVNKRVIWGIEVAEELHWKGWELGKETTRNLVLKNRSLKLQKMKYRPPKTKFFFTVIPQPIFLSPGITLTLPIVFRPLEAKEYMDQLWFEKAEGMFCVGLRATLPCHRLICRPPSLQLPMCAVGDTTEAFFCLDNVGDLPTFFTWEFSSPFQMLPATGLLEPGQASQIKVTFQPLTAVIYEVQATCWYGAGSRQRSSIQLQAVAKCAQLLVSIKHKCPEDQDAEGFQKLLYFGSVAVGCTSERQIRLHNPSAVNAPFRIEISPDELAEDQAFSCPTAHGIVLPGEKKCVSVFFHPKTLDTRTVDYCSIMPSGCASKTLLKVVGFCRGPAVSLQHYCVNFSWVNLGERSEQPLWIENQSDCTAHFQFAIDCLESVFTIRPAFGTLVGKARMTLHCAFQPTHPIICFRRVACLIHHQDPLFLDLMGTCHSDSTKPAILKPQHLTWYRTHLARGLTLYPPDILDAMLKEKKLAQDQNGALMIPIQDLEDMPAPQYPYIPPMTEFFFDGTSDITIFPPPISVEPVEVDFGACPGPEAPNPVPLCLMNHTKGKIMVVWTRRSDCPFWVTPESCDVPPLKSMAMRLHFQPPHPNCLYTVELEAFAIYKVLQSYSNIEEDCTMCPSWCLTVRARGHSYFAGFEHHIPQYSLDVPKLFPAVSSGEPTYRSLLLVNKDCKLLTFSLAPQRGSDVILRPTSGLVAPGAHQIILICTYPEGSSWKQHTFYLQCNASPQYLKEVSMYSREEPLQLKLDTHKSLYFKPTWVGCSSTSPFTFRNPSRLPLQFEWRVSEQHRKLLAVQPSRGLIQPNERLTLTWTFSPLEETKYLFQVGMWVWEAGLSPNANPAATTHYMLRLVGVGLTSSLSAKEKELAFGNVLVNSKQSRFLVLLNDGNCTLYYRLYLEQGSPEAVDNHPLALQLDRTEGSMPPRSQDTICLTACPKQRSQYSWTITYSLLSHRDNKAGEKQELCCVSLVAVYPLLSILDVSSMGSAEGITRKHLWRLFSLDLLNSYLERDPTPCELTYKVPTRHSMSQIPPVLTPLRLDFNFGAAPFKAPPSVVFLALKNSGVVSLDWAFLLPSDQRIDVELWAEQAELNSTELHQMRVQDNCLFSISPKAGSLSPGQEQMVELKYSHLFIGTDHLPVLFKVSHGREILLNFIGVTVKPEQKYVHFTSTTHQFIPIPIGDTLPPRQIYELYNGGSVPVTYEVQTDVLSQVQEKNFDHPIFCCLNPKGEIQPGSTARVLWIFSPIEAKTYTVDVPIHILGWNSALIHFQGVGYNPHMMGDTAPFHNISSWDNSSIHSRLVVPGQNVFLSQSHISLGNIPVQSKCSRLLFLNNISKNEEIAFSWQPSPLDFGEVSVSPMIGVVAPEETVPFVVTLRASVHASFYSADLVCKLYSQQLMRQYHKELQEWKDEKVRQEVEFTITDMKVKKRTCCTACEPARKYKTLPPIKNQQSVSRPASWKLQTPKEEVSWPCPQPPSPGMLCLGLTARAHATDYFLANFFSEFPCHFLHRELPKRKAPREESETSEEKSPNKWGPVSKQKKQLLVDILTTIIRGLLEDKNFHEAVDQSLVEQVPYFRQFWNEQSTKFMDQKNSLYLMPILPVPSSSWEDGKGKQPKEDRPEHYPGLGKKEEGEEEKGEEEEEELEEEEEEEEETEEEELGKEEIEEKEEERDEKEEKVSWAGIGPTPQPESQESMQWQWQQQLNVMVKEEQEQDEKEAIRRLPAFANLQEALLENMIQNILVEASRGEVVLTSRPRVIALPPFCVPRSLTPDTLLPTQQAEVLHPVVPLPTDLP

SEQ ID NO: 2662 - protein, 1925 aa, Homo Sapiens; identical to SEQ ID NO: 2661

SEQ ID NO: 2663 - protein, 114 aa, Homo Sapiens
MMLTQAPSSVVRSRNSRNHTVNSGGSCLSASTVAIPAINDSSAAMSACSTISAQPASSMDTQMHSPKKQERVNKRVIWGIEVAEELHWKGWELGKETTRNLVLKNRSLKLQKMK

SEQ ID NO: 2664 - protein, 117 aa, Homo Sapiens
MMLTQAPSSVVRSRNSRNHTVNSGGSCLSASTVAIPAINDSSAAMSACSTISAQPASSMDTQMHSPKKQERVNKRVIWGIEVAEELHWKGWELGKETTRNLVLKNRSLKLQKMKYRP

SEQ ID NO: 2665 - protein, 730 aa, Homo Sapiens
MMLTQAPSSVVRSRNSRNHTVNSGGSCLSASTVAIPAINDSSAAMSACSTISAQPASSMDTQMHSPKKQERVNKRVIWGIEVAEELHWKGWELGKETTRNLVLKNRSLKLQKMKYRPPKTKFFFTVIPQPIFLSPGITLTLPIVFRPLEAKEYMDQLWFEKAEGMFCVGLRATLPCHRLICRPPSLQLPMCAVGDTTEAFFCLDNVGDLPTFFTWEFSSPFQMLPATGLLEPGQASQIKVTFQPLTAVIYEVQATCWYGAGSRQRSSIQLQAVAKCAQLLVSIKHKCPEDQDAEGFQKLLYFGSVAVGCTSERQIRLHNPSAVNAPFRIEISPDELAEDQAFSCPTAHGIVLPGEKKCVSVFFHPKTLDTRTVDYCSIMPSGCASKTLLKVVGFCRGPAVSLQHYCVNFSWVNLGERSEQPLWIENQSDCTAHFQFAIDCLESVFTIRPAFGTLVGKARMTLHCAFQPTHPIICFRRVACLIHHQDPLFLDLMGTCHSDSTKPAILKPQHLTWYRTHLARGLTLYPPDILDAMLKEKKLAQDQNGALMIPIQDLEDMPAPQYPYIPPMTEFFFDGTSDITIFPPPISVEPVEVDFGACPGPEAPNPVPLCLMNHTKGKIMVVWTRRSDCPFWVTPESCDVPPLKSMAMRLHFQPPHPNCLYTVELEAFAIYKVCARNEREECGVSARSLSGLVGWQEVTEGSFRLHPLRARLSLGWTVTPMSLSPPKLLA

SEQ ID NO: 2666 - protein, 164 aa, Homo Sapiens
MMLTQAPSSVVRSRNSRNHTVNSGGSCLSASTVAIPAINDSSAAMSACSTISAQPASSMDTQMHSPKKQERVNKRVIWGIEVAEELHWKGWELGKETTRNLVLKNRSLKLQKMKYRYQYKGSRTQCHSLEPRKQALFKTKQNKQKKPLTCHIKASECLKYVQYE

SEQ ID NO: 2667 - protein, 271 aa, Homo Sapiens
MTLHCAFQPTHPIICFRRVACLIHHQDPLFLDLMGTCHSDSTKPAILKPQHLTWYRTHLARGLTLYPPDILDAMLKEKKLAQDQNGALMIPIQDLEDMPAPQYPYIPPMTEFFFDGTSDITIFPPPISVEPVEVDFGACPGPEAPNPVPLCLMNHTKGKIMVVWTRRSDCPFWVTPESCDVPPLKSMAMRLHFQPPHPNCLYTVELEAFAIYKVCARNEREECGVSARSLSGLVGWQEVTEGSFRLHPLRARLSLGWTVTPMSLSPPKLLA

SEQ ID NO: 2668 - protein, 127 aa, Homo Sapiens
  misc_feature (1)..(1): Xaa can be any naturally occurring amino acid
XKQELCCVSLVAVYPLLSILDVSSMGSAEGITRKHLWRLFSLDLLNSYLERDPTPCELTYKVPTRHSMSQIPPVLTPLRLDFNFGAAPFKAPPSVVFLALKNSGVVSLDWYGLKGATGGPGRQVPRG

SEQ ID NO: 2669 - protein, 144 aa, Homo Sapiens
MGSNLSPQLCLMPFILGLLSGGVTTTPWSLARPQGSCSLEGVEIKGGSFRLLQEGQALEYVCPSGFYPYPVQTRTCRSTGSWSTLKTQDQKTVRKAECRAIHCPRPHDFENGEYWPRSPYYNVSDEISFHCYDGYTLRGSANRT

SEQ ID NO: 2670 - protein, 764 aa, Homo Sapiens
MGSNLSPQLCLMPFILGLLSGGVTTTPWSLARPQGSCSLEGVEIKGGSFRLLQEGQALEYVCPSGFYPYPVQTRTCRSTGSWSTLKTQDQKTVRKAECRAIHCPRPHDFENGEYWPRSPYYNVSDEISFHCYDGYTLRGSANRTCQVNGRWSGQTAICDNGAGYCSNPGIPIGTRKVGSQYRLEDSVTYHCSRGLTLRGSQRRTCQEGGSWSGTEPSCQDSFMYDTPQEVAEAFLSSLTETIEGVDAEDGHGPGEQQKRKIVLDPSGSMNIYLVLDGSDSIGASNFTGAKKCLVNLIEKVASYGVKPRYGLVTYATYPKIWVKVSEADSSNADWVTKQLNEINYEDHKLKSGTNTKKALQAVYSMMSWPDDVPPEGWNRTRHVIILMTDGLHNMGGDPITVIDEIRDLLYIGKDRKNPREDYLDVYVFGVGPLVNQVNINALASKKDNEQHVFKVKDMENLEDVFYQMIDESQSLSLCGMVWEHRKGTDYHKQPWQAKISVIRPSKGHESCMGAVVSEYFVLTAAHCFTVDDKEHSIKVSVGGEKRDLEIEVVLFHPNYNINGKKEAGIPEFYDYDVALIKLKNKLKYGQTIRPICLPCTEGTTRALRLPPTTTCQQQKEELLPAQDIKALFVSEEEKKLTRKEVYIKNGDKKGSCERDAQYAPGYDKVKDISEVVTPRFLCTGGVSPYADPNTCRGDSGGPLIVHKRSRFIQVGVISWGVVDVCKNQKRQKQVPAHARDFHINLFQVLPWLKEKLQDEDLGFL

SEQ ID NO: 2671 - protein, 86 aa, Homo Sapiens
MGSNLSPQLCLMPFILGLLSGVRVSFWLLPVPCADTYLQIYGVLEHPEDSRPKDCQEGRVQSNPLSKTTRLRERGILAPVSLLQCE

SEQ ID NO: 2672 - protein, 305 aa, Homo Sapiens
  misc_feature (1)..(1): Xaa can be any naturally occurring amino acid
XDGLHNMGGDPITVIDEIRDLLYIGKDRKNPREDYLDVYVFGVGPLVNQVNINALASKKDNEQHVFKVKDMENLEDVFYQMIGGEKRDLEIEVVLFHPNYNINGKKEAGIPEFYDYDVALIKLKNKLKYGQTIRPICLPCTEGTTRALRLPPTTTCQQQKEELLPAQDIKALFVSEEEKKLTRKEVYIKNGDKKGSCERDAQYAPGYDKVKDISEVVTPRFLCTGGVSPYADPNTCRGDSGGPLIVHKRSRFIQVGVISWGVVDVCKNQKRQKQVPAHARDFHINLFQVLPWLKEKLQDEDLGFL

SEQ ID NO: 2673 - protein, 68 aa, Homo Sapiens
  misc_feature (1)..(1): Xaa can be any naturally occurring amino acid
XPRFLCTGGVSPYADPNTCRGDSGGPLIVHKRSRFIQVSPPFPIWGDAKWSAWAPKQESSMHVASNSR

SEQ ID NO: 2674 - protein, 148 aa, Homo Sapiens
MTWRHHVRLLFTVSLALQIINLGNSYQREKHNGGREEVTKVATQKHRQSPLNWTSSHFGEVTGSAEGWGPEEPLPYSRAFGEDPKDFLASHAHGPSAGGAPSLLLLLPCALLHRLLRPDAPAHPRSLVPSVLQRERRPCGRPGLGHRL

SEQ ID NO: 2675 - protein, 223 aa, Homo Sapiens
MTWRHHVRLLFTVSLALQIINLGNSYQREKHNGGREEVTKVATQKHRQSPLNWTSSHFGEVTGSAEGWGPEEPLPYSRAFGEGASARPRCCRNGGTCVLGSFCVCPAHFTGRYCEHDQRRSECGALEHGAWTLRACHLCRCIFGALHCLPLQTPDRCDPKDFLASHAHGPSAGGAPSLLLLLPCALLHRLLRPDAPAHPRSLVPSVLQRERRPCGRPGLGHRL

SEQ ID NO: 2676 - protein, 191 aa, Homo Sapiens
MTWRHHVRLLFTVSLALQIINLGNSYQREKHNGGREEVTKVATQKHRQSPLNWTSSHFGEVTGSAEGWGPEEPLPYSRAFGEVNAAPWSTEPGPSAPATSAGASSGPCTASPSRRLTAVTRKTSWPPTLTGRAPGARPACYSCCPAHSCTASCARMRPRTLGPWSLPSSSGSGAPAEGRDLGIAFNFLCCK

SEQ ID NO: 2677 - protein, 148 aa, Homo Sapiens
MTWRHHVRLLFTVSLALQIINLGNSYQREKHNGGREEVTKVATQKHRQSPLNWTSSHFGEVTGSAEGWGPEEPLPYSWAFGEDPKDFLASHAHGPSAGGAPSLLLLLPCALLHRLLRPDAPAHPRSLVPSVLQRERRPCGRPGLGHRL

SEQ ID NO: 2678 - protein, 223 aa, Homo Sapiens
MTWRHHVRLLFTVSLALQIINLGNSYQREKHNGGREEVTKVATQKHRQSPLNWTSSHFGEVTGSAEGWGPEEPLPYSWAFGEGASARPRCCRNGGTCVLGSFCVCPAHFTGRYCEHDQRRSECGALEHGAWTLRACHLCRCIFGALHCLPLQTPDRCDPKDFLASHAHGPSAGGAPSLLLLLPCALLHRLLRPDAPAHPRSLVPSVLQRERRPCGRPGLGHRL

SEQ ID NO: 2679 - protein, 191 aa, Homo Sapiens
MTWRHHVRLLFTVSLALQIINLGNSYQREKHNGGREEVTKVATQKHRQSPLNWTSSHFGEVTGSAEGWGPEEPLPYSWAFGEVNAAPWSTEPGPSAPATSAGASSGPCTASPSRRLTAVTRKTSWPPTLTGRAPGARPACYSCCPAHSCTASCARMRPRTLGPWSLPSSSGSGAPAEGRDLGIAFNFLCCK

SEQ ID NO: 2680 - protein, 253 aa, Homo Sapiens
MHSWERLAVLVLLGAAACAAPPRGRILGGREAEAHARPYMASVQLNGAHLCGGVLVAEQWVLSAAHCLEDAADGKVQVLLGAHSLSQPEPSKRLYDVLRAVPHPDSQPDTIDHDLLLLQLSEKATLGPAVRPLPWQRVDRDVAPGTLCDVAGWGIVNHAGRRPDSLQHVLLPVLDRATCNRRTHHDGAITERLMCAESNRRDSCKGDSGGPLVCGGVLEGVVTSGSRVCGNRKKPGIYTRVASYAAWIDSVLA

SEQ ID NO: 2681 - protein, 260 aa, Homo Sapiens
MHSWERLAVLVLLGAAACGEEAWAWAAPPRGRILGGREAEAHARPYMASVQLNGAHLCGGVLVAEQWVLSAAHCLEDAADGKVQVLLGAHSLSQPEPSKRLYDVLRAVPHPDSQPDTIDHDLLLLQLSEKATLGPAVRPLPWQRVDRDVAPGTLCDVAGWGIVNHAGRRPDSLQHVLLPVLDRATCNRRTHHDGAITERLMCAESNRRDSCKGDSGGPLVCGGVLEGVVTSGSRVCGNRKKPGIYTRVASYAAWIDSVLA

SEQ ID NO: 2682 - protein, 299 aa, Homo Sapiens
MEEFDSEDFSTSEEDEDYVPSGGEYSEDDVNELVKEDEVDGEEQTQKTQGKKRKAQSIPARKRRQGGLSLEEEEEEDANSESEGSSSEEEDDAAEQEKGIGSEDARKKKEDELWASFLNDVGPKSKVPPSTQVKKGEETEETSSSKLLVKAEELEKPKETEKVKITKVFDFAGEEVRVTKEVDATSKEAKSFFKQNEKEKPQANVPSALPSLPAGSGLKRSSGMSSLLGKIGAKKQKMSTLEKSKLDWESFKEEEGIGEELAIHNRGKEGYIERKAFLDRVDHRQFEIERDLRLSKMKP

SEQ ID NO: 2683 - protein, 50 aa, Homo Sapiens
MSRRPAYCSLQFLGSSDPPASASPVDGTTGGEYSEDDVNELVKEDEVDGE

SEQ ID NO: 2684 - protein, 19 aa, Homo Sapiens
QANVPSALPSLPAGSGCVI

SEQ ID NO: 2685 - protein, 17 aa, Homo Sapiens
  misc_feature (1)..(1): Xaa can be any naturally occurring amino acid
XALPSLPAGSGKKKFDA

SEQ ID NO: 2686 - protein, 385 aa, Homo Sapiens
MRLLAKIICLMLWAICVAEDCNELPPRRNTEILTGSWSDQTYPEGTQAIYKCRPGYRSLGNVIMVCRKGEWVALNPLRKCQKRPCGHPGDTPFGTFTLTGGNVFEYGVKAVYTCNEGYQLLGEINYRECDTDGWTNDIPICEEISCKSPDVINGSPISQKIIYKENERFQYKCNMGYEYSERGDAVCTESGWRPLPSCEEKSCDNPYIPNGDYSPLRIKHRTGDEITYQCRNGFYPATRGNTAKCTSTGWIPAPRCTLKPCDYPDIKHGGLYHENMRRPYFPVAVGKYYSYYCDEHFETPSGSYWDHIHCTQDGWSPAVPCLRKCYFPYLENGYNQNHGRKFVQGKSIDVACHPGYALPKAQTTVTCMENGWSPTPRCIRVSFTL

SEQ ID NO: 2687 - protein, 1231 aa, Homo Sapiens
MRLLAKIICLMLWAICVAEDCNELPPRRNTEILTGSWSDQTYPEGTQAIYKCRPGYRSLGNVIMVCRKGEWVALNPLRKCQKRPCGHPGDTPFGTFTLTGGNVFEYGVKAVYTCNEGYQLLGEINYRECDTDGWTNDIPICEVVKCLPVTAPENGKIVSSAMEPDREYHFGQAVRFVCNSGYKIEGDEEMHCSDDGFWSKEKPKCVEISCKSPDVINGSPISQKIIYKENERFQYKCNMGYEYSERGDAVCTESGWRPLPSCEEKSCDNPYIPNGDYSPLRIKHRTGDEITYQCRNGFYPATRGNTAKCTSTGWIPAPRCTLKPCDYPDIKHGGLYHENMRRPYFPVAVGKYYSYYCDEHFETPSGSYWDHIHCTQDGWSPAVPCLRKCYFPYLENGYNQNHGRKFVQGKSIDVACHPGYALPKAQTTVTCMENGWSPTPRCIRVKTCSKSSIDIENGFISESQYTYALKEKAKYQCKLGYVTADGETSGSITCGKDGWSAQPTCIKSCDIPVFMNARTKNDFTWFKLNDTLDYECHDGYESNTGSTTGSIVCGYNGWSDLPICYERECELPKIDVHLVPDRKKDQYKVGEVLKFSCKPGFTIVGPNSVQCYHFGLSPDLPICKEQVQSCGPPPELLNGNVKEKTKEEYGHSEVVEYYCNPRFLMKGPNKIQCVDGEWTTLPVCIVEESTCGDIPELEHGWAQLSSPPYYYGDSVEFNCSESFTMIGHRSITCIHGVWTQLPQCVAIDKLKKCKSSNLIILEEHLKNKKEFDHNSNIRYRCRGKEGWIHTVCINGRWDPEVNCSMAQIQLCPPPPQIPNSHNMTTTLNYRDGEKVSVLCQENYLIQEGEEITCKDGRWQSIPLCVEKIPCSQPPQIEHGTINSSRSSQESYAHGTKLSYTCEGGFRISEENETTCYMGKWSSPPQCEGLPCKSPPEISHGVVAHMSDSYQYGEEVTYKCFEGFGIDGPAIAKCLGEKWSHPPSCIKTDCLSLPSFENAIPMGEKKDVYKAGEQVTYTCATYYKMDGASNVTCINSRWTGRPTCRDTSCVNPPTVQNAYIVSRQMSKYPSGERVRYQCRSPYEMFGDEEVMCLNGNWTEPPQCKDSTGKCGPPPPIDNGDITSFPLSVYAPASSVEYQCQNLYQLEGNKRITCRNGQWSEPPKCLHPCVISREIMENYNIALRWTAKQKLYSRTGESVEFVCKRGYRLSSRSHTLRTTCWDGKLEYPTCAKR

SEQ ID NO: 2688 - protein, 449 aa, Homo Sapiens
MRLLAKIICLMLWAICVAEDCNELPPRRNTEILTGSWSDQTYPEGTQAIYKCRPGYRSLGNVIMVCRKGEWVALNPLRKCQKRPCGHPGDTPFGTFTLTGGNVFEYGVKAVYTCNEGYQLLGEINYRECDTDGWTNDIPICEVVKCLPVTAPENGKIVSSAMEPDREYHFGQAVRFVCNSGYKIEGDEEMHCSDDGFWSKEKPKCVEISCKSPDVINGSPISQKIIYKENERFQYKCNMGYEYSERGDAVCTESGWRPLPSCEEKSCDNPYIPNGDYSPLRIKHRTGDEITYQCRNGFYPATRGNTAKCTSTGWIPAPRCTLKPCDYPDIKHGGLYHENMRRPYFPVAVGKYYSYYCDEHFETPSGSYWDHIHCTQDGWSPAVPCLRKCYFPYLENGYNQNHGRKFVQGKSIDVACHPGYALPKAQTTVTCMENGWSPTPRCIRVSFTL

SEQ ID NO: 2689 - protein, 271 aa, Homo Sapiens
MWLLVSVILISRISSVGGEATFCDFPKINHGILYDEEKYKPFSQVPTGEVFYYSCEYNFVSPSKSFWTRITCTEEGWSPTPKCLRLCFFPFVENGHSESSGQTHLEGDTVQIICNTGYRLQNNENNISCVERGWSTPPKCRSTDSTGKCGPPPPIDNGDITSFPLSVYAPASSVEYQCQNLYQLEGNKRITCRNGQWSEPPKCLHPCVISREIMENYNIALRWTAKQKLYLRTGESAEFVCKRGYRLSSRSHTLRTTCWDGKLEYPTCAKR

SEQ ID NO: 2690 - protein, 330 aa, Homo Sapiens
MWLLVSVILISRISSVGGEATFCDFPKINHGILYDEEKYKPFSQVPTGEVFYYSCEYNFVSPSKSFWTRITCTEEGWSPTPKCLRLCFFPFVENGHSESSGQTHLEGDTVQIICNTGYRLQNNENNISCVERGWSTPPKCRSTDTSCVNPPTVQNAHILSRQMSKYPSGERVRYECRSPYEMFGDEEVMCLNGNWTEPPQCKDSTGKCGPPPPIDNGDITSFPLSVYAPASSVEYQCQNLYQLEGNKRITCRNGQWSEPPKCLHPCVISREIMENYNIALRWTAKQKLYLRTGESAEFVCKRGYRLSSRSHTLRTTCWDGKLEYPTCAKR

SEQ ID NO: 2691 - protein, 270 aa, Homo Sapiens; identical to SEQ ID NO: 1649

SEQ ID NO: 2692 - protein, 254 aa, Homo Sapiens
MWLLVSVILISRISSVGGEAMFCDFPKINHGILYDEEKYKPFSQVPTGEVFYYSCEYNFVSPSKSFWTRITCAEEGWSPTPKCLRQTHLEGDTVQIICNTGYRLQNNENNISCVERGWSTPPKCRSTISAEKCGPPPPIDNGDITSFLLSVYAPGSSVEYQCQNLYQLEGNNQITCRNGQWSEPPKCLDPCVISQEIMEKYNIKLKWTNQQKLYSRTGDIVEFVCKSGYHPTKSHSFRAMCQNGKLVYPSCEEK

SEQ ID NO: 2693 - protein, 269 aa, Homo Sapiens
MLLLINVILTLWVSCANGQVKPCDFPDIKHGGLFHENMRRPYFPVAVGKYYSYYCDEHFETPSGSYWDYIHCTQNGWSPAVPCLRKCYFPYLENGYNQNYGRKFVQGNSTEVACHPGYGLPKAQTTVTCTEKGWSPTPRCIRVNSSEKCGPPPPISNGDTTSFLLKVYVPQSRVEYQCQPYYELQGSNYVTCSNGEWSEPPRCIHPCIITEENMNKNNIKLKGRSDRKYYAKTGDTIEFMCKLGYNANTSILSFQAVCREGIVEYPRCE

SEQ ID NO: 2694 - protein, 195 aa, Homo Sapiens
MLLLINVILTLWVSCANGQVKPCDFPDIKHGGLFHENMRRPYFPVAVGKYYSYYCDEHFETPSGSYWDYIHCTQNGWSPAVPCLRKCYFPYLENGYNQNYGRKFVQGNSTEVACHPGYGLPKAQTTVTCTEKGWSPTPRCIRVRTCSKSDIEIENGFISESSSIYILNKEIQYKCKPGYATADGNSSDMVFCISY

SEQ ID NO: 2695 - protein, 330 aa, Homo Sapiens
MLLLINVILTLWVSCANGQVKPCDFPDIKHGGLFHENMRRPYFPVAVGKYYSYYCDEHFETPSGSYWDYIHCTQNGWSPAVPCLRKCYFPYLENGYNQNYGRKFVQGNSTEVACHPGYGLPKAQTTVTCTEKGWSPTPRCIRVRTCSKSDIEIENGFISESSSIYILNKEIQYKCKPGYATADGNSSGSITCLQNGWSAQPICINSSEKCGPPPPISNGDTTSFLLKVYVPQSRVEYQCQPYYELQGSNYVTCSNGEWSEPPRCIHPCIITEENMNKNNIKLKGRSDRKYYAKTGDTIEFMCKLGYNANTSILSFQAVCREGIVEYPRCE

SEQ ID NO: 2696 - protein, 232 aa, Homo Sapiens
MLLLINVILTLWVSCANGQVKPCDFPDIKHGGLFHENMRRPYFPVAVGKYYSYYCDEHFETPSGSYWDYIHCTQNGWSPAVPCLRKCYFPYLENGYNQNYGRKFVQGNSTEVACHPGYGLPKAQTTVTCTEKGWSPTPRCIRVRTCSKSDIEIENGFISESSSIYILNKEIQYKCKPGYATADGNSSGSITCLQNGWSAQPICITACIAFRAHAQKSCTCRGRNECLILNFC

SEQ ID NO: 2697 - protein, 232 aa, Homo Sapiens; identical to SEQ ID NO: 2696

SEQ ID NO: 2698 - protein, 201 aa, Homo Sapiens
MENGWSPPCRCIRVRTCSKSDIEIENGFISESSSIYILNKEIQYKCKPGYATADGNSSGSITCLQNGWSAQPICINSSEKCGPPPPISNGDTTSFLLKVYVPQSRVEYQCQSYYELQGSNYVTCSNGEWSEPPRCIHPCIITEENMNKNNIQLKGKSDIKYYAKTGDTIEFMCKLGYNANTSVLSFQAVCREGIVEYPRCE

SEQ ID NO: 2699 - protein, 331 aa, Homo Sapiens
MLLLINVILTLWVSCANGQEVKPCDFPEIQHGGLYYKSLRRLYFPAAAGQSYSYYCDQNFVTPSGSYWDYIHCTQDGWLPTVPCLRTCSKSDIEIENGFISESSSIYILNKEIQYKCKPGYATADGNSSGSITCLQNGWSAQPICIKFCDMPVFENSRAKSNGMRFKLHDTLDYECYDGYEISYGNTTGSIVCGEDGWSHFPTCYNSSEKCGPPPPISNGDTTSFLLKVYVPQSRVEYQCQSYYELQGSNYVTCSNGEWSEPPRCIHPCIITEENMNKNNIQLKGKSDIKYYAKTGDTIEFMCKLGYNANTSVLSFQAVCREGIVEYPRCE

SEQ ID NO: 2700 - protein, 331 aa, Homo Sapiens
MLLLINVILTLWVSCANGQEVKPCDFPEIQHGGLYYKSLRRLYFPAAAGQSYSYYCDQNFVTPSGSYWDYIHCTQDGWSPTVPCLRTCSKSDIEIENGFISESSSIYILNKEIQYKCKPGYATADGNSSGSITCLQNGWSAQPICIKFCDMPVFENSRAKSNGMRFKLHDTLDYECYDGYEISYGNTTGSIVCGEDGWSHFPTCYNSSEKCGPPPPISNGDTTSFLLKVYVPQSRVEYQCQSYYELQGSNYVTCSNGEWSEPPRCIHPCIITEENMNKNNIQLKGKSDIKYYAKTGDTIEFMCKLGYNANTSVLSFQAVCREGIVEYPRCE

SEQ ID NO: 2701 - protein, 577 aa, Homo Sapiens
MLLLINVILTLWVSCANGQVKPCDFPEIQHGGLYYKSLRRLYFPAAAGQSYSYYCDQNFVTPSGSYWDYIHCTQDGWSPTVPCLRTCSKSDVEIENGFISESSSIYILNEETQYNCKPGYATAEGNSSGSITCLQNGWSTQPICIKFCDMPVFENSRAKSNGMWFKLHDTLDYECYDGYESSYGNTTDSIVCGEDGWSHLPTCYNSSENCGPPPPISNGDTTSFPQKVYLPWSRVEYQCQSYYELQGSKYVTCSNGDWSEPPRCISMKPCEFPEIQHGHLYYENTRRPYFPVATGQSYSYYCDQNFVTPSGSYWDYIHCTQDGWLPTVPCLRTCSKSDIEIENGFISESSSIYILNKEIQYKCKPGYATADGNSSGSITCLQNGWSAQPICIKFCDMPVFENSRAKSNGMRFKLHDTLDYECYDGYEISYGNTTGSIVCGEDGWSHFPTCYNSSEKCGPPPPISNGDTTSFLLKVYVPQSRVEYQCQSYYELQGSNYVTCSNGEWSEPPRCIHPCIITEENMNKNNIQLKGKSDIKYYAKTGDTIEFMCKLGYNANTSVLSFQAVCREGIVEYPRCE

SEQ ID NO: 2702 - protein, 569 aa, Homo Sapiens
MLLLFSVILISWVSTVGGEGTLCDFPKIHHGFLYDEEDYNPFSQVPTGEVFYYSCEYNFVSPSKSFWTRITCTEEGWSPTPKCLRMCSFPFVKNGHSESSGLIHLEGDTVQIICNTGYSLQNNEKNISCVERGWSTPPICSFTKGECHVPILEANVDAQPKKESYKVGDVLKFSCRKNLIRVGSDSVQCYQFGWSPNFPTCKGQVRSCGPPPQLSNGEVKEIRKEEYGHNEVVEYDCNPNFIINGPKKIQCVDGEWTTLPTCVEQVKTCGYIPELEYGYVQPSVPPYQHGVSVEVNCRNEYAMIGNNMITCINGIWTELPMCVATHQLKRCKIAGVNIKTLLKLSGKEFNHNSRIRYRCSDIFRYRHSVCINGKWNPEVDCTEKREQFCPPPPQIPNAQNMTTTVNYQDGEKVAVLCKENYLLPEAKEIVCKDGRWQSLPRCVESTAYCGPPPSINNGDTTSFPLSVYPPGSTVTYRCQSFYKLQGSVTVTCRNKQWSEPPRCLDPCVVSEENMNKNNIQLKWRNDGKLYAKTGDAVEFQCKFPHKAMISSPPFRAICQEGKFEYPICE

SEQ ID NO: 2703 - protein, 161 aa, Homo Sapiens
MKLLHVFLLFLCFHLRFCKVTYTSQEDLVEKKCLAKKYTHLSCDKVFCQPWQRCIEGTCVCKLPYQCPKNGTAVCATNRRSFPTYCQQKSLECLHPGTKFLNNGTCTAEGKFSVSLKHGNTDSEGIVEVKLVDQDKTMFICKSSWSMREANVACLDLGFQQ

SEQ ID NO: 2704 - protein, 591 aa, Homo Sapiens
MKLLHVFLLFLCFHLRFCKVTYTSQEDLVEKKCLAKKYTHLSCDKVFCQPWQRCIEGTCVCKLPYQCPKNGTAVCATNRRSFPTYCQQKSLECLHPGTKFLNNGTCTAEGKFSVSLKHGNTDSEGIVEVKLVDQDKTMFICKSSWSMREANVACLDLGFQQGADTQRRFKLSDLSINSTECLHVHCRGLETSLAECTFTKRRTMGYQDFADVVCYTQKADSPMDDFFQCVNGKYISQMKACDGINDCGDQSDELCCKACQGKGFHCKSGVCIPSQYQCNGEVDCITGEDEVGCAAARHPTIQGFASVTQEETEILTADMDAERRRIKSLLPKLSCGVKNRMHIRRKRIVGGKRAQLGDLPWQVAIKDASGITCGGIYIGGCWILTAAHCLRASKTHRYQIWTTVVDWIHPDLKRIVIEYVDRIIFHENYNAGTYQNDIALIEMKKDGNKKDCELPRSIPACVPWSPYLFQPNDTCIVSGWGREKDNERVFSLQWGEVKLISNCSKFYGNRFYEKEMECAGTYDGSIDACKGDSGGPLVCMDANNVTYVWGVVSWGENCGKPEFPGVYTKVANYFDWISYHVGRPFISQYNV

SEQ ID NO: 2705 - protein, 583 aa, Homo Sapiens
MKLLHVFLLFLCFHLRFCKVTYTSQEDLVEKKCLAKKYTHLSCDKVFCQPWQRCIEGTCVCKLPYQCPKNGTAVCATNRRSFPTYCQQKSLECLHPGTKFLNNGTCTAEGKFSVSLKHGNTDSEGIVEVKLVDQDKTMFICKSSWSMREANVACLDLGFQQGADTQRRFKLSDLSINSTECLHVHCRGLETSLAECTFTKRRTMGYQDFADVVCYTQKADSPMDDFFQCVNGKYISQMKACDGINDCGDQSDELCCKACQGKGFHCKSGVCIPSQYQCNGEVDCITGEDEVGCAGFASVTQEETEILTADMDAERRRIKSLLPKLSCGVKNRMHIRRKRIVGGKRAQLGDLPWQVAIKDASGITCGGIYIGGCWILTAAHCLRASKTHRYQIWTTVVDWIHPDLKRIVIEYVDRIIFHENYNAGTYQNDIALIEMKKDGNKKDCELPRSIPACVPWSPYLFQPNDTCIVSGWGREKDNERVFSLQWGEVKLISNCSKFYGNRFYEKEMECAGTYDGSIDACKGDSGGPLVCMDANNVTYVWGVVSWGENCGKPEFPGVYTKVANYFDWISYHVGRPFISQYNV

SEQ ID NO: 2706 - protein, 576 aa, Homo Sapiens
MKLLHVFLLFLCFHLRFCKVTYTSQEDLVEKKCLAKKYTHLSCDKVFCQPWQRCIEGTCVCKLPYQCPKNGTAVCATNRRSFPTYCQQKSLECLHPGTKFLNNGTCTAEGKFSVSLKHGNTDSEGIVEVKLVDQDKTMFICKSSWSMREANVACLDLGFQQGADTQRRFKLSDLSINSTECLHVHCRGLETSLAECTFTKRRTMGYQDFADVVCYTQKADSPMDDFFQCVNGKYISQMKACDGINDCGDQSDELCCKACQGKGFHCKSGVCIPSQYQCNGEVDCITGEDEVGCAEETEILTADMDAERRRIKSLLPKLSCGVKNRMHIRRKRIVGGKRAQLGDLPWQVAIKDASGITCGGIYIGGCWILTAAHCLRASKTHRYQIWTTVVDWIHPDLKRIVIEYVDRIIFHENYNAGTYQNDIALIEMKKDGNKKDCELPRSIPACVPWSPYLFQPNDTCIVSGWGREKDNERVFSLQWGEVKLISNCSKFYGNRFYEKEMECAGTYDGSIDACKGDSGGPLVCMDANNVTYVWGVVSWGENCGKPEFPGVYTKVANYFDWISYHVGRPFISQYNV

SEQ ID NO: 2707 - protein, 378 aa, Homo Sapiens
MKLLHVFLLFLCFHLRFCKVTYTSQEDLVEKKCLAKKYTHLSCDKVFCQPWQRCIEGTCVCKLPYQCPKNGTAVCATNRRSFPTYCQQKSLECLHPGTKFLNNGTCTAEGKFSVSLKHGNTDSEGIVEVKLVDQDKTMFICKSSWSMREANVACLDLGFQQGADTQRRFKLSDLSINSTECLHVHCRGLETSLAECTFTKRRTMGYQDFADVVCYTQKADSPMDDFFQCVNGKYISQMKACDGINDCGDQSDELCCKACQGKGFHCKSGVCIPSQYQCNGEVDCITGEDEVGCAGFASVTQEETEILTADMDAERRRIKSLLPKLSCGVKNRMHIRRKRIVGGKRAQLGGKMKQISLDIFKGLHRVYAILEFCCIILK

SEQ ID NO: 2708 - protein, 167 aa, Homo Sapiens
MGGWSGWGPWEPCSVTCSKGTRTRRRACNHPAPKCGGHCPGQAQESEACDTQQVCPTHGAWATWGPWTPCSASCHGGPHEPKETRSRKCSAPEPSQKPPGKPCPGLAYEQRRCTGLPPCPVAGGWGPWGPVSPCPVTCGLGQTMEQRTCNHPVPQHGGPFCAGDATR

SEQ ID NO: 2709 - protein, 469 aa, Homo Sapiens
MITEGAQAPRLLLPPLLLLLTLPATGSDPVLCFTQYEESSGKCKGLLGGGVSVEDCCLNTAFAYQKRSGGLCQPCRSPRWSLWSTWAPCSVTCSEGSQLRYRRCVGWNGQCSGKVAPGTLEWQLQACEDQQCCPEMGGWSGWGPWEPCSVTCSKGTRTRRRACNHPAPKCGGHCPGQAQESEACDTQQVCPTHGAWATWGPWTPCSASCHGGPHEPKETRSRKCSAPEPSQKPPGKPCPGLAYEQRRCTGLPPCPVAGGWGPWGPVSPCPVTCGLGQTMEQRTCNHPVPQHGGPFCAGDATRTHICNTAVPCPVDGEWDSWGEWSPCIRRNMKSISCQEIPGQQSRGRTCRGRKFDGHRCAGQQQDIRHCYSIQHCPLKGSWSEWSTWGLCMPPCGPNPTRARQRLCTPLLPKYPPTVSMVEGQGEKNVTFWGRPLPRCEELQGQKLVVEEKRPCLHVPACKDPEEEEL

SEQ ID NO: 2710 - protein, 415 aa, Homo Sapiens
MITEGAQAPRLLLPPLLLLLTLPATGSDPVLCFTQYEESSGKCKGLLGGGVSVEDCCLNTAFAYQKRSGGLCQPCRSPRWSLWSTWAPCSVTCSEGSQLRYRRCVGWNGQCSGKVAPGTLEWQLQACEDQQCCPEMGGWSGWGPWEPCSVTCSKGTRTRRRACNHPAPKCGGHCPGQAQESEACDTQQVCPTHGAWATWGPWTPCSASCHGGPHEPKETRSRKCSAPEPSQKPPGKPCPGLAYEQRRCTGLPPCPVAGGWGPWGPVSPCPVTCGLGQTMEQRTCNHPVPQHGGPFCAGDATRTHICNTAVPCPVDGEWDSWGEWSPCIRRNMKSISCQEIPGQQSRGRTCRGRKFDGHRCAGQQQDIRHCYSIQHCPLKGSWSEWSTWGLCMPPCGPNPTRARQRLCTPLLPKYP

SEQ ID NO: 2711 - protein, 469 aa, Homo Sapiens; identical to SEQ ID NO: 2709

SEQ ID NO: 2712 - protein, 62 aa, Homo Sapiens
MDYYRKYAAIFLVTLSVFLHVLHSAPDVQDCPECTLQENPFFSQPGAPILQCMGCCFSRAYP

SEQ ID NO: 2713 - protein, 101 aa, Homo Sapiens
MDYYRKYAAIFLVTLSVFLHVLHSAPDVQDCPECTLQENPFFSQPGAPILQCMGCCFSRAYPTPLRSKKTMLVQKNVTSESTCCVAKSYNRVRTSRSPEAF

SEQ ID NO: 2714 - protein, 116 aa, Homo Sapiens
MDYYRKYAAIFLVTLSVFLHVLHSAPDVQDCPECTLQENPFFSQPGAPILQCMGCCFSRAYPTPLRSKKTMLVQKNVTSESTCCVAKSYNRVTVMGGFKVENHTACHCSTCYYHKS

SEQ ID NO: 2715 - protein, 147 aa, Homo Sapiens
MDYYRKYAAIFLVTLSVFLHVLHSAPDVQETGFHHVAQAALKLLSSSNPPTKASQSARITDCPECTLQENPFFSQPGAPILQCMGCCFSRAYPTPLRSKKTMLVQKNVTSESTCCVAKSYNRVTVMGGFKVENHTACHCSTCYYHKS

SEQ ID NO: 2716 - protein, 116 aa, Homo Sapiens
MQLSFWSHCRCFCMFSIPLLMCRVRDQICDCPECTLQENPFFSQPGAPILQCMGCCFSRAYPTPLRSKKTMLVQKNVTSESTCCVAKSYNRVTVMGGFKVENHTACHCSTCYYHKS

SEQ ID NO: 2717 - protein, 130 aa, Homo Sapiens; identical to SEQ ID NO: 74

SEQ ID NO: 2718 - protein, 155 aa, Homo Sapiens
MSKRLLLLLLLSMGGTWASKEPLRPRCRPINATLAVEKEGCPVCITVNTTICAGYCPTMTRVLQGVLPALPQVVCNYRDVRFESIRLPGCPRGVNPVVSYAVALSCQCALCRRSTTDCGGPKDHPLTCDDPRFQDSSSSKAPPPSLPSPSRLPGP

SEQ ID NO: 2719 - protein, 130 aa, Homo Sapiens
MGGTWASKEPLRPRCRPINATLAVEKEGCPVCITVNTTICAGYCPTMTRVLQGVLPALPQVVCNYRDVRFESIRLPGCPRGVNPVVSYAVALSCQCALCRRSTTDCGGPKDHPLTCDDPRFQASSSSKAP

SEQ ID NO: 2720 - protein, 163 aa, Homo Sapiens
MSKGLLLLLLLSMGGTWASKEPLRPRCRPINATLAVEKEGCPVCITVNTTICAGYCPTMTRVLQGVLPALPQVVCNYRDVRFESIRLPGCPRGVNPVVSYAVALSCQCALCRRSTTDCGGPKDHPLTCDDPRFQASSSSKAPPPSLPSPSRLPGPSDTPILPQ

SEQ ID NO: 2721 - protein, 165 aa, Homo Sapiens
MEMFQGLLLLLLLSMGGTWASKEPLRPRCRPINATLAVEKEGCPVCITVNTTICAGYCPTMTRVLQGVLPALPQVVCNYRDVRFESIRLPGCPRGVNPVVSYAVALSCQCALCRRSTTDCGGPKDHPLTCDDPRFQDSSSSKAPPPSLPSPSRLPGPSDTPILPQ

SEQ ID NO: 2722 - protein, 165 aa, Homo Sapiens; identical to SEQ ID NO: 2721

SEQ ID NO: 2723 - protein, 165 aa, Homo Sapiens
MEMFQGLLLLLLLSMGGTWASREMLRPRCRPINATLAVEKEGCPVCITVNTTICAGYCPTMTRVLQGVLPALPQVVCNYRDVRFESIRLPGCPRGVNPVVSYAVALSCQCALCRRSTTDCGGPKDHPLTCDDPRFQASSSSKAPPPSLPSPSRLPGPSDTPILPQ

SEQ ID NO: 2724 - protein, 165 aa, Homo Sapiens; identical to SEQ ID NO: 2723

SEQ ID NO: 2725 - protein, 165 aa, Homo Sapiens; identical to SEQ ID NO: 2723

SEQ ID NO: 2726 - protein, 165 aa, Homo Sapiens; identical to SEQ ID NO: 2721

SEQ ID NO: 2727 - protein, 132 aa, Homo Sapiens
MLPLTMTVLILLLLPTGQAAPKDGVTRPDSEVQHQLLPNPFQPGQEQLGLLQSYLKGLGRTEVQLEHLSREQVLLYLFALHDYDQSGQLDGLELLSMLTAALAPGAANSPTTNPGNLDARLDGGEKAMQPQW

SEQ ID NO: 2728 - protein, 301 aa, Homo Sapiens
MLPLTMTVLILLLLPTGQAAPKDGVTRPDSEVQHQLLPNPFQPGQEQLGLLQSYLKGLGRTEVQLEHLSREQVLLYLFALHDYDQSGQLDGLELLSMLTAALAPGAANSPTTNPVILIVDKVLETQDLNGDGLMTPAELINFPGVALRHVEPGEPLAPSPQEPQAVGRQSLLAKSPLRQETQEAPGPREEAKGQVEARRESLDPVQEPGGQAEADGDVPGPRGEAEGQAEAKGDAPGPRGEAGGQAEAEGDAPGPRGEAGGQAEARENGEEAKELPGETLESKNTQNDFEVHIVQVENDEI

SEQ ID NO: 2729 - protein, 318 aa, Homo Sapiens
MLPLTMTVLILLLLPTGQAAPKDGVTRPDSEVQHQLLPNPFQPGQEQLGLLQSYLKGLGRTEVQLEHLSREQVLLYLFALHDYDQSGQLDGLELLSMLTAALAPGAANSPTTNPVILIVDKVLETQDLNGDGLMTPAELINFPGVALRHVEPGEPLAPSPQEPQAVGRQSLLAKSPLRQETQEAPGPREEAKGQVEARRESLDPVQEPGGQAEADGDVPGPRGEAEGQAEAKGDAPGPRGEAGGQAEAEGDAPGPRGEAGGQAEAEGDAPGPRGEAGGQAEARENGEEAKELPGETLESKNTQNDFEVHIVQVENDEI

SEQ ID NO: 2730 - protein, 318 aa, Homo Sapiens; identical to SEQ ID NO: 2729

SEQ ID NO: 2731 - protein, 318 aa, Homo Sapiens; identical to SEQ ID NO: 2729

SEQ ID NO: 2732 - protein, 57 aa, Homo Sapiens
MLPLTMTVLILLLLPTGQAAPKDGVTRPDSEVQHQLLPNPFQPGQEQLGSPLPLCPP

SEQ ID NO: 2733 - protein, 112 aa, Homo Sapiens
MLTAALAPGAANSPTTNPVILIVDKVLETQDLNGDGLMTPAELINFPGVALRPYPPYIGVGPNSNMCSRSDLPEDSNTLYPGSHLWLRHALNSKGNLDARLDGGEKAMQPQW

SEQ ID NO: 2734 - protein, 440 aa, Homo Sapiens
MNGLKEVRYACAVLLWAPWHLVGSKGMGRGVGMRPQLCFRHSRPAFMCFIYKSWSDIYFEHSSMGSLLSVCESSLSRSPVFGAAGRSRQKMRLCLTQPICDTVADASFPRPLILFLVPVPGRMLPLTMTVLILLLLPTGQAAPKDGVTRPDSEVQHQLLPNPFQPGQEQLGLLQSYLKGLGRTEVQLEHLSREQVLLYLFALHDYDQSGQLDGLELLSMLTAALAPGAANSPTTNPVILIVDKVLETQDLNGDGLMTPAELINFPGVALRHVEPGEPLAPSPQEPQAVGRQSLLAKSPLRQETQEAPGPREEAKGQVEARRESLDPVQEPGGQAEADGDVPGPRGEAEGQAEAKGDAPGPRGEAGGQAEAEGDAPGPRGEAGGQAEAEGDAPGPRGEAGGQAEARENGEEAKELPGETLESKNTQNDFEVHIVQVENDEI

SEQ ID NO: 2735 - protein, 359 aa, Homo Sapiens
MVRPMLLLSLGLLAGLLPALAACPQNCHCHSDLQHVICDKVGLQKIPKVSEKTKLLNLQRNNFPVLAANSFRAMPNLVSLHLQHCQIREVAAGAFRGLKQLIYLYLSHNDIRVLRAGAFDDLTELTYLYLDHNKVTELPRGLLSPLVNLFILQLNNNKIRELRAGAFQGAKDLRWLYLSENALSSLQPGALDDVENLAKFHVDRNQLSSYPSAALSKLRVVEELKLSHNPLKSIPDNAFQSFGRYLETLWLDNTNLEKFSDGAFLGVTTLKHVHLENNRLNQLPSNFPFDSLETLALTNNPWKCTCQLRGLRRWLEAKASRPDATCASPAKFKGQHIRDTDAFRSCKFPTKRSKKAGRH

SEQ ID NO: 2736 - protein, 359 aa, Homo Sapiens; identical to SEQ ID NO: 2735

SEQ ID NO: 2737 - protein, 42 aa, Homo Sapiens
  misc_feature (1)..(1): Xaa can be any naturally occurring amino acid
XASRPDATCASPAKFKGQHIRDTDAFRSCKFPTKRSKKAGRH

SEQ ID NO: 2738 - protein, 762 aa, Homo Sapiens
MEGPRSSTHVPLVLPLLVLLLLAPARQAAAQRCPQACICDNSRRHVACRYQNLTEVPDAIPELTQRLDLQGNLLKVIPAAAFQGVPHLTHLDLRHCEVELVAEGAFRGLGRLLLLNLASNHLRELPQEALDGLGSLRRLELEGNALEELRPGTFGALGALATLNLAHNALVYLPAMAFQGLLRVRWLRLSHNALSVLAPEALAGLPALRRLSLHHNELQALPGPVLSQARGLARLELGHNPLTYAGEEDGLALPGLRELLLDGGALQALGPRAFAHCPRLHTLDLRGNQLDTLPPLQGPGQLRRLRLQGNPLWCGCQARPLLEWLARARVRSDGACQGPRRLRGEALDALRPWDLRCPGDAAQEEEELEERAVAGPRAPPRGPPRGPGEERAVAPCPRACVCVPESRHSSCEGCGLQAVPRGFPSDTQLLDLRRNHFPSVPRAAFPGLGHLVSLHLQHCGIAELEAGALAGLGRLIYLYLSDNQLAGLSAAALEGAPRLGYLYLERNRFLQVPGAALRALPSLFSLHLQDNAVDRLAPGDLGRTRALRWVYLSGNRITEVSLGALGPARELEKLHLDRNQLREVPTGALEGLPALLELQLSGNPLRALRDGAFQPVGRSLQHLFLNSSGLEQICPGAFSGLGPGLQSLHLQKNQLRALPALPSLSQLELIDLSSNPFHCDCQLLPLHRWLTGLNLRVGATCATPPNARGQRVKAAAAVFEDCPGWAARKAKRTPASRPSARRTPIKGRQCGADKVGKEKGRL

SEQ ID NO: 2739 - protein, 253 aa, Homo Sapiens [sequence omitted]

SEQ ID NO: 2740 - protein, 684 aa, Homo Sapiens
  misc_feature (1)..(1): Xaa can be any naturally occurring amino acid
XPRSSTHVPLVLPLLVLLLLAPARQAAAQRCPQACICDNSRRHVACRYQNLTEVPDAIPELTQRLDLQGNLLKVIPAAAFQGVPHLTHLDLRHCEVELVAEGAFRGLGRLLLLNLASNHLRELPQEALDGLGSLRRLELEGNALEELRPGTFGALGALATLNLAHNALVYLPAMAFQGLLRVRWLRLSHNALSVLAPEALAGLPALRRLSLHHNELQALPGPVLSQARGLARLELGHNPLTYAGEEDGLALPGLRELLLDGGALQALGPRAFAHCPRLHTLDLRGNQLDTLPPLQGPGQLRRLRLQGNPLWCGCQARPLLEWLARARVRSDGACQGPRRLRGEALDALRPWDLRCPGDAAQEEEELEERAVAGPRAPPRGPPRGPGEERAVAPCPRACVCVPESRHSSCEGCGLQAVPRGFPSDTQLLDLRRNHFPSVPRAAFPGLGHLVSLHLQHCGIAELEAGALAGLGRLIYLYLSDNQLAGLSAAALEGAPRLGYLYLERNRFLQVPGAALRALPSLFSLHLQDNAVDRLAPGDLGRTRALRWVYLSGNRITEVSLGALGPARELEKLHLDRNQLREVPTGALEGLPALLELQLSGNPLRALRDGAFQPVGRSLQHLFLNSSGLEQICPGAFSGLGPGLQSLHLQKNQLRALPALPSARRTPIKGRQCGADKVGKEKGRL

SEQ ID NO: 2741 - protein, 57 aa, Homo Sapiens
FREVGPKNSYIAYIEDHSGNGTFVNTELVGKGKRRPLNNNSEIALSLSRNKVVPVER

SEQ ID NO: 2742 - protein, 137 aa, Homo Sapiens
MERLLYGIGACGEVKLAFERKTCKKVAIKIISKRKFAIGSAREADPALNVETEIEILKKLNHPCIIKIKNFFDAEDYYIVLELMEGGELFDKVVGNKRLKEATCKLYFYQMLLAVQYLHENGIIHRDLKPENVLLSS

SEQ ID NO: 2743 - protein, 172 aa, Homo Sapiens
MLRLLTSMVVMSRESDVEAQQSHGSSACSQPHGSVTQSQGSSSQSQGISSSSTSTMPNSSQSSHSSSGTLSSLETVSTQELYSIPEDQEPEDQEPEEPTPAPWARLWALQDGFANLECVNDNYWFGRDKSCEYCFDEPLLKRTDKYRTYSKKHFRIFREVGPKNSYIAYIED

SEQ ID NO: 2744 - protein, 121 aa, Homo Sapiens
MSKTLGSGACGEVKLAFERKTCKKVAIKIISKRKFAIGSAREADPALNVETEIEILKKLNHPCIIKIKNFFDAEDYYIVLELMEGGELFDKVVGNKRLKEATCKLYFYQMLLAVQYLHENG

SEQ ID NO: 2745 - protein, 161 aa, Homo Sapiens
MSRESDVEAQQSHGSSACSQPHGSVTQSQGSSSQSQGISSSSTSTMPNSSQSSHSSSGTLSSLETVSTQELYSIPEDQEPEDQEPEEPTPAPWARLWALQDGFANLECVNDNYWFGRDKSCEYCFDEPLLKRTDKYRTYSKKHFRIFREENLSCPYRIWFK

SEQ ID NO: 2746 - protein, 165 aa, Homo Sapiens
MSRESDVEAQQSHGSSACSQPHGSVTQSQGSSSQSQGISSSSTSTMPNSSQSSHSSSGTLSSLETVSTQELYSIPEDQEPEDQEPEEPTPAPWARLWALQDGFANLECVNDNYWFGRDKSCEYCFDEPLLKRTDKYRTYSKKHFRIFREENLSCPYRIWFNFCLF

SEQ ID NO: 2747 - protein, 298 aa, Homo Sapiens
MSRESDVEAQQSHGSSACSQPHGSVTQSQGSSSQSQGISSSSTSTMPNSSQSSHSSSGTLSSLETVSTQELYSIPEDQEPEDQEPEEPTPAPWARLWALQDGFANLECVNDNYWFGRDKSCEYCFDEPLLKRTDKYRTYSKKHFRIFREENLSCPYRIWFNGACGEVKLAFERKTCKKVAIKIISKRKFAIGSAREADPALNVETEIEILKKLNHPCIIKIKNFFDAEDYYIVLELMEGGELFDKVVGNKRLKEATCKLYFYQMLLAVQYLHENGIIHRDLKPENVLLSSQEEDCLIK

SEQ ID NO: 2748 - protein, 207 aa, Homo Sapiens
MSRESDVEAQQSHGSSACSQPHGSVTQSQGSSSQSQGISSSSTSTMPNSSQSSHSSSGTLSSLETVSTQELYSIPEDQEPEDQEPEEPTPAPWARLWALQDGFANLECVNDNYWFGRDKSCEYCFDEPLLKRTDKYRTYSKKHFRIFREVGPKNSYIAYIEDHSGNGTFVNTELVGKGKRRPLNNNSEIALSLSRNKEKILKIYSLS

SEQ ID NO: 2749 - protein, 207 aa, Homo Sapiens; identical to SEQ ID NO: 2748

SEQ ID NO: 2750 - protein, 514 aa, Homo Sapiens
MSRESDVEAQQSHGSSACSQPHGSVTQSQGSSSQSQGISSSSTSTMPNSSQSSHSSSGTLSSLETVSTQELYSIPEDQEPEDQEPEEPTPAPWARLWALQDGFANLECVNDNYWFGRDKSCEYCFDEPLLKRTDKYRTYSKKHFRIFREVGPKNSYIAYIEDHSGNGTFVNTELVGKGKRRPLNNNSEIALSLSRNKVFVFFDLTVDDQSVYPKALRDEYIMSKTLGSGACGEVKLAFERKTCKKVAIKIISKRKFAIGSAREADPALNVETEIEILKKLNHPCIIKIKNFFDAEDYYIVLELMEGGELFDKVVGNKRLKEATCKLYFYQMLLAVQITDFGHSKILGETSLMRTLCGTPTYLAPEVLVSVGTAGYNRAVDCWSLGVILFICLSGYPPFSEHRTQVSLKDQITSGKYNFIPEVWAEVSEKALDLVKKLLVVDPKARFTTEEALRHPWLQDEDMKRKFQDLLSEENESTALPQVLAQPSTSRKRPREGEAEGAETTKRPAVCAAVL

SEQ ID NO: 2751 - protein, 543 aa, Homo Sapiens
MSRESDVEAQQSHGSSACSQPHGSVTQSQGSSSQSQGISSSSTSTMPNSSQSSHSSSGTLSSLETVSTQELYSIPEDQEPEDQEPEEPTPAPWARLWALQDGFANLECVNDNYWFGRDKSCEYCFDEPLLKRTDKYRTYSKKHFRIFREVGPKNSYIAYIEDHSGNGTFVNTELVGKGKRRPLNNNSEIALSLSRNKVFVFFDLTVDDQSVYPKALRDEYIMSKTLGSGACGEVKLAFERKTCKKVAIKIISKRKFAIGSAREADPALNVETEIEILKKLNHPCIIKIKNFFDAEDYYIVLELMEGGELFDKVVGNKRLKEATCKLYFYQMLLAVQYLHENGIIHRDLKPENVLLSSQEEDCLIKITDFGHSKILGETSLMRTLCGTPTYLAPEVLVSVGTAGYNRAVDCWSLGVILFICLSGYPPFSEHRTQVSLKDQITSGKYNFIPEVWAEVSEKALDLVKKLLVVDPKARFTTEEALRHPWLQDEDMKRKFQDLLSEENESTALPQVLAQPSTSRKRPREGEAEGAETTKRPAVCAAVL

SEQ ID NO: 2752 - protein, 514 aa, Homo Sapiens; identical to SEQ ID NO: 2750

SEQ ID NO: 2753 - protein, 543 aa, Homo Sapiens; identical to SEQ ID NO: 2751

SEQ ID NO: 2754 - protein, 289 aa, Homo Sapiens
MSRESDVEAQQSHGSSACSQPHGSVTQSQGSSSQSQGISSSSTSTMPNSSQSSHSSSGTLSSLETVSTQELYSIPEDQEPEDQEPEEPTPAPWARLWALQDGFANLECVNDNYWFGRDKSCEYCFDEPLLKRTDKYRTYSKKHFRIFREVGPKNSYIAYIEDHSGNGTFVNTELVGKGKRRPLNNNSEIALSLSRNKVFVFFDLTVDDQSVYPKALRDEYIMSKTLGSGACGEVKLAFERKTCKKVAIKIISKRKFAIGSAREADPALNVETEIEILKKLNHDGRGRAV

SEQ ID NO: 2755 - protein, 543 aa, Homo Sapiens; identical to SEQ ID NO: 2751

SEQ ID NO: 2756 - protein, 203 aa, Homo Sapiens
MSRESDVEAQQSHGSSACSQPHGSVTQSQGSSSQSQGISSSSTSTMPNSSQSSHSSSGTLSSLETVSTQELYSIPEDQEPEDQEPEEPTPAPWARLWALQDGFANLECVNDNYWFGRDKSCEYCFDEPLLKRTDKYRTYSKKHFRIFREVGPKNSYIAYIEDHSGNGTFVNTELVGKGKRRPLNNNSEIALSLSRNKVVPVER

SEQ ID NO: 2757 - protein, 295 aa, Homo Sapiens
MSRESDVEAQQSHGSSACSQPHGSVTQSQGSSSQSQGISSSSTSTMPNSSQSSHSSSGTLSSLETVSTQELYSIPEDQEPEDQEPEEPTPAPWARLWALQDGFANLETESGHVTQSDLELLLSSDPPASASQSAGIRECVNDNYWFGRDKSCEYCFDEPLLKRTDKYRTYSKKHFRIFREVGPKNSYIAYIEDHSGNGTFVNTELVGKGKRRPLNNNSEIALSLSRNKVFVFFDLTVDDQSVYPKALRDEYIMSKTLGSGACGEVKLAFERKTCKKVAIKIISKRKFAIGSAREA

SEQ ID NO: 2758 - protein, 586 aa, Homo Sapiens
MSRESDVEAQQSHGSSACSQPHGSVTQSQGSSSQSQGISSSSTSTMPNSSQSSHSSSGTLSSLETVSTQELYSIPEDQEPEDQEPEEPTPAPWARLWALQDGFANLETESGHVTQSDLELLLSSDPPASASQSAGIRGVRHHPRPVCSLKCVNDNYWFGRDKSCEYCFDEPLLKRTDKYRTYSKKHFRIFREVGPKNSYIAYIEDHSGNGTFVNTELVGKGKRRPLNNNSEIALSLSRNKVFVFFDLTVDDQSVYPKALRDEYIMSKTLGSGACGEVKLAFERKTCKKVAIKIISKRKFAIGSAREADPALNVETEIEILKKLNHPCIIKIKNFFDAEDYYIVLELMEGGELFDKVVGNKRLKEATCKLYFYQMLLAVQYLHENGIIHRDLKPENVLLSSQEEDCLIKITDFGHSKILGETSLMRTLCGTPTYLAPEVLVSVGTAGYNRAVDCWSLGVILFICLSGYPPFSEHRTQVSLKDQITSGKYNFIPEVWAEVSEKALDLVKKLLVVDPKARFTTEEALRHPWLQDEDMKRKFQDLLSEENESTALPQVLAQPSTSRKRPREGEAEGAETTKRPAVCAAVL

SEQ ID NO: 2759 - protein, 452 aa, Homo Sapiens
MSRESDVEAQQSHGSSACSQPHGSVTQSQGSSSQSQGISSSSTSTMPNSSQSSHSSSGTLSSLETVSTQELYSIPEDQEPEDQEPEEPTPAPWARLWALQDGFANLVFVFFDLTVDDQSVYPKALRDEYIMSKTLGSGACGEVKLAFERKTCKKVAIKIISKRKFAIGSAREADPALNVETEIEILKKLNHPCIIKIKNFFDAEDYYIVLELMEGGELFDKVVGNKRLKEATCKLYFYQMLLAVQYLHENGIIHRDLKPENVLLSSQEEDCLIKITDFGHSKILGETSLMRTLCGTPTYLAPEVLVSVGTAGYNRAVDCWSLGVILFICLSGYPPFSEHRTQVSLKDQITSGKYNFIPEVWAEVSEKALDLVKKLLVVDPKARFTTEEALRHPWLQDEDMKRKFQDLLSEENESTALPQVLAQPSTSRKRPREGEAEGAETTKRPAVCAAVL

SEQ ID NO: 2760 - protein, 45 aa, Homo Sapiens
SSDPPASASQSAGIRGVRHHPRPVCSLIETGFHRVSQDGLHLLTS

SEQ ID NO: 2761 - protein, 276 aa, Homo Sapiens
  misc_feature (1)..(1): Xaa can be any naturally occurring amino acid
XIGSAREADPALNVETEIEILKKLNHPCIIKIKNFFDAEDYYIVLELMEGGELFDKVVGNKRLKEATCKLYFYQMLLAVQYLHENGIIHRDLKPENVLLSSQEEDCLIKITDFGHSKILGETSLMRTLCGTPTYLAPEVLVSVGTAGYNRAVDCWSLGVILFIWTQVSLKDQITSGKYNFIPEVWAEVSEKALDLVKKLLVVDPKARFTTEEALRHPWLQDEDMKRKFQDLLSEENESTALPQVLAQPSTSRKRPREGEAEGAETTKRPAVCAAVL

SEQ ID NO: 2762 - protein, 144 aa, Homo Sapiens
  misc_feature (1)..(1): Xaa can be any naturally occurring amino acid
XIISKRKFAIGSAREADPALNVETEIEILKKLNHPCIIKIKNFFDAEDYYIVLELMEGGELFDKVVGNKRLKEATCKLYFYQMLLAVQDEDMKRKFQDLLSEENESTALPQVLAQPSTSRKRPREGEAEGAETTKRPAVCAAVL

SEQ ID NO: 2763 - protein, 38 aa, Homo Sapiens
MRSAAVLALLLCAGQVTALPVNSPMNKGDTEMNGSFPF

SEQ ID NO: 2764 - protein, 457 aa, Homo Sapiens
MRSAAVLALLLCAGQVTALPVNSPMNKGDTEVMKCIVEVISDTLSKPSPMPVSQECFETLRGDERILSILRHQNLLKELQDLALQGAKERAHQQKKHSGFEDELSEVLENQSSQAELKEAVEEPSSKDVMEKREDSKEAEKSGEATDGARPQALPEPMQESKAEGNNQAPGEEEEEEEEATNTHPPASLPSQKYPGPQAEGDSEGLSQGLVDREKGLSAEPGWQAKREEEEEEEEEAEAGEEAVPEEEGPTVVLNPHPSLGYKEIRKGESRSEALAVDGAGKPGAEEAQDPEGKGEQEHSQQKEEEEEMAVVPQGLFRGGKSGELEQEEERLSKEWEDSKRWSKMDQLAKELTAEKRLEGQEEEEDNRDSSMKLSFRARAYGFRGPGPQLRRGWRPSSREDSLEAGLPLQVRGYPEEKKEEEGSANRRPEDQELESLSAIEAELEKVAHQLQALRRG

SEQ ID NO: 2765 - protein, 306 aa, Homo Sapiens
MRSAAVLALLLCAGQVTALPVNSPMNKGDTEVMKCIVEVISDTLSKPSPMPVSQECFETLRGDERILSILRHQNLLKELQDLALQGAKERAHQQKKHSGFEDELSEVLENQSSQAELKGRSEALAVDGAGKPGAEEAQDPEGKGEQEHSQQKEEEEEMAVVPQGLFRGGKSGELEQEEERLSKEWEDSKRWSKMDQLAKELTAEKRLEGQEEEEDNRDSSMKLSFRARAYGFRGPGPQLRRGWRPSSREDSLEAGLPLQVRGYPEEKKEEEGSANRRPEDQELESLSAIEAELEKVAHQLQALRRG

SEQ ID NO: 2766 - protein, 289 aa, Homo Sapiens
MPVDNRNHNEGMVTRCIIEVLSNALSKSSAPPITPECRQVLKTSRKDVKDKETTENENTKFEVRLLRDPADASEAHESSSRGEAGAPGEEDIQGPTKADTEKWAEGGGHSRERADEPQWSLYPSDSQVSEEVKTRHSEKSQREDEEEEEGENYQKGERGEDSSEEKHLEEPGETQNAFLNERKQASAIKKEELVARSETHAAGHSQEKTHSREKSSQESGEETGSQENHPQESKGQPRSQEESEEGEEDATSEVDKRRTRPRHHHGRSRPDRSSQGGSLPSEEKGHPQE

SEQ ID NO: 2767 - protein, 677 aa, Homo Sapiens
MQPTLLLSLLGAVGLAAVNSMPVDNRNHNEGMVTRCIIEVLSNALSKSSAPPITPECRQVLKTSRKDVKDKETTENENTKFEVRLLRDPADASEAHESSSRGEAGAPGEEDIQGPTKADTEKWAEGGGHSRERADEPQWSLYPSDSQVSEEVKTRHSEKSQREDEEEEEGENYQKGERGEDSSEEKHLEEPGETQNAFLNERKQASAIKKEELVARSETHAAGHSQEKTHSREKSSQESGEETGSQENHPQESKGQPRSQEESEEGEEDATSEVDKRRTRPRHHHGRSRPDRSSQGGSLPSEEKGHPQEESEESNVSMASLGEKRDHHSTHYRASEEEPEYGEEIKGYPGVQAPEDLEWERYRGRGSEEYRAPRPQSEESWDEEDKRNYPSLELDKMAHGYGEESEEERGLEPGKGRHHRGRGGEPRAYFMSDTREEKRFLGEGHHRVQENQMDKARRHPQGAWKELDRNYLNYGEEGAPGKWQQQGDLQDTKENREEARFQDKQYSSHHTAEKRKRLGELFNPYYDPLQWKSSHFERRDNMNDNFLEGEEENELTLNEKNFFPEYNYDWWEKKPFSEDVNWGYEKRNLARVPKLDLKRQYDRVAQLDQLLHYRKKSAEFPDFYDSEEPVSTHQEAENEKDRADQTVLTEDEKKELENLAAMDLELQKIAEKFSQRG

SEQ ID NO: 2768 - protein, 383 aa, Homo Sapiens
MGVKASQTGFVVLVLLQCCSAYKLVCYYTSWSQYREGDGSCFPDALDRFLCTHIIYSFANISNDHIDTWEWNDVTLYGMLNTLKNRNPNLKTLLSVGGWNFGSQRFSKIASNTQSRRTFIKSVPPFLRTHGFDGLDLAWLYPGRRDKQHFTTLIKEMKAEFIKEAQPGKKQLLLSAALSAGKVTIDSSYDIAKISQHLDFISIMTYDFHGAWRGTTGHHSPLFRGQEDASPDRFSNTDYAVGYMLRLGAPASKLVMGIPTFGRSFTLASSETGVGAPISGPGIPGRFTKEAGTLAYYEICDFLRGATVHRILGQQVPYATKGNQWVGYDDQESVKSKVQYLKDRQLAGAMVWALDLDDFQGSFCGQDLRFPLTNAIKDALAAT

SEQ ID NO: 2769 - protein, 152 aa, Homo Sapiens
  misc_feature (1)..(1): Xaa can be any naturally occurring amino acid
XLLLSAALSAGKVTIDSSYDIAKISQHLDFISIMTYDFHGAWRGTTGHHSPLFRGQEDASPDRFSNTICDFLRGATVHRILGQQVPYATKGNQWVGYDDQESVKSKVQYLKDRQLAGAMVWALDLDDFQGSFCGQDLRFPLTNAIKDALAAT

SEQ ID NO: 2770 - protein, 380 aa, Homo Sapiens
MGATTMDQKSLWAGSAYKLVCYFTNWSQDRQEPGKFTPENIDPFLCSHLIYSFASIENNKVIIKDKSEVMLYQTINSLKTKNPKLKILLSIGGYLFGSKGFHPMVDSSTSRLEFINSIILFLRNHNFDGLDVSWIYPDQKENTHFTVLIHELAEAFQKDFTKSTKERLLLTAGVSAGRQMIDNSYQVEKLAKDLDFINLLSFDFHGSWEKPLITGHNSPLSKGWQDRGPSSYYNVEYAVGYWIHKGMPSEKVVMGIPTYGHSFTLASAETTVGAPASGPGAAGPITESSGFLAYYEICQFLKGAKITRLQDQQVPYAVKGNQWVGYDDVKSMETKVQFLKNLNLGGAMIWSIDMDDFTGKSCNQGPYPLVQAVKRSLGSL

SEQ ID NO: 2771 - protein, 182 aa, Homo Sapiens
MGATTMDQKSLWAGVVVLLLLQGGSAYKLVCYFTNWSQDRQEPGKFTPENIDPFLCSHLIYSFASIENNKVIIKDKSEVMLYQTINSLKTKNPKLKILLSIGGYLFGSKGFHPMVDSSTSRLEFINSIILFLRNHNFDGLDELAEAFQKDFTKSTKERLLLTAGVSAGRQMIDNSYQVEKLA

SEQ ID NO: 2772 - protein, 201 aa, Homo Sapiens
MGATTMDQKSLWAGVVVLLLLQGGSAYKLVCYFTNWSQDRQEPGKFTPENIDPFLCSHLIYSFASIENNKVIIKDKSEVMLYQTINSLKTKNPKLKILLSIGGYLFGSKGFHPMVDSSTSRLEFINSIILFLRNHNFDGLDVSWIYPDQKENTHFTVLIHELAEAFQKDFTKSTKERLLLTAGVSAGRQMIDNSYQVEKLA

SEQ ID NO: 2773 - protein, 221 aa, Homo Sapiens
MGATTMDQKSLWAGVVVLLLLQGGSAYKLVCYFTNWSQDRQEPGKFTPENIDPFLCSHLIYSFASIENNKVIIKDKSEVMLYQTINSLKTKNPKLKILLSIGGYLFGSKGFHPMVDSSTSRLEFINSIILFLRNHNFDGLDVSWIYPDQKENTHFTVLIHELAEAFQKDFTKSTKERLLLTAGVSAGRQMIDNSYQVEKLAKDLDFINLLSFDFHGSWEKP

SEQ ID NO: 2774 - protein, 390 aa, Homo Sapiens
MGATTMDQKSLWAGVVVLLLLQGGSAYKLVCYFTNWSQDRQEPGKFTPENIDPFLCSHLIYSFASIENNKVIIKDKSEVMLYQTINSLKTKNPKLKILLSIGGYLFGSKGFHPMVDSSTSRLEFINSIILFLRNHNFDGLDVSWIYPDQKENTHFTVLIHELAEAFQKDFTKSTKERLLLTAGVSAGRQMIDNSYQVEKLAKDLDFINLLSFDFHGSWEKPLITGHNSPLSKGWQDRGPSSYYNVEYAVGYWIHKGMPSEKVVMGIPTYGHSFTLASAETTVGAPASGPGAAGPITESSGFLAYYEICQFLKGAKITRLQDQQVPYAVKGNQWVGYDDVKSMETKVQFLKNLNLGGAMIWSIDMDDFTGKSCNQGPYPLVQAVKRSLGSL

SEQ ID NO: 2775 - protein, 390 aa, Homo Sapiens; identical to SEQ ID NO: 2774

SEQ ID NO: 2776 - protein, 145 aa, Homo Sapiens
MLYQTINSLKTKFHPMVDSSTSRLEFINSIILFLRNHNFDGLDVSWIYPDQKENTHFTVLIHELAEAFQKDFTKSTKERLLLTAGVSAGRQMIDNSYQVEKLAKDLDFINLLSFDFHGSWEKPLITGHNSPLSKGWQDRGPSSYY

SEQ ID NO: 2777 - protein, 122 aa, Homo Sapiens
MLYQTINSLKTKNPKLKILLSIGGYLFGSKGFHPMVDSSTSRLEFINSIILFLRNHNFDGLDVSWIYPDQKENTHFTVLIHELAEAFQKDFTKSTKERLLLTAGVSAGRQMIDNSYQVEKLA

SEQ ID NO: 2778 - protein, 169 aa, Homo Sapiens
MLYQTINSLKTKNPKLKILLSIGGYLFGSKGFHPMVDSSTSRLEFINSIILFLRNHNFDGLDVSWIYPDQKENTHFTVLIHELAEAFQKDFTKSTKERLLLTAGVSAGRQMIDNSYQVEKLAKDLDFINLLSFDFHGSWEKPLITGHNSPLSKGWQDRGPSSYYNVEYA

SEQ ID NO: 2779 - protein, 311 aa, Homo Sapiens
MLYQTINSLKTKNPKLKILLSIGGYLFGSKGFHPMVDSSTSRLEFINSIILFLRNHNFDGLDVSWIYPDQKENTHFTVLIHELAEAFQKDFTKSTKERLLLTAGVSAGRQMIDNSYQVEKLAKDLDFINLLSFDFHGSWEKPLITGHNSPLSKGWQDRGPSSYYNVEYAVGYWIHKGMPSEKVVMGIPTYGHSFTLASAETTVGAPASGPGAAGPITESSGFLAYYEICQFLKGAKITRLQDQQVPYAVKGNQWVGYDDVKSMETKVQFLKNLNLGGAMIWSIDMDDFTGKSCNQGPYPLVQAVKRSLGSL

SEQ ID NO: 2780 - protein, 311 aa, Homo Sapiens; identical to SEQ ID NO: 2779

SEQ ID NO: 2781 - protein, 183 aa, Homo Sapiens
PDQKENTHFTVLIHELAEAFQKDFTKSTKERLLLTAGVSAGRQMIDNSYQVEKLAKDLDFINLLSFDFHGSWEKPLITGHNSPLSKGWQDRGPSSYYNVICQFLKGAKITRLQDQQVPYAVKGNQWVGYDDVKSMETKVQFLKNLNLGGAMIWSIDMDDFTGKSCNQGPYPLVQAVKRSLGSL

SEQ ID NO: 2782 - protein, 161 aa, Homo Sapiens
  misc_feature (1)..(1): Xaa can be any naturally occurring amino acid
XFTNWSQDRQEPGKFTPENIDPFLCSHLIYSFASIENNKVIIKDKSEVMLYQTINSLKTKNPKLKILLSIGGYLFGSKGDLDFINLLSFDFHGSWEKPLITGHNSPLSKGWQDRGPSSYYNVEYAVGYWIHKGMPSEKVVMGIPTYGHSFTLASAETTVGA

SEQ ID NO: 2783 - protein, 42 aa, Homo Sapiens
YEICQFLKGAKITRLQDQQVPYAVKGNQWVGYDDVKSMETKD

SEQ ID NO: 2784 - protein, 420 aa, Homo Sapiens
ETSSSVHEQVADSGAQAVAFQSGGESSIVWNSQLKTLLAIGGWNFGTAPFTAMVSTPENRQTFITSVIKFLRQYEFDGLDFDWEYPGSRGSPPQDKHLFTVLVQEMREAFEQEAKQINKPRLMVTAAVAAGISNIQSGYEIPQLSQYLDYIHVMTYDLHGSWEGYTGENSPLYKYPTDTGSNAYLNVDYVMNYWKDNGAPAEKLIVGFPTYGHNFILSNPSNTGIGAPTSGAGPAGPYAKESGIWAYYEICTFLKNGATQGWDAPQEVPYAYQGNVWVGYDNIKSFDIKAQWLKHNKFGGAMVWAIDLDDFTGTFCNQGKFPLISTLKKALGLQSASCTAPAQPIEPITAAPSGSGNGSGSSSSGGSSGGSGFCAVRANGLYPVANNRNAFWHCVNGVTYQQNCQAGLVFDTSCDCCNWA

SEQ ID NO: 2785 - protein, 315 aa, Homo Sapiens
MREAFEQEAKQINKPRLMVTAAVAAGISNIQSGYEIPQLSQYLDYIHVMTYDLHGSWEGYTGENSPLYKYPTDTGSNAYLNVDYVMNYWKDNGAPAEKLIVGFPTYGHNFILSNPSNTGIGAPTSGAGPAGPYAKESGIWAYYEICTFLKNGATQGWDAPQEVPYAYQGNVWVGYDNIKSFDIKAQWLKHNKFGGAMVWAIDLDDFTGTFCNQGKFPLISTLKKALGLQSASCTAPAQPIEPITAAPSGSGNGSGSSSSGGSSGGSGFCAVRANGLYPVANNRNAFWHCVNGVTYQQNCQAGLVFDTSCDCCNWA

SEQ ID NO: 2786 - protein, 315 aa, Homo Sapiens; identical to SEQ ID NO: 2785

SEQ ID NO: 2787 - protein, 287 aa, Homo Sapiens
MREAFEQEAKQINKPRLMVTAAVAAGISNIQSGYEIPQLSQYLDYIHVMTYDLHGSWEGYTGENSPLYKYPTDTGSNAYLNVDYVMNYWKDNGAPAEKLIVGFPTYGHNFILSNPSNTGIGAPTSGAGPAGPYAKESGIWAYYEICTFLKNGATQGWDAPQEVPYAYQGNVWVGYDNIKSFDIKAQWLKHNKFGGAMVWAIDLDDFTGTFCNQGKFPLISTLKKALGLQSASCTAPAQPIEPITAAPSGSGNGSGSSSSGGSSGGSGFCAVRANGLYPVANNRNAFW

SEQ ID NO: 2788 - protein, 315 aa, Homo Sapiens; identical to SEQ ID NO: 2785

SEQ ID NO: 2789 - protein, 476 aa, Homo Sapiens [sequence omitted]

SEQ ID NO: 2790 - protein, 476 aa, Homo Sapiens [sequence omitted]

SEQ ID NO: 2791 - protein, 368 aa, Homo Sapiens
MVSTPENRQTFITSVIKFLRQYEFDGLDFDWEYPGSRGSPPQDKHLFTVLVQEMREAFEQEAKQINKPRLMVTAAVAAGISNIQSGYEIPQLSQYLDYIHVMTYDLHGSWEGYTGENSPLYKYPTDTGSNAYLNVDYVMNYWKDNGAPAEKLIVGFPTYGHNFILSNPSNTGIGAPTSGAGPAGPYAKESGIWAYYEICTFLKNGATQGWDAPQEVPYAYQGNVWVGYDNIKSFDIKAQWLKHNKFGGAMVWAIDLDDFTGTFCNQGKFPLISTLKKALGLQSASCTAPAQPIEPITAAPSGSGNGSGSSSSGGSSGGSGFCAVRANGLYPVANNRNAFWHCVNGVTYQQNCQAGLVFDTSCDCCNWA

SEQ ID NO: 2792 - protein, 101 aa, Homo Sapiens
MVSTPENRQTFITSVIKFLRQYEFDGLDFDWEYPGSRGSPPQDKHLFTVLVQMRKLKYREDLSNLPKITQLVGIITSSAVWPQSPLLLSITLGCPLLLRNA

SEQ ID NO: 2793 - protein, 69 aa, Homo Sapiens
LKDHRPRMVWDSQASEHFFEYKKSRSGRHVVFYPTLKSLQVRLELARELGVGVSIWELGQGLDYFYDLL

SEQ ID NO: 2794 - protein, 26 aa, Homo Sapiens
MRTLFNLLWLALACSPVHTTLSKSDA

SEQ ID NO: 2795 - protein, 84 aa, Homo Sapiens
MRTLFNLLWLALACSPVHTTLSKSDAKKAASKTLLEKAGAQWRDLGSPQPLPPRFKRFSCFSLPSSWDYRVSFQISRCKTGVWW

SEQ ID NO: 2796 - protein, 84 aa, Homo Sapiens
MRTLFNLLWLALACSPVHTTLSKSDAKKAASKTLLEKSQFSDKPVQDRGLVVTDLKAESVVLEHRSYCSAKARDRHFAGDVLGY

SEQ ID NO: 2797 - protein, 116 aa, Homo Sapiens
MRTLFNLLWLALACSPVHTTLSKSDAKKAASKTLLEKSQFSDKPVQDRGLVVTDLKAESVVLEHRSYCSAKARDRHFAGDVLGYVTPWNSHGYDVTKVFGSKFTQISPVWLQLKRR

SEQ ID NO: 2798 - protein, 119 aa, Homo Sapiens
MRTLFNLLWLALACSPVHTTLSKSDAKKAASKTLLEKSQFSDKPVQDRGLVVTDLKAESVVLEHRSYCSAKARDRHFAGDVLGYVTPWNSHGYDVTKVFGSKFTQISPVWLQLKRRGRE

SEQ ID NO: 2799 - protein, 224 aa, Homo Sapiens
MRTLFNLLWLALACSPVHTTLSKSDAKKAASKTLLEKSQFSDKPVQDRGLVVTDLKAESVVLEHRSYCSAKARDRHFAGDVLGYVTPWNSHGYDVTKVFGSKFTQISPVWLQLKRRGREMFEARLLALLVIPPAITPGTDQLGMFTHKEFEQLAPVLDGFSLMTYDYSTAHQPGPNAPLSWVRACVQVLDPKSKWRSKILLGLNFYGMDYATSKDAREPVVGAR

SEQ ID NO: 2800 - protein, 132 aa, Homo Sapiens
MRTLFNLLWLALACSPVHTTLSKSDAKKAASKTLLEKSQFSDKPVQDRGLVVTDLKAESVVLEHRSYCSAKARDRHFAGDVLGYVTPWNSHGYDVTKVFGSKFTQISPVWLQLKRRGREMFEVTGLHDVDQG

SEQ ID NO: 2801 - protein, 162 aa, Homo Sapiens
MRTLFNLLWLALACSPVHTTLSKSDAKKAASKTLLEKSQFSDKPVQDRGLVVTDLKAESVVLEHRSYCSAKARDRHFAGDVLGYVTPWNSHGYDVTKVFGSKFTQISPVWLQLKRRGREMFEVTGLHDVDQGSHPSCLTVLAPQAEKSGGCELSGSMPRACT

SEQ ID NO: 2802 - protein, 393 aa, Homo Sapiens
MRTLFNLLWLALACSPVHTTLSKSDAKKAASKTLLEKSQFSDKPVQDRGLVVTDLKAESVVLEHRSYCSAKARDRHFAGDVLGYVTPWNSHGYDVTKVFGSKFTQISPVWLQLKRRGREMFEVTGLHDVDQGWMRAVRKHAKGLHIVPRLLFEDWTYDDFRNVLDSEDEIEELSKTVVQVAKNQHFDGFVVEVWNQLLSQKRVGLIHMLTHLAEALHQARLLALLVIPPAITPGTDQLGMFTHKEFEQLAPVLDGFSLMTYDYSTAHQPGPNAPLSWVRACVQVLDPKSKWRSKILLGLNFYGMDYATSKDAREPVVGARYIQTLKDHRPRMVWDSQASEHFFEYKKSRSGRHVVFYPTLKSLQVRLELARELGVGVSIWELGQGLDYFYDLL

SEQ ID NO: 2803 - protein, 393 aa, Homo Sapiens; identical to SEQ ID NO: 2802

SEQ ID NO: 2804 - protein, 393 aa, Homo Sapiens; identical to SEQ ID NO: 2802

SEQ ID NO: 2805 - protein, 362 aa, Homo Sapiens
MRTLFNLLWLALACSPVHTTLSKSDAKKAASKTLLEKSQFSDKPVQDRGLVVTDLKAESVVLEHRSYCSAKARDRHFAGDVLGYVTPWNSHGYDVTKVFGSKFTQISPVWLQLKRRGREMFEVTGLHDVDQGWMRAVRKHAKGLHIVPRLLFEDWTYDDFRNVLDSEDEIEELSKTVVQVAKNQHFDGFVVEVWNQLLSQKRVTDQLGMFTHKEFEQLAPVLDGFSLMTYDYSTAHQPGPNAPLSWVRACVQVLDPKSKWRSKILLGLNFYGMDYATSKDAREPVVGARYIQTLKDHRPRMVWDSQASEHFFEYKKSRSGRHVVFYPTLKSLQVRLELARELGVGVSIWELGQGLDYFYDLL

SEQ ID NO: 2806 - protein, 38 aa, Homo Sapiens
MRTLFNLLWLALACSPVHTTLSKSDAKKAASKTLLEKV

SEQ ID NO: 2807 - protein, 418 aa, Homo Sapiens
MRTLFNLLWLALACSPVHTTLSKSDAKKAASKTLLEKVKFCSCCPGWSAMARSWLTATSATQSQFSDKPVQDRGLVVTDLKAESVVLEHRSYCSAKARDRHFAGDVLGYVTPWNSHGYDVTKVFGSKFTQISPVWLQLKRRGREMFEVTGLHDVDQGWMRAVRKHAKGLHIVPRLLFEDWTYDDFRNVLDSEDEIEELSKTVVQVAKNQHFDGFVVEVWNQLLSQKRVGLIHMLTHLAEALHQARLLALLVIPPAITPGTDQLGMFTHKEFEQLAPVLDGFSLMTYDYSTAHQPGPNAPLSWVRACVQVLDPKSKWRSKILLGLNFYGMDYATSKDAREPVVGARYIQTLKDHRPRMVWDSQASEHFFEYKKSRSGRHVVFYPTLKSLQVRLELARELGVGVSIWELGQGLDYFYDLL

SEQ ID NO: 2808 - protein, 418 aa, Homo Sapiens; identical to SEQ ID NO: 2807

SEQ ID NO: 2809 - protein, 84 aa, Homo Sapiens
  misc_feature (1)..(1): Xaa can be any naturally occurring amino acid
XDAREPVVGARYIQTLKDHRPRMVWDSQASEHFFEYKKSRSGRHVVFYPTLKSLQVRLELARELGVGVSIWELGQGLDYFYDLL

SEQ ID NO: 2810 - protein, 108 aa, Homo Sapiens
  misc_feature (1)..(1): Xaa can be any naturally occurring amino acid
XPKSKWRSKILLGLNFYGMDYATSKDAREPVVGARYIQTLKDHRPRMVWDSQASEHFFEYKKSRSGRHVVFYPTLKSLQVRLELARELGVGVSIWELGQGLDYFYDLL

SEQ ID NO: 2811 - protein, 72 aa, Homo Sapiens
  misc_feature (1)..(1): Xaa can be any naturally occurring amino acid
XQLGMFTHKEFEQLAPVLDGFSLMTYDYSTAHQPGPNAPLSWVRACVQVLDPKSKWRSKILLGLNFYGTSRH

SEQ ID NO: 2812 - protein, 447 aa, Homo Sapiens
MVRSVAWAGFMVLLMIPWGSAAKLVCYFTNWAQYRQGEARFLPKDLDPSLCTHLIYAFAGMTNHQLSTTEWNDETLYQEFNGLKKMFTDMVATANNRQTFVNSAIRFLRKYSFDGLDLDWEYPGSQGSPAVDKERFTTLVQDLANAFQQEAQTSGKERLLLSAAVPAGQTYVDAGYEVDKIAQNLDFVNLMAYDFHGSWEKVTGHNSPLYKRQEESGAAASLNVDAAVQQWLQKGTPASKLILGMPTYGRSFTLASSSDTRVGAPATGSGTPGPFTKEGGMLAYYEVCSWKGATKQRIQDQKVPYIFRDNQWVGFDDVESFKTKVSYLKQKGLGGAMVWALDLDDFAGFSCNQGRYPLIQTLRQELSLPYLPSGTPELEVPKPGQPSEPEHGPSPGQDTFCQGKADGLYPNPRERSSFYSCAAGRLFQQSCPTGLVFSNSCKCCTWN

SEQ ID NO: 2813 - protein, 466 aa, Homo Sapiens
MVRSVAWAGFMVLLMIPWGSAAKLVCYFTNWAQYRQGEARFLPKDLDPSLCTHLIYAFAGMTNHQLSTTEWNDETLYQEFNGLKKMNPKLKTLLAIGGWNFGTQKFTDMVATANNRQTFVNSAIRFLRKYSFDGLDLDWEYPGSQGSPAVDKERFTTLVQDLANAFQQEAQTSGKERLLLSAAVPAGQTYVDAGYEVDKIAQNLDFVNLMAYDFHGSWEKVTGHNSPLYKRQEESGAAASLNVDAAVQQWLQKGTPASKLILGMPTYGRSFTLASSSDTRVGAPATGSGTPGPFTKEGGMLAYYEVCSWKGATKQRIQDQKVPYIFRDNQWVGFDDVESFKTKVSYLKQKGLGGAMVWALDLDDFAGFSCNQGRYPLIQTLRQELSLPYLPSGTPELEVPKPGQPSEPEHGPSPGQDTFCQGKADGLYPNPRERSSFYSCAAGRLFQQSCPTGLVFSNSCKCCTWN

SEQ ID NO: 2814 - protein, 387 aa, Homo Sapiens
MVRSVAWAGFMVLLMIPWGSAAKLVCYFTNWAQYRQGEARFLPKDLDPSLCTHLIYAFAGMTNHQLSTTEWNDETLYQEFNGLKKMNPKLKTLLAIGGWNFGTQKFTDMVATANNRQTFVNSAIRFLRKYSFDGLDLDWEYPGSQGSPAVDKERFTTLVQDLANAFQQEAQTSGKERLLLSAAVPAGQTYVDAGYEVDKIAQNLDFVNLMAYDFHGSWEKVTGHNSPLYKRQEESGAAASLNVDAAVQQWLQKGTPASKLILGMPTYGRSFTLASSSDTRVGAPATGSGTPGPFTKEGGMLAYYEVCSWKGATKQRIQDQKVPYIFRDNQWVGFDDVESFKTKVSYLKQKGLGGAMVWALDLDDFAGFSCNQGRYPLIQTLRQELNG

SEQ ID NO: 2815 - protein, 361 aa, Homo Sapiens
MVRSVAWAGFMVLLMIPWGSAAKLVCYFTNWAQYRQGEARFLPKDLDPSLCTHLIYAFAGMTNHQLSTTEWNDETLYQEFNGLKKMNPKLKTLLAIGGWNFGTQKFTDMVATANNRQTFVNSAIRFLRKYSFDGLDLDWEYPGSQGSPAVDKERFTTLVQDLANAFQQEAQTSGKERLLLSAAVPAGQTYVDAGYEVDKIAQNLDFVNLMAYDFHGSWEKVTGHNSPLYKRQEESGAAASLNVDAAVQQWLQKGTPASKLILGMPTYGRSFTLASSSDTRVGAPATGSGTPGPFTKEGGMLAYYEVCSWKGATKQRIQDQKVPYIFRDNQWVGFDDVESFKTKVMLTLRQGDCKMTDVQAA

SEQ ID NO: 2816 - protein, 66 aa, Homo Sapiens
MEPLLLGRGLIVYLMFLLLKFSKAIEIPSSVQQVPTIIKQSKVQVAFPFDEYFQIECEAKGNPEPT

SEQ ID NO: 2817 - protein, 85 aa, Homo Sapiens
MEPLLLGRGLIVYLMFLLLKFSKAIEIPSSVQQVPTIIKQSKVQVAFPFDEYFQIECEAKGNPEPTFSWTKDGNPFYFTDHRIIP

SEQ ID NO: 2818 - protein, 96 aa, Homo Sapiens
MEPLLLGRGLIVYLMFLLLKFSKAIEIPSSVQQVPTIIKQSKVQVAFPFDEYFQIECEAKGNPEPTFSWTKDGNPFYFTDHRIIPSNNSGTFRIPN

SEQ ID NO: 2819 - protein, 181 aa, Homo Sapiens
MEPLLLGRGLIVYLMFLLLKFSKAIEIPSSVQQVPTIIKQSKVQVAFPFDEYFQIECEAKGNPEPTFSWTKDGNPFYFTDHRIIPSNNSGTFRIPNEGHISHFQGKYRCFASNKLGIAMSEEIEFIVPSVPKFPKEKIDPLEVEEGDPIVLPCNPPKGLPPLHIYWMNIELEHIEQDERVY

SEQ ID NO: 2820 - protein, 1224 aa, Homo Sapiens
MEPLLLGRGLIVYLMFLLLKFSKAIEIPSSVQQVPTIIKQSKVQVAFPFDEYFQIECEAKGNPEPTFSWTKDGNPFYFTDHRIIPSNNSGTFRIPNEGHISHFQGKYRCFASNKLGIAMSEEIEFIVPSVPKFPKEKIDPLEVEEGDPIVLPCNPPKGLPPLHIYWMNIELEHIEQDERVYMSQKGDLYFANVEEKDSRNDYCCFAAFPRLRTIVQKMPMKLTVNSLKHANDSSSSTEIGSKANSIKQRKPKLLLPPTESGSESSITILKGEILLLECFAEGLPTPQVDWNKIGGDLPKGRETKENYGKTLKIENVSYQDKGNYRCTASNFLGTATHDFHVIVEEPPRWTKKPQSAVYSTGSNGILLCEAEGEPQPTIKWRVNGSPVDNHPFAGDVVFPREISFTNLQPNHTAVYQCEASNVHGTILANANIDVVDVRPLIQTKDGENYATVVGYSAFLHCEFFASPEAVVSWQKVEEVKPLEGRRYHIYENGTLQINRTTEEDAGSYSCWVENAIGKTAVTANLDIRNATKLRVSPKNPRIPKLHMLELHCESKCDSHLKHSLKLSWSKDGEAFEINGTEDGRIIIDGANLTISNVTLEDQGIYCCSAHTALDSAADITQVTVLDVPDPPENLHLSERQNRSVRLTWEAGADHNSNISEYIVEFEGNKEEPGRWEELTRVQGKKTTVILPLAPFVRYQFRVIAVNEVGRSQPSQPSDHHETPPAAPDRNPQNIRVQASQPKEMIIKWEPLKSMEQNGPGLEYRVTWKPQGAPVEWEEETVTNHTLRVMTPAVYAPYDVKVQAINQLGSGPDPQSVTLYSGEDYPDTAPVIHGVDVINSTLVKVTWSTVPKDRVHGRLKGYQINWWKTKSLLDGRTHPKEVNILRFSGQRNSGMVPSLDAFSEFHLTVLAYNSKGAGPESEPYIFQTPEGVPEQPTFLKVIKVDKDTATLSWGLPKKLNGNLTGYLLQYQIINDTYEIGELNDINITTPSKPSWHLSNLNATTKYKFYLRACTSQGCGKPITEESSTLGEGSKGIGKISGVNLTQKTHPIEVFEPGAEHIVRLMTKNWGDNDSIFQDVIETRGREYAGLYDDISTQGWFIGLMCAIALLTLLLLTVCFVKRNRGGKYSVKEKEDLHPDPEIQSVKDETFGEYSDSDEKPLKGSLRSLNRDMQPTESADSLVEYGEGDHGLFSEDGSFIGAYAGSKEKGSVESNGSSTATFPLRA

SEQ ID NO: 2821 - protein, 1171 aa, Homo Sapiens
MEPLLLGRGLIVYLMFLLLKFSKAIEIPSSVQQVPTIIKQSKVQVAFPFDEYFQIECEAKGNPEPTFSWTKDGNPFYFTDHRIIPSNNSGTFRIPNEGHISHFQGKYRCFASNKLGIAMSEEIEFIVPSVPKFPKEKIDPLEVEEGDPIVLPCNPPKGLPPLHIYWMNIELEHIEQDERVYMSQKGDLYFANVEEKDSRNDYCCFAAFPRLRTIVQKMPMKLTVNSLKHANDSSSSTEIGSKANSIKQRKPKLLLPPTESGSESSITILKGEILLLECFAEGLPTPQVDWNKIGGDLPKGRETKENYGKTLKIENVSYQDKGNYRCTASNFLGTATHDFHVIVEEPPRWTKKPQSAVYSTGSNGILLCEAEGEPQPTIKWRVNGSPVDNHPFAGDVVFPREISFTNLQPNHTAVYQCEASNVHGTILANANIDVVDVRPLIQTKDGENYATVVGYSAFLHCEFFASPEAVVSWQKVEEVKPLEGRRYHIYENGTLQINRTTEEDAGSYSCWVENAIGKTAVTANLDIRNATKLRVSPKNPRIPKLHMLELHCESKCDSHLKHSLKLSWSKDGEAFEINGTEDGRIIIDGANLTISNVTLEDQGIYCCSAHTALDSAADITQVTVLDVPDPPENLHLSERQNRSVRLTWEAGADHNSNISEYIVEFEGNKEEPGRWEELTRVQGKKTTVILPLAPFVRYQFRVIAVNEVGRSQPSQPSDHHETPPAAPDRNPQNIRVQASQPKEMIIKWEPLKSMEQNGPGLEYRVTWKPQGAPVEWEEETVTNHTLRVMTPAVYAPYDVKVQAINQLGSGPDPQSVTLYSGEDYPDTAPVIHGVDVINSTLVKVTWSTVPKDRVHGRLKGYQINWWKTKSLLDGRTHPKEVNILRFSGQRNSGMVPSLDAFSEFHLTVLAYNSKGAGPESEPYIFQTPEGVPEQPTFLKVIKVDKDTATLSWGLPKKLNGNLTGYLLQYQIINDTYEIGELNDINITTPSKPSWHLSNLNATTKYKFYLRACTSQGCGKPITEESSTLGEGKYAGLYDDISTQGWFIGLMCAIALLTLLLLTVCFVKRNRGGKYSVKEKEDLHPDPEIQSVKDETFGEYSDSDEKPLKGSLRSLNRDMQPTESADSLVEYGEGDHGLFSEDGSFIGAYAGSKEKGSVESNGSSTATFPLRA

SEQ ID NO: 2822 - protein, 1208 aa, Homo Sapiens
MEPLLLGRGLIVYLMFLLLKFSKAIEIPSSVQQVPTIIKQSKVQVAFPFDEYFQIECEAKGNPEPTFSWTKDGNPFYFTDHRIIPSNNSGTFRIPNEGHISHFQGKYRCFASNKLGIAMSEEIEFIVPSVPKFPKEKIDPLEVEEGDPIVLPCNPPKGLPPLHIYWMNIELEHIEQDERVYMSQKGDLYFANVEEKDSRNDYCCFAAFPRLRTIVQKMPMKLTVNSSNSIKQRKPKLLLPPTESGSESSITILKGEILLLECFAEGLPTPQVDWNKIGGDLPKGRETKENYGKTLKIENVSYQDKGNYRCTASNFLGTATHDFHVIVEEPPRWTKKPQSAVYSTGSNGILLCEAEGEPQPTIKWRVNGSPVDNHPFAGDVVFPREISFTNLQPNHTAVYQCEASNVHGTILANANIDVVDVRPLIQTKDGENYATVVGYSAFLHCEFFASPEAVVSWQKVEEVKPLEGRRYHIYENGTLQINRTTEEDAGSYSCWVENAIGKTAVTANLDIRNATKLRVSPKNPRIPKLHMLELHCESKCDSHLKHSLKLSWSKDGEAFEINGTEDGRIIIDGANLTISNVTLEDQGIYCCSAHTALDSAADITQVTVLDVPDPPENLHLSERQNRSVRLTWEAGADHNSNISEYIVEFEGNKEEPGRWEELTRVQGKKTTVILPLAPFVRYQFRVIAVNEVGRSQPSQPSDHHETPPAAPDRNPQNIRVQASQPKEMIIKWEPLKSMEQNGPGLEYRVTWKPQGAPVEWEEETVTNHTLRVMTPAVYAPYDVKVQAINQLGSGPDPQSVTLYSGEDYPDTAPVIHGVDVINSTLVKVTWSTVPKDRVHGRLKGYQINWWKTKSLLDGRTHPKEVNILRFSGQRNSGMVPSLDAFSEFHLTVLAYNSKGAGPESEPYIFQTPEGVPEQPTFLKVIKVDKDTATLSWGLPKKLNGNLTGYLLQYQIINDTYEIGELNDINITTPSKPSWHLSNLNATTKYKFYLRACTSQGCGKPITEESSTLGEGSKGIGKISGVNLTQKTHPIEVFEPGAEHIVRLMTKNWGDNDSIFQDVIETRGREYAGLYDDISTQGWFIGLMCAIALLTLLLLTVCFVKRNRGGKYSVKEKEDLHPDPEIQSVKDETFGEYSDSDEKPLKGSLRSLNRDMQPTESADSLVEYGEGDHGLFSEDGSFIGAYAGSKEKGSVESNGSSTATFPLRA

SEQ ID NO: 2823 - protein, 93 aa, Homo Sapiens
MPPAWSGESMDRGVVGLGSTKTQRGARAPPPQTAEGREGAPGAVVAMAPGSGARGAGDAGRGWSLLPLCASLFLSLFFFFWSVSVRGEAARRK

SEQ ID NO: 2824 - protein, 358 aa, Homo Sapiens
  misc_feature (1)..(1): Xaa can be any naturally occurring amino acid
XSVTLYSGEDYPDTAPVIHGVDVINSTLVKVTWSTVPKDRVHGRLKGYQINWWKTKSLLDGRTHPKEVNILRFSGQRNSGMVPSLDAFSEFHLTVLAYNSKGAGPESEPYIFQTPEGVPEQPTFLKVIKVDKDTATLSWGLPKKLNGNLTGYLLQYQIINDTYEIGELNDINITTPSKPSWHLSNLNATTKYKFYLRACTSQGCGKPITEESSTLGEGKYAGLYDDISTQGWFIGLMCAIALLTLLLLTVCFVKRNRGGKYSVKEKEDLHPDPEIQSVKDETFGEYSDSDEKPLKGSLRSLNRDMQPTESADSLVEYGEGDHGLFSEDGSFIGAYAGSKEKGSVESNGSSTATFPLRA

SEQ ID NO: 2825 - protein, 23 aa, Homo Sapiens
MALTLFDTDEYRPPVWKSYCFMA

SEQ ID NO: 2826 - protein, 459 aa, Homo Sapiens
MALTLFDTDEYRPPVWKSYLYQLQQEAPHPRRITCTCEVENRPKYYGREFHGMISREAADQLLIVAEGSYLIRESQRQPGTYTLALRFGSQTRNFRLYYDGKHFVGEKRFESIHDLVTDGLITLYIETKAAEYIAKMTINPIYEHVGYTTLNREPAYKKHMPVLKETHDERDSTGQDGVSEKRLTSLVRRATLKENEQIPKYEKIHNFKVHTFRGPHWCEYCANFMWGLIAQGVKCADCGLNVHKQCSKMVPNDCKPDLKHVKKVYSCDLTTLVKAHTTKRPMVVDMCIREIESRGLNSEGLYRVSGFSDLIEDVKMAFDRDGEKADISVNMYEDINIITGALKLYFRDLPIPLITYDAYPKFIESAKIMDPDEQLETLHEALKLLPPAHCETLRYLMAHLKRVTLHEKENLMNAENLGIVFGPTLMRSPELDAMAALNDIRYQRLVVELLIKNEDILF

SEQ ID NO: 2827 - protein, 433 aa, Homo Sapiens
MALTLFDTDEYRPPVWKSYLYQLQQEAPHPRRITCTCEVENRPKYYGREFHGMISREAADQLLIVAEGSYLIRESQRQPGTYTLALRFGSQTRNFRLYYDGKHFVGEKRFESIHDLVTDGLITLYIETKAAEYIAKMTINPIYEHVGYTTLNREPAYKKHMPVLKETHDERDSTGQDGVSEKRVHTFRGPHWCEYCANFMWGLIAQGVKCADCGLNVHKQCSKMVPNDCKPDLKHVKKVYSCDLTTLVKAHTTKRPMVVDMCIREIESRGLNSEGLYRVSGFSDLIEDVKMAFDRDGEKADISVNMYEDINIITGALKLYFRDLPIPLITYDAYPKFIESAKIMDPDEQLETLHEALKLLPPAHCETLRYLMAHLKRVTLHEKENLMNAENLGIVFGPTLMRSPELDAMAALNDIRYQRLVVELLIKNEDILF

SEQ ID NO: 2828 - protein, 22 aa, Homo Sapiens
MALTLFDTDEYRPPVWKSYYIL

SEQ ID NO: 2829 - protein, 185 aa, Homo Sapiens
MATMGLLMLLTLAASPHFLSICFHHVCVHTFRGPHWCEYCANFMWGLIAQGVKCADCGLNVHKQCSKMVPNDCKPDLKHVKKVYSCDLTTLVKAHTTKRPMVVDMCIREIESRGLNSEGLYRVSGFSDLIEDVKMAFDRDGEKADISVNMYEDINIITGALKLYFRDLPIPLITYDAYPKFIESA

SEQ ID NO: 2830 - protein, 275 aa, Homo Sapiens
MATMGLLMLLTLAASPHFLSICFHHVHTFRGPHWCEYCANFMWGLIAQGVKCADCGLNVHKQCSKMVPNDCKPDLKHVKKVYSCDLTTLVKAHTTKRPMVVDMCIREIESRGLNSEGLYRVSGFSDLIEDVKMAFDRDGEKADISVNMYEDINIITGALKLYFRDLPIPLITYDAYPKFIESAKIMDPDEQLETLHEALKLLPPAHCETLRYLMAHLKRVTLHEKENLMNAENLGIVFGPTLMRSPELDAMAALNDIRYQRLVVELLIKNEDILF

SEQ ID NO: 2831 - protein, 334 aa, Homo Sapiens
MPSKESWSGRKTNRAAVHKSKQEGRQQDLLIAALGMKLGSPKSSVTIWQPLKLFAYSQLTSLVRRATLKENEQIPKYEKIHNFKVHTFRGPHWCEYCANFMWGLIAQGVKCADCGLNVHKQCSKMVPNDCKPDLKHVKKVYSCDLTTLVKAHTTKRPMVVDMCIREIESRGLNSEGLYRVSGFSDLIEDVKMAFDRDGEKADISVNMYEDINIITGALKLYFRDLPIPLITYDAYPKFIESAKIMDPDEQLETLHEALKLLPPAHCETLRYLMAHLKRVTLHEKENLMNAENLGIVFGPTLMRSPELDAMAALNDIRYQRLVVELLIKNEDILF

SEQ ID NO: 2832 - protein, 165 aa, Homo Sapiens
MPSKESWSGRKTNRAAVHKSKQEGRQQDLLIAALGMKLGSPKSSVTIWQPLKLFAYSQLTSLVRRATLKENEQIPKYEKIHNFKVHTFRGPHWCEYCANFMWGLIAQGVKCAVLEARKSKIKLAAGSVSDCGLNVHKQCSKMVPNDCKPDLKHVKKVYSCDLTTL

SEQ ID NO: 2833 - protein, 186 aa, Homo Sapiens
MRGGRNRDRLTSLVRRATLKENEQIPKYEKIHNFKVHTFRGPHWCEYCANFMWGLIAQGVKCADCGLNVHKQCSKMVPNDCKPDLKHVKKVYSCDLTTLVKAHTTKRPMVVDMCIREIESRGLNSEGLYRVSGFSDLIEDVKMAFDRDGEKADISVNMYEDINIITGALKLYFRDLPIPLITYDAY

SEQ ID NO: 2834 - protein, 173 aa, Homo Sapiens
MWGLIAQGVKCADCGLNVHKQCSKMVPNDCKPDLKHVKKVYSCDLTTLVKAHTTKRPMVVDMCIREIESRGLNSEGLYRVSGFSDLIEDVKMAFDRDGEKADISVNMYEDINIITGALKLYFRDLPIPLITYDAYPKFIESAKIMDPDEQLETLHEALKLLPPAHCETLRYLM

SEQ ID NO: 2835 - protein, 194 aa, Homo Sapiens
MWGLIAQGVKCAVLEARKSKIKLAAGSVSDCGLNVHKQCSKMVPNDCKPDLKHVKKVYSCDLTTLVKAHTTKRPMVVDMCIREIESRGLNSEGLYRVSGFSDLIEDVKMAFDRDGEKADISVNMYEDINIITGALKLYFRDLPIPLITYDAYPKFIESAKIMDPDEQLETLHEALKLLPPAHCETLRYLMAHLK

SEQ ID NO: 2836 - protein, 613 aa, Homo Sapiens
MAVVTLGEERPIGHLHLALRHLLEQHGDDFDWFFLVPDTTYTEAHGLARLTGHLSLASAAHLYLGRPQDFIGGEPTPGRYCHGGFGVLLSRMLLQQLRPHLEGCRNDIVSARPDEWLGRCILDATGVGCTGDHEGVHYSHLELSPGEPVQEGDPHFRSALTAHPVRDPVHMYQLHKAFARAELERTYQEIQELQWEIQNTSHLAVDGDQAAAWPVGIPAPSRPASRFEVLRWDYFTEQHAFSCADGSPRCPLRGADRADVADVLGTALEELNRRYHPALRLQKQQLVNGYRRFDPARGMEYTLDLQLEALTPQGGRRPLTRRVQLLRPLSRVEILPVPYVTEASRLTVLLPLAAAERDLAPGFLEAFATAALEPGDAAAALTLLLLYEPRQAQRVAHADVFAPVKAHVAELERRFPGARVPWLSVQTAAPSPLRLMDLLSKKHPLDTLFLLAGPDTVLTPDFLNRCRMHAISGWQAFFPMHFQAFHPAVAPPQGPGPPELGRDTGRFDRQAASEACFYNSDYVAARGRLAAASEQEEELLESLDVYELFLHFSSLHVLRAVEPALLQRYRAQTCSARLSEDLYHRCLQSVLEGLGSRTQLAMLLFEQEQGNST

SEQ ID NO: 2837 - protein, 775 aa, Homo Sapiens
MRASLLLSVLRPAGPVAVGISLGFTLSLLSVTWVEEPCGPGPPQPGDSELPPRGNTNAARRPNSVQPGAEREKPGAGEGAGENWEPRVLPYHPAQPGQAAKKAVRTRYISTELGIRQRLLVAVLTSQTTLPTLGVAVNRTLGHRLERVVFLTGARGRRAPPGMAVVTLGEERPIGHLHLALRHLLEQHGDDFDWFFLVPDTTYTEAHGLARLTGHLSLASAAHLYLGRPQDFIGGEPTPGRYCHGGFGVLLSRMLLQQLRPHLEGCRNDIVSARPDEWLGRCILDATGVGCTGDHEGVHYSHLELSPGEPVQEGDPHFRSALTAHPVRDPVHMYQLHKAFARAELERTYQEIQELQWEIQNTSHLAVDGDQAAAWPVGIPAPSRPASRFEVLRWDYFTEQHAFSCADGSPRCPLRGADRADVADVLGTALEELNRRYHPALRLQKQQLVNGYRRFDPARGMEYTLDLQLEALTPQGGRRPLTRRVQLLRPLSRVEILPVPYVTEASRLTVLLPLAAAERDLAPGFLEAFATAALEPGDAAAALTLLLLYEPRQAQRVAHADVFAPVKAHVAELERRFPGARVPWLSVQTAAPSPLRLMDLLSKKHPLDTLFLLAGPDTVLTPDFLNRCRMHAISGWQAFFPMHFQAFHPAVAPPQGPGPPELGRDTGRFDRQAASEACFYNSDYVAARGRLAAASEQEEELLESLDVYELFLHFSSLHVLRAVEPALLQRYRAQTCSARLSEDLYHRCLQSVLEGLGSRTQLAMLLFEQEQGNST

SEQ ID NO: 2838 - protein, 298 aa, Homo Sapiens
MRASLLLSVLRPAGPVAVGISLGFTLSLLSVTWVEEPCGPGPPQPGDSELPPRGNTNAARRPNSVQPGAEREKPGAGEGAGENWEPRVLPYHPAQPGQAAKKAVRTRYISTELGIRQRLLVAVLTSQTTLPTLGVAVNRTLGHRLERVVFLTGARGRRAPPGMAVVTLGEERPIGHLHLALRHLLEQHGDDFDWFFLVPDTTYTEAHGLARLTGHLSLASAAHLYLGRPQDFIGGEPTPGRYCHGGFGVLLSRMLLQQLRPHLEGCRNDIVSARPDEWLGRCILDATGVGCTGDHEVG

SEQ ID NO: 2839 - protein, 123 aa, Homo Sapiens
CHGGFGYLLSRSLLLRLRPHLDGCRGDILSARPDEWLGRCLIDSLGVGCVSQHQGQQYRSFELAKNRDPEKEGSSAFLSAFAVHPVSEGTLMYRLHKRFSALELERAYSEIEQLQNCPKKAQG

SEQ ID NO: 2840 - protein, 90 aa, Homo Sapiens
MLSLARPPLPPTGLRTRTRYIQTELGSRERLLVAVLTSRATLSTLAVAVNRTVAHHFPRLLYFTGQRGARAPAGMQVVSHGDERPAWLMS

SEQ ID NO: 2841 - protein, 764 aa, Homo Sapiens
MLSLARPPLPPTGLRTSLSLLRVSWIQGEGEDPCVEAVGERGGPQNPDSRARLDQSDEDFKPRIVPYYRDPNKPYKKVLRTRYIQTELGSRERLLVAVLTSRATLSTLAVAVNRTVAHHFPRLLYFTGQRGARAPAGMQVVSHGDERPAWLMSETLRHLHTHFGADYDWFFIMQDDTYVQAPRLAALAGHLSINQDLYLGRAEEFIGAGEQARYCHGGFGYLLSRSLLLRLRPHLDGCRGDILSARPDEWLGRCLIDSLGVGCVSQHQGQQYRSFELAKNRDPEKEGSSAFLSAFAVHPVSEGTLMYRLHKRFSALELERAYSEIEQLQAQIRNLTVLTPEGEAGLSWPVGLPAPFTPHSRFEVLGWDYFTEQHTFSCADGAPKCPLQGASRADVGDALETALEQLNRRYQPRLRFQKQRLLNGYRRFDPARGMEYTLDLLLECVTQRGHRRALARRVSLLRPLSRVEILPMPYVTEATRVQLVLPLLVAEAAAAPAFLEAFAANVLEPREHALLTLLLVYGPREGGRGAPDPFLGVKAAAAELERRYPGTRLAWLAVRAEAPSQVRLMDVVSKKHPVDTLFFLTTVWTRPGPEVLNRCRMNAISGWQAFFPVHFQEFNPALSPQRSPPGPPGAGPDPPSPPGADPSRGAPIGGRFDRQASAEGCFYNADYLAARARLAGELAGQEEEEALEGLEVMDVFLRFSGLHLFRAVEPGLVQKFSLRDCSPRLSEELYHRCRLSNLEGLGGRAQLAMALFEQEQANST

SEQ ID NO: 2842 - protein, 772 aa, Homo Sapiens
MRLSSLLALLRPALPLILGLSLGCSLSLLRVSWIQGEGEDPCVEAVGERGGPQNPDSRARLDQSDEDFKPRIVPYYRDPNKPYKKVLRTRYIQTELGSRERLLVAVLTSRATLSTLAVAVNRTVAHHFPRLLYFTGQRGARAPAGMQVVSHGDERPAWLMSETLRHLHTHFGADYDWFFIMQDDTYVQAPRLAALAGHLSINQDLYLGRAEEFIGAGEQARYCHGGFGYLLSRSLLLRLRPHLDGCRGDILSARPDEWLGRCLIDSLGVGCVSQHQGQQYRSFELAKNRDPEKEGSSAFLSAFAVHPVSEGTLMYRLHKRFSALELERAYSEIEQLQAQIRNLTVLTPEGEAGLSWPVGLPAPFTPHSRFEVLGWDYFTEQHTFSCADGAPKCPLQGASRADVGDALETALEQLNRRYQPRLRFQKQRLLNGYRRFDPARGMEYTLDLLLECVTQRGHRRALARRVSLLRPLSRVEILPMPYVTEATRVQLVLPLLVAEAAAAPAFLEAFAANVLEPREHALLTLLLVYGPREGGRGAPDPFLGVKAAAAELERRYPGTRLAWLAVRAEAPSQVRLMDVVSKKHPVDTLFFLTTVWTRPGPEVLNRCRMNAISGWQAFFPVHFQEFNPALSPQRSPPGPPGAGPDPPSPPGADPSRGAPIGGRFDRQASAEGCFYNADYLAARARLAGELAGQEEEEALEGLEVMDVFLRFSGLHLFRAVEPGLVQKFSLRDCSPRLSEELYHRCRLSNLEGLGGRAQLAMALFEQEQANST

SEQ ID NO: 2843 - protein, 86 aa, Homo Sapiens
MPSLPAPPAPLLLLGLLLLGSRPARGAGPEPPVLPIRSEKEPLPVRGAAGCTFGGKVYALDETWHPDLGEPFGVMRCVLCACEAGP

SEQ ID NO: 2844 - protein, 955 aa, Homo Sapiens
MPSLPAPPAPLLLLGLLLLGSRPARGAGPEPPVLPIRSEKEPLPVRGAAGCTFGGKVYALDETWHPDLGEPFGVMRCVLCACEAPQWGRRTRGPGRVSCKNIKPECPTPACGQPRQLPGHCCQTCPQERSSSERQPSGLSFEYPRDPEHRSYSDRGEPGAEERARGDGHTDFVALLTGPRSQAVARARVSLLRSSLRFSISYRRLDRPTRIRFSDSNGSVLFEHPAAPTQDGLVCGVWRAVPRLSLRLLRAEQLHVALVTLTHPSGEVWGPLIRHRALAAETFSAILTLEGPPQQGVGGITLLTLSDTEDSLHFLLLFRGLLEPRSGGLTQVPLRLQILHQGQLLRELQANVSAQEPGFAEVLPNLTVQEMDWLVLGELQMALEWAGRPGLRISGHIAARKSCDVLQSVLCGADALIPVQTGAAGSASLTLLGNGSLIYQVQVVGTSSEVVAMTLETKPQRRDQRTVLCHMAGLQPGGHTAVGICPGLGARGAHMLLQNELFLNVGTKDFPDGELRGHVAALPYCGHSARHDTLPVPLAGALVLPPVKSQAAGHAWLSLDTHCHLHYEVLLAGLGGSEQGTVTAHLLGPPGTPGPRRLLKGFYGSEAQGVVKDLEPELLRHLAKGMASLMITTKGSPRGELRGQVHIANQCEVGGLRLEAAGAEGVRALGAPDTASAAPPVVPGLPALAPAKPGGPGRPRDPNTCFFEGQQRPHGARWAPNYDPLCSLCTCQRRTVICDPVVCPPPSCPHPVQAPDQCCPVCPEKQDVRDLPGLPRSRDPGEGCYFDGDRSWRAAGTRWHPVVPPFGLIKCAVCTCKGGTGEVHCEKVQCPRLACAQPVRVNPTDCCKQCPVGSGAHPQLGDPMQADGPRGCRFAGQWFPESQSWHPSVPPFGEMSCITCRCGAGVPHCERDDCSLPLSCGSGKESRCCSRCTAHRRPAPETRTDPELEKEAEGS

SEQ ID NO: 2845 - protein, 915 aa, Homo Sapiens
MPSLPAPPAPLLLLGLLLLGSRPARGAGPEPPVLPIRSEKEPLPVRGAAGCTFGGKVYALDETWHPDLGEPFGVMRCVLCACEAPQWGRRTRGPGRVSCKNIKPECPTPACGQPRQLPGHCCQTCPQERSSSERQPSGLSFEYPRDPEHRSYSDRGEPGAEERARGDGHTDFVALLTGPRSQAVARARVSLLRSSLRFSISYRRLDRPTRIRFSDSNGSVLFEHPAAPTQDGLVCGVWRAVPRLSLRLLRAEQLHVALVTLTHPSGEVWGPLIRHRALAAETFSAILTLEGPPQQGVGGITLLTLSDTEDSLHFLLLFRGLLEPRSGGLTQVPLRLQILHQGQLLRELQANVSAQEPGFAEVLPNLTVQEMDWLVLGELQMALEWAGRPGLRISGHIAARKSCDVLQSVLCGADALIPVQTGAAGSASLTLLGNGSLIYQAVGICPGLGARGAHMLLQNELFLNVGTKDFPDGELRGHVAALPYCGHSARHDTLPVPLAGALVLPPVKSQAAGHAWLSLDTHCHLHYEVLLAGLGGSEQGTVTAHLLGPPGTPGPRRLLKGFYGSEAQGVVKDLEPELLRHLAKGMASLMITTKGSPRGELRGQVHIANQCEVGGLRLEAAGAEGVRALGAPDTASAAPPVVPGLPALAPAKPGGPGRPRDPNTCFFEGQQRPHGARWAPNYDPLCSLCTCQRRTVICDPVVCPPPSCPHPVQAPDQCCPVCPEKQDVRDLPGLPRSRDPGEGCYFDGDRSWRAAGTRWHPVVPPFGLIKCAVCTCKGGTGEVHCEKVQCPRLACAQPVRVNPTDCCKQCPVGSGAHPQLGDPMQADGPRGCRFAGQWFPESQSWHPSVPPFGEMSCITCRCGAGVPHCERDDCSLPLSCGSGKESRCCSRCTAHRRPAPETRTDPELEKEAEGS

SEQ ID NO: 2846 - protein, 350 aa, Homo Sapiens
MPSLPAPPAPLLLLGLLLLGSRPARGAGPEPPVLPIRSEKEPLPVRGAAGCTFGGKVYALDETWHPDLGEPFGVMRCVLCACEAPQWGRRTRGPGRVSCKNIKPECPTPACGQPRQLPGHCCQTCPQERSSSERQPSGLSFEYPRDPEHRSYSDRGEPGAEERARGDGHTDFVALLTGPRSQAVARARVSLLRSSLRFSISYRRLDRPTRIRFSDSNGSVLFEHPAAPTQDGLVCGVWRAVPRLSLRLLRAEQLHVALVTLTHPSGEVWGPLIRHRALAAETFSAILTLEGPPQQGVGGITLLTLSDTEDSLHFLLLFRGLLEPRSGDSTPGAATARTSGQCLSPGTRLC

SEQ ID NO: 2847 - protein, 954 aa, Homo Sapiens
MPSLPAPPAPLLLLGLLLLGSRPARGAGPEPPVLPIRSEKEPLPVRGAAGCTFGGKVYALDETWHPDLGEPFGVMRCVLCACEAPQWGRRTRGPGRVSCKNIKPECPTPACGQPRQLPGHCCQTCPQERSSSERQPSGLSFEYPRDPEHRSYSDRGEPGAEERARGDGHTDFVALLTGPRSQAVARARVSLLRSSLRFSISYRRLDRPTRIRFSDSNGSVLFEHPAAPTQDGLVCGVWRAVPRLSLRLLRAEQLHVALVTLTHPSGEVWGPLIRHRALAAETFSAILTLEGPPQQGVGGITLLTLSDTEDSLHFLLLFRGLLEPRSGGLTQVPLRLQILHQGQLLRELQANVSAQEPGFAEVLPNLTVQEMDWLVLGELQMALEWAGRPGLRISGHIAARKSCDVLQSVLCGADALIPVQTGAAGSASLTLLGNGSLIYQVQVVGTSSEVVAMTLETKPQRRDQRTVLCHMAGLQPGGHTAVGICPGLGARGAHMLLQNELFLNVGTKDFPDGELRGHVAALPYCGHSARHDTLPVPLAGALVLPPVKSQAAGHAWLSLDTHCHLHYEVLLAGLGGSEQGTVTAHLLGPPGTPGPRRLLKGFYGSEAQGVVKDLEPELLRHLAKGMASLMITTKGSPRGELRGQVHIANQCEVGGLRLEAAGAEGVRALGAPDTASAAPPVVPGLPALAPAKPGGPGRPRDPNTCFFEGQQRPHGARWAPNYDPLCSLCTCQRRTVICDPVVCPPPSCPHPVQAPDQCCPVCPEKQDVRDLPGLPRSRDPGEGCYFDGDRSWRAAGTRWHPVVPPFGLIKCAVCTCKGGTGEVHCEKVQCPRLACAQPVRVNPTDCCKQCPVGSGAHPQLGDPMQADGPRGCRFAGQWFPESQSWHPSVPPFGEMSCITCRCGAGVPHCERDDCSLPLSCGSGKESRCCSRCTAHRRPPETRTDPELEKEAEGS

SEQ ID NO: 2848 - protein, 94 aa, Homo Sapiens
MPSLPAPPAPLLLLGLLLLGSRPARGAGPEPPVLPIRSEKEPLPVRGAAGCTFGGKVYALDETWHPDLGEPFGVMRCVLCACEATGTLRPREMK

SEQ ID NO: 2849 - protein, 450 aa, Homo Sapiens
MGGMKYIFSLLFFLLLEGGKTEQVKHSETYCMFQDKKYRVGERWHPYLEPYGLVYCVNCICSENGNVLCSRVRCPNVHCLSPVHIPHLCCPRCPDSLPPVNNKVTSKSCEYNGTTYQHGELFVAEGLFQNRQPNQCTQCSCSEGNVYCGLKTCPKLTCAFPVSVPDSCCRVCRGDGELSWEHSDGDIFRQPANREARHSYHRSHYDPPPSRQAGGLSRFPGARSHRGALMDSQQASGTIVQIVINNKHKHGQVCVSNGKTYSHGESWHPNLRAFGIVECVLCTCNVTKQECKKIHCPNRYPCKYPQKIDGKCCKVCPGKKAKELPGQSFDNKGYFCGEETMPVYESVFMEDGETTRKIALETERPPQVEVHVWTIRKGILQHFHIEKISKRMFEELPHFKLVTRTTLSQWKIFTEGEAQISQMCSSRVCRTELEDLVKVLYLERSEKGHC

SEQ ID NO: 2850 - protein, 456 aa, Homo Sapiens
MRKKWKMGGMKYIFSLLFFLLLEGGKTEQVKHSETYCMFQDKKYRVGERWHPYLEPYGLVYCVNCICSENGNVLCSRVRCPNVHCLSPVHIPHLCCPRCPDSLPPVNNKVTSKSCEYNGTTYQHGELFVAEGLFQNRQPNQCTQCSCSEGNVYCGLKTCPKLTCAFPVSVPDSCCRVCRGDGELSWEHSDGDIFRQPANREARHSYHRSHYDPPPSRQAGGLSRFPGARSHRGALMDSQQASGTIVQIVINNKHKHGQVCVSNGKTYSHGESWHPNLRAFGIVECVLCTCNVTKQECKKIHCPNRYPCKYPQKIDGKCCKVCPGKKAKELPGQSFDNKGYFCGEETMPVYESVFMEDGETTRKIALETERPPQVEVHVWTIRKGILQHFHIEKISKRMFEELPHFKLVTRTTLSQWKIFTEGEAQISQMCSSRVCRTELEDLVKVLYLERSEKGHC

SEQ ID NO: 2851 - protein, 457 aa, Homo Sapiens
MRKKWKMGGMKYIFSLLFFLLLEGGKTEQVKHSETYCMFQDKKYRVGERWHPYLEPYGLVYCVNCICSENGNVLCSRVRCPNVHCLSPVHIPHLCCPRCPDSLPPVNNKVTSKSCEYNGTTYQHGELFVAEGLFQNRQPNQCTQCSCSEGNVYCGLKTCPKLTCAFPVSVPDSCCRVCRGDGELSWEHSDGDIFRQPANREARHSYHRSHYDPPPSRQAGGLSRFPGARSHRGALMDSQQASGTIVQIVINNKHKHGQVCVSNGKTYSHGESWHPNLRAFGIVECVLCTCNVTKQECKKIHCPNRYPCKYPQKIDGKCCKVCPGKKAKEELPGQSFDNKGYFCGEETMPVYESVFMEDGETTRKIALETERPPQVEVHVWTIRKGILQHFHIEKISKRMFEELPHFKLVTRTTLSQWKIFTEGEAQISQMCSSRVCRTELEDLVKVLYLERSEKGHC

SEQ ID NO: 2852 - protein, 458 aa, Homo Sapiens
MRKKWKMGGMKYIFSLLFFLLLEGGKTEQVKHSETYCMFQDKKYRVGERWHPYLEPYGLVYCVNCICSENGNVLCSRVRCPNVHCLSPVHIPHLCCPRCPEDSLPPVNNKVTSKSCEYNGTTYQHGELFVAEGLFQNRQPNQCTQCSCSEGNVYCGLKTCPKLTCAFPVSVPDSCCRVCRGDGELSWEHSDGDIFRQPANREARHSYHRSHYDPPPSRQAGGLSRFPGARSHRGALMDSQQASGTIVQIVINNKHKHGQVCVSNGKTYSHGESWHPNLRAFGIVECVLCTCNVTKQECKKIHCPNRYPCKYPQKIDGKCCKVCPGKKAKEELPGQSFDNKGYFCGEETMPVYESVFMEDGETTRKIALETERPPQVEVHVWTIRKGILQHFHIEKISKRMFEELPHFKLVTRTTLSQWKIFTEGEAQISQMCSSRVCRTELEDLVKVLYLERSEKGHC

SEQ ID NO: 2853 - protein, 378 aa, Homo Sapiens
MRKKWKMGGMKYIFSLLFFLLLEGGKTEQVKHSETYCMFQDKKYRVGERWHPYLEPYGLVYCVNCICSENGNVLCSRVRCPNVHCLSPVHIPHLCCPRCPGDGELSWEHSDGDIFRQPANREARHSYHRSHYDPPPSRQAGGLSRFPGARSHRGALMDSQQASGTIVQIVINNKHKHGQVCVSNGKTYSHGESWHPNLRAFGIVECVLCTCNVTKQECKKIHCPNRYPCKYPQKIDGKCCKVCPGKKAKEELPGQSFDNKGYFCGEETMPVYESVFMEDGETTRKIALETERPPQVEVHVWTIRKGILQHFHIEKISKRMFEELPHFKLVTRTTLSQWKIFTEGEAQISQMCSSRVCRTELEDLVKVLYLERSEKGHC

SEQ ID NO: 2854 - protein, 142 aa, Homo Sapiens
MALVGLPGPDMFCLFHGKRYSPGESWHPYLEPQGLMYCLRCTCSEGAHVSCYRLHCPPVHCPQPVTEPQQCCPKCVEPHTPSGLRAPPKSCQHNGTMYQHGEIFSAHELFPSRLPNQCVLCSCTMRQVSNRMKRTVCSRSMG

SEQ ID NO: 2855 - protein, 93 aa, Homo Sapiens
MALVGLPGPDMFCLFHGKRYSPGESWHPYLEPQGLMYCLRCTCSENLTLPLDSGPHQSPASTTGPCTNTERSSVPMSCSPPACPTSVSSAAAQ

SEQ ID NO: 2856 - protein, 142 aa, Homo Sapiens
MALVGLPGPDMFCLFHGKRYSPGESWHPYLEPQGLMYCLRCTCSENLTLPLDSGPHQSPASTTGPCTNTERSSVPMSCSPPACPTSVSSAAAQRARSTAASQPAPNQAAQHPSRCQTPAARPAKMRQVSNRMKRTVCSRSMG

SEQ ID NO: 2857 - protein, 451 aa, Homo Sapiens
MVPEVRVLSSLLGLALLWFPLDSHARARPDMFCLFHGKRYSPGESWHPYLEPQGLMYCLRCTCSEGAHVSCYRLHCPPVHCPQPVTEPQQCCPKCVEPHTPSGLRAPPKSCQHNGTMYQHGEIFSAHELFPSRLPNQCVLCSCTEGQIYCGLTTCPEPGCPAPLPLPDSCCQACKDEASEQSDEEDSVQSLHGVRHPQDPCSSDAGRKRGPGTPAPTGLSAPLSFIPRHFRPKGAGSTTVKIVLKEKHKKACVHGGKTYSHGEVWHPAFRAFGPLPCILCTCEDGRQDCQRVTCPTEYPCRHPEKVAGKCCKICPEDKADPGHSEISSTRCPKAPGRVLVHTSVSPSPDNLRRFALEHEASDLVEIYLWKLVKDEETEAQRGEVPGPRPHSQNLPLDSDQESQEARLPERGTALPTARWPPRRSLERLPSPDPGAEGHGQSRQSDQDITKT

SEQ ID NO: 2858 - protein, 429 aa, Homo Sapiens
MVPEVRVLSSLLGLALLWFPLDSHARARPDMFCLFHGKRYSPGESWHPYLEPQGLMYCLRCTCSEGAHVSCYRLHCPPVHCPQPVTEPQQCCPKCVEPHTPSGLRAPPKSCQHNGTMYQHGEIFSAHELFPSRLPNQCVLCSCTEGQIYCGLTTCPEPGCPAPLPLPDSCCQACKDEASEQSDEEDSVQSLHGVRHPQDPCSSDAGRKRGPGTPAPTGLSAPLSFIPRHFRPKGAGSTTVKIVLKEKHKKACVHGGKTYSHGEVWHPAFRAFGPLPCILCTCEDGRQDCQRVTCPTEYPCRHPEKVAGKCCKICPEDKADPGHSEISSTRCPKAPGRVLVHTSVSPSPDNLRRFALEHEASDLVEIYLWKLVKGIFHLTQIKKVRKQDFQKEAQHFRLLAGPHEGHWNVFLAQTLELKVTASPDKVTKT

SEQ ID NO: 2859 - protein, 308 aa, Homo Sapiens
MVPEVRVLSSLLGLALLWFPLDSHARARPDMFCLFHGKRYSPGESWHPYLEPQGLMYCLRCTCSEGAHVSCYRLHCPPVHCPQPVTEPQQCCPKCVEPHTPSGLRAPPKSCQHNGTMYQHGEIFSAHELFPSRLPNQCVLCSCTEGQIYCGLTTCPEPGCPAPLPLPDSCCQACKDEASEQSDEEDSVQSLHGVRHPQDPCSSDAGRKRGPGTPAPTGLSAPLSFIPRHFRPKGAGSTTVKIVLKEKHKKEDKADPGHSEISSTRCPKAPGRVLVHTSVSPSPDNLRRFALEHEASDLVEIYLWKLVK

SEQ ID NO: 2860 - protein, 281 aa, Homo Sapiens [sequence omitted]

SEQ ID NO: 2861 - protein, 91 aa, Homo Sapiens
  misc_feature (1)..(1): Xaa can be any naturally occurring amino acid
XGDRSRISKENRQKKTGFTVEATGRQGRGMTGNLPLDSDQESQEARLPERGTALPTARWPPRRSLERLPSPDPGAEGHGQSRQSDQDITKT

SEQ ID NO: 2862 - protein, 177 aa, Homo Sapiens
  misc_feature (1)..(1): Xaa can be any naturally occurring amino acid
XSSDAGRKRGPGTPAPTGLSAPLSFIPRHFRPKGAGSTTVKIVLKEKHKKACVHGGKTYSHGEVWHPAFRAFGPLPCILCTCEDGRQDCQRVTCPTEYPCRHPEKVAGKCCKICPEDKADPGHSEISSTRCPKAPGRVLVHTSVSPSPDNLRRFALEHEASDLVEIYLWKLVTGTSS

SEQ ID NO: 2863 - protein, 507 aa, Homo Sapiens
MAGGEEAKRPPPRAPGDPLSSPSPTALPQGGSHTETEDRLFKHLFRGYNRWARPVPNTSDVVIVRFGLSIAQLIDVDEKNQMMTTNVWLKQEWSDYKLRWNPTDFGNITSLRVPSEMIWIPDIVLYNNADGEFAVTHMTKAHLFSTGTVHWVPPAIYKSSCSIDVTFFPFDQQNCKMKFGSWTYDKAKIDLEQMEQTVDLKDYWESGEWAIVNATGTYNSKKYDCCAEIYPDVTYAFVIRRLPLFYTINLIIPCLLISCLTVLVFYLPSDCGEKITLCISVLLSLTVFLLLITEIIPSTSLVIPLIGEYLLFTMIFVTLSIVITVFVLNVHHRSPSTHTMPHWVRGALLGCVPRWLLMNRPPPPVELCHPLRLKLSPSYHWLESNVDAEEREVVVEEEDRWACAGHVAPSVGTLCSHGHLHSGASGPKAEALLQEGELLLSPHMQKALEGVHYIADHLRSEDADSSVKEDWKYVAMVIDRIFLWLFIIVCFLGTIGLFLPPFLAGMI

SEQ ID NO: 2864 - protein, 19 aa, Homo Sapiens
MGPSCPVFLSFTKLSLWWL

SEQ ID NO: 2865 - protein, 50 aa, Homo Sapiens
MGPSCPVFLSFTKLSLWWLLLTPAGGEEAKRPPPRAPGDPLSSPSPTALP

SEQ ID NO: 2866 - protein, 81 aa, Homo Sapiens
MGPSCPVFLSFTKLSLWWLLLTPAGGEEAKRPPPRAPGDPLSSPSPTALPQGGSHTETEDRLFKHLFRGYNRWARPVPNTS

SEQ ID NO: 2867 - protein, 514 aa, Homo Sapiens
MGPSCPVFLSFTKLSLWWLLLTPAGGEEAKRPPPRAPGDPLSSPSPTALPQGGSHTETEDRLFKHLFRGYNRWARPVPNTSDVDEKNQMMTTNVWLKQEWSDYKLRWNPTDFGNITSLRVPSEMIWIPDIVLYNNADGEFAVTHMTKAHLFSTGTVHWVPPAIYKSSCSIDVTFFPFDQQNCKMKFGSWTYDKAKIDLEQMEQTVDLKDYWESGEWAIVNATGTYNSKKYDCCAEIYPDVTYAFVIRRLPLFYTINLIIPCLLISCLTVLVFYLPSDCGEKITLCISVLLSLTVFLLLITEIIPSTSLVIPLIGEYLLFTMIFVTLSIVITVFVLNVHHRSPSTHTMPHWVRGALLGCVPRWLLMNRPPPPVELCHPLRLKLSPSYHWLESNVDAEEREVVVEEEDRWACAGHVAPSVGTLCSHGHLHSGASGPKAEALLQEGELLLSPHMQKALEGVHYIADHLRSEDADSSVKEDWKYVAMVIDRIFLWLFIIVCFLGTIGLFLPPFLAGMI

SEQ ID NO: 2868 - protein, 108 aa, Homo Sapiens
MGPSCPVFLSFTKLSLWWLLLTPAGGEEAKRPPPRAPGDPLSSPSPTALPQGGSHTETEDRLFKHLFRGYNRWARPVPNTSDVVIVRFGLSIAQLIDVDEKNQMMTTN

SEQ ID NO: 2869 - protein, 529 aa, Homo Sapiens
MGPSCPVFLSFTKLSLWWLLLTPAGGEEAKRPPPRAPGDPLSSPSPTALPQGGSHTETEDRLFKHLFRGYNRWARPVPNTSDVVIVRFGLSIAQLIDVDEKNQMMTTNVWLKQEWSDYKLRWNPTDFGNITSLRVPSEMIWIPDIVLYNNADGEFAVTHMTKAHLFSTGTVHWVPPAIYKSSCSIDVTFFPFDQQNCKMKFGSWTYDKAKIDLEQMEQTVDLKDYWESGEWAIVNATGTYNSKKYDCCAEIYPDVTYAFVIRRLPLFYTINLIIPCLLISCLTVLVFYLPSDCGEKITLCISVLLSLTVFLLLITEIIPSTSLVIPLIGEYLLFTMIFVTLSIVITVFVLNVHHRSPSTHTMPHWVRGALLGCVPRWLLMNRPPPPVELCHPLRLKLSPSYHWLESNVDAEEREVVVEEEDRWACAGHVAPSVGTLCSHGHLHSGASGPKAEALLQEGELLLSPHMQKALEGVHYIADHLRSEDADSSVKEDWKYVAMVIDRIFLWLFIIVCFLGTIGLFLPPFLAGMI

SEQ ID NO: 2870 - protein, 154 aa, Homo Sapiens
MGPSCPVFLSFTKLSLWWLLLTPAGGEEAKRPPPRAPGDPLSSPSPTALPQGGSHTETEDRLFKHLFRGYNRWARPVPNTSDVVIVRFGLSIAQLIDVDEKNQMMTTNVWLKQEWSDYKLRWNPTDFGNITSLRVPSEMIWIPDIVLYNNRTAR

SEQ ID NO: 2871 - protein, 133 aa, Homo Sapiens
MGPSCPVFLSFTKLSLWWLLLTPAGGEEAKRPPPRAPGDPLSSPSPTALPQGGSHTETEDRLFKHLFRGYNRWARPVPNTSDVVIVRFGLSIAQLIDVVRLSSHRWPEEGDPRPPTAFPLLLPLPQPCPHAQQ

SEQ ID NO: 2872 - protein, 160 aa, Homo Sapiens
MAARGSGPRALRLLLLVQLVAGRCGLAGAAGGAQRGLSEPSSIAKHEDSLLKDLFQDYERWVRPVEHLNDKIKIKFGLAISQLVDVDEKNQLMTTNVWLKQEWIDVKLRWNPDDYGGIKVIRVPSDSVWTPDIVLFDNADGRFEGTSTKTVIRLLKIGNS

SEQ ID NO: 2873 - protein, 468 aa, Homo Sapiens
MAARGSGPRALRLLLLVQLVAGRCGLAGAAGGAQRGLSEPSSIAKHEDSLLKDLFQDYERWVRPVEHLNDKIKIKFGLAISQLVDVDEKNQLMTTNVWLKQEWIDVKLRWNPDDYGGIKVIRVPSDSVWTPDIVLFDNADGRFEGTSTKTVIRYNGTVTWTPPANYKSSCTIDVTFFPFDLQNCSMKFGSWTYDGSQVDIILEDQDVDKRDFFDNGEWEIVSATGSKGNRTDSCCWYPYVTYSFVIKRLPLFYTLFLIIPCIGLSFLTVLVFYLPSNEGEKICLCTSVLVSLTVFLLVIEEIIPSSSKVIPLIGEYLVFTMIFVTLSIMVTVFAINIHHRSSSTHNAMAPLVRKIFLHTLPKLLCMRSHVDRYFTQKEETESGSGPKSSRNTLEAALDSIRYITRHIMKENDVREVVEDWKFIAQVLDRMFLWTFLFVSIVGSLGLFVPVIYKWANILIPVHIGNANK

SEQ ID NO: 2874 - protein, 182 aa, Homo Sapiens
  misc_feature (1)..(1): Xaa can be any naturally occurring amino acid
XRPVEHLNDKIKIKFGLAISQLVDVDEKNQLMTTNVWLKQEWIDVKLRWNPDDYGGIKVIRVPSDSVWTPDIVLFDNADGRFEGTSTKTVIRYNGTVTWTPPANYKSSCTIDVTFFPFDLQNCSMKFGSWTYDGSQVDIILEDQDVDKRDFFDNGEWEIVSATGSKGNRTDSCCWLLKIGNS

SEQ ID NO: 2875 - protein, 56 aa, Homo Sapiens
  misc_feature (1)..(1): Xaa can be any naturally occurring amino acid
XTLSIMVTVFAINIHHRSSSTHNAMAPLVRKIFLHTLPKLLCMRSHVDRLLKIGNS

SEQ ID NO: 2876 - protein, 429 aa, Homo Sapiens
MSTKVYLDLEWTDYRLSWDPAEHDGIDSLRITAESVWLPDVVLLNNNDGNFDVALDISVVVSSDGSVRWQPPGIYRSSCSIQVTYFPFDWQNCTMVFSSYSYDSSEVSLQTGLGPDGQGHQEIHIHEGTFIENGQWEIIHKPSRLIQPPGDPRGGREGQRQEVIFYLIIRRKPLFYLVNVIAPCILITLLAIFVFYLPPDAGEKMGLSIFALLTLTVFLLLLADKVPETSLSVPIIIKYLMFTMVLVTFSVILSVVVLNLHHRSPHTHQMPLWVRQIFIHKLPLYLRLKRPKPERDLMPEPPHCSSPGSGWGRGTDEYFIRKPPSDFLFPKPNRFQPELSAPDLRRFIDGPNRAVALLPELREVVSSISYIARQLQEQEDHDALKEDWQFVAMVVDRLFLWTFIIFTSVGTLVIFLDATYHLPPPDPFP

SEQ ID NO: 2877 - protein, 380 aa, Homo Sapiens
MSTKVYLDLEWTDYRLSWDPAEHDGIDSLRITAESVWLPDVVLLNNNDGNFDVALDISVVVSSDGSVRWQPPGIYRSSCSIQVTYFPFDWQNCTMVFSSYSYDSSEVSLQTGLGPDGQGHQEIHIHEGTFIENGQWEIIHKPSRLIQPPGDPRGGREGQRQEVIFYLIIRRKPLFYLVNVIAPCILITLLAIFVFYLPPDAVILSVVVLNLHHRSPHTHQMPLWVRQIFIHKLPLYLRLKRPKPERDLMPEPPHCSSPGSGWGRGTDEYFIRKPPSDFLFPKPNRFQPELSAPDLRRFIDGPNRAVALLPELREVVSSISYIARQLQEQEDHDALKEDWQFVAMVVDRLFLWTFIIFTSVGTLVIFLDATYHLPPPDPFP

SEQ ID NO: 2878 - protein, 158 aa, Homo Sapiens
MTPGALLMLLGALGAPLAPGVRGSEAEGRLREKLFSGYDSSVRPAREVGDRVRVSVGLILAQLISLNEKDEEMSTKVYLDLAVLECGGSSHPPASGGTSTSAEITAEWTDYRLSWDPAEHDGIDSLRITAESVWLPDVVLLNNNDGNFDVALDISVVV

SEQ ID NO: 2879 - protein, 501 aa, Homo Sapiens
MTPGALLMLLGALGAPLAPGVRGSEAEGRLREKLFSGYDSSVRPAREVGDRVRVSVGLILAQLISLNEKDEEMSTKVYLDLEWTDYRLSWDPAEHDGIDSLRITAESVWLPDVVLLNNNDGNFDVALDISVVVSSDGSVRWQPPGIYRSSCSIQVTYFPFDWQNCTMVFSSYSYDSSEVSLQTGLGPDGQGHQEIHIHEGTFIENGQWEIIHKPSRLIQPPGDPRGGREGQRQEVIFYLIIRRKPLFYLVNVIAPCILITLLAIFVFYLPPDAGEKMGLSIFALLTLTVFLLLLADKVPETSLSVPIIIKYLMFTMVLVTFSVILSVVVLNLHHRSPHTHQMPLWVRQIFIHKLPLYLRLKRPKPERDLMPEPPHCSSPGSGWGRGTDEYFIRKPPSDFLFPKPNRFQPELSAPDLRRFIDGPNRAVALLPELREVVSSISYIARQLQEQEDHDALKEDWQFVAMVVDRLFLWTFIIFTSVGTLVIFLDATYHLPPPDPFP

SEQ ID NO: 2880 - protein, 37 aa, Homo Sapiens
MVVDRLFLWTFIIFTSVGTLVIFLDATYHLPPPDPFP

SEQ ID NO: 2881 - protein, 316 aa, Homo Sapiens
  misc_feature (1)..(1): Xaa can be any naturally occurring amino acid
XPAREVGDRVRVSVGLILAQLISLNEKDEEMSTKVYLDLEWTDYRLSWDPAEHDGIDSLRITAESVWLPDVVLLNNNDGNFDVALDISVVVSSDGSVRWQPPGIYRSSCSIQVTYFPFDWQNCTMVFSSYSYDSSEVSLQTGLGPDGQGHQEIHIHEGTFIGEKMGLSIFALLTLTVFLLLLADKVPETSLSVPIIIKYLMFTMVLVTFSVILSVVVLNLHHRSPHTHQMPLWVRQIFIHKLPLYLRLKRPKPERDLMPEPPHCSSPGSGWGRGTDEYFIRKPPSDFLFPKPNRFQPELSAPDLRRFIDGPNRAVA

SEQ ID NO: 2882 - protein, 172 aa, Homo Sapiens
MEGPVLTLGLLAALAVCGSWGLNEEERLIRHLFQEKGYNKELRPVAHKEESVDVALALTLSNLISLGWTDNRLKWNAEEFGNISVLRLPPDMVWLPEIVLENNNDGSFQISYSCNVLVYHYGFVYWLPPAIFRSSCPISVTYFPFDWQNCSLKFSSLKYTAKEITLSLKQDA

SEQ ID NO: 2883 - protein, 502 aa, Homo Sapiens
MEGPVLTLGLLAALAVCGSWGLNEEERLIRHLFQEKGYNKELRPVAHKEESVDVALALTLSNLISLGWTDNRLKWNAEEFGNISVLRLPPDMVWLPEIVLENNNDGSFQISYSCNVLVYHYGFVYWLPPAIFRSSCPISVTYFPFDWQNCSLKFSSLKYTAKEITLSLKQDAKENRTYPVEWIIIDPEGFTENGEWEIVHRPARVNVDPRAPLDSPSRQDITFYLIIRRKPLFYIINILVPCVLISFMVNLVFYLPADSGEKTSVAISVLLAQSVFLLLISKRLPATSMAIPLIGKFLLFGMVLVTMVVVICVIVLNIHFRTPSTHVLSEGVKKLFLETLPELLHMSRPAEDGPSPGALVRRSSSLGYISKAEEYFLLKSRSDLMFEKQSERHGLARRLTTARRPPASSEQAQQELFNELKPAVDGANFIVNHMRDQNNYNEEKDSWNRVARTVDRLCLFVVTPVMVVGTAWIFLQGVYNQPPPQPFPGDPYSYNVQDKRFI

SEQ ID NO: 2884 - protein, 108 aa, Homo Sapiens
MEGPVLTLGLLAALAVCGSWGLNEEERLIRHLFQEKGYNKELRPVAHKEESVDVALALTLSNLISLKEVEETLTTNVWIEHGWTDNRLKWNAEEFGNISVLRLPPDMQ

SEQ ID NO: 2885 - protein, 235 aa, Homo Sapiens
MEGPVLTLGLLAALAVCGSWGLNEEERLIRHLFQEKGYNKELRPVAHKEESVDVALALTLSNLISLKEVEETLTTNVWIEHGWTDNRLKWNAEEFGNISVLRLPPDMVWLPEIVLENNNDGSFQISYSCNVLVYHYGFVYWLPPAIFRSSCPISVTYFPFDWQNCSLKFRERGVGDSPPAGQGQRGPQSPSGQPQPPGHHLLPHHPPQAPLLHHQHPGALRAHLLHGQPGLLPTG

SEQ ID NO: 2886 - protein, 171 aa, Homo Sapiens
MEGPVLTLGLLAALAVCGSWGLNEEERLIRHLFQEKGYNKELRPVAHKEESVDVALALTLSNLISLKEVEETLTTNVWIEHGWTDNRLKWNAEEFGNISVLRLPPDMVWLPEIVLENNNDGSFQISYSCNVLVYHYGFVYWLPPAIFRSSCPISVTYFPFDWQNCSLKFRW

SEQ ID NO: 2887 - protein, 517 aa, Homo Sapiens
MEGPVLTLGLLAALAVCGSWGLNEEERLIRHLFQEKGYNKELRPVAHKEESVDVALALTLSNLISLKEVEETLTTNVWIEHGWTDNRLKWNAEEFGNISVLRLPPDMVWLPEIVLENNNDGSFQISYSCNVLVYHYGFVYWLPPAIFRSSCPISVTYFPFDWQNCSLKFSSLKYTAKEITLSLKQDAKENRTYPVEWIIIDPEGFTENGEWEIVHRPARVNVDPRAPLDSPSRQDITFYLIIRRKPLFYIINILVPCVLISFMVNLVFYLPADSGEKTSVAISVLLAQSVFLLLISKRLPATSMAIPLIGKFLLFGMVLVTMVVVICVIVLNIHFRTPSTHVLSEGVKKLFLETLPELLHMSRPAEDGPSPGALVRRSSSLGYISKAEEYFLLKSRSDLMFEKQSERHGLARRLTTARRPPASSEQAQQELFNELKPAVDGANFIVNHMRDQNNYNEEKDSWNRVARTVDRLCLFVVTPVMVVGTAWIFLQGVYNQPPPQPFPGDPYSYNVQDKRFI

SEQ ID NO: 2888 - protein, 411 aa, Homo Sapiens
MQCSWKAVLLLALASIAIQYTAIRTFTAKSFHTCPGLAEAGLAERLCEESPTFAYNLSRKTHILILATTRSGSSFVGQLFNQHLDVFYLFEPLYHVQNTLIPRFTQGKSPADRRVMLGASRDLLRSLYDCDLYFLENYIKPPPVNHTTDRIFRRGASRVLCSRPVCDPPGPADLVLEEGDCVRKCGLLNLTVAAEACRERSHVAIKTVRVPEVNDLRALVEDPRLNLKVIQLVRDPRGILASRSETFRDTYRLWRLWYGTGRKPYNLDVTQLTTVCEDFSNSVSTGLMRPPWLKGKYMLVRYEDLARNPMKKTEEIYGFLGIPLDSHVARWIQNNTRGDPTLGKHKYGTVRNSAATAEKWRFRLSYDIVAFAQNACQQVLAQLGYKIAASEEELKNPSVSLVEERDFRPFS

SEQ ID NO: 2889 - protein, 33 aa, Homo Sapiens
MHHQWLLLAACFWVIFMFMVASKFITLTFKDPD

SEQ ID NO: 2890 - protein, 64 aa, Homo Sapiens
MHHQWLLLAACFWVIFMFMVASKFITLTFKDPDVYSAKQEFLFLTTMPEVRKLPEEKHIPEELK

SEQ ID NO: 2891 - protein, 85 aa, Homo Sapiens
MHHQWLLLAACFWVIFMFMVASKFITLTFKDPDVYSAKQEFLFLTTMPEVRKLPEEKHIPEELKPTGKELPDSQLVQPLVYMERL

SEQ ID NO: 2892 - protein, 133 aa, Homo Sapiens
MHHQWLLLAACFWVIFMFMVASKFITLTFKDPDVYSAKQEFLFLTTMPEVRKLPEEKHIPEELKPTGKELPDSQLVQPLVYMERLELIRNVCRDDALKNLSHTPVSKFVLDRIFVCDKHKILFCQTPKVGNTQ

SEQ ID NO: 2893 - protein, 141 aa, Homo Sapiens
MHHQWLLLAACFWVIFMFMVASKFITLTFKDPDVYSAKQEFLFLTTMPEVRKLPEEKHIPEELKPTGKELPDSQLVQPLVYMERLELIRNVCRDDALKNLSHTPVSKFVLDRIFVCDKHKILFCQTPKVGNTQWKKVLIVL

SEQ ID NO: 2894 - protein, 356 aa, Homo Sapiens
MHHQWLLLAACFWVIFMFMVASKFITLTFKDPDVYSAKQEFLFLTTMPEVRKLPEEKHIPEELKPTGKELPDSQLVQPLVYMERLELIRNVCRDDALKNLSHTPVSKFVLDRIFVCDKHKILFCQTPKVGNTQWKKVLIVLNGAFSSIEEIPENVVHDHEKNGLPRLSSFSDAEIQKRLKTYFKFFIVRDPFERLISAFKDKFVHNPRFEPWYRHEIAPGIIRKYRRNRTETRGIQFEDFVRYLGDPNHRWLDLQFGDHIIHWVTYVELCAPCEIMYSVIGHHETLEDDAPYILKEAGIDHLVSYPTIPPGITVYNRTKVEHYFLGISKRDIRRLYARFEGDFKLFGYQKPDFLLN

SEQ ID NO: 2895 - protein, 356 aa, Homo Sapiens; identical to SEQ ID NO: 2894

SEQ ID NO: 2896 - protein, 142 aa, Homo Sapiens
MQRKAGKKEHVQLRDKRNQEPQFRGNTARKCEPQAAEGRVSEWLRCDNMHHQWLLLAACFWVIFMFMVASKFITLTFKDPDVYSAKQEFLFLTTMPEVRKLPEEKHIPEELKPTGKELPDSQLVQPLVYMERLELIRNVCRD

SEQ ID NO: 2897 - protein, 347 aa, Homo Sapiens
MKPALLEVMRMNRICRMVLATCLGSFILVIFYFQIMRRNPFGVDICCRKGSRSPLQELYNPIQLELSNTAVLHQMRRDQVTDTCRANSATSRKRRVLTPNDLKHLVVDEDHELIYCYVPKVACTNWKRLMMVLTGRGKYSDPMEIPANEAHVSANLKTLNQYSIPEINHRLKSYMKFLFVREPFERLVSAYRNKFTQKYNISFHKRYGTKIIKRQRKNATQEALRKGDDVKFEEFVAYLIDPHTQREEPFNEHWQTVYSLCHPCHIHYDLVGKYETLEEDSNYVLQLAGVGSYLKFPTYAKSTRTTDEMTTEFFQNISSEHQTQLYEVYKLDFLMFNYSVPSYLKLE

SEQ ID NO: 2898 - protein, 72 aa, Homo Sapiens
MKPALLEVMRMNRICRMVLATCLGSFILVIFYFQIMRRNPFGVDICCRKGSRSPLQELYNPIQVSFKHSVSM

SEQ ID NO: 2899 - protein, 352 aa, Homo Sapiens
MKPALLEVMRMNRICRMVLATCLGSFILVIFYFQSMLHPVMRRNPFGVDICCRKGSRSPLQELYNPIQLELSNTAVLHQMRRDQVTDTCRANSATSRKRRVLTPNDLKHLVVDEDHELIYCYVPKVACTNWKRLMMVLTGRGKYSDPMEIPANEAHVSANLKTLNQYSIPEINHRLKSYMKFLFVREPFERLVSAYRNKFTQKYNISFHKRYGTKIIKRQRKNATQEALRKGDDVKFEEFVAYLIDPHTQREEPFNEHWQTVYSLCHPCHIHYDLVGKYETLEEDSNYVLQLAGVGSYLKFPTYAKSTRTTDEMTTEFFQNISSEHQTQLYEVYKLDFLMFNYSVPSYLKLE

SEQ ID NO: 2900 - protein, 77 aa, Homo Sapiens
MKPALLEVMRMNRICRMVLATCLGSFILVIFYFQSMLHPVMRRNPFGVDICCRKGSRSPLQELYNPIQVSFKHSVSM

SEQ ID NO: 2901 - protein, 158 aa, Homo Sapiens
MRRNPFGVDICCRKGSRSPLQELYNPIQLELSNTAVLHQMRRDQVTDTCRANSATSRKRRVLTPNDLKHLVVDEDHELIYCYVPKVACTNWKRLMMVLTGRGKYSDPMEIPANEAHVSANLKTLNQYSIPEINHRLKSYMKFLFVREPFERLVSAYRN

SEQ ID NO: 2902 - protein, 225 aa, Homo Sapiens [sequence omitted]

SEQ ID NO: 2903 - protein, 341 aa, Homo Sapiens
MGRRCCRRRVLAAACLGAALLLLCAAPRSLRPAFGNRALGSSWLGGEKRSPLQKLYDLDQDPRSTLAKVHRQRRDLLNSACSRHSRRQRLLQPEDLRHVLVDDAHGLLYCYVPKVACTNWKRVLLALSGQARGDPRAISAQEAHAPGRLPSLADFSPAEINRRLRAYLAFLFVREPFERLASAYRNKLARPYSAAFQRRYGARIVQRLRPRALPDARARGHDVRFAEFLAYLLDPRTRREEPFNEHWERAHALCHPCRLRYDVVGKFETLAEDAAFVLGLAGASDLSFPGPPRPRGAAASRDLAARLFRDISPFYQRRLFDLYKMDFLLFNYSAPSYLRLL

SEQ ID NO: 2904 - protein, 386 aa, Homo Sapiens
MLLPKKMKLLLFLVSQMAILALFFHMYSHNISSLSMKAQPERMHVLVLSSWRSGSSFVGQLFGQHPDVFYLMEPAWHVWMTFKQSTAWMLHMAVRDLIRAVFLCDMSVFDAYMEPGPRRQSSLFQWENSRALCSAPACDIIPQDEIIPRAHCRLLCSQQPFEVVEKACRSYSHVVLKEVRFFNLQSLYPLLKDPSLNLHIVHLVRDPRAVFRSRERTKGDLMIDSRIVMGQHEQKLKKEDQPYYVMQVICQSQLEIYKTIQSLPKALQERYLLVRYEDLARAPVAQTSRMYEFVGLEFLPHLQTWVHNITRGKGMGDHAFHTNARDALNVSQAWRWSLPYEKVSRLQKACGDAMNLLGYRHVRSEQEQRNLLLDLLSTWTVPEQIH

SEQ ID NO: 2905 - protein, 386 aa, Homo Sapiens; identical to SEQ ID NO: 2904

SEQ ID NO: 2906 - protein, 411 aa, Homo Sapiens
MGMRARVPKVAHSTRRPPAARMWLPRFSSKTVTVLLLAQTTCLLLFIISRPGPSSPAGGEDRVHVLVLSSWRSGSSFLGQLFSQHPDVFYLMEPAWHVWTTLSQGSAATLHMAVRDLMRSIFLCDMDVFDAYMPQSRNLSAFFNWATSRALCSPPACSAFPRGTISKQDVCKTLCTRQPFSLAREACRSYSHVVLKEVRFFNLQVLYPLLSDPALNLRIVHLVRDPRAVLRSREAAGPILARDNGIVLGTNGKWVEADPHLRLIREVCRSHVRIAEAATLKPPPFLRGRYRLVRFEDLAREPLAEIRALYAFTGLTLTPQLEAWIHNITHGSGIGKPIEAFHTSSRNARNVSQAWRHALPFTKILRVQEVCAGALQLLGYRPVYSADQQRDLTLDLVLPRGPDHFSWASPD

SEQ ID NO: 2907 - protein, 99 aa, Homo Sapiens
MSRHLPWICDQRCSSPSSPGRWPPAARMWLPRFSSKTVTVLLLAQTTCLLLFIISRPGPSSPAGGEDRVHVLVLSSWRSGSSFLGQLFSQHPDVFYLME

SEQ ID NO: 2908 - protein, 395 aa, Homo Sapiens
MWLPRVSSTAVTALLLAQTFLLLFLVSRPGPSSPAGGEARVHVLVLSSWRSGSSFVGQLFNQHPDVFYLMEPAWHVWTTLSQGSAATLHMAVRDLVRSVFLCDMDVFDAYLPWRRNLSDLFQWAVSRALCSPPACSAFPRGAISSEAVCKPLCARQSFTLAREACRSYSHVVLKEVRFFNLQVLYPLLSDPALNLRIVHLVRDPRAVLRSREQTAKALARDNGIVLGTNGTWVEADPGLRVVREVCRSHVRIAEAATLKPPPFLRGRYRLVRFEDLAREPLAEIRALYAFTGLSLTPQLEAWIHNITHGSGPGARREAFKTSSRNALNVSQAWRHALPFAKIRRVQELCAGALQLLGYRPVYSEDEQRNLALDLVLPRGLNGFTWASSTASHPRN

SEQ ID NO: 2909 - protein, 395 aa, Homo Sapiens; identical to SEQ ID NO: 2908

SEQ ID NO: 2910 - protein, 486 aa, Homo Sapiens
MKGRRRRRREYCKFALLLVLYTLVLLLVPSVLDGGRDGDKGAEHCPGLQRSLGVWSLEAAAAGEREQGAEARAAEEGGANQSPRFPSNLSGAVGEAVSREKQHIYVHATWRTGSSFLGELFNQHPDVFYLYEPMWHLWQALYPGDAESLQGALRDMLRSLFRCDFSVLRLYAPPGDPAARAPDTANLTTAALFRWRTNKVICSPPLCPGAPRARAEVGLVEDTACERSCPPVAIRALEAECRKYPVVVIKDVRLLDLGVLVPLLRDPGLNLKVVQLFRDPRAVHNSRLKSRQGLLRESIQVLRTRQRGDRFHRVLLAHGVGARPGGQSRALPAAPRADFFLTGALEVICEAWLRDLLFARGAPAWLRRRYLRLRYEDLVRQPRAQLRRLLRFSGLRALAALDAFALNMTRGAAYGADRPFHLSARDAREAVHAWRERLSREQVRQVEAACAPAMRLLAYPRSGEEGDAEQPREGETPLEMDADGAT

SEQ ID NO: 2911 - protein, 178 aa, Homo Sapiens
MTLRPGTMRLACMFSSILLFGAAGLLLFISLQDPTELAPQQVPGIKFNIRPRQPHHDLPPGGSQDGDLKEPTERVTRDLSSGAPRGRNLPAPDQPQPPLQRGTRLRLRQRRRRLLIKKMPAAATIPANSSDAPFIRPGPGTLDGRWVSLHRSQQERKRVMQEACAKYRASSSRRAVTP

SEQ ID NO: 2912 - protein, 424 aa, Homo Sapiens
MTLRPGTMRLACMFSSILLFGAAGLLLFISLQDPTELAPQQVPGIKFNIRPRQPHHDLPPGGSQDGDLKEPTERVTRDLSSGAPRGRNLPAPDQPQPPLQRGTRLRLRQRRRRLLIKKMPAAATIPANSSDAPFIRPGPGTLDGRWVSLHRSQQERKRVMQEACAKYRASSSRRAVTPRHVSRIFVEDRHRVLYCEVPKAGCSNWKRVLMVLAGLASSTADIQHNTVHYGSALKRLDTFDRQGILHRLSTYTKMLFVREPFERLVSAFRDKFEHPNSYYHPVFGKAILARYRANASREALRTGSGVRFPEFVQYLLDVHRPVGMDIHWDHVSRLCSPCLIDYDFVGKFESMEDDANFFLSLIRAPRNLTFPRFKDRHSQEARTTARIAHQYFAQLSALQRQRTYDFYYMDYLMFNYSKPFADLY

SEQ ID NO: 2913 - protein, 424 aa, Homo Sapiens; identical to SEQ ID NO: 2912

SEQ ID NO: 2914 - protein, 424 aa, Homo Sapiens; identical to SEQ ID NO: 2912

SEQ ID NO: 2915 - protein, 53 aa, Homo Sapiens
EDVEVGRCVRRFAGVQCVWSYEDKRVRKPLLCNELKRCLSPNGKLSLCSSDGL

SEQ ID NO: 2916 - protein, 802 aa, Homo Sapiens
MAARGRRAWLSVLLGLVLGFVLASRLVLPRASELKRAGPRRRASPEGCRSGQAAASQAGGARGDARGAQLWPPGSDPDGGPRDRNFLFVGVMTAQKYLQTRAVAAYRTWSKTIPGKVQFFSSEGSDTSVPIPVVPLRGVDDSYPPQKKSFMMLKYMHDHYLDKYEWFMRADDDVYIKGDRLENFLRSLNSSEPLFLGQTGLGTTEEMGKLALEPGENFCMGGPGVIMSREVLRRMVPHIGKCLREMYTTHEDVEVGRCVRRFAGVQCVWSYEMQQLFYENYEQNKKGYIRDLHNSKIHQAITLHPNKNPPYQYRLHSYMLSRKISELRHRTIQLHREIVLMSKYSNTEIHKEDLQLGIPPSFMRFQPRQREEILEWEFLTGKYLYSAVDGQPPRRGMDSAQREALDDIVMQVMEMINANAKTRGRIIDFKEIQYGYRRVNPMYGAEYILDLLLLYKKHKGKKMTVPVRRHAYLQQTFSKIQFVEHEELDAQELAKRINQESGSLSFLSNSLKKLVPFQLPGSKSEHKEPKDKKINILIPLSGRFDMFVRFMGNFEKTCLIPNQNVKLVVLLFNSDSNPDKAKQVELMRDYRIKYPKADMQILPVSGEFSRALALEVGSSQFNNESLLFFCDVDLVFTTEFLQRCRANTVLGQQIYFPIIFSQYDPKIVYSGKVPSDNHFAFTQKTGFWRNYGFGITCIYKGDLVRVGGFDVSIQGWGLEDVDLFNKVVQAGLKTFRSQEVGVVHVHHPVFCDPNLDPKQYKMCLGSKASTYGSTQQLAEMWLEKNDPSYSKSSNNNGSVRTA

SEQ ID NO: 2917 - protein, 882 aa, Homo Sapiens
MAVRSRRPWMSVALGLVLGFTAASWLIAPRVAELSERKRRGSSLCSYYGRSAAGPRAGAQQPLPQPQSRPRQEQSPPPARQDLQGPPLPEAAPGITSFRSSPWQQPPPLQQRRRGREPEGATGLPGAPAAEGEPEEEDGGAAGQRRDGRPGSSHNGSGDGGAAAPSARPRDFLYVGVMTAQKYLGSRALAAQRTWARFIPGRVEFFSSQQPPNAGQPPPPLPVIALPGVDDSYPPQKKSFMMIKYMHDHYLDKYEWFMRADDDVYIKGDKLEEFLRSLNSSKPLYLGQTGLGNIEELGKLGLEPGENFCMGGPGMIFSREVLRRMVPHIGECLREMYTTHEDVEVGRCVRRFGGTQCVWSYEMQQLFHENYEHNRKGYIQDLHNSKIHAAITLHPNKRPAYQYRLHNYMLSRKISELRYRTIQLHRESALMSKLSNTEVSKEDQQLGVIPSFNHFQPRERNEVIEWEFLTGKLLYSAAENQPPRQSLSSILRTALDDTVLQVMEMINENAKSRGRLIDFKEIQYGYRRVNPMHGVEYILDLLLLYKRHKGRKLTVPVRRHAYLQQLFSKPFFRETEELDVNSLVESINSETQSFSFISNSLKILSSFQGAKEMGGHNEKKVHILVPLIGRYDIFLRFMENFENMCLIPKQNVKLVIILFSRDSGQDSSKHIELIKGYQNKYPKAEMTLIPMKGEFSRGLGLEMASAQFDNDTLLLFCDVDLIFREDFLQRCRDNTIQGQQVYYPIIFSQYDPKVTNGGNPPTDDYFIFSKKTGFWRDYGYGITCIYKSDLLGAGGFDTSIQGWGLEDVDLYNKVILSGLRPFRSQEVGVVHIFHPVHCDPNLDPKQYKMCLGSKASTFASTMQLAELWLEKHLGVRYNRTLS

SEQ ID NO: 2918 - protein, 65 aa, Homo Sapiens
HILYGKIIHLEKPFAVLVKHTPGDQDCDELGRETGTRYLVTALIKDKILFKTRPKPIITSVPKKV

SEQ ID NO: 2919 - protein, 524 aa, Homo Sapiens
MKEPRIFPRERPTPWTRAPLPPRGRLDGSLGPQGGPVLNTGHPLGVNSDPFLMAAGSLGGNLTPFPRNPSPFPASSGSLASNPAPFPAGARDPSMASFPRGMNPTGTGAVSFPRPGGLLGPGPGPGPTLNPRTGALPGPGPLSNPRLGGLPGPGPMSNPRAGGLLGAGPDPRGGGPMGPGSGPNLRAGVLLTSGNGPPNPRPVGLGPGPNPNLRSGFLGTNPAPRSGVFPGPGLGPNPRPSGLGPGPNLDARAGGLLGTGSGLNLRMAGPQGLDLAPILRAAGLLGANSASFSQASGNMGTSPSSMARVPGPMGPNSGPSSRGIGLPGPNPSPMSRAPGPIGPNSAHFSRPVGPMGVNANPFPRGAGSSAFSQSSGTLASNPATFQRSAGLQGSNPTIFPRASGPLGPNPANFPRATGLQGPSPTTFPRSTGPLGPGQVTFPRPAAGHLGPSPAGPVGINPAPFTRPTGTLGLNPASFPRMNGPAGKSFVPFPRVGSLPGTNPAAFPRPGGPMAAMYPNGMLPP

SEQ ID NO: 2920 - protein, 12 aa, Homo Sapiens
MVQIVISRESLC

SEQ ID NO: 2921 - protein, 12 aa, Homo Sapiens
MVQIVISRESLC

SEQ ID NO: 2922 - protein, 121 aa, Homo Sapiens
MVQIVISSARAGGLAEWVLMELQGEIEARYSTGLAGNLLGDLHYTTEGIPVLIVGHHILYGKIIHLEKPFAVLVKHTPGDQDCDELGRETGTRYLVTALIKDKILFKTRPKPIITSVPKKV

SEQ ID NO: 2923 - protein, 121 aa, Homo Sapiens; identical to SEQ ID NO: 2922

SEQ ID NO: 2924 - protein, 58 aa, Homo Sapiens
MVQIVISSARAGGLAEWVLMELQGEIEARYSTGLAGNLLGDLHYTTEGYIGLQVPVHM

SEQ ID NO: 2925 - protein, 75 aa, Homo Sapiens
MVQIVISSARAGGLAEWVLMELQGEIEARYSTGLAGNLLGDLHYTTELHQAHWLQIQHLSRLVLVTQVWLLFQEG

SEQ ID NO: 2926 - protein, 99 aa, Homo Sapiens
MVQIVISSARAGGLAEWVLMELQGEIEARYSTGLAGNLLGDLHYTTEVRGLFFPCLMPQESKLHQGGAPRTQSEDCLRFVIQGLANLRCSLLVLPLPLQ

SEQ ID NO: 2927 - protein, 144 aa, Homo Sapiens
  misc_feature (1)..(1): Xaa can be any naturally occurring amino acid
XAVLAAAATAAGGSVVARWPRGAALGGRHCSARAGGLAEWVLMELQGEIEARYSTGLAGNLLGDLHYTTEGIPVLIVGHHILYGKIIHLEKPFAVLVKHTPGDQDCDELGRETGTRYLVTALIKDKILFKTRPKPIITSVPKKV

SEQ ID NO: 2928 - protein, 104 aa, Homo Sapiens
  misc_feature (1)..(1): Xaa can be any naturally occurring amino acid
XSARGGGDGGGRFGCRPLAARRRARRPPLQGIPVLIVGHHILYGKIIHLEKPFAVLVKHTPGDQDCDELGRETGTRYLVTALIKDKILFKTRPKPIITSVPKKV

SEQ ID NO: 2929 - protein, 1184 aa, Homo Sapiens
MVGTKAWVFSFLVLEVTSVLGRQTMLTQSVRRVQPGKKNPSIFAKPADTLESPGEWTTWFNIDYPGGKGDYERLDAIRFYYGDRVCARPLRLEARTTDWTPAGSTGQVVHGSPREGFWCLNREQRPGQNCSNYTVRFLCPPGSLRRDTERIWSPWSPWSKCSAACGQTGVQTRTRICLAEMVSLCSEASEEGQHCMGQDCTACDLTCPMGQVNADCDACMCQDFMLHGAVSLPGGAPASGAAIYLLTKTPKLLTQTDSDGRFRIPGLCPDGKSILKITKVKFAPIVLTMPKTSLKAATIKAEFVRAETPYMVMNPETKARRAGQSVSLCCKATGKPRPDKYFWYHNDTLLDPSLYKHESKLVLRKLQQHQAGEYFCKAQSDAGAVKSKVAQLIVIASDETPCNPVPESYLIRLPHDCFQNATNSFYYDVGRCPVKTCAGQQDNGIRCRDAVQNCCGISKTEEREIQCSGYTLPTKVAKECSCQRCTETRSIVRGRVSAADNGEPMRFGHVYMGNSRVSMTGYKGTFTLHVPQDTERLVLTFVDRLQKFVNTTKVLPFNKKGSAVFHEIKMLRRKKPITLEAMETNIIPLGEVVGEDPMAELEIPSRSFYRQNGEPYIGKVKASVTFLDPRNISTATAAQTDLNFINDEGDTFPLRTYGMFSVDFRDEVTSEPLNAGKVKVHLDSTQVKMPEHISTVKLWSLNPDTGLWEEEGDFKFENQRRNKREDRTFLVGNLEIRERRLFNLDVPESRRCFVKVRAYRSERFLPSEQIQGVVISVINLEPRTGFLSNPRAWGRFDSVITGPNGACVPAFCDDQSPDAYSAYVLASLAGEELQAVESSPKFNPNAIGVPQPYLNKLNYRRTDHEDPRVKKTAFQISMAKPRPNSAEESNGPIYAFENLRACEEAPPSAAHFRFYQIEGDRYDYNTVPFNEDDPMSWTEDYLAWWPKPMEFRACYIKVKIVGPLEVNVRSRNMGGTHRQTVGKLYGIRDVRSTRDRDQPNVSAACLEFKCSGMLYDQDRVDRTLVKVIPQGSCRRASVNPMLHEYLVNHLPLAVNNDTSEYTMLAPLDPLGHNYGIYTVTDQDPRTAKEIALGRCFDGTSDGSSRIMKSNVGVALTFNCVERQVGRQSAFQYLQSTPAQSPAAGTVQGRVPSRRQQRASRGGQRQGGVVASLRFPRVAQQPLIN

SEQ ID NO: 2930 - protein, 1162 aa, Homo Sapiens
MASLLPLLCLCVVAAHLAGARDATPTEEPMATALGLERRSVYTGQPSPALEDWEARAVPAEASEWTSWFNVDHPGGDGDFESLAAIRFYYGPARVCPRPLALEARTTDWALPSAVGERVHLNPTRGFWCLNREQPRGRRCSNYHVRFRCPLEASWGAWGPWGPCSGSCGPGRRLRRRHCPSPAGDACPGRPLEAQKCVRPRCPGCSLDTCECPDHILLGSVVTPSGQPLLGARVSLRDQPGTVATSDAHGTFRVPGVCADSRANIRAQMDGFSAGEAQAQANGSISVVTIILDKLEKPYLVKHPESRVREAGQNVTFCCKASGTPMPKKYSWFHNGTLLDRRAHGYGAHLELRGLRPDQAGIYHCKAWNEAGAVRSGTARLTVLAPGQPACDPRPREYLIKLPEDCGQPGSGPAYLDVGLCPDTRCPSLAGSSPRCGDASSRCCSVRRLERREIHCPGYVLPVKVVAECGCQKCLPPRGLVRGRVVAADSGEPLRFARILLGQEPIGFTAYQGDFTIEVPPSTQRLVVTFVDPSGEFMDAVRVLPFDPRGAGVYHEVKAMRKKAPVILHTSQSNTIPLGELEDEAPLGELVLPSGAFRRADGKPYSGPVEARVTFVDPRDLTSAASAPSDLRFVDSDGELAPLRTYGMFSVDLRAPGSAEQLQVGPVAVRVAASQIHMPGHVEALKLWSLNPETGLWEEESGFRREGSSGPRVRREERVFLVGNVEIRERRLFNLDVPERRRCFVKVRAYANDKFTPSEQVEGVVVTLVNLEPAPGFSANPRAWGRFDSAVTGPNGACLPAFCDADRPDAYTALVTATLGGEELEPAPSLPRPLPATVGVTQPYLDRLGYRRTDHDDPAFKRNGFRINLAKPRPGDPAEANGPVYPWRSLRECQGAPVTASHFRFARVEADKYEYNVVPFREGTPASWTGDLLAWWPNPQEFRACFLKVKIQGPQEYMVRSHNAGGSHPRTRGQLYGLRDARSVRDPERPGTSAACVEFKCSGMLFDQRQVDRTLVTIMPQGSCRRVAVNGLLRDYLTRHPPPVPAEDPAAFSMLAPLDPLGHNYGVYTVTDQSPRLAKEIAIGRCFDGSSDGFSREMKADAGTAVTFQCREPPAGRPSLFQRLLESPATALGDIRREMSEAAQAQARASGPLRTRRGRVRQ

SEQ ID NO: 2931 - protein, 1156 aa, Homo Sapiens
MASLLPLLCLCVVAAHLAGARDATPTEEPMATALGLERRSVYTGQPSPALEDWEEASEWTSWFNVDHPGGDGDFESLAAIRFYYGPARVCPRPLALEARTTDWALPSAVGERVHLNPTRGFWCLNREQPRGRRCSNYHVRFRCPLEASWGAWGPWGPCSGSCGPGRRLRRRHCPSPAGDACPGRPLEAQKCVRPRCPGCSLDTCECPDHILLGSVVTPSGQPLLGARVSLRDQPGTVATSDAHGTFRVPGVCADSRANIRAQMDGFSAGEAQAQANGSISVVTIILDKLEKPYLVKHPESRVREAGQNVTFCCKASGTPMPKKYSWFHNGTLLDRRAHGYGAHLELRGLRPDQAGIYHCKAWNEAGAVRSGTARLTVLAPGQPACDPRPREYLIKLPEDCGQPGSGPAYLDVGLCPDTRCPSLAGSSPRCGDASSRCCSVRRLERREIHCPGYVLPVKVVAECGCQKCLPPRGLVRGRVVAADSGEPLRFARILLGQEPIGFTAYQGDFTIEVPPSTQRLVVTFVDPSGEFMDAVRVLPFDPRGAGVYHEVKAMRKKAPVILHTSQSNTIPLGELEDEAPLGELVLPSGAFRRADGKPYSGPVEARVTFVDPRDLTSAASAPSDLRFVDSDGELAPLRTYGMFSVDLRAPGSAEQLQVGPVAVRVAASQIHMPGHVEALKLWSLNPETGLWEEESGFRREGSSGPRVRREERVFLVGNVEIRERRLFNLDVPERRRCFVKVRAYANDKFTPSEQVEGVVVTLVNLEPAPGFSANPRAWGRFDSAVTGPNGACLPAFCDADRPDAYTALVTATLGGEELEPAPSLPRPLPATVGVTQPYLDRLGYRRTDHDDPAFKRNGFRINLAKPRPGDPAEANGPVYPWRSLRECQGAPVTASHFRFARVEADKYEYNVVPFREGTPASWTGDLLAWWPNPQEFRACFLKVKIQGPQEYMVRSHNAGGSHPRTRGQLYGLRDARSVRDPERPGTSAACVEFKCSGMLFDQRQVDRTLVTIMPQGSCRRVAVNGLLRDYLTRHPPPVPAEDPAAFSMLAPLDPLGHNYGVYTVTDQSPRLAKEIAIGRCFDGSSDGFSREMKADAGTAVTFQCREPPAGRPSLFQRLLESPATALGDIRREMSEAAQAQARASGPLRTRRGRVRQ

SEQ ID NO: 2932 - protein, 113 aa, Homo Sapiens
MDNVQPKIKHRPFCFSVKGHVKMLRLALTVTSMTFFIIAQAPEPYIVITGFEVTVILFFILLYVLRLDRLMKWLFWPLLDIINSLVTTVFMLIVSVLALIPETTTLTVGGGLF

SEQ ID NO: 2933 - protein, 152 aa, Homo Sapiens
MDNVQPKIKHRPFCFSVKGHVKMLRLALTVTSMTFFIIAQAPEPYIVITGFEVTVILFFILLYVLRLDRLMKWLFWPLLDIINSLVTTVFMLIVSVLALIPETTTLTVGGGVFALVTAVCCLADGALIYRKLLFNPSGPYQKKPVHEKKEVL

SEQ ID NO: 2934 - protein, 120 aa, Homo Sapiens
MDNVQPKIKHRPFCFSVKGHVKMLRLALTVTSMTFFIIAQAPEPYIVITGFEVTVILFFILLYVLRLDRLMKWLFWPLLVFALVTAVCCLADGALIYRKLLFNPSGPYQKKPVHEKKEVL

SEQ ID NO: 2935 - protein, 99 aa, Homo Sapiens
MDNVQPKIKHRPFCFSVKGHVKMLRLDIINSLVTTVFMLIVSVLALIPETTTLTVGGGVFALVTAVCCLADGALIYRKLLFNPSGPYQKKPVHEKKEVL

SEQ ID NO: 2936 - protein, 33 aa, Homo Sapiens
MDNVQPKIKHRPFCFSVKGHVKMLRLHCLVVFM

SEQ ID NO: 2937 - protein, 67 aa, Homo Sapiens
MDNVQPKIKHRPFCFSVKGHVKMLRLVFALVTAVCCLADGALIYRKLLFNPSGPYQKKPVHEKKEVL

SEQ ID NO: 2938 - protein, 69 aa, Homo Sapiens
MAGPFSRLLSARPGLRLLALAGAGSLAAGFLLRPEPVRAASERRRLYPPRLFPSSIRSVVSWEERTEQI

SEQ ID NO: 2939 - protein, 148 aa, Homo Sapiens
MAGPFSRLLSARPGLRLLALAGAGSLAAGFLLRPEPVRAASERRRLYPPSAEYPDLRKHNNCMASHLTPAVYARLCDKTTPTGWTLDQCIQTGVDNPGHPFIKTVGMVAGDEETYEVFADLFDPVIQERHNGYDPRTMKHTTDLDASK

SEQ ID NO: 2940 - protein, 417 aa, Homo Sapiens
MAGPFSRLLSARPGLRLLALAGAGSLAAGFLLRPEPVRAASERRRLYPPSAEYPDLRKHNNCMASHLTPAVYARLCDKTTPTGWTLDQCIQTGVDNPGHPFIKTVGMVAGDEETYEVFADLFDPVIQERHNGYDPRTMKHTTDLDASKIRSGYFDERYVLSSRVRTGRSIRGLSLPPACTRAERREVERVVVDALSGLKGDLAGRYYRLSEMTEAEQQQLIDDHFLFDKPVSPLLTAAGMARDWPDARGIWHNNEKSFLIWVNEEDHTRVISMEKGGNMKRVFERFCRGLKEVERLIQERGWEFMWNERLGYILTCPSNLGTGLRAGVHIKLPLLSKDSRFPKILENLRLQKRGTGGVDTAATGGVFDISNLDRLGKSEVELVQLVIDGVNYLIDCERRLERGQDIRIPTPVIHTKH

SEQ ID NO: 2941 - protein, 417 aa, Homo Sapiens; identical to SEQ ID NO: 2940

SEQ ID NO: 2942 - protein, 298 aa, Homo Sapiens
MAGPFSRLLSARPGLRLLALAGAGSLAAGFLLRPEPVRAASERRRLYPPSAEYPDLRKHNNCMASHLTPAVYARLCDKTTPTGWTLDQCIQTGVDNPGHPFIKTVGMVAGDEETYEVFADLFDPVIQERHNGYDPRTMKHTTDLDASKIRSGYFDERYVLSSRVRTGRSIRGLSLPPACTRAERREVERVVVDALSGLKGDLAGRYYRLSEMTEAEQQQLIDDHFLFDKPVSPLLTAAGMARDWPDARGIWHNNEKSFLIWVNEEDHTRVISMEKGGNMKRVFERFCRGLKEVVVGIK

SEQ ID NO: 2943 - protein, 222 aa, Homo Sapiens
MAGPFSRLLSARPGLRLLALAGAGSLAAGFLLRPEPVRAASERRRLYPPSQTWPTGQLPGNCTRSRRLCPPSMVTGYPLPSAEYPDLRKHNNCMASHLTPAVYARLCDKTTPTGWTLDQCIQTGVDNPGHPFIKTVGMVAGDEETYEVFADLFDPVIQERHNGYDPRTMKHTTDLDASKIRSGYFDERYVLSSRVRTGRSIRGLSLPPACTRAERREVERVV

SEQ ID NO: 2944 - protein, 58 aa, Homo Sapiens
MAGPFSRLLSARPGLRLLALAGAGSLAAGFLLRPEPVRAASERRRLYPPRYLLTCLTL

SEQ ID NO: 2945 - protein, 103 aa, Homo Sapiens
MAGPFSRLLSARPGLRLLALAGAGSLAAGFLLRPEPVRAASERRRLYPPSAEYPDLRKHNNCMASHLTPAVYARLCDKTTPTGWTLDQCIQTGVDNPGHPFIK

SEQ ID NO: 2946 - protein, 129 aa, Homo Sapiens
MAGPFSRLLSARPGLRLLALAGAGSLAAGFLLRPEPVRAASERRRLYPPSAEYPDLRKHNNCMASHLTPAVYARLCDKTTPTGWTLDQCIQTGVDNPGHPFIKTVGMVAGDEETYEVFADLFDPVIQER

SEQ ID NO: 2947 - protein, 241 aa, Homo Sapiens
MAGPFSRLLSARPGLRLLALAGAGSLAAGFLLRPEPVRAASERRRLYPPSAEYPDLRKHNNCMASHLTPAVYARLCDKTTPTGWTLDQCIQTGVDNPGHPFIKTVGMVAGDEETYEVFADLFDPVIQERHNGYDPRTMKHTTDLDASKIRSGYFDERYVLSSRVRTGRSIRGLSLPPACTRAERREVERVVVDALSGLKGDLAGRYYRLSEMTEAEQQQLIDDHFLFDKPVSPLLTAAGMA

SEQ ID NO: 2948 - protein, 417 aa, Homo Sapiens; identical to SEQ ID NO: 2940

SEQ ID NO: 2949 - protein, 298 aa, Homo Sapiens; identical to SEQ ID NO: 2942

SEQ ID NO: 2950 - protein, 417 aa, Homo Sapiens; identical to SEQ ID NO: 2940

SEQ ID NO: 2951 - protein, 298 aa, Homo Sapiens; identical to SEQ ID NO: 2942

SEQ ID NO: 2952 - protein, 96 aa, Homo Sapiens
MAGPFSRLLSARPGLRLLALAGAGSLAAGFLLRPEPVRAASERRRLYPPSQTWPTGQLPGNCTRSRRLCPPSMVTGYPLPSAEYPDLRKHNNCMAS

SEQ ID NO: 2953 - protein, 203 aa, Homo Sapiens
MAGPFSRLLSARPGLRLLALAGAGSLAAGFLLRPEPVRAASERRRLYPPSQTWPTGQLPGNCTRSRRLCPPSMVTGYPLPSAEYPDLRKHNNCMASHLTPAVYARLCDKTTPTGWTLDQCIQTGVDNPGHPFIKTVGMVAGDEETYEVFADLFDPVIQERHNGYDPRTMKHTTDLDASKIRSGYFDERYVLSSRVRTGRSIRG

SEQ ID NO: 2954 - protein, 914 aa, Homo Sapiens
MGPFKSSVFILILHLLEGALSNSLIQLNNNGYEGIVVAIDPNVPEDETLIQQIKDMVTQASLYLLEATGKRFYFKNVAILIPETWKTKADYVRPKLETYKNADVLVAESTPPGNDEPYTEQMGNCGEKGERIHLTPDFIAGKKLAEYGPQGRAFVHEWAHLRWGVFDEYNNDEKFYLSNGRIQAVRCSAGITGTNVVKKCQGGSCYTKRCTFNKVTGLYEKGCEFVLQSRQTEKASIMFAQHVDSIVEFCTEQNHNKEAPNKQNQKCNLRSTWEVIRDSEDFKKTTPMTTQPPNPTFSLLQIGQRIVCLVLDKSGSMATGNRLNRLNQAGQLFLLQTVELGSWVGMVTFDSAAHVQNELIQINSGSDRDTLAKRLPAAASGGTSICSGLRSAFTVIRKKYPTDGSEIVLLTDGEDNTISGCFNEVKQSGAIIHTVALGPSAAQELEELSKMTGGLQTYASDQVQNNGLIDAFGALSSGNGAVSQRSIQLESKGLTLQNSQWMNGTVIVDSTVGKDTLFLITWTMQPPQILLWDPSGQKQGGFVVDKNTKMAYLQIPGIAKVGTWKYSLQASSQTLTLTVTSRASNATLPPITVTSKTNKDTSKFPSPLVVYANIRQGASPILRASVTALIESVNGKTVTLELLDNGAGADATKDDGVYSRYFTTYDTNGRYSVKVRALGGVNAARRRVIPQQSGALYIPGWIENDEIQWNPPRPEINKDDVQHKQVCFSRTSSGGSFVASDVPNAPIPDLFPPGQITDLKAEIHGGSLINLTWTAPGDDYDHGTAHKYIIRISTSILDLRDKFNESLQVNTTALIPKEANSEEVFLFKPENITFENGTDLFIAIQAVDKVDLKSEISNIARVSLFIPPQTPPETPSPDETSAPCPNIHINSTIPGIHILKIMWKWIGELQLSIA

SEQ ID NO: 2955 - protein, 914 aa, Homo Sapiens; identical to SEQ ID NO: 2954

SEQ ID NO: 2956 - protein, 225 aa, Homo Sapiens
MDLRAGDSWGMLACLCTVLWHLPAVPALNRTGDPGPGPSIQKTYDLTRYLEHQLRSLAGTYLNYLGPPFNEPDFNPPRLGAETLPRATVDLEVWRSLNDKLRLTQNYEAYSHLLCYLRGLNRQAATAELRRSLAHFCTSLQGLLGSIAGVMAALGYPLPQPLPGTEPTWTPGPAHSDFLQKMDDFWLLKELQTWLWRSAKDFNRLKKKMQPPAAAVTLHLGAHGF

SEQ ID NO: 2957 - protein, 215 aa, Homo Sapiens
MLACLCTVLWHLPAVPALNRTGDPGPGPSIQKTYDLTRYLEHQLRSLAGTYLNYLGPPFNEPDFNPPRLGAETLPRATVDLEVWRSLNDKLRLTQNYEAYSHLLCYLRGLNRQAATAELRRSLAHFCTSLQGLLGSIAGVMAALGYPLPQPLPGTEPTWTPGPAHSDFLQKMDDFWLLKELQTWLWRSAKDFNRLKKKMQPPAAAVTLHLGAHGF

SEQ ID NO: 2958 - protein, 170 aa, Homo Sapiens
MSMAVETFGFFMATVGLLMLGVTLPNSYWRVSTVHGNVITTNTIFENLWFSCATDSLGVYNCWEFPSMLALSGIAGLRCTNIGGLELSRKAKLAATAGALHILAGICGMVAISWYAFNITRDFFDPLYPGTKYELGPALYLGWSASLISILGGLCLCSACCCGSDEDPAA

SEQ ID NO: 2959 - protein, 148 aa, Homo Sapiens
MSMAVETFGFFMATVGLLMLGVTLPNSYWRVSTVHGNVITTNTIFENLWFSCATDSLGVYNCWEFPSMLALSGICGMVAISWYAFNITRDFFDPLYPGTKYELGPALYLGWSASLISILGGLCLCSACCCGSDEDPAASARRPYQAPV

SEQ ID NO: 2960 - protein, 128 aa, Homo Sapiens
MSMAVETFGFFMATVGLLMLGVTLPNSYWRVSTVHGNVITTNTIFENLWFSCATDSLGVYNCWEFPSMLALSGSTDSPASLSGGTGLLVRLMSIKGPCEGRRLASCRLSVRCKEAVCVQGIFRPAGHS

SEQ ID NO: 2961 - protein, 228 aa, Homo Sapiens
MSMAVETFGFFMATVGLLMLGVTLPNSYWRVSTVHGNVITTNTIFENLWFSCATDSLGVYNCWEFPSMLALSGYIQACRALMITAILLGFLGLLLGIAGLRCTNIGGLELSRKAKLAATAGALHILAGICGMVAISWYAFNITRDFFDPLYPGTKYELGPALYLGWSASLISILGGLCLCSACCCGSDEDPAASARRPYQAPVSVMPVATSDQEGDSSFGKYGRNAYV

SEQ ID NO: 2962 - protein, 228 aa, Homo Sapiens; identical to SEQ ID NO: 2961

SEQ ID NO: 2963 - protein, 106 aa, Homo Sapiens
  misc_feature (1)..(1): Xaa can be any naturally occurring amino acid
XGNVITTNTIFENLWFSCATDSLGVYNCWEFPSMLALSGYIQACRALMITAILLGFLGLLLGIAGLRCTNIGGLELSRKAKLAATAGALHILADLLAANQPIGSVS

SEQ ID NO: 2964 - protein, 140 aa, Homo Sapiens
MANSGLQLLGFSMALLGWVGLVACTAIPQWQMSSYAGDNIITAQAMYKGLWMDCVTQSTGMMSCKIGLAGHSSPNGGLPGAGLPGHVCGHDGHEVHALWGRRQSEEGPYSHGWRHNFHRGRSCRLGSLLLVWPSDCHRLL

SEQ ID NO: 2965 - protein, 129 aa, Homo Sapiens
MANSGLQLLGFSMALLGWVGLVACTAIPQWQMSSYAGDNIITAQAMYKGLWMDCVTQSTGMMSCKMYDSVLALSAALQATRALMVVSLVLGFLAMFVATMGMKCTRCGGDDKVKKARIAMGGGIIFIVA

SEQ ID NO: 2966 - protein, 211 aa, Homo Sapiens
MANSGLQLLGFSMALLGWVGLVACTAIPQWQMSSYAGDNIITAQAMYKGLWMDCVTQSTGMMSCKMYDSVLALSAALQATRALMVVSLVLGFLAMFVATMGMKCTRCGGDDKVKKARIAMGGGIIFIVAGLAALVACSWYGHQIVTDFYNPLIPTNIKYEFGPAIFIGWAGSALVILGGALLSCSCPGNESKAGYRVPRSYPKSNSSKEYV

SEQ ID NO: 2967 - protein, 211 aa, Homo Sapiens; identical to SEQ ID NO: 2966

SEQ ID NO: 2968 - protein, 145 aa, Homo Sapiens
MANSGLQLLGFSMALLGWVGLVACTAIPQWQMSSYAGDNIITAQAMYKGLWMDCVTQSTGMMSCKMYDSVLALSAALQATRALMVVSLVLGFLAMFVATMGMKCTRCGGDDKVKKARIAMGGGIIFIVAGMSLALPSLLAGQGLP

SEQ ID NO: 2969 - protein, 194 aa, Homo Sapiens
MPEGTVGLPARRPQCFLRAEMANSGLQLLGFSMALLGWVGLVACTAIPQWQMSSYAGDNIITAQAMYKGLWMDCVTQSTGMMSCKMYDSVLALSAALQATRALMVVSLVLGFLAMFVATMGMKCTRCGGDDKVKKARIAMGGGIIFIVAGLAALVACSWYGHQIVTDFYNPLIPTNIKYEFGPAIFIGWAGSAL

SEQ ID NO: 2970 - protein, 100 aa, Homo Sapiens
MVVSLVLGFLAMFVATMGMKCTRCGGDDKVKKARIAMGGGIIFIVAGLAALVACSWYGHQIVTDFYNPLIPTNIKYEFGPAIFIGWAGSALVILGGALLS

SEQ ID NO: 2971 - protein, 72 aa, Homo Sapiens
FVSLGLMCFGALIGLCACICRSLYPTIATGILHLLAGLCTLGSVSCYVAGIELLHQKLELPDNPSTIKNVSP

SEQ ID NO: 2972 - protein, 155 aa, Homo Sapiens
KSIWDEFISDEADEKTYNDALFRYNGTVGLWRRCITIPKNMHWYSPPERTESFDVVTKCVSFTLTEQFMEKFVDPGNHNSGIDLLRTYLWRCQFLLPFVSLGLMCFGALIGLCACICRSLYPTIATGILHLLAAQYYKERFTIMTLQSWETYHKI

SEQ ID NO: 2973 - protein, 138 aa, Homo Sapiens
MAASIGTDFWYEYRSPVQENSSDLNKSIWDEFISDEADEKTYNDALFRYNGTVGLWRRCITIPKNMHWYSPPERTESFDVVTKCVSFTLTEQFMEKFVDPGNHNSGIDLLRTYLWRCQFLLPFVSLGLMCFGALIGLC

SEQ ID NO: 2974 - protein, 223 aa, Homo Sapiens
MAASIGTDFWYEYRSPVQENSSDLNKSIWDEFISDEADEKTYNDALFRYNGTVGLWRRCITIPKNMHWYSPPERTESFDVVTKCVSFTLTEQFMEKFVDPGNHNSGIDLLRTYLWRCQFLLPFVSLGLMCFGALIGLCACICRSLYPTIATGILHLLAGLCTLGSVSCYVAGIELLHQKLELPDNVSGEFGWSFCLACVSAPLQFMASALFIWAAHTNRKEYT

SEQ ID NO: 2975 - protein, 89 aa, Homo Sapiens
MDNRFATAFVIACVLSLISTIYMAASIGTDFWYEYRSPVQENSSDLNKSIWDEFISDEADEKTYNDALFRYNGTVGLWRRCITIPKNMH

SEQ ID NO: 2976 - protein, 145 aa, Homo Sapiens
MDNRFATAFVIACVLSLISTIYMAASIGTDFWYEYRSPVQENSSDLNKSIWDEFISDEADEKTYNDALFRYNGTVGLWRRCITIPKNMHWYSPPERTESFDVVTKCVSFTLTEQFMEKFVDPGNHNSGIDLLRTYLWRCQFLLPF

SEQ ID NO: 2977 - protein, 172 aa, Homo Sapiens
MDNRFATAFVIACVLSLISTIYMAASIGTDFWYEYRSPVQENSSDLNKSIWDEFISDEADEKTYNDALFRYNGTVGLWRRCITIPKNMHWYSPPERTESFDVVTKCVSFTLTEQFMEKFVDPGNHNSGIDLLRTYLWRCQFLLPFVSLGLMCFGALIGLCACICRSLYPTIA

SEQ ID NO: 2978 - protein, 177 aa, Homo Sapiens
MDNRFATAFVIACVLSLISTIYMAASIGTDFWYEYRSPVQENSSDLNKSIWDEFISDEADEKTYNDALFRYNGTVGLWRRCITIPKNMHWYSPPERTESFDVVTKCVSFTLTEQFMEKFVDPGNHNSGIDLLRTYLWRCQFLLPFVSLGLMCFGALIGLCACICRSLYPTIATGILH

SEQ ID NO: 2979 - protein, 180 aa, Homo Sapiens
MDNRFATAFVIACVLSLISTIYMAASIGTDFWYEYRSPVQENSSDLNKSIWDEFISDEADEKTYNDALFRYNGTVGLWRRCITIPKNMHWYSPPERTESFDVVTKCVSFTLTEQFMEKFVDPGNHNSGIDLLRTYLWRCQFLLPFVSLGLMCFGALIGLCACICRSLYPTIATGILHLLA

SEQ ID NO: 2980 - protein, 213 aa, Homo Sapiens
MDNRFATAFVIACVLSLISTIYMAASIGTDFWYEYRSPVQENSSDLNKSIWDEFISDEADEKTYNDALFRYNGTVGLWRRCITIPKNMHWYSPPERTESFDVVTKCVSFTLTEQFMEKFVDPGNHNSGIDLLRTYLWRCQFLLPFVSLGLMCFGALIGLCACICRSLYPTIATGILHLLAGLCTLGSVSCYVAGIELLHQKLELPDNVSGEFG

SEQ ID NO: 2981 - protein, 237 aa, Homo Sapiens
MDNRFATAFVIACVLSLISTIYMAASIGTDFWYEYRSPVQENSSDLNKSIWDEFISDEADEKTYNDALFRYNGTVGLWRRCITIPKNMHWYSPPERTESFDVVTKCVSFTLTEQFMEKFVDPGNHNSGIDLLRTYLWRCQFLLPFVSLGLMCFGALIGLCACICRSLYPTIATGILHLLAGLCTLGSVSCYVAGIELLHQKLELPDNVSGEFGWSFCLACVSAPLQFMASALFIWAA

SEQ ID NO: 2982 - protein, 239 aa, Homo Sapiens
MDNRFATAFVIACVLSLISTIYMAASIGTDFWYEYRSPVQENSSDLNKSIWDEFISDEADEKTYNDALFRYNGTVGLWRRCITIPKNMHWYSPPERTESFDVVTKCVSFTLTEQFMEKFVDPGNHNSGIDLLRTYLWRCQFLLPFVSLGLMCFGALIGLCACICRSLYPTIATGILHLLAGLCTLGSVSCYVAGIELLHQKLELPDNVSGEFGWSFCLACVSAPLQFMASALFIWAAHT

SEQ ID NO: 2983 - protein, 245 aa, Homo Sapiens
MDNRFATAFVIACVLSLISTIYMAASIGTDFWYEYRSPVQENSSDLNKSIWDEFISDEADEKTYNDALFRYNGTVGLWRRCITIPKNMHWYSPPERTESFDVVTKCVSFTLTEQFMEKFVDPGNHNSGIDLLRTYLWRCQFLLPFVSLGLMCFGALIGLCACICRSLYPTIATGILHLLAGLCTLGSVSCYVAGIELLHQKLELPDNVSGEFGWSFCLACVSAPLQFMASALFIWAAHTNRKEYT

SEQ ID NO: 2984 - protein, 253 aa, Homo Sapiens
MDNRFATAFVIACVLSLISTIYMAASIGTDFWYEYRSPVQENSSDLNKSIWDEFISDEADEKTYNDALFRYNGTVGLWRRCITIPKNMHWYSPPERTESFDVVTKCVSFTLTEQFMEKFVDPGNHNSGIDLLRTYLWRCQFLLPFVSLGLMCFGALIGLCACICRSLYPTIATGILHLLAGLCTLGSVSCYVAGIELLHQKLELPDNVSGEFGWSFCLACVSAPLQFMASALFIWAAHTNRKEYTLMKAYRVA

SEQ ID NO: 2985 - protein, 253 aa, Homo Sapiens; identical to SEQ ID NO: 2984

SEQ ID NO: 2986 - protein, 253 aa, Homo Sapiens; identical to SEQ ID NO: 2984

SEQ ID NO: 2987 - protein, 253 aa, Homo Sapiens; identical to SEQ ID NO: 2984

SEQ ID NO: 2988 - protein, 253 aa, Homo Sapiens; identical to SEQ ID NO: 2984

SEQ ID NO: 2989 - protein, 253 aa, Homo Sapiens; identical to SEQ ID NO: 2984

SEQ ID NO: 2990 - protein, 210 aa, Homo Sapiens
MDNRFATAFVIACVLSLISTIYMAASIGTDFWYEYRSPVQENSSDLNKSIWDEFISDEADEKTYNDALFRYNGTVGLWRRCITIPKNMHWYSPPERTESFDVVTKCVSFTLTEQFMEKFVDPGNHNSGIDLLRTYLWRCQFLLPFVSLGLMCFGALIGLCACICRSLYPTIATGILHLLAVTKESMLPAGAESKHTATPAHACVQTGKPK

SEQ ID NO: 2991 - protein, 106 aa, Homo Sapiens
MDNRFATAFVIACVLSLISTIYMAASIGTDFWYEYRSPVQENSSDLNKSIWDEFISDEADEKTYNDALFRYNGTVGLWRRCITIPKNMHWYSPPERTGNCSCSRVI

SEQ ID NO: 2992 - protein, 100 aa, Homo Sapiens
MEKFVDPGNHNSGIDLLRTYLWRCQFLLPFVSLGLMCFGALIGLCACICRSLYPTIATGILHLLAGLCTLGSVSCYVAGIELLHQKLELPDNVSGEFGWS

SEQ ID NO: 2993 - protein, 122 aa, Homo Sapiens
MEKFVDPGNHNSGIDLLRTYLWRCQFLLPFVSLGLMCFGALIGLCACICRSLYPTIATGILHLLAGLCTLGSVSCYVAGIELLHQKLELPDNVSGEFGWSFCLACVSAPLQFMASALFIWAA

SEQ ID NO: 2994 - protein, 87 aa, Homo Sapiens
MGESFDVVTKCVSFTLTEQFMEKFVDPGNHNSGIDLLRTYLWRCQFLLPFVSLGLMCFGALIGLCACICRSLYPTIATGILHLLAEN

SEQ ID NO: 2995 - protein, 158 aa, Homo Sapiens
MGESFDVVTKCVSFTLTEQFMEKFVDPGNHNSGIDLLRTYLWRCQFLLPFVSLGLMCFGALIGLCACICRSLYPTIATGILHLLAGLCTLGSVSCYVAGIELLHQKLELPDNVSGEFGWSFCLACVSAPLQFMASALFIWAAHTNRKEYTLMKAYRVA

SEQ ID NO: 2996 - protein, 276 aa, Homo Sapiens
MGGDRLENKTSVSVASWSSLNARMDNRFATAFVIACVLSLISTIYMAASIGTDFWYEYRSPVQENSSDLNKSIWDEFISDEADEKTYNDALFRYNGTVGLWRRCITIPKNMHWYSPPERTESFDVVTKCVSFTLTEQFMEKFVDPGNHNSGIDLLRTYLWRCQFLLPFVSLGLMCFGALIGLCACICRSLYPTIATGILHLLAGLCTLGSVSCYVAGIELLHQKLELPDNVSGEFGWSFCLACVSAPLQFMASALFIWAAHTNRKEYTLMKAYRVA

SEQ ID NO: 2997 - protein, 317 aa, Homo Sapiens
MQAAWLLGALVVPQLLGFGHGARGAEREWEGGWGGAQEEEREREALMLKHLQEALGLPAGRGDENPAGTVEGKEDWEMEEDQGEEEEEEATPTPSSGPSPSPTPEDIVTYILGRLAGLDAGLHQLHVRLHALDTRVVELTQGLRQLRNAAGDTRDAVQALQEAQGRAEREHGRLEDSECMTPPPSLPGPAHRLPEGAAPGPQVLPALARLRSSGGGAGAVHGAGREPGAAGRPPADGGAHSVPARGARSLQLARVAGRARSARRGPLPLRKRPARVLLRLASLTPPRARRPAQRLAASAQPGPAQRWHARELRGAGL

SEQ ID NO: 2998 - protein, 323 aa, Homo Sapiens
MQAAWLLGALVVPQLLGFGHGARGAEREWEGGWGGAQEEEREREALMLKHLQEALGLPAGRGDENPAGTVEGKEDWEMEEDQGEEEEEEATPTPSSGPSPSPTPEDIVTYILGRLAGLDAGLHQLHVRLHALDTRVVELTQGLRQLRNAAGDTRDAVQALQEAQGRAEREHGRLEGCLKGLRLGHKCFLLSRDFEAQAAAQARCTARGGSLAQPADRQQMEALTRYLRAALAPYNWPVWLGVHDRRAEGLYLFENGQRVSFFAWHRSPRPELGAQPSASPHPLSPDQPNGGTLENCVAQASDDGSWWDHDCQRRLYYVCEFPF

SEQ ID NO: 2999 - protein, 245 aa, Homo Sapiens
MQAAWLLGALVVPQLLGFGHGARGAEREWEGGWGGAQEEEREREALMLKHLQEALGLPAGRGDENPAGTVEGKEDWEMEEDQGEEEEEEATPTPSSGPSPSPTPEDIVTYILGRLAGLDAGLHQLHVRLHALDTRVVELTQGLRQLRNAAGDTRDAVQALQEAQGRAEREHGRLEGCLKGLRLGHKCFLLSRDFEAQPSASPHPLSPDQPNGGTLENCVAQASDDGSWWDHDCQRRLYYVCEFPF

SEQ ID NO: 3000 - protein, 118 aa, Homo Sapiens
LAKGRIQARRMKMQRIAALLDLPIQPTTEVLGFGLGSSTSTQHLPFRFYDQGRRGSSDPTVQRSVFASVDKVPALLTAAVERQPRWPLPSLLVPWLTDCCGGLCLLIYRRFSRIVFKI

SEQ ID NO: 3001 - protein, 906 aa, Homo Sapiens
MFGRSRSWVGGGHGKTSRNIHSLDHLKYLYHVLTKNTTVTEQNRNLLVETIRSITEILIWGDQNDSSVFDFFLEKNMFVFFLNILRQKSGRYVCVQLLQTLNILFENISHETSLYYLLSNNYVNSIIVHKFDFSDEEIMAYYISFLKTLSLKLNNHTVHFFYNEHTNDFALYTEAIKFFNHPESMVRIAVRTITLNVYKVDNQAMLHYIRDKTAVPYFSNLVWFIGSHVIELDDCVQTDEEHRNRGKLSDLVAEHLDHLHYLNDILIINCEFLNDVLTDHLLNRLFLPLYVYSLENQDKGGERPKISLPVSLYLLSQVFLIIHHAPLVNSLAEVILNGDLSEMYAKTEQDIQRSSAKPSIRCFIKPTETLERSLEMNKHKGKRRVQKRPNYKNVGEEEDEEKGPTEDAQEDAEKAKEIEMVIMERSKLSELAASTSVQEQNTTDEEKSAAATCSESTQWSRPFLDMVYHALDSPDDDYHALFVLCLLYAMSHNKGMDPEKLERIQLPVPNAAEKTTYNHPLAERLIRIMNNAAQPDGKIRLATLELSCLLLKQQVLMSAGCIMKDVHLACLEGAREESVHLVRHFYKGEDIFLDMFEDEYRSMTMKPMNVEYLMMDASILLPPTGTPLTGIDFVKRLPCGDVEKTRRAIRVFFMLRSLSLQLRGEPETQLPLTREEDLIKTDDVLDLNNSDLIACTVITKDGGMVQRFLAVDIYQMSLVEPDVSRLGWGVVKFAGLLQDMQVTGVEDDSRALNITIHKPASSPHSKPFPILQATFIFSDHIRCIIAKQRLAKGRIQARRMKMQRIAALLDLPIQPTTEVLGFGLGSSTSTQHLPFRFYDQGRRGSSDPTVQRSVFASVDKVPGEPAPRPAPQLVHHGGRSRSFSLWSLCELPFLSQKPRRLAAPAS

SEQ ID NO: 3002 - protein, 1053 aa, Homo Sapiens
MFGRSRSWVGGGHGKTSRNIHSLDHLKYLYHVLTKNTTVTEQNRNLLVETIRSITEILIWGDQNDSSVFDFFLEKNMFVFFLNILRQKSGRYVCVQLLQTLNILFENISHETSLYYLLSNNYVNSIIVHKFDFSDEEIMAYYISFLKTLSLKLNNHTVHFFYNEHTNDFALYTEAIKFFNHPESMVRIAVRTITLNVYKVSLDNQAMLHYIRDKTAVPYFSNLVWFIGSHVIELDDCVQTDEEHRNRGKLSDLVAEHLDHLHYLNDILIINCEFLNDVLTDHLLNRLFLPLYVYSLENQDKGGERPKISLPVSLYLLSQVFLIIHHAPLVNSLAEVILNGDLSEMYAKTEQDIQRSSAKPSIRCFIKPTETLERSLEMNKHKGKRRVQKRPNYKNVGEEEDEEKGPTEDAQEDAEKAKGTEGGSKGIKTSGESEEIEMVIMERSKLSELAASTSVQEQNTTDEEKSAAATCSESTQWSRPFLDMVYHALDSPDDDYHALFVLCLLYAMSHNKGMDPEKLERIQLPVPNAAEKTTYNHPLAERLIRIMNNAAQPDGKIRLATLELSCLLLKQQVLMSAGCIMKDVHLACLEGAREESVHLVRHFYKGEDIFLDMFEDEYRSMTMKPMNVEYLMMDASILLPPTGTPLTGIDFVKRLPCGDVEKTRRAIRVFFMLRSLSLQLRGEPETQLPLTREEDLIKTDDVLDLNNSDLIACTVITKDGGMVQRFLAVDIYQMSLVEPDVSRLGWGVVKFAGLLQDMQVTGVEDDSRALNITIHKPASSPHSKPFPILQATFIFSDHIRCIIAKQRLAKGRIQARRMKMQRIAALLDLPIQPTTEVLGFGLGSSTSTQHLPFRFYDQGRRGSSDPTVQRSVFASVDKVPGFAVAQCINQHSSPSLSSQSPPSASGSPSGSGSTSHCDSGGTSSSSTPSTAQSPADAPMSPELPKPHLPDQLVIVNETEADSKPSKNVARSAAVETASLSPSLVPARQPTISLLCEDTADTLSVESLTLVPPVDPHSLRSLTGMPPLSTPAAACTEPVGEEAACAEPVGTAED

SEQ ID NO: 3003 - protein, 60 aa, Homo Sapiens
  misc_feature (1)..(1): Xaa can be any naturally occurring amino acid
XEVLGFGLGSSTSTQHLPFRFYDQGRRGSSDPTVQRSVFASVDKVPDPSLCSCISYMCQS

SEQ ID NO: 3004 - protein, 152 aa, Homo Sapiens
  misc_feature (1)..(1): Xaa can be any naturally occurring amino acid
XKGRIQARRMKMQRIAALLDLPIQPTTEVLGFGLGSSTSTQHLPFRFYDQGRRGSSDPTVQRSVFASVDKVPGFAVAQCINQHSSPSLSSQSPPSASGSPSGSGSTSHCDSGGTSSSSTPSTAQSPAVRSGRKGRRRVFSLSEADSHGGHWV

SEQ ID NO: 3005 - protein, 128 aa, Homo Sapiens
  misc_feature (1)..(1): Xaa can be any naturally occurring amino acid
XMQVTGVEDDSRALNITIHKPASSPHSKPFPILQATFIFSDHIRCIIAKQRLAKGRIQARRMKMQRIAALLDLPIQPTTEVLGFGLGSSTSTQHLPFRFYDQGRRGSSDPTVQRSVFASVDKVPGFQG

SEQ ID NO: 3006 - protein, 446 aa, Homo Sapiens
MLHPETSPGRGHLLAVLLALLGTAWAEVWPPQLQEQAPMAGALNRKESFLLLSLHNRLRSWVQPPAADMRRLDWSDSLAQLAQARAALCGTPTPSLASGLWRTLQVGWNMQLLPAGLVSFVEVVSLWFAEGQRYSHAAGECARNATCTHYTQLVWATSSQLGCGRHLCSAGQAAIEAFVCAYSPRGNWEVNGKTIVPYKKGAWCSLCTASVSGCFKAWDHAGGLCEVPRNPCRMSCQNHGRLNISTCHCHCPPGYTGRYCQVRCSLQCVHGRFREEECSCVCDIGYGGAQCATKVHFPFHTCDLRIDGDCFMVSSEADTYYRARMKCQRKGGVLAQIKSQKVQDILAFYLGRLETTNEVIDSDFETRNFWIGLTYKTAKDSFRWATGEHQAFTSFAFGQPDNHGFGNCVELQASAAFNWNDQRCKTRNRYICQFAQEHISRWGPGS

SEQ ID NO: 3007 - protein, 446 aa, Homo Sapiens; identical to SEQ ID NO: 3006

SEQ ID NO: 3008 - protein, 455 aa, Homo Sapiens
MLHPETSPGRGHLLAVLLALLGTAWAEVWPPQLQEQAPMAGALNRKESFLLLSLHNRLRSWVQPPAADMRRLDWSDSLAQLAQARAALCGTPTPSLASGLWRTLQVGWNMQLLPAGLVSFVEVVSLWFAEGQRYSHAAGECARNATCTHYTQLVWATSSQLGCGRHLCSAGQAAIEAFVCAYSPRGNWEVNGKTIVPYKKGAWCSLCTASVSGCFKAWDHAGGLCEVPRNPCRMSCQNHGRLNISTCHCHCPPGYTGRYCQVRCSLQCVHGRFREEECSCVCDIGYGGAQCATKVHFPFHTCDLRIDGDCFMVSSEADTYYRARMKCQRKGGVLAQIKSQKVQDILAFYLGRLETTNEVIDSDFETRNFWIGLTYKTAKDSFRWATGEHQAFTSFAFGQPDNHGLVWLSAAMGFGNCVELQASAAFNWNDQRCKTRNRYICQFAQEHISRWGPGS

SEQ ID NO: 3009 - protein, 446 aa, Homo Sapiens; identical to SEQ ID NO: 3006

SEQ ID NO: 3010 - protein, 446 aa, Homo Sapiens; identical to SEQ ID NO: 3006

SEQ ID NO: 3011 - protein, 66 aa, Homo Sapiens
MRRLLVWATSSQLGCGRHLCSAGQAAIEAFVCAYSPRGNWEVNGKTIVPYKKGAWCSLCTASVSGC

SEQ ID NO: 3012 - protein, 455 aa, Homo Sapiens
MLHPETSPGRGHLLAVLLALLGTTWAEVWPPQLQEQAPMAGALNRKESFLLLSLHNRLRSWVQPPAADMRRLDWSDSLAQLAQARAALCGIPTPSLASGLWRTLQVGWNMQLLPAGLASFVEVVSLWFAEGQRYSHAAGECARNATCTHYTQLVWATSSQLGCGRHLCSAGQTAIEAFVCAYSPGGNWEVNGKTIIPYKKGAWCSLCTASVSGCFKAWDHAGGLCEVPRNPCRMSCQNHGRLNISTCHCHCPPGYTGRYCQVRCSLQCVHGRFREEECSCVCDIGYGGAQCATKVHFPFHTCDLRIDGDCFMVSSEADTYYRARMKCQRKGGVLAQIKSQKVQDILAFYLGRLETTNEVIDSDFETRNFWIGLTYKTAKDSFRWATGEHQAFTSFAFGQPDNHGLVWLSAAMGFGNCVELQASAAFNWNDQRCKTRNRYICQFAQEHISRWGPGS

SEQ ID NO: 3013 - protein, 446 aa, Homo Sapiens
MLHPETSPGRGHLLAVLLALLGTTWAEVWPPQLQEQAPMAGALNRKESFLLLSLHNRLRSWVQPPAADMRRLDWSDSLAQLAQARAALCGIPTPSLASGLWRTLQVGWNMQLLPAGLASFVEVVSLWFAEGQRYSHAAGECARNATCTHYTQLVWATSSQLGCGRHLCSAGQTAIEAFVCAYSPRGNWEVNGKTIIPYKKGAWCSLCTASVSGCFKAWDHAGGLCEVPRNPCRMSCQNHGRLNISTCHCHCPPGYTGRYCQVRCSLQCVHGRFREEECSCVCDIGYGGAQCATKVHFPFHTCDLRIDGDCFMVSSEADTYYRARMKCQRKGGVLAQIKSQKVQDILAFYLGRLETTNEVIDSDFETRNFWIGLTYKTAKDSFRWATGEHQAFTSFAFGQPDNHGFGNCVELQASAAFNWNDQRCKTRNRYICQFAQEHISRWGPGS

SEQ ID NO: 3014 - protein, 303 aa, Homo Sapiens [sequence omitted]

SEQ ID NO: 3015 - protein, 446 aa, Homo Sapiens; identical to SEQ ID NO: 3013

SEQ ID NO: 3016 - protein, 119 aa, Homo Sapiens
MLHPETSPGRGHLLAVLLALLGTAWAEVWPPQLQEQAPMAGALNRKESFLLLSLHNRLRSWVQPPAADMRRLDWSDSLAQLAQARAALCGIPTPSLASGLWRTLQVGWNMQLLPAGLAS

SEQ ID NO: 3017 - protein, 446 aa, Homo Sapiens
MLHPETSPGRGHLLAVLLALLGTAWAEVWPPQLQEQAPMAGALNRKESFLLLSLHNRLRSWVQPPAADMRRLDWSDSLAQLAQARAALCGIPTPSLASGLWRTLQVGWNMQLLPAGLASFVEVVSLWFAEGQRYSHAAGECARNATCTHYTQLVWATSSQLGCGRHLCSAGQAAIEAFVCAYSPRGNWEVNGKTIVPYKKGAWCSLCTASVSGCFKAWDHAGGLCEVPRNPCRMSCQNHGRLNISTCHCHCPPGYTGRYCQVRCSLQCVHGRFREEECSCVCDIGYGGAQCATKVHFPFHTCDLRIDGDCFMVSSEADTYYRARMKCQRKGGVLAQIKSQKVQDILAFYLGRLETTNEVIDSDFETRNFWIGLTYKTAKDSFRWATGEHQAFTSFAFGQPDNHGFGNCVELQASAAFNWNNQRCKTRNRYICQFAQEHISRWGPGS

SEQ ID NO: 3018 - protein, 455 aa, Homo Sapiens
MLHPETSPGRGHLLAVLLALLGTAWAEVWPPQLQEQAPMAGALNRKESFLLLSLHNRLRSWVQPPAADMRRLDWSDSLAQLAQARAALCGIPTPSLASGLWRTLQVGWNMQLLPAGLASFVEVVSLWFAEGQRYSHAAGECARNATCTHYTQLVWATSSQLGCGRHLCSAGQAAIEAFVCAYSPRGNWEVNGKTIVPYKKGAWCSLCTASVSGCFKAWDHAGGLCEVPRNPCRMSCQNHGRLNISTCHCHCPPGYTGRYCQVRCSLQCVHGRFREEECSCVCDIGYGGAQCATKVHFPFHTCDLRIDGDCFMVSSEADTYYRARMKCQRKGGVLAQIKSQKVQDILAFYLGRLETTNEVIDSDFETRNFWIGLTYKTAKDSFRWATGEHQAFTSFAFGQPDNHGLVWLSAAMGFGNCVELQASAAFNWNNQRCKTRNRYICQFAQEHISRWGPGS

SEQ ID NO: 3019 - protein, 446 aa, Homo Sapiens; identical to SEQ ID NO: 3017

SEQ ID NO: 3020 - protein, 446 aa, Homo Sapiens; identical to SEQ ID NO: 3017

SEQ ID NO: 3021 - protein, 446 aa, Homo Sapiens; identical to SEQ ID NO: 3017

SEQ ID NO: 3022 - protein, 134 aa, Homo Sapiens
MLHPETSPGRGHLLAVLLALLGTAWAEVWPPQLQEQAPMAGALNRKESFLLLSLHNRLRSWVQPPAADMRRLLVWATSSQLGCGRHLCSAGQAAIEAFVCAYSPRGNWEVNGKTIVPYKKGAWCSLCTASVSGC

SEQ ID NO: 3023 - protein, 86 aa, Homo Sapiens
MQRWTLWAAAFLTLHSAQAFPQTDISISPALPELPLPSLCPLFWMEFKGHCYRFFPLNKTWAEADLYCSEFSVGRKSAKLASIHSL

SEQ ID NO: 3024 - protein, 186 aa, Homo Sapiens
MQRWTLWAAAFLTLHSAQAFPQTDISISPALPELPLPSLCPLFWMEFKGHCYRFFPLNKTWAEADLYCSEFSVGRKSAKLASIHSWEENVFVYDLVNSCVPGIPADVWTGLHDHRQEGQFEWTDGSSYDYSYWDGSQPDDGVHADPEEEDCVQIWYRPTSALRSWNDNTCSRKFPFVCKIPSLTIH

SEQ ID NO: 3025 - protein, 136 aa, Homo Sapiens
MQRWTLWAAAFLTLHSAQAFPQTDISISPALPELPLPSLCPLFWMEFKGHCYRFFPLNKTWAEADLYCSEFSVGRKSAKLASIHSWEENVFVYDLVNSCVPGIPADVWTGLHDHRQVRKQWPLGPLGSSSQDSILI

SEQ ID NO: 3026 - protein, 65 aa, Homo Sapiens
MQRWTLWAAAFLTLHSAQAFPQTDISISPVCFLSAPSPARAAPAFPVPPVLDGVQRPLLSILPSQ

SEQ ID NO: 3027 - protein, 80 aa, Homo Sapiens
MILKLILSLKNFLRRYKCSSDHWIGLKMAKNRTGQWVDGATFTKSFGMRGSEGCAYLSDDGAATARCYTERKWICRKRIH

SEQ ID NO: 3028 - protein, 149 aa, Homo Sapiens
MMTKHKKCFIIVGVLITTNIITLIVKLTRDSQSLCPYDWIGFQNKCYYFSKEEGDWNSSKYNCSTQHADLTIIDNIEEMNFLRRYKCSSDHWIGLKMAKNRTGQWVDGATFTKSFGMRGSEGCAYLSDDGAATARCYTERKWICRKRIH

SEQ ID NO: 3029 - protein, 206 aa, Homo Sapiens
MAQQACPRAMAKNGLVICILVITLLLDQTTSHTSRLKARKHSKRRVRDKDGDLKTQIEKLWTEVNALKEIQALQTVCLRGTKVHKKCYLASEGLKHFHEANEDCISKGGILVIPRNSDEINALQDYGKRSLPGVNDFWLGINDMVTEGKFVDVNGIAISFLNWDRAQPNGGKRENCVLFSQSAQGKWSDEACRSSKRYICEFTIPQ

SEQ ID NO: 3030 - protein, 50 aa, Homo Sapiens
MAQQACPRAMAKNGLVICILVITLLLDQTTSHTSRLKARKHSKRRVRGIC

SEQ ID NO: 3031 - protein, 202 aa, Homo Sapiens
MELWGAYLLLCLFSLLTQVTTEPPTQKPKKIVNAKKDVVNTKMFEELKSRLDTLAQEVALLKEQQALQTVCLKGTKVHMKCFLAFTQTKTFHEASEDCISRGGTLGTPQTGSENDALYEYLRQSVGNEAEIWLGLNDMAAEGTWVDMTGARIAYKNWETEITAQPDGGKTENCAVLSGAANGKWFDKRCRDQLPYICQFGIV

SEQ ID NO: 3032 - protein, 160 aa, Homo Sapiens
MFEELKSRLDTLAQEVALLKEQQALQTVCLKGTKVHMKCFLAFTQTKTFHEASEDCISRGGTLGTPQTGSENDALYEYLRQSVGNEAEIWLGLNDMAAEGTWVDMTGARIAYKNWETEITAQPDGGKTENCAVLSGAANGKWFDKRCRDQLPYICQFGIV

SEQ ID NO: 3033 - protein, 179 aa, Homo Sapiens
MHFQAFWLCLGLLFISINAEFMDDDVETEDFEENSEEIDVNESELSSEIKYKTPQPIGEVYFAETFDSGRLAGWVLSKAKKDDMDEEISIYDGRWEIEELKENQVPGDRGLVLKSRAKHHAISAVLAKPFIFADKPLIVQYEVNFQDGIDCGGAYIKLLADTDDLILENFYDKTSYIIM

SEQ ID NO: 3034 - protein, 610 aa, Homo Sapiens
MHFQAFWLCLGLLFISINAEFMDDDVETEDFEENSEEIDVNESELSSEIKYKTPQPIGEVYFAETFDSGRLAGWVLSKAKKDDMDEEISIYDGRWEIEELKENQVPGDRGLVLKSRAKHHAISAVLAKPFIFADKPLIVQYEVNFQDGIDCGGAYIKLLADTDDLILENFYDKTSYIIMFGPDKCGEDYKLHFIFRHKHPKTGVFEEKHAKPPDVDLKKFFTDRKTHLYTLVMNPDDTFEVLVDQTVVNKGSLLEDVVPPIKPPKEIEDPNDKKPEEWDERAKIPDPSAVKPEDWDESEPAQIEDSSVVKPAGWLDDEPKFIPDPNAEKPDDWNEDTDGEWEAPQILNPACRIGCGEWKPPMIDNPKYKGVWRPPLVDNPNYQGIWSPRKIPNPDYFEDDHPFLLTSFSALGLELWSMTSDIYFDNFIICSEKEVADHWAADGWRWKIMIANANKPGVLKQLMAAAEGHPWLWLIYLVTAGVPIALITSFCWPRKVKKKHKDTEYKKTDICIPQTKGVLEQEEKEEKAALEKPMDLEEEKKQNDGEMLEKEEESEPEEKSEEEIEIIEGQEESNQSNKSGSEDEMKEADESTGSGDGPIKSVRKRRVRKD

SEQ ID NO: 3035 - protein, 610 aa, Homo Sapiens; identical to SEQ ID NO: 3034

SEQ ID NO: 3036 - protein, 277 aa, Homo Sapiens
GCSLMAQEVDTAQGAEMRRGAGAARGRASWCWALALLWLAVVPGWSRVSGIPSRRHWPVPYKRFDFRPKPDPYCQAKYTFCPTGSPIPVMEGDDDIEVFRLQAPVWEFKYGDLLGHLKIMHDAIGFRSTLTGKNYTMEWYELFQLGNCTFPHLRPEMDAPFWCNQGAACFFEGIDDVHWKENGTLVQVATISGFHHVGQDSIELRTSSDPPILASQSAGITDVSHCTRPTIRILPQRGTLYYLSLALLPGWSTVVRPRLTATSASRIQTIFLPQPPK

SEQ ID NO: 3037 - protein, 204 aa, Homo Sapiens
GSTGCSLMAQEVDTAQGAEMRRGAGAARGRASWCWALALLWLAVVPGWSRVSGIPSRRHWPVPYKRFDFRPKPDPYCQAKYTFCPTGSPIPVMEGDDDIEVFRLQAPVWEFKYGDLLGHLKIMHDAIGFRSTLTGKNYTMEWYELFQLGNCTFPHLRPEMDAPFWCNQGAACFFEGIDDVHWKENGTLVQVATISDGETEAQRG

SEQ ID NO: 3038 - protein, 271 aa, Homo Sapiens
LMAQEVDTAQGAEMRRGAGAARGRASWCWALALLWLAVVPGWSRVSGIPSRRHWPVPYKRFDFRPKPDPYCQAKYTFCPTGSPIPVMEGDDDIEVFRLQAPVWEFKYGDLLGHLKIMHDAIGFRSTLTGKNYTMEWYELFQLGNCTFPHLRPEMDAPFWCNQGAACFFEGIDDVHWKENGTLVQVATISGFHHVGQDSIELRTSSDPPILASQSAGITDVSHCTRPTIRILPQRGTLYYLLWTKTFLLCSLQFSWDFQNIATPYFNLLPKP

SEQ ID NO: 3039 - protein, 358 aa, Homo Sapiens
MAQEVDTAQGAEMRRGAGAARGRASWCWALALLWLAVVPGWSRVSGIPSRRHWPVPYKRFDFRPKPDPYCQAKYTFCPTGSPIPVMEGDDDIEVFRLQAPVWEFKYGDLLGHLKIMHDAIGFRSTLTGKNYTMEWYELFQLGNCTFPHLRPEMDAPFWCNQGAACFFEGIDDVHWKENGTLVQVATISGNMFNQMAKWVKQDNETGIYYETWNVKASPEKGAETWFDSYDCSKFVLRTFNKLAEFGAEFKNIETNYTRIFLYSGEPTYLGNETSVFGPTGNKTLGLAIKRFYYPFKPHLPTKEFLLSLLQIFDAVIVHKQFYLFYNFEYWFLPMKFPFIKITYEEIPLPIRNKTLSGL

SEQ ID NO: 3040 - protein, 36 aa, Homo Sapiens
MEGDDDIEVFRLQAPVWEFKYGDLLGHLLLYLAPGR

SEQ ID NO: 3041 - protein, 407 aa, Homo Sapiens
MRRNLRLGPSSGADAQGQGAPRPGLAAPRMLLPPASQASRGSGSTGCSLMAQEVDTAQGAEMRRGAGAARGRASWCWALALLWLAVVPGWSRVSGIPSRRHWPVPYKRFDFRPKPDPYCQAKYTFCPTGSPIPVMEGDDDIEVFRLQAPVWEFKYGDLLGHLKIMHDAIGFRSTLTGKNYTMEWYELFQLGNCTFPHLRPEMDAPFWCNQGAACFFEGIDDVHWKENGTLVQVATISGNMFNQMAKWVKQDNETGIYYETWNVKASPEKGAETWFDSYDCSKFVLRTFNKLAEFGAEFKNIETNYTRIFLYSGEPTYLGNETSVFGPTGNKTLGLAIKRFYYPFKPHLPTKEFLLSLLQIFDAVIVHKQFYLFYNFEYWFLPMKFPFIKITYEEIPLPIRNKTLSGL

SEQ ID NO: 3042 - protein, 125 aa, Homo Sapiens
  misc_feature (1)..(1): Xaa can be any naturally occurring amino acid
XGRASWCWALALLWLAVVPGWSRVSGIPSRRHWPVPYKRFDFRPKPDPYCQAKYTFCPTGSPIPVMEGDDDIEVFRLQAPVWEFKYGDLLGHLVTWTHGCVTVAFIHVLSLHRKLCMMPLDSEVH

SEQ ID NO: 3043 - protein, 304 aa, Homo Sapiens
  misc_feature (1)..(1): Xaa can be any naturally occurring amino acid
XGYKRFDFRPKPDPYCQAKYTFCPTGSPIPVMEGDDDIEVFRLQAPVWEFKYGDLLGHLKIMHDAIGFRSTLTGKNYTMEWYELFQLGNCTFPHLRPEMDAPFWCNQGAACFFEGIDDVHWKENGTLVQVATISGNMFNQMAKWVKQDNETGIYYETWNVKASPEKGAETWFDSYDCSKFVLRTFNKLAEFGAEFKNIETNYTRIFLYSGEPTYLGNETSVFGPTGNKTLGLAIKRFYYPFKPHLPTKEFLLSLLQIFDAVIVHKQFYLFYNFEYWFLPMKFPFIKITYEEIPLPIRNKTLSGL

SEQ ID NO: 3044 - protein, 216 aa, Homo Sapiens
  misc_feature (1)..(1): Xaa can be any naturally occurring amino acid
XLPPASQASRGSGSTGCSLMAQEVDTAQGAEMRRGAGAARGRASWCWALALLWLAVVPGWSRVSGIPSRRHWPVPYKRFDFRPKPDPYCQAKYTFCPTGSPIPVMEGDDDIEVFRLQAPVWEFKYGDLLGHLKIMHDAIGFRSTLTGKNYTMEWYELFQLGNCTFPHLRPEMDAPFWCNQGAACFFEGIDDVHWKENGTLVQVATISDGETEAQRG

SEQ ID NO: 3045 - protein, 249 aa, Homo Sapiens
  misc_feature (1)..(1): Xaa can be any naturally occurring amino acid
XMAQEVDTAQGAEMRRGAGAARGRASWCWALALLWLAVVPGWSRVSGIPSRRHWPVPYKRFDFRPKPDPYCQAKYTFCPTGSPIPVMEGDDDIEVFRLQAPVWEFKYGDLLGHLKIMHDAIGFRSTLTGKNYTMEWYELFQLGNCTFPHLRPEMDAPFWCNQGAACFFEGIDDVHWKENGTLVQVATISGFHHVGQDSIELRTSSDPPILASQSAGITDVSHCTRPTIRILPQRGTLYYLRWVLLCCPG

SEQ ID NO: 3046 - protein, 205 aa, Homo Sapiens
  misc_feature (1)..(1): Xaa can be any naturally occurring amino acid
XQASRGSGSTGCSLMAQEVDTAQGAEMRRGAGAARGRASWCWALALLWLAVVPGWSRVSGIPSRRHWPVPYKRFDFRPKPDPYCQAKYTFCPTGSPIPVMEGDDDIEVFRLQAPVWEFKYGDLLGHLKIMHDAIGFRSTLTGKNYTMEWYELFQLGNCTFPHLRPEMDAPFWCNQGAACFFEGIDDVHWKENGTLVQVATISGKL

SEQ ID NO: 3047 - protein, 210 aa, Homo Sapiens
  misc_feature (1)..(1): Xaa can be any naturally occurring amino acid
XSLMAQEVDTAQGAEMRRGAGAARGRASWCWALALLWLAVVPGWSRVSGIPSRRHWPVPYKRFDFRPKPDPYCQAKYTFCPTGSPIPVMEGDDDIEVFRLQAPVWEFKYGDLLGHLKIMHDAIGFRSTLTGKNYTMEWYELFQLGNCTFPHLRPEMDAPFWCNQGAACFFEGIDDVHWKENGTLVQVATISEISCALKNGIKLAELGFLL

SEQ ID NO: 3048 - protein, 112 aa, Homo Sapiens
MEKILILLLVALSVAYAAPGPRGIIINLENGELCMNSAQCKSNCCQHSSALGLARCTSMASENSECSVKTLYGIYYKCPCERGLTCEGDKTIVGSITNTNFGICHDAGRSKQ

SEQ ID NO: 3049 - protein, 71 aa, Homo Sapiens
MEKILILLLVALSVAYAAPGPRGIIINLTLYGIYYKCPCERGLTCEGDKTIVGSITNTNFGICHDAGRSKQ

SEQ ID NO: 3050 - protein, 98 aa, Homo Sapiens
MILLPQPPKKLGLQENGELCMNSAQCKSNCCQHSSALGLARCTSMASENSECSVKTLYGIYYKCPCERGLTCEGDKTIVGSITNTNFGICHDAGRSKQ

SEQ ID NO: 3051 - protein, 42 aa, Homo Sapiens
GCCQRAPDNCESHCAEKGSEGSLCQTQLPATPCFLPSNTVRT

SEQ ID NO: 3052 - protein, 121 aa, Homo Sapiens
MMLPQWLLLLFLLFFFLFLLTRGSLSPTKYNLLELKESCIRNQDCETGCCQRAPDNCESHCAEKGSEGSLCQTQVFFGQYRACPCLRNLTCIYSKNEKWLSIAYGRCQKIGRQKLAKKMFF

SEQ ID NO: 3053 - protein, 100 aa, Homo Sapiens
MAAALALVAGVLSGAVLPLWSALPQYKKKITDRCFHHSECYSGCCLMDLDSGGAFCAPRARITMICLPQTKGATNIICPCRMGLTCISKDLMCSRRCHMI

SEQ ID NO: 3054 - protein, 153 aa, Homo Sapiens
MAAALALVAGVLSGAVLPLWSALPQYKKKITDRCFHHSECYSGCCLMDLDSGGAFCAPRARITMICLPQWLELFKGRDRIIFIYEAPTPSLVSAHNQGSYQHHLPLPDGLDVHIQGLDVFPPVPYDLEEDAGWSLLPWGHRPWLPPTCSKSSS

SEQ ID NO: 3055 - protein, 633 aa, Homo Sapiens
MPSCGACTCGAAAVRLITSSLASAQRGISGGRIHMSVLGRLGTFETQILQRAPLRSFTETPAYFASKDGISKDGSGDGNKKSASEGSSKKSGSGNSGKGGNQLRCPKCGDLCTHVETFVSSTRFVKCEKCHHFFVVLSEADSKKSIIKEPESAAEAVKLAFQQKPPPPPKKIYNYLDKYVVGQSFAKKVLSVAVYNHYKRIYNNIPANLRQQAEVEKQTSLTPRELEIRRREDEYRFTKLLQIAGISPHGNALGASMQQQVNQQIPQEKRGGEVLDSSHDDIKLEKSNILLLGPTGSGKTLLAQTLAKCLDVPFAICDCTTLTQAGYVGEDIESVIAKLLQDANYNVEKAQQGIVFLDEVDKIGSVPGIHQLRDVGGEGVQQGLLKLLEGTIVNVPEKNSRKLRGETVQVDTTNILFVASGAFNGLDRIISRRKNEKYLGFGTPSNLGKGRRAAAAADLANRSGESNTHQDIEEKDRLLRHVEARDLIEFGMIPEFVGRLPVVVPLHSLDEKTLVQILTEPRNAVIPQYQALFSMDKCELNVTEDALKAIARLALERKTGARGLRSIMEKLLLEPMFEVPNSDIVCVEVDKEVVEGKKEPGYIRAPTKESSEEEYDSGVEEEGWPRQADAANS

SEQ ID NO: 3056 - protein, 268 aa, Homo Sapiens
MPSCGACTCGAAAVRLITSSLASAQRGISGGRIHMSVLGRLGTFETQILQRAPLRSFTETPAYFASKDGISKDGSGDGNKKSASEGSSKKSGSGNSGKGGNQLRCPKCGDLCTHVETFVSSTRFVKCEKCHHFFVVLSEADSKKSIIKEPESAAEAVKLAFQQKPPPPPKKIYNYLDKYVVGQSFAKKVLSVAVYNHYKRIYNNIPANLRQQAEVEKQTSLTPRELEIRRREDEYRFTKLLQIAGISPHGNALGASMQQQVKLCWHKP

SEQ ID NO: 3057 - protein, 130 aa, Homo Sapiens
MSVLGRLGTFETQILQRAPLRSFTETPAYFASKDGISKDGSGDGNKKSASEGSSKKSGSGNSGKGGNQLRCPKCGDLCTHVETFVSSTRFVKCEKCHHFFVVLSEADSKKSIIKEPESAAEAVKLAFQQK

SEQ ID NO: 3058 - protein, 129 aa, Homo Sapiens
MENDNTVLLNPPLFALDKDAPLRYAGEICGFRLHGSGVPFEAVILDKATGEGLIRAKEPVDCEAQKEHTFTIQAYDCGEGPDGANTKKSHKATVHVRVNDVNEFAPVFVERLYRAAVTEGKLYDRILRV

SEQ ID NO: 3059 - protein, 142 aa, Homo Sapiens
MENDNTVLLNPPLFALDKDAPLRYAGEICGFRLHGSGVPFEAVILDKATGEGLIRAKEPVDCEAQKEHTFTIQAYDCGEGPDGANTKKSHKATVHVRVNDVNEFAPVFVERLYRAAVTEGKLYDRILRVEAIDGDCSPQYSQ

SEQ ID NO: 3060 - protein, 154 aa, Homo Sapiens
MENDNTVLLNPPLFALDKDAPLRYAGEICGFRLHGSGVPFEAVILDKATGEGLIRAKEPVDCEAQKEHTFTIQAYDCGEGPDGANTKKSHKATVHVRVNDVNEFAPVFVERLYRAAVTEGKLYDRILRVEAIDGDCSPQYSQICYYEILTPNTP

SEQ ID NO: 3061 - protein, 134 aa, Homo Sapiens
MTLLLLPLLLASLLASCSCNKANKHKPWIEAEYQGIVMENDNTVLLNPPLFALDKDAPLRYAGEICGFRLHGSGVPFEAVILDKATGEGLIRAKEPVDCEAQKEHTFTIQAYDCGEGPDGANTKKSHKATVHVR

SEQ ID NO: 3062 - protein, 956 aa, Homo Sapiens
MTLLLLPLLLASLLASCSCNKANKHKPWIEAEYQGIVMENDNTVLLNPPLFALDKDAPLRYAGEICGFRLHGSGVPFEAVILDKATGEGLIRAKEPVDCEAQKEHTFTIQAYDCGEGPDGANTKKSHKATVHVRVNDVNEFAPVFVERLYRAAVTEGKLYDRILRVEAIDGDCSPQYSQICYYEILTPNTPFLIDNDGNIENTEKLQYSGERLYKFTVTAYDCGKKRAADDAEVEIQVKPTCKPSWQGWNKRIEYAPGAGSLALFPGIRLETCDEPLWNIQATIELQTSHVAKGCDRDNYSERALRKLCGAATGEVDLLPMPGPNANWTAGLSVHYSQDSSLIYWFNGTQAVQVPLGGPSGLGSGPQDSLSDHFTLSFWMKHGVTPNKGKKEEETIVCNTVQNEDGFSHYSLTVHGCRIAFLYWPLLESARPVKFLWKLEQVCDDEWHHYALNLEFPTVTLYTDGISFDPALIHDNGLIHPPRREPALMIGACWTEEKNKEKEKGDNSTDTTQGDPLSIHHYFHGYLAGFSVRSGRLESREVIECLYACREGLDYRDFESLGKGMKVHVNPSQSLLTLEGDDVETFNHALQHVAYMNTLRFATPGVRPLRLTTAVKCFSEESCVSIPEVEGYVVVLQPDAPQILLSGTAHFARPAVDFEGTNGVPLFPDLQITCSISHQVEAKKDESWQGTVTDTRMSDEIVHNLDGCEISLVGDDLDPERESLLLDTTSLQQRGLELTNTSAYLTIAGVESITVYEEILRQARYRLRHGAALYTRKFRLSCSEMNGRYSSNEFIVEVNVLHSMNRVAHPSHVLSSQQFLHRGHQPPPEMAGHSLASSHRNSMIPSAATLIIVVCVGFLVLMVVLGLVRIHSLHRRVSGAGGPPGASSDPKDPDLFWDDSALTIIVNPMESYQNRQSCVTGAVGGQQEDEDSSDSEVADSPSSDERRIIETPPHRY

SEQ ID NO: 3063 - protein, 968 aa, Homo Sapiens
MVLGCELSGSTRVVVGVEALLTGASSPLPGVGPANKHKPWIEAEYQGIVMENDNTVLLNPPLFALDKDAPLRYAGEICGFRLHGSGVPFEAVILDKATGEGLIRAKEPVDCEAQKEHTFTIQAYDCGEGPDGANTKKSHKATVHVRVNDVNEFAPVFVERLYRAAVTEGKLYDRILRVEAIDGDCSPQYSQICYYEILTPNTPFLIDNDGNIENTEKLQYSGERLYKFTVTAYDCGKKRAADDAEVEIQVKPTCKPSWQGWNKRIEYAPGAGSLALFPGIRLETCDEPLWNIQATIELQTSHVAKGCDRDNYSERALRKLCGAATGEVDLLPMPGPNANWTAGLSVHYSQDSSLIYWFNGTQAVQVPLGGPSGLGSGPQDSLSDHFTLSFWMKHGVTPNKGKKEEETIVCNTVQNEDGFSHYSLTVHGCRIAFLYWPLLESARPVKFLWKLEQVCDDEWHHYALNLEFPTVTLYTDGISFDPALIHDNGLIHPPRREPALMIGACWTEEKNKEKEKGDNSTDTTQGDPLSIHHYFHGYLAGFSVRSGRLESREVIECLYACREGLDYRDFESLGKGMKVHVNPSQSLLTLEGDDVETFNHALQHVAYMNTLRFATPGVRPLRLTTAVKCFSEESCVSIPEVEGYVVVLQPDAPQILLSGTAHFARPAVDFEGTNGVPLFPDLQITCSISHQVEAKKDESWQGTVTDTRMSDEIVHNLDGCEISLVGDDLDPERESLLLDTTSLQQRGLELTNTSAYLTIAGVESITVYEEILRQARYRLRHGAALYTRKFRLSCSEMNGRYSSNEFIVEVNVLHSMNRVAHPSHVLSSQQFLHRGHQPPPEMAGHSLASSHRNSMIPSAATLIIVVCVGFLVLMVVLGLVRIHSLHRRVSGAGGPPGASSDPKDPDLFWDDSALTIIVNPMESYQNRQSCVTGAVGGQQEDEDSSDSEVADSPSSDERRIIETPPHRY

SEQ ID NO: 3064 - protein, 176 aa, Homo Sapiens
MVVITNKHKPWIEAEYQGIVMENDNTVLLNPPLFALDKDAPLRYAGEICGFRLHGSGVPFEAVILDKATGEGLIRAKEPVDCEAQKEHTFTIQAYDCGEGPDGANTKKSHKATVHVRVNDVNEFAPVFVERLYRAAVTEGKLYDRILRVEAIDGDCSPQYSQICYYEILTPNTPFL

SEQ ID NO: 3065 - protein, 297 aa, Homo Sapiens
MEACKDSRIGGMMKTLLLFVGLLLTWESGQVLGDQTVSDNELQEMSNQGSKYVNKEIQNAVNGVKQIKTLIEKTNEERKTLLSNLEEAKKKKEDALNETRESETKLKELPGVCNETMMALWEECKPCLKQTCMKFYARVCRSGSGLVGRQLEEFLNQSSPFYFWMNGDRIDSLLENDRQQTHMLDVMQDHFSRASSIIDELFQDRFFTREPQDTYHYLPFSLPHRRPHFFFPKSRIVRSLMPFSPYEPLNFHAMFQPFLEMIHEAQQAMDIHFHSPAFQHPPTEFIREGDDDRTVCR

SEQ ID NO: 3066 - protein, 32 aa, Homo Sapiens
MMKTLLLFVGLLLTWESGQVLGDQTVSDNELQ

SEQ ID NO: 3067 - protein, 82 aa, Homo Sapiens
MMKTLLLFVGLLLTWESGQVLGDQTVSDNELQEMSNQGSKYVNKEIQNAVNGVKQIKTLIEKTNEERKTLLSNLEEAKKKKE

SEQ ID NO: 3068 - protein, 82 aa, Homo Sapiens; identical to SEQ ID NO: 3067

SEQ ID NO: 3069 - protein, 129 aa, Homo Sapiens
MMKTLLLFVGLLLTWESGQVLGDQTVSDNELQEMSNQGSKYVNKEIQNAVNGVKQIKTLIEKTNEERKTLLSNLEEAKKKKEDALNETRESETKLKELPGVCNETMMALWEECKPCLKQTCMKFYARVC

SEQ ID NO: 3070 - protein, 136 aa, Homo Sapiens
MMKTLLLFVGLLLTWESGQVLGDQTVSDNELQEMSNQGSKYVNKEIQNAVNGVKQIKTLIEKTNEERKTLLSNLEEAKKKKEDALNETRESETKLKELPGVCNETMMALWEECKPCLKQTCMKFYARVCRSGSGLV

SEQ ID NO: 3071 - protein, 139 aa, Homo Sapiens
MMKTLLLFVGLLLTWESGQVLGDQTVSDNELQEMSNQGSKYVNKEIQNAVNGVKQIKTLIEKTNEERKTLLSNLEEAKKKKEDALNETRESETKLKELPGVCNETMMALWEECKPCLKQTCMKFYARVCRSGSGLVGRQ

SEQ ID NO: 3072 - protein, 204 aa, Homo Sapiens
MMKTLLLFVGLLLTWESGQVLGDQTVSDNELQEMSNQGSKYVNKEIQNAVNGVKQIKTLIEKTNEERKTLLSNLEEAKKKKEDALNETRESETKLKELPGVCNETMMALWEECKPCLKQTCMKFYARVCRSGSGLVGRQLEEFLNQSSPFYFWMNGDRIDSLLENDRQQTHMLDVMQDHFSRASSIIDELFQDRFFTREPQDTY

SEQ ID NO: 3073 - protein, 449 aa, Homo Sapiens
MMKTLLLFVGLLLTWESGQVLGDQTVSDNELQEMSNQGSKYVNKEIQNAVNGVKQIKTLIEKTNEERKTLLSNLEEAKKKKEDALNETRESETKLKELPGVCNETMMALWEECKPCLKQTCMKFYARVCRSGSGLVGRQLEEFLNQSSPFYFWMNGDRIDSLLENDRQQTHMLDVMQDHFSRASSIIDELFQDRFFTREPQDTYHYLPFSLPHRRPHFFFPKSRIVRSLMPFSPYEPLNFHAMFQPFLEMIHEAQQAMDIHFHSPAFQHPPTEFIREGDDDRTVCREIRHNSTGCLRMKDQCDKCREILSVDCSTNNPSQAKLRRELDESLQVAERLTRKYNELLKSYQWKMLNTSSLLEQLNEQFNWVSRLANLTQGEDQYYLRVTTVASHTSDSDVPSGVTEVVVKLFDSDPITVTVPVEVSRKNPKFMETVAEKALQEYRKKHREE

SEQ ID NO: 3074 - protein, 449 aa, Homo Sapiens; identical to SEQ ID NO: 3073

SEQ ID NO: 3075 - protein, 449 aa, Homo Sapiens; identical to SEQ ID NO: 3073

SEQ ID NO: 3076 - protein, 271 aa, Homo Sapiens
MMKTLLLFVGLLLTWESGQVLGDQTVSDNELQEMSNQGSKYVNKEIQNAVNGVKQIKTLIEKTNEERKTLLSNLEEAKKKKEDALNETRESETKLKELPGVCNETMMALWEECKPCLKQTCMKFYARVCRSGSGLVGRQLEEFLNQSSPFYFWMNGDRIDSLLENDRQQTHMLDVMQDHFSRASSIIDELFQDSLMPFSPYEPLNFHAMFQPFLEMIHEAQQAMDIHFHSPAFQHPPTEFIREGDDDRTVCREIRHNSTGCLRMKDQCDKC

SEQ ID NO: 3077 - protein, 140 aa, Homo Sapiens
  misc_feature (1)..(1): Xaa can be any naturally occurring amino acid
XADCSTNNPSQAKLRRELDESLQVAERLTRKYNELLKSYQWKMLNTSSLLEQLNEQFNWVSRLANLTQGEDQYYLRVTTVASHTSDSDVPSGVTEVVVKLFDSDPITVTVPVEVSRKNPKFMETVAEKALQEYRKKHREE

SEQ ID NO: 3078 - protein, 284 aa, Homo Sapiens
  misc_feature (1)..(1): Xaa can be any naturally occurring amino acid
XQLEEFLNQSSPFYFWMNGDRIDSLLENDRQQTHMLDVMQDHFSRASSIIDELFQDRFFTREPQDTYHYLPFSLPHRRPHFFFPKSRIVRSLMPFSPYEPLNFHAMFQPFLEMIHEAQQAMDIHFHSPAFQHPPTEFIREGDDDRTVCREIRHNSTGCLRMKDQCDKCREILSVDCSTNNPSQAKLRRELDESLQVAERLTRKYNELLKSYQWKMLNTSSLLEQLNEQFNWVSRLANLTQGEDQYYLRVTTVASHTSDSDVPSGVTEVVVKLFDSDPITVTVPV

SEQ ID NO: 3079 - protein, 466 aa, Homo Sapiens
MKPPLLVFIVCLLWLKDSHCAPTWKDKTAISENLKSFSEVGEIDADEEVKKALTGIKQMKIMMERKEKEHTNLMSTLKKCREEKQEALKLLNEVQEHLEEEERLCRESLADSWGECRSCLENNCMRIYTTCQPSWSSVKNKIERFFRKIYQFLFPFHEDNEKDLPISEKLIEEDAQLTQMEDVFSQLTVDVNSLFNRSFNVFRQMQQEFDQTFQSHFISDTDLTEPYFFPAFSKEPMTKADLEQCWDIPNFFQLFCNFSVSIYESVSETITKMLKAIEDLPKQDKAPDHGGLISKMLPGQDRGLCGELDQNLSRCFKFHEKCQKCQAHLSEDCPDVPALHTELDEAIRLVNVSNQQYGQILQMTRKHLEDTAYLVEKMRGQFGWVSELANQAPETEIIFNSIQVVPRIHEGNISKQDETMMTDLSILPSSNFTLKIPLEESAESSNFIGYVVAKALQHFKEHFKTW

SEQ ID NO: 3080 - protein, 466 aa, Homo Sapiens; identical to SEQ ID NO: 3079

SEQ ID NO: 3081 - protein, 466 aa, Homo Sapiens; identical to SEQ ID NO: 3079

SEQ ID NO: 3082 - protein, 491 aa, Homo Sapiens
MNSMEAAVGTEVPLLDNLQHCNSGNMKPPLLVFIVCLLWLKDSHCAPTWKDKTAISENLKSFSEVGEIDADEEVKKALTGIKQMKIMMERKEKEHTNLMSTLKKCREEKQEALKLLNEVQEHLEEEERLCRESLADSWGECRSCLENNCMRIYTTCQPSWSSVKNKIERFFRKIYQFLFPFHEDNEKDLPISEKLIEEDAQLTQMEDVFSQLTVDVNSLFNRSFNVFRQMQQEFDQTFQSHFISDTDLTEPYFFPAFSKEPMTKADLEQCWDIPNFFQLFCNFSVSIYESVSETITKMLKAIEDLPKQDKAPDHGGLISKMLPGQDRGLCGELDQNLSRCFKFHEKCQKCQAHLSEDCPDVPALHTELDEAIRLVNVSNQQYGQILQMTRKHLEDTAYLVEKMRGQFGWVSELANQAPETEIIFNSIQVVPRIHEGNISKQDETMMTDLSILPSSNFTLKIPLEESAESSNFIGYVVAKALQHFKEHFKTW

SEQ ID NO: 3083 - protein, 518 aa, Homo Sapiens
MRTWDYRWSLALVAQTGVHCCNLSSLQPLPPRFKRFSCLSLSSGWDYSNSGNMKPPLLVFIVCLLWLKDSHCAPTWKDKTAISENLKSFSEVGEIDADEEVKKALTGIKQMKIMMERKEKEHTNLMSTLKKCREEKQEALKLLNEVQEHLEEEERLCRESLADSWGECRSCLENNCMRIYTTCQPSWSSVKNKIERFFRKIYQFLFPFHEDNEKDLPISEKLIEEDAQLTQMEDVFSQLTVDVNSLFNRSFNVFRQMQQEFDQTFQSHFISDTDLTEPYFFPAFSKEPMTKADLEQCWDIPNFFQLFCNFSVSIYESVSETITKMLKAIEDLPKQDKAPDHGGLISKMLPGQDRGLCGELDQNLSRCFKFHEKCQKCQAHLSEDCPDVPALHTELDEAIRLVNVSNQQYGQILQMTRKHLEDTAYLVEKMRGQFGWVSELANQAPETEIIFNSIQVVPRIHEGNISKQDETMMTDLSILPSSNFTLKIPLEESAESSNFIGYVVAKALQHFKEHFKTW

SEQ ID NO: 3084 - protein, 518 aa, Homo Sapiens; identical to SEQ ID NO: 3083

SEQ ID NO: 3085 - protein, 82 aa, Homo Sapiens
MRTWDYSNSGNMKPPLLVFIVCLLWLKDSHCAPTWKDKTAISENLKSFSEVGEIDADEEVKKALTGIKQMKIMMERKEKEHT

SEQ ID NO: 3086 - protein, 34 aa, Homo Sapiens
  misc_feature (1)..(1): Xaa can be any naturally occurring amino acid
XQFGWVSELANQAPETEIIFNSIQVRRSNASYIQ

SEQ ID NO: 3087 - protein, 136 aa, Homo Sapiens
MLLKLKEKASLTLAVGTLPFPSQFNFVPPGRMCRVAGWGRTGVLKPGSDTLQEVKLRLMDPQACSHFRDFDHNLQLCVGNPRKTKSAFKGDSGGPLLCAGVAQGIVSYGRSDAKPPAVFTRISHYRPWINQILQAN

SEQ ID NO: 3088 - protein, 247 aa, Homo Sapiens
MLLLPLPLLLFLLCSRAEAGEIIGGTECKPHSRPYMAYLEIVTSNGPSKFCGGFLIRRNFVLTAAHCAGRSITVTLGAHNITEEEDTWQKLEVIKQFRHPKYNTSTLHHDIMLLKLKEKASLTLAVGTLPFPSQFNFVPPGRMCRVAGWGRTGVLKPGSDTLQEVKLRLMDPQACSHFRDFDHNLQLCVGNPRKTKSAFKGDSGGPLLCAGVAQGIVSYGRSDAKPPAVFTRISHYRPWINQILQAN

SEQ ID NO: 3089 - protein, 179 aa, Homo Sapiens
MLSRCRSGLLHVLGLSFLLQTRRPILLCSPRLMKPLVVFVLGGPGAGKGTQCARIVEEMDQTMAANAQKNKFLIDGFPRNQDNLQGWNKTMDGKADVSFVLFFDCNNEICIERCLERGKSSGRSDDNRESLEKRIQTYLQSTKPIIDLYEEMGKVKKIDASKSVDEVFDEVVQIFDKEG

SEQ ID NO: 3090 - protein, 58 aa, Homo Sapiens
MLSRCRSGLLHVLGLSFLLQTRRPILLCSPRLMKPLVVFVLGGPGAGKGTQCARIVEG

SEQ ID NO: 3091 - protein, 228 aa, Homo Sapiens
MLSRCRSGLLHVLGLSFLLQTRRPILLCSPRLMKPLVVFVLGGPGAGKGTQCARIVEKYGYTHLSAGELLRDERKNPDSQYGELIEKYIKEGKIVPVEITISLLKREMDQTMAANAQKNKFLIDGFPRNQDNLQGWNKTMDGKADVSFVLFFDCNNEICIERCLERGKSSGRSDDNRESLEKRIQTYLQSTKPIIDLYEEMGKVKKIDASKSVDEVFDEVVQIFDKEG

SEQ ID NO: 3092 - protein, 169 aa, Homo Sapiens
MLSRCRSGLLHVLGLSFLLQTRRPILLCSPRLMKPLVVFVLGGPGAGKGTQCARIVEKYGYTHLSAGELLRDERKNPDSQYGELIEKYIKEGKIVPVEITISLLKREMDQTMAANAQKNKFLIDGFPRNQDNLQGWNKTMDGKADVSFVLFFDCNNENSDLPSVNKANY

SEQ ID NO: 3093 - protein, 436 aa, Homo Sapiens
MPMSSLPAAILSHMTAINNVPPPPLHSIPNLKKSKHINYGQLNALCHIRGQHSRSMSNILSAHDTFMKQYPKVFLHQKPRLPKLFKQEEQRELNEGKEESQHQQPDDSNNIAVHVQRAHGGHILYRPKRATEKFEEFLAILKKLPIHRTPYEHKTVWKFLKTIPDLTFQLNDKHLKTLSKTVFSETWLKGSTVVANDGFYVILKGLARPQTNVYKNLIEGSDSPDSFISQSFHSFIWSEEFKNSTLAEMYLPSYDSMLSKWSTFGTLEVMPQNESETQMFSVVTEDDCEILKIPAKGYAKIKEEKIKLENMQKLKLIRMCPYYEEWPTLSIYELIALLKWKKFPPGHVIVESGNIISFVGYINSGCCNIYRSIIGFVKLRSNKVKRSQKLVYMGKLKEKESFGEISVLLQVPFTCTIITKKEVEMAIIEDKDLFVA

SEQ ID NO: 3094 - protein, 292 aa, Homo Sapiens [sequence omitted]

SEQ ID NO: 3095 - protein, 161 aa, Homo Sapiens
  misc_feature (1)..(1): Xaa can be any naturally occurring amino acid
XGCCNIYRSIIGFVKLRSNKVKRSQKLVYMGKLKEKESFGEISVLLQVPFTCTIITKKEVEMAIIEDKDLFELDPVTKQLMLQTAKPTFGHLTDEDVKNEYLKKEQQKEWKDFKIASWTKEITDFICLYEKHQDNFTLPKIAHLERITKRIKNNSILIHLE

SEQ ID NO: 3096 - protein, 207 aa, Homo Sapiens
  misc_feature (1)..(1): Xaa can be any naturally occurring amino acid
XNMQKLKLIRMCPYYEEWPTLSIYELIALLKWKKFPPGHVIVESGNIISFVGYINSGCCNIYRSIIGFVKLRSNKVKRSQKLVYMGKLKEKESFGEISVLLQVPFTCTIITKKEVEMAIIEDKDLFELDPVTKQLMLQTAKPTFGHLTDEDVKNEYLKKEQQKEWKDFKDKTVKNSLYYKGIIPGFGKWDHYCTSIPRNLKDTLVNY

SEQ ID NO: 3097 - protein, 507 aa, Homo Sapiens
MDPKLGRMAASLLAVLLLLLERGMFSSPSPPPALLEKVFQYIDLHQDEFVQTLKEWVAIESDSVQPVPRFRQELFRMMAVAADTLQRLGARVASVDMGPQQLPDGQSLPIPPVILAELGSDPTKGTVCFYGHLDVQPADRGDGWLTDPYVLTEVDGKLYGRGATDNKGPVLAWINAVSAFRALEQDLPVNIKFIIEGMEEAGSVALEELVEKEKDRFFSGVDYIVISDNLWISQRKPAITYGTRGNSYFMVEVKCRDQDFHSGTFGGILHEPMADLVALLGSLVDSSGHILVPGIYDEVVPLTEEEINTYKAIHLDLEEYRNSSRVEKFLFDTKEEILMHLWRYPSLSIHGIEGAFDEPGTKTVIPGRVIGKFSIRLVPHMNVSAVEKQVTRHLEDVFSKRNSSNKMVVSMTLGLHPWIANIDDTQYLAAKRAIRTVFGTEPDMIRDGSTIPIAKMFQEIVHKSVVLIPLGAVDDGEHSQNEKINRWNYIEGTKLFAAFFLEMAQLH

SEQ ID NO: 3098 - protein, 464 aa, Homo Sapiens
MDPKLGRMTLKEWVAIESDSVQPVPRFRQELFRMMAVAADTLQRLGARVASVDMGPQQLPDGQSLPIPPVILAELGSDPTKGTVCFYGHLDVQPADRGDGWLTDPYVLTEVDGKLYGRGATDNKGPVLAWINAVSAFRALEQDLPVNIKFIIEGMEEAGSVALEELVEKEKDRFFSGVDYIVISDNLWISQRKPAITYGTRGNSYFMVEVKCRDQDFHSGTFGGILHEPMADLVALLGSLVDSSGHILVPGIYDEVVPLTEEEINTYKAIHLDLEEYRNSSRVEKFLFDTKEEILMHLWRYPSLSIHGIEGAFDEPGTKTVIPGRVIGKFSIRLVPHMNVSAVEKQVTRHLEDVFSKRNSSNKMVVSMTLGLHPWIANIDDTQYLAAKRAIRTVFGTEPDMIRDGSTIPIAKMFQEIVHKSVVLIPLGAVDDGEHSQNEKINRWNYIEGTKLFAAFFLEMAQLH

SEQ ID NO: 3099 - protein, 38 aa, Homo Sapiens
  misc_feature (1)..(1): Xaa can be any naturally occurring amino acid
XADRGDGWLTDPYVLTEGNFMDEERPTTKALSWLGSML

SEQ ID NO: 3100 - protein, 61 aa, Homo Sapiens
ILQKILLDDTGLAYICQTYERFSHVAMILGKMVLQLSKEPSARLLKHVVRCYLRLSDNPRC

SEQ ID NO: 3101 - protein, 41 aa, Homo Sapiens
MHSLATAADLALLPRLECSGVILAHRNLDLLGSVDSPTSAS

SEQ ID NO: 3102 - protein, 299 aa, Homo Sapiens
MHSLATAAPVPTTLAQVDREKIYQWINELSSPETRENALLELSKKRESVPDLAPMLWHSFGTIAALLQEIVNIYPSINPPTLTAHQSNRVCNALALLQCVASHPETRSAFLAAHIPLFLYPFLHTVSKTRPFEYLRLTSLGVIGALVKTDEQEVINFLLTTEIIPLCLRIMESGSELSKTVATFILQKILLDDTGLAYICQTYERFSHVAMILGKMVLQLSKEPSARLLKHVVRCYLRLSDNPRAREALRQCLPDQLKDTTFAQVLKDDTTTKRWLAQLVKNLQEGQVTDPRGIPLPPQ

SEQ ID NO: 3103 - protein, 299 aa, Homo Sapiens; identical to SEQ ID NO: 3102

SEQ ID NO: 3104 - protein, 258 aa, Homo Sapiens
MHSLATAAPVPTTLAQVDREKIYQWINELSSPETRENALLELSKKRESVPDLAPMLWHSFGTIAALLQEIVNIYPSINPPTLTAHQSNRVCNALALLQCVASHPETRSAFLAAHIPLFLYPFLHTVSKTRPFEYLRLTSLGVIGALVKTDEQEVINFLLTTEIIPLCLRIMESGSELSKTVATFILQKILLDDTGLAYICQTYERFSHVAMILGKMVLQLSKEPSARLLKHVVRCYLRLSDNPRFSDLTFCWSSFQRK

SEQ ID NO: 3105 - protein, 331 aa, Homo Sapiens
MHSLATAAPVPTTLAQVDREKIYQWINELSSPETRENALLELSKKRESVPDLAPMLWHSFGTIAALLQEIVNIYPSINPPTLTAHQSNRVCNALALLQCVASHPETRSAFLAAHIPLFLYPFLHTVSKTRPFEYLRLTSLGVIVETGFHHVGQADLELPTSSDLPASASQSAGITGALVKTDEQEVINFLLTTEIIPLCLRIMESGSELSKTVATFILQKILLDDTGLAYICQTYERFSHVAMILGKMVLQLSKEPSARLLKHVVRCYLRLSDNPRAREALRQCLPDQLKDTTFAQVLKDDTTTKRWLAQLVKNLQEGQVTDPRGIPLPPQ

SEQ ID NO: 3106 - protein, 75 aa, Homo Sapiens
MHSLATAAPVPTTLAQVDREKIYQWINELSSPETRENALLELSKKRESVPDLAPMLWHSFGTIAALLQVIVMQVI

SEQ ID NO: 3107 - protein, 80 aa, Homo Sapiens
KNYVRVVGRNGESSELDLQGIRIDSDISGTLKFACESIVEEYEDELIEFFSREADNVKDKLCSKRTDLCDHALHISHDEL

SEQ ID NO: 3108 - protein, 102 aa, Homo Sapiens
MGSFRINPDGSQSVVEVPYARSEAHLTELLEEICDRMKEYGEQIDPSTHRKNYVRVVGRNGESSELDLQGIRIDSDISGTLKFACESIVEEYEDELIEFFSR

SEQ ID NO: 3109 - protein, 168 aa, Homo Sapiens
MKGWGWLALLLGALLGTAWARRSQDLHCGACRALVDELEWEIAQVDPKKTIQMGSFRINPDGSQSVVEVPYARSEAHLTELLEEICDRMKEYGEQIDPSTHRKNYVRVVGRNGESSELDLQGIRIDSDISGTLKFACESIVEEYEDELIEFFSREADNVKDKLCSKRT

SEQ ID NO: 3110 - protein, 182 aa, Homo Sapiens
MKGWGWLALLLGALLGTAWARRSQDLHCGACRALVDELEWEIAQVDPKKTIQMGSFRINPDGSQSVVEVPYARSEAHLTELLEEICDRMKEYGEQIDPSTHRKNYVRVVGRNGESSELDLQGIRIDSDISGTLKFACESIVEEYEDELIEFFSREADNVKDKLCSKRTDLCDHALHISHDEL

SEQ ID NO: 3111 - protein, 41 aa, Homo Sapiens
  misc_feature (1)..(1): Xaa can be any naturally occurring amino acid
XACRALVDELEWEIAQVDPKKTIQMGSFRINPDGSQSVVER

SEQ ID NO: 3112 - protein, 278 aa, Homo Sapiens [sequence omitted]

SEQ ID NO: 3113 - protein, 143 aa, Homo Sapiens
MDSMPEPASRCLLLLPLLLLLLLLLPAPELGPSQAGAEENDWVRLPSKCEVCKYVAVELKSAFEETGKTKEVIGTGYGILDQKASGVKYTKSDLRLIEVTETICKRLLIIACTRRGPAAIDLPRACQRPLRHYTTWYTKGSRW

SEQ ID NO: 3114 - protein, 36 aa, Homo Sapiens
MATLKGLVQKGVKVDLGIPLELWDEPSVEVTYLKKQ

SEQ ID NO: 3115 - protein, 248 aa, Homo Sapiens
MGPVRLGILLFLFLAVHEAWAGMLKEEDDDTERLPSKCEVCKLLSTELQAELSRTGRSREVLELGQVLDTGKRKRHVPYSVSETRLEEALENLCERILDYSVHAERKGSLRYAKGQSQTMATLKGLVQKGVKVDLGIPLELWDEPSVEVTYLKKQCETMLEEFEDIVGDWYFHHQEQPLQNFLCEGHVLPAAETACLQETWTGKEITDGEEKTEGEEEQEEEEEEEEEEGGDKMTKTGSHPKLDREDL

SEQ ID NO: 3116 - protein, 118 aa, Homo Sapiens
  misc_feature (1)..(1): Xaa can be any naturally occurring amino acid
XCKLLSTELQAELSRTGRSREVLELGQVLDTGKRKRHVPYSVSETRLEEALENLCERILDYSVHAERKGSLRYAKGQSQTMATLKGLVQKGVKVDLGIPLELWDEPSVEVTYLKKQSG

SEQ ID NO: 3117 - protein, 372 aa, Homo Sapiens
MAAPVPWACCAVLAAAAAVVYAQRHSPQEAPHVQYERLGSDVTLPCGTANWDAAVTWRVNGTDLAPDLLNGSQLVLHGLELGHSGLYACFHRDSWHLRHQVLLHVGLPPREPVLSCRSNTYPKGFYCSWHLPTPTYIPNTFNVTVLHGSKIMVCEKDPALKNRCHIRYMHLFSTIKYKVSISVSNALGHNATAITFDEFTIVKPDPPENVVARPVPSNPRRLEVTWQTPSTWPDPESFPLKFFLRYRPLILDQWQHVELSDGTAHTITDAYAGKEYIIQVAAKDNEIGTWSDWSVAAHATPWTEEPRHLTTEAQAAETTTSTTSSLAPPPTTKICDPGELGSGGGPSAPFLVSVPITLALAAAAATASSLLI

SEQ ID NO: 3118 - protein, 372 aa, Homo Sapiens; identical to SEQ ID NO: 3117

SEQ ID NO: 3119 - protein, 256 aa, Homo Sapiens
MAAPVPWACCAVLAAAAAVVYAQRHSPQEAPHVQYERLGSDVTLPCGTANWDAAVTWRVNGTDLAPDLLNGSQLVLHGLELGHSGLYACFHRDSWHLRHQVLLHVGLPPREPVLSCRSNTYPKGFYCSWHLPTPTYIPNTFNVTVLHGSKIMVCEKDPALKNRCHIRYMHLFSTIKYKVSISVSNALGHNATAITFDEFTIVKPDPPENVVARPVPSNPRRLEVTWQTPSTWPDPESFPLKFFLRYRPLILDQWQH

SEQ ID NO: 3120 - protein, 372 aa, Homo Sapiens; identical to SEQ ID NO: 3117

SEQ ID NO: 3121 - protein, 57 aa, Homo Sapiens
KHSIEVPIPRDGEYVVEVRAHSDGGDGVVSQVKISEGKSTSLRSKTAKDHRSIRTMS

SEQ ID NO: 3122 - protein, 63 aa, Homo Sapiens
MKMWLLVSHLVIISITTCLAEFTWYRRYGHGVSEEDKGFGPIFEEQPINTIYPEESLEGKVSL

SEQ ID NO: 3123 - protein, 73 aa, Homo Sapiens
MKMWLLVSHLVIISITTCLAEFTWYRRYGHGVSEEDKGFGPIFEEQPINTIYPEESLEGKVSLNCRARASPFP

SEQ ID NO: 3124 - protein, 85 aa, Homo Sapiens
MKMWLLVSHLVIISITTCLAEFTWYRRYGHGVSEEDKGFGPIFEEQPINTIYPEESLEGKVSLNCRARASPFPVYKWRMNNGDVD

SEQ ID NO: 3125 - protein, 90 aa, Homo Sapiens
MKMWLLVSHLVIISITTCLAEFTWYRRYGHGVSEEDKGFGPIFEEQPINTIYPEESLEGKVSLNCRARASPFPVYKWRMNNGDVDLTSDR

SEQ ID NO: 3126 - protein, 1018 aa, Homo Sapiens
MKMWLLVSHLVIISITTCLAEFTWYRRYGHGVSEEDKGFGPIFEEQPINTIYPEESLEGKVSLNCRARASPFPVYKWRMNNGDVDLTSDRYSMVGGNLVINNPDKQKDAGIYYCLASNNYGMVRSTEATLSFGYLDPFPPEERPEVRVKEGKGMVLLCDPPYHFPDDLSYRWLLNEFPVFITMDKRRFVSQTNGNLYIANVEASDKGNYSCFVSSPSITKSVFSKFIPLIPIPERTTKPYPADIVVQFKDVYALMGQNVTLECFALGNPVPDIRWRKVLEPMPSTAEISTSGAVLKIFNIQLEDEGIYECEAENIRGKDKHQARIYVQAFPEWVEHINDTEVDIGSDLYWPCVATGKPIPTIRWLKNGYAYHKGELRLYDVTFENAGMYQCIAENTYGAIYANAELKILALAPTFEMNPMKKKILAAKGGRVIIECKPKAAPKPKFSWSKGTEWLVNSSRILIWEDGSLEINNITRNDGGIYTCFAENNRGKANSTGTLVITDPTRIILAPINADITVGENATMQCAASFDPALDLTFVWSFNGYVIDFNKENIHYQRNFMLDSNGELLIRNAQLKHAGRYTCTAQTIVDNSSASADLVVRGPPGPPGGLRIEDIRATSVALTWSRGSDNHSPISKYTIQTKTILSDDWKDAKTDPPIIEGNMEAARAVDLIPWMEYEFRVVATNTLGRGEPSIPSNRIKTDGAAPNVAPSDVGGGGGRNRELTITWAPLSREYHYGNNFGYIVAFKPFDGEEWKKVTVTNPDTGRYVHKDETMSPSTAFQVKVKAFNNKGDGPYSLVAVINSAQDAPSEAPTEVGVKVLSSSEISVHWEHVLEKIVESYQIRYWAAHDKEEAANRVQVTSQEYSARLENLLPDTQYFIEVGACNSAGCGPPSDMIEAFTKKAPPSQPPRIISSVRSGSRYIITWDHVVALSNESTVTGYKVLYRPDGQHDGKLYSTHKHSIEVPIPRDGEYVVEVRAHSDGGDGVVSQVKISGAPTLSPSLLGLLLPAFGILVYLEF

SEQ ID NO: 3127 - protein, 1018 aa, Homo Sapiens; identical to SEQ ID NO: 3126

SEQ ID NO: 3128 - protein, 627 aa, Homo Sapiens
MKMWLLVSHLVIISITTCLAEFTWYRRYGHGVSEEDKGFGPIFEEQPINTIYPEESLEGKVSLNCRARASPFPVYKWRMNNGDVDLTSDRYSMVGGNLVINNPDKQKDAGIYYCLASNNYGMVRSTEATLSFGYLDPFPPEERPEVRVKEGKGMVLLCDPPYHFPDDLSYRWLLNEFPVFITMDKRRFVSQTNGNLYIANVEASDKGNYSCFVSSPSITKSVFSKFIPLIPIPERTTKPYPADIVVQFKDVYALMGQNVTLECFALGNPVPDIRWRKVLEPMPSTAEISTSGAVLKIFNIQLEDEGIYECEAENIRGKDKHQARIYVQAFPEWVEHINDTEVDIGSDLYWPCVATGKPIPTIRWLKNGYAYHKGELRLYDVTFENAGMYQCIAENTYGAIYANAELKILALAPTFEMNPMKKKILAAKGGRVIIECKPKAAPKPKFSWSKGTEWLVNSSRILIWEDGSLEINNITRNDGGIYTCFAENNRGKANSTGTLVITDPTRIILAPINADITVGENATMQCAASFDPALDLTFVWSFNGYVIDFNKENIHYQRNFMLDSNGELLIRNAQLKHAGRYTCTAQTIVDNSSASADLVVRGKNRKGGEKNMVDSFLPVCASLPPTW

SEQ ID NO: 3129 - protein, 627 aa, Homo Sapiens; identical to SEQ ID NO: 3128

SEQ ID NO: 3130 - protein, 1007 aa, Homo Sapiens
MKMWLLVSHLVIISITTCLAVSEEDKGFGPIFEEQPINTIYPEESLEGKVSLNCRARASPFPVYKWRMNNGDVDLTSDRYSMVGGNLVINNPDKQKDAGIYYCLASNNYGMVRSTEATLSFGYLDPFPPEERPEVRVKEGKGMVLLCDPPYHFPDDLSYRWLLNEFPVFITMDKRRFVSQTNGNLYIANVEASDKGNYSCFVSSPSITKSVFSKFIPLIPIPERTTKPYPADIVVQFKDVYALMGQNVTLECFALGNPVPDIRWRKVLEPMPSTAEISTSGAVLKIFNIQLEDEGIYECEAENIRGKDKHQARIYVQAFPEWVEHINDTEVDIGSDLYWPCVATGKPIPTIRWLKNGYAYHKGELRLYDVTFENAGMYQCIAENTYGAIYANAELKILALAPTFEMNPMKKKILAAKGGRVIIECKPKAAPKPKFSWSKGTEWLVNSSRILIWEDGSLEINNITRNDGGIYTCFAENNRGKANSTGTLVITDPTRIILAPINADITVGENATMQCAASFDPALDLTFVWSFNGYVIDFNKENIHYQRNFMLDSNGELLIRNAQLKHAGRYTCTAQTIVDNSSASADLVVRGPPGPPGGLRIEDIRATSVALTWSRGSDNHSPISKYTIQTKTILSDDWKDAKTDPPIIEGNMEAARAVDLIPWMEYEFRVVATNTLGRGEPSIPSNRIKTDGAAPNVAPSDVGGGGGRNRELTITWAPLSREYHYGNNFGYIVAFKPFDGEEWKKVTVTNPDTGRYVHKDETMSPSTAFQVKVKAFNNKGDGPYSLVAVINSAQDAPSEAPTEVGVKVLSSSEISVHWEHVLEKIVESYQIRYWAAHDKEEAANRVQVTSQEYSARLENLLPDTQYFIEVGACNSAGCGPPSDMIEAFTKKAPPSQPPRIISSVRSGSRYIITWDHVVALSNESTVTGYKVLYRPDGQHDGKLYSTHKHSIEVPIPRDGEYVVEVRAHSDGGDGVVSQVKISGAPTLSPSLLGLLLPAFGILVYLEF

SEQ ID NO: 3131 - protein, 1040 aa, Homo Sapiens
MGTATRRKPHLLLVAAVALVSSSAWSSALGSQTTFGPVFEDQPLSVLFPEESTEEQVLLACRARASPPATYRWKMNGTEMKLEPGSRHQLVGGNLVIMNPTKAQDAGVYQCLASNPVGTVVSREAILRFGFLQEFSKEERDPVKAHEGWGVMLPCNPPAHYPGLSYRWLLNEFPNFIPTDGRHFVSQTTGNLYIARTNASDLGNYSCLATSHMDFSTKSVFSKFAQLNLAAEDTRLFAPSIKARFPAETYALVGQQVTLECFAFGNPVPRIKWRKVDGSLSPQWTTAEPTLQIPSVSFEDEGTYECEAENSKGRDTVQGRIIVQAQPEWLKVISDTEADIGSNLRWGCAAAGKPRPTVRWLRNGEPLASQNRVEVLAGDLRFSKLSLEDSGMYQCVAENKHGTIYASAELAVQALAPDFRLNPVRRLIPAARGGEILIPCQPRAAPKAVVLWSKGTEILVNSSRVTVTPDGTLIIRNISRSDEGKYTCFAENFMGKANSTGILSVRDATKITLAPSSADINLGDNLTLQCHASHDPTMDLTFTWTLDDFPIDFDKPGGHYRRTNVKETIGDLTILNAQLRHGGKYTCMAQTVVDSASKEATVLVRGPPGPPGGVVVRDIGDTTIQLSWSRGFDNHSPIAKYTLQARTPPAGKWKQVRTNPANIEGNAETAQVLGLTPWMDYEFRVIASNILGTGEPSGPSSKIRTREAAPSVAPSGLSGGGGAPGELIVNWTPMSREYQNGDGFGYLLSFRRQGSTHWQTARVPGADAQYFVYSNESVRPYTPFEVKIRSYNRRGDGPESLTALVYSAEEEPRVAPTKVWAKGVSSSEMNVTWEPVQQDMNGILLGYEIRYWKAGDKEAAADRVRTAGLDTSARVSGLHPNTKYHVTVRAYNRAGTGPASPSANATTMKPPPRRPPGNISWTFSSSSLSIKWDPVVPFRNESAVTGYKMLYQNDLHLTPTLHLTGKNWIEIPVPEDIGHALVQIRTTGPGGDGIPAEVHIVRNGGTSMMVENMAVRPAPHPGTVISHSVAMLILIGSLEL

SEQ ID NO: 3132 - protein, 1040 aa, Homo Sapiens; identical to SEQ ID NO: 3131

SEQ ID NO: 3133 - protein, 1085 aa, Homo Sapiens
MGTATRRKPHLLLVAAVALVSSSAWSSALGSQTTFGPVFEDQPLSVLFPEESTEEQVLLACRARASPPATYRWKMNGTEMKLEPGSRHQLVGGNLVIMNPTKAQDAGVYQCLASNPVGTVVSREAILRFGFLQEFSKEERDPVKAHEGWGVMLPCNPPAHYPGLSYRWLLNEFPNFIPTDGRHFVSQTTGNLYIARTNASDLGNYSCLATSHMDFSTKSVFSKFAQLNLAAEDTRLFAPSIKARFPAETYALVGQQVTLECFAFGNPVPRIKWRKVDGSLSPQWTTAEPTLQIPSVSFEDEGTYECEAENSKGRDTVQGRIIVQAQPEWLKVISDTEADIGSNLRWGCAAAGKPRPTVRWLRNGEPLASQNRVEVLAGDLRFSKLSLEDSGMYQCVAENKHGTIYASAELAVQALAPDFRLNPVRRLIPAARGGEILIPCQPRAAPKAVVLWSKGTEILVNSSRVTVTPDGTLIIRNISRSDEGKYTCFAENFMGKANSTGILSVRDATKITLAPSSADINLGDNLTLQCHASHDPTMDLTFTWTLDDFPIDFDKPGGHYRRTNVKETIGDLTILNAQLRHGGKYTCMAQTVVDSASKEATVLVRGPPGPPGGVVVRDIGDTTIQLSWSRGFDNHSPIAKYTLQARTPPAGKWKQVRTNPANIEGNAETAQVLGLTPWMDYEFRVIASNILGTGEPSGPSSKIRTREAAPSVAPSGLSGGGGAPGELIVNWTPMSREYQNGDGFGYLLSFRRQGSTHWQTARVPGADAQYFVYSNESVRPYTPFEVKIRSYNRRGDGPESLTALVYSAEEEPRVAPTKVWAKGVSSSEMNVTWEPVQQDMNGILLGYEIRYWKAGDKEAAADRVRTAGLDTSARVSGLHPNTKYHVTVRAYNRAGTGPASPSANATTMKPPPRRPPGNISWTFSSSSLSIKWDPVVPFRNESAVTGYKMLYQNDLHLTPTLHLTGKNWIEIPVPEDIGHALVQIRTTGPGGDGIPAEVHIVRNGEMALWDPIRTPPLESSPRPGRNTRHEQVEELERSAHLTILQSKEEGQALGPRALPPSPSSSSKDPDAVPDNSLGAPACPSG

SEQ ID NO: 3134 - protein, 1040 aa, Homo Sapiens; identical to SEQ ID NO: 3131

SEQ ID NO: 3135 - protein, 1040 aa, Homo Sapiens; identical to SEQ ID NO: 3131

SEQ ID NO: 3136 - protein, 764 aa, Homo Sapiens
MGTATRRKPHLLLVAAVALVSSSAWSSALGSQTTFGPVFEDQPLSVLFPEESTEEQVLLACRARASPPATYRWKMNGTEMKLEPGSRHQLVGGNLVIMNPTKAQDAGVYQCLASNPVGTVVSREAILRFGFLQEFSKEERDPVKAHEGWGVMLPCNPPAHYPGLSYRWLLNEFPNFIPTDGRHFVSQTTGNLYIARTNASDLGNYSCLATSHMDFSTKSVFSKFAQLNLAAEDTRLFAPSIKARFPAETYALVGQQVTLECFAFGNPVPRIKWRKVDGSLSPQWTTAEPTLQIPSVSFEDEGTYECEAENSKGRDTVQGRIIVQAQPEWLKVISDTEADIGSNLRWGCAAAGKPRPTVRWLRNGEPLASQNRVEVLAGDLRFSKLSLEDSGMYQCVAENKHGTIYASAELAVQALAPDFRLNPVRRLIPAARGGEILIPCQPRAAPKAVVLWSKGTEILVNSSRVTVTPDGTLIIRNISRSDEGKYTCFAENFMGKANSTGILSVRDATKITLAPSSADINLGDNLTLQCHASHDPTMDLTFTWTLDDFPIDFDKPGGHYRRTNVKETIGDLTILNAQLRHGGKYTCMAQTVVDSASKEATVLVRGPPGPPGGVVVRDIGDTTIQLSWSRGFDNHSPIAKYTLQARTPPAGKWKQVRTNPANIEGNAETAQVLGLTPWMDYEFRVIASNILGTGEPSGPSSKIRTREAAPSVAPSGLSGGGGAPGELIVNWTAGQHSLADRPGAWRRCPVLCLQQRERPALHAL

SEQ ID NO: 3137 - protein, 41 aa, Homo Sapiens
MGTATRRKPHLLLVAAVALVSSSGEDTEAQKSSITFPRSHS

SEQ ID NO: 3138 - protein, 41 aa, Homo Sapiens; identical to SEQ ID NO: 3137

SEQ ID NO: 3139 - protein, 527 aa, Homo Sapiens
  misc_feature (1)..(1): Xaa can be any naturally occurring amino acid
XAQTVVDSASKEATVLVRGPPGPPGGVVVRDIGDTTIQLSWSRGFDNHSPIAKYTLQARTPPAGKWKQVRTNPANIEGNAETAQVLGLTPWMDYEFRVIASNILGTGEPSGPSSKIRTREAAPSVAPSGLSGGGGAPGELIVNWTPMSREYQNGDGFGYLLSFRRQGSTHWQTARVPGADAQYFVYSNESVRPYTPFEVKIRSYNRRGDGPESLTALVYSAEEEPRVAPTKVWAKGVSSSEMNVTWEPVQQDMNGILLGYEIRYWKAGDKEAAADRVRTAGLDTSARVSGLHPNTKYHVTVRAYNRAGTGPASPSANATTMKPPPRRPPGNISWTFSSSSLSIKWDPVVPFRNESAVTGYKMLYQNDLHLTPTLHLTGKNWIEIPVPEDIGHALVQIRTTGPGGDGIPAEVHIVRNGGAAPPLPLSPREIQDPPRYLRGSFPPRPTPISTRKGKWKAGRNQVQSSLRTASPPPFYPAPRTSPRAREGRRVQGEAEDQPAIANGLQSTVGVGLRRPPSRPLPGLQLAL

SEQ ID NO: 3140 - protein, 115 aa, Homo Sapiens
  misc_feature (1)..(1): Xaa can be any naturally occurring amino acid
XGKANSTGILSVRDATKITLAPSSADINLGDNLTLQCHASHDPTMDLTFTWTLDDFPIDFDKPGGHYRRTNVKETIGDLTILNAQLRHGGKYTCMAQTVVDSASKEATVLVRGPK

SEQ ID NO: 3141 - protein, 473 aa, Homo Sapiens
  misc_feature (1)..(1): Xaa can be any naturally occurring amino acid
XIKWRKVDGSLSPQWTTAEPTLQIPSVSFEDEGTYECEAENSKGRDTVQGRIIVQAQPEWLKVISDTEADIGSNLRWGCAAAGKPRPTVRWLRNGEPLASQNRVEVLAGDLRFSKLSLEDSGMYQCVAENKHGTIYASAELAVQALAPDFRLNPVRRLIPAARGGEILIPCQPRAAPKAVVLWSKGTEILVNSSRVTVTPDGTLIIRNISRSDEGKYTCFAENFMGKANSTGILSVRDATKITLAPSSADINLGDNLTLQCHASHDPTMDLTFTWTLDDFPIDFDKPGGHYRRTNVKETIGDLTILNAQLRHGGKYTCMAQTVVDSASKEATVLVRGPPGPPGGVVVRDIGDTTIQLSWSRGFDNHSPIAKYTLQARTPPAGKWKQVRTNPANIEGNAETAQVLGLTPWMDYEFRVIASNILGTGEPSGPSSKIRTREAAPSVAPSGLSGGGGAPGELIVNWTQRERPALHAL

SEQ ID NO: 3142 - protein, 1011 aa, Homo Sapiens
  misc_feature (1)..(1): Xaa can be any naturally occurring amino acid
XPTDGRHFVSQTTGNLYIARTNASDLGNYSCLATSHMDFSTKSVFSKFAQLNLAAEDTRLFAPSIKARFPAETYALVGQQVTLECFAFGNPVPRIKWRKVDGSLSPQWTTAEPTLQIPSVSFEDEGTYECEAENSKGRDTVQGRIIVQAQPEWLKVISDTEADIGSNLRWGCAAAGKPRPTVRWLRNGEPLASQNRVEVLAGDLRFSKLSLEDSGMYQCVAENKHGTIYASAELAVQALAPDFRLNPVRRLIPAARGGEILIPCQPRAAPKAVVLWSKGTEILVNSSRVTVTPDGTLIIRNISRSDEGKYTCFAENFMGKANSTGILSVRDATKITLAPSSADINLGDNLTLQCHASHDPTMDLTFTWTLDDFPIDFDKPGGHYRRTNVKETIGDLTILNAQLRHGGKYTCMAQTVVDSASKEATVLVRGPPGPPGGVVVRDIGDTTIQLSWSRGFDNHSPIAKYTLQARTPPAGKWKQVRTNPANIEGNAETAQVLGLTPWMDYEFRVIASNILGTGEPSGPSSKIRTREAAPSVAPSGLSGGGGAPGELIVNWTPMSREYQNGDGFGYLLSFRRQGSTHWQTARVPGADAQYFVYSNESVRPYTPFEVKIRSYNRRGDGPESLTALVYSAEEEPRVAPTKVWAKGVSSSEMNVTWEPVQQDMNGILLGYEIRYWKAGDKEAAADRVRTAGLDTSARVSGLHPNTKYHVTVRAYNRAGTGPASPSANATTMKPPPRRPPGNISWTFSSSSLSIKWDPVVPFRNESAVTGYKMLYQNDLHLTPTLHLTGKNWIEIPVPEDIGHALVQIRTTGPGGDGIPAEVHIVRNGGAAPPLPLSPREIQDPPRYLRGSFPPRPTPISTRKGKWKAGRNQVQSSLRTASPPPFYPAPRTSPRAREGRRVQGEAEDQPAIANGLQSTVGVGLRRPPSRPLPGLQLALHKHDGGEHGSPPSTTPWHRHFPLRGDADPHRLPGALILEPLPLRRSWTPPPTDTASPFLLPRWPDTVPESGWF

SEQ ID NO: 3143 - protein, 1028 aa, Homo Sapiens
MMFPWKQLILLSFIGCLGGELLLQGPVFIKEPSNSIFPVGSEDKKITLHCEARGNPSPHYRWQLNGSDIDMSMEHRYKLNGGNLVVINPNRNWDTGTYQCFATNSLGTIVSREAKLQFAYLENFKTKMRSTVSVREGQGVVLLCGPPPHSGELSYAWIFNEYPSFVEEDSRRFVSQETGHLYISKVEPSDVGNYTCVVTSMVTNARVLGSPTPLVLRSDGVMGEYEPKIEVQFPETLPAAKGSTVKLECFALGNPIPQINWRRSDGLPFSSKIKLRKFSGVLEIPNFQQEDAGSYECIAENSRGKNVARGRLTYYAKPHWVQLIKDVEIAVEDSLYWECRASGKPKPSYRWLKNGAALVLEERTQIENGALTISNLSVTDSGMFQCIAENKHGLVYSSAELKVVASAPDFSKNPMKKLVQVQVGSLVSLDCKPRASPRALSSWKKGDVSVQEHERISLLNDGGLKIANVTKADAGTYTCMAENQFGKANGTTHLVVTEPTRITLAPSNMDVSVGESVILPCQVQHDPLLDIIFTWYFNGALADFKKDGSHFEKVGGSSSGDLMIRNIQLKHSGKYVCMVQTGVDSVSSAADLIVRGSPGPPENVKVDEITDTTAQLSWKEGKDNHSPVISYSIQARTPFSVGWQTVTTVPEVIDGKTHTATVVELNPWVEYEFRVVASNKIGGGEPSLPSEKVRTEEAVPEVPPSEVNGGGGSRSELVITWDPVPEELQNGEGFGYVVAFRPLGVTTWIQTVVTSPDTPRYVFRNESIVPYSPYEVKVGVYNNKGEGPFSPVTTVFSAEEEPTVAPSQVSANSLSSSEIEVSWNTIPWKLSNGHLLGYEVRYWNGGGKEESSSKMKVAGNETSARLRGLKSNLAYYTAVRAYNSAGAGPFSATVNVTTKKTPPSQPPGNVVWNATDTKVLLNWEQVKAMENESEVTGYKVFYRTSSQNNVQVLNTNKTSAELVLPIKEDYIIEVKATTDGGDGTSSEQIRIPRITSMDARGSTSAISNVHPMSSYMPIVLFLIVYVLW

SEQ ID NO: 3144 - protein, 698 aa, Homo Sapiens
MEENVFWECKANGRPKPTYKWLKNGEPLLTRDRIQIEQGTLNITIVNLSDAGMYQCLAENKHGVIFSNAELSVIAVGPDFSRTLLKRVTLVKVGGEVVIECKPKASPKPVYTWKKGRDILKENERITISEDGNLRIINVTKSDAGSYTCIATNHFGTASSTGNLVVKDPTRVMVPPSSMDVTVGESIVLPCQVTHDHSLDIVFTWSFNGHLIDFDRDGDHFERVGGQDSAGDLMIRNIQLKHAGKYVCMVQTSVDRLSAAADLIVRGPPGPPEAVTIDEITDTTAQLSWRPGPDNHSPITMYVIQARTPFSVGWQAVSTVPELIDGKTFTATVVGLNPWVEYEFRTVAANVIGIGEPSRPSEKRRTEEALPEVTPANVSGGGGSKSELVITWETVPEELQNGRGFGYVVAFRPYGKMIWMLTVLASADASRYVFRNESVHPFSPFEVKVGVFNNKGEGPFSPTTVVYSAEEEPTKPPASIFARSLSATDIEVFWASPLEKNRGRIQGYEVKYWRHEDKEENARKIRTVGNQTSTKITNLKGSVLYHLAVKAYNSAGTGPSSATVNVTTRKPPPSQPPGNIIWNSSDSKIILNWDQVKALDNESEVKGYKVLYRWNRQSSTSVIETNKTSVELSLPFDEDYIIEIKPFSDGGDGSSSEQIRIPKISNAYARGSGASTSNACTLSAISTIMISLTARSSL

SEQ ID NO: 3145 - protein, 54 aa, Homo Sapiens
MRLPWELLVLQSFILCLADDSTLHGPIFIQEPSPVMFPLDSEEKKVKLNCEVKG

SEQ ID NO: 3146 - protein, 116 aa, Homo Sapiens
MRLPWELLVLQSFILCLADDSTLHGPIFIQEPSPVMFPLDSEEKKVKLNCEVKGNPKPHIRWKLNGTDVDTGMDFRYSVVEGSLLINNPNKTQDAGTYQCTATNSFGTIVSREAKL

SEQ ID NO: 3147 - protein, 1026 aa, Homo Sapiens
MRLPWELLVLQSFILCLADDSTLHGPIFIQEPSPVMFPLDSEEKKVKLNCEVKGNPKPHIRWKLNGTDVDTGMDFRYSVVEGSLLINNPNKTQDAGTYQCTATNSFGTIVSREAKLQFAYLDNFKTRTRSTVSVRRGQGMVLLCGPPPHSGELSYAWIFNEYPSYQDNRRFVSQETGNLYIAKVEKSDVGNYTCVVTNTVTNHKVLGPPTPLILRNDGVMGEYEPKIEVQFPETVPTAKGATVKLECFALGNPVPTIIWRRADGKPIARKARRHKSNGILEIPNFQQEDAGLYECVAENSRGKNVARGQLTFYAQPNWIQKINDIHVAMEENVFWECKANGRPKPTYKWLKNGEPLLTRDRIQIEQGTLNITIVNLSDAGMYQCLAENKHGVIFSNAELSVIAVGPDFSRTLLKRVTLVKVGGEVVIECKPKASPKPVYTWKKGRDILKENERITISEDGNLRIINVTKSDAGSYTCIATNHFGTASSTGNLVVKDPTRVMVPPSSMDVTVGESIVLPCQVTHDHSLDIVFTWSFNGHLIDFDRDGDHFERVGGQDSAGDLMIRNIQLKHAGKYVCMVQTSVDRLSAAADLIVRGPPGPPEAVTIDEITDTTAQLSWRPGPDNHSPITMYVIQARTPFSVGWQAVSTVPELIDGKTFTATVVGLNPWVEYEFRTVAANVIGIGEPSRPSEKRRTEEALPEVTPANVSGGGGSKSELVITWETVPEELQNGRGFGYVVAFRPYGKMIWMLTVLASADASRYVFRNESVHPFSPFEVKVGVFNNKGEGPFSPTTVVYSAEEEPTKPPASIFARSLSATDIEVFWASPLEKNRGRIQGYEVKYWRHEDKEENARKIRTVGNQTSTKITNLKGSVLYHLAVKAYNSAGTGPSSATVNVTTRKPPPSQPPGNIIWNSSDSKIILNWDQVKALDNESEVKGYKVLYRWNRQSSTSVIETNKTSVELSLPFDEDYIIEIKPFSDGGDGSSSEQIRIPKISNAYARGSGASTSNACTLSAISTIMISLTARSSL

SEQ ID NO: 3148 - protein, 1026 aa, Homo Sapiens; identical to SEQ ID NO: 3147

SEQ ID NO: 3149 - protein, 1026 aa, Homo Sapiens; identical to SEQ ID NO: 3147

SEQ ID NO: 3150 - protein, 232 aa, Homo Sapiens
MRLPWELLVLQSFILCLADDSTLHGPIFIQEPSPVMFPLDSEEKKVKLNCEVKGNPKPHIRWKLNGTDVDTGMDFRYSVVEGSLLINNPNKTQDAGTYQCTATNSFGTIVSREAKLQFAYLDNFKTRTRSTVSVRRGQGMVLLCGPPPHSGELSYAWIFNEYPSYQDNRRFVSQETGNLYIAKVEKSDVGNYTCVVTNTVTNHKVLGPPTPLILRNDVQYQLLSGEELMESQ

SEQ ID NO: 3151 - protein, 137 aa, Homo Sapiens
MRLPWELLVLQSFILCLAGSQTDFWSLLGVLPALEADDSTLHGPIFIQEPSPVMFPLDSEEKKVKLNCEVKGNPKPHIRWKLNGTDVDTGMDFRYSVVEGSLLINNPNKTQDAGTYQCTATNSFGTIVSREAKLQFA

SEQ ID NO: 3152 - protein, 143 aa, Homo Sapiens
NDIHVAMEENVFWECKANGRPKPTYKWLKNGEPLLTRDRIQIEQGTLNITIVNLSDAGMYQCLAENKHGVIFSNAELSVIAVGPDFSRTLLKRVTLVKVGGEVVIECKPKASPKPVYTWKKGRDILKENESVHQGFGSGSAPL

SEQ ID NO: 3153 - protein, 1022 aa, Homo Sapiens [sequence omitted]

SEQ ID NO: 3154 - protein, 1084 aa, Homo Sapiens
LTEYSKSLPGLSTSYAALLRIKKSSSSSLFGSKTRPRYSSPSLGTLSASSPSWLGAAQNYYSPINLYHSSDAFKQDESVDYGPVFVQEPDDIIFPTDSDEKKVALNCEVRGNPVPSYRWLRNGTEIDLESDYRYSLIDGTFIISNPSEAKDSGHYQCLATNTVGSILSREATLQFAYLGNFSGRTRSAVSVREGQGVVLMCSPPPHSPEIIYSWVFNEFPSFVAEDSRRFISQETGNLYISKVQTSDVGSYICLVKNTVTNARVLSPPTPLTLRNDGVMGEYEPKIEVHFPFTVTAAKGTTVKMECFALGNPVPTITWMKVNGYIPSKARLRKSQAVLEIPNVQLDDAGIYECRAENSRGKNSFRGQLQVYTYPHWVEKLNDTQLDSGSPLRWECKATGKPRPTYRWLKNGVPLSPQSRVEMVNGVLMIHNVNQSDAGMYQCLAENKYGAIYASAELKILASAPTFALNQLKKTIIVTKDQEVVIECKPQGSPKPTISWKKGDRAVRENKRIAILPDGSLRILNASKSDEGKYVCRGENVFGSAEIIASLSVKEPTRIELTPKRTELTVGESIVLNCKAIHDASLDVTFYWTLKGQPIDFEEEGGHFESIRAQASSADLMIRNILLMHAGRYGCRVQTTADSVSDEAELLVRGPPGPPGIVIVEEITESTATLSWSPAADNHSPISSYNLQARSPFSLGWQTVKTVPEIITGDMESAMAVDLNPWVEYEFRVVATNPIGTGDPSTPSRMIRTNEAVPKTAPTNVSGRSGRRHELVIAWEPVSEEFQNGEGFGYIVAFRPNGTRGWKEKMVTSSEASKFIYRDESVPPLTPFEVKVGVYNNKGDGPFSQIVVICSAEGEPSAAPTDVKATSVSVSEILVAWKHIKESLGRPQGFEVGYWKDMEQEDTAETVKTRGNESFVILTGLEGNTLYHFTVRAYNGAGYGPPSSEVSATTKKSPPSQAPSNLRWEQQGSQVSLGWEPVIPLANESEVVGYKVFYRQEGHSNSQVIETQKLQAVVPLPDAGVYIIEVRAYSEGGDGTASSQIRVPSYSGGKITSAQSTLHSLSTSSSSVTLLLALMIPSTSW

SEQ ID NO: 3155 - protein, 1026 aa, Homo Sapiens
MASSWKLMLFLSVTMCLSESVDYGPVFVQEPDDIIFPTDSDEKKVALNCEVRGNPVPSYRWLRNGTEIDLESDYRYSLIDGTFIISNPSEAKDSGHYQCLATNTVGSILSREATLQFAYLGNFSGRTRSAVSVREGQGVVLMCSPPPHSPEIIYSWVFNEFPSFVAEDSRRFISQETGNLYISKVQTSDVGSYICLVKNTVTNARVLSPPTPLTLRNDGVMGEYEPKIEVHFPFTVTAAKGTTVKMECFALGNPVPTITWMKVNGYIPSKARLRKSQAVLEIPNVQLDDAGIYECRAENSRGKNSFRGQLQVYTYPHWVEKLNDTQLDSGSPLRWECKATGKPRPTYRWLKNGVPLSPQSRVEMVNGVLMIHNVNQSDAGMYQCLAENKYGAIYASAELKILASAPTFALNQLKKTIIVTKDQEVVIECKPQGSPKPTISWKKGDRAVRENKRIAILPDGSLRILNASKSDEGKYVCRGENVFGSAEIIASLSVKEPTRIELTPKRTELTVGESIVLNCKAIHDASLDVTFYWTLKGQPIDFEEEGGHFESIRAQASSADLMIRNILLMHAGRYGCRVQTTADSVSDEAELLVRGPPGPPGIVIVEEITESTATLSWSPAADNHSPISSYNLQARSPFSLGWQTVKTVPEIITGDMESAMAVDLNPWVEYEFRVVATNPIGTGDPSTPSRMIRTNEAVPKTAPTNVSGRSGRRHELVIAWEPVSEEFQNGEGFGYIVAFRPNGTRGWKEKMVTSSEASKFIYRDESVPPLTPFEVKVGVYNNKGDGPFSQIVVICSAEGEPSAAPTDVKATSVSVSEILVAWKHIKESLGRPQGFEVGYWKDMEQEDTAETVKTRGNESFVILTGLEGNTLYHFTVRAYNGAGYGPPSSEVSATTKKSPPSQAPSNLRWEQQGSQVSLGWEPVIPLANESEVVGYKVFYRQEGHSNSQVIETQKLQAVVPLPDAGVYIIEVRAYSEGGDGTASSQIRVPSYSGGKITSAQSTLHSLSTSSSSVTLLLALMIPSTSW

SEQ ID NO: 3156 - protein, 1100 aa, Homo Sapiens
MASSWKLMLFLSVTMCLSEYSKSLPGLSTSYAALLRIKKSSSSSLFGSKTRPRYSSPSLGTLSASSPSWLGAAQNYYSPINLYHSSDAFKQDESVDYGPVFVQEPDDIIFPTDSDEKKVALNCEVRGNPVPSYRWLRNGTEIDLESDYRYSLIDGTFIISNPSEAKDSGHYQCLATNTVGSILSREATLQFAYLGNFSGRTRSAVSVREGQGVVLMCSPPPHSPEIIYSWVFNEFPSFVAEDSRRFISQETGNLYISKVQTSDVGSYICLVKNTVTNARVLSPPTPLTLRNDGVMGEYEPKIEVHFPFTVTAAKGTTVKMECFALGNPVPTITWMKVNGYIPSKARLRKSQAVLEIPNVQLDDAGIYECRAENSRGKNSFRGQLQVYTYPHWVEKLNDTQLDSGSPLRWECKATGKPRPTYRWLKNGVPLSPQSRVEMVNGVLMIHNVNQSDAGMYQCLAENKYGAIYASAELKILASAPTFALNQLKKTIIVTKDQEVVIECKPQGSPKPTISWKKGDRAVRENKRIAILPDGSLRILNASKSDEGKYVCRGENVFGSAEIIASLSVKEPTRIELTPKRTELTVGESIVLNCKAIHDASLDVTFYWTLKGQPIDFEEEGGHFESIRAQASSADLMIRNILLMHAGRYGCRVQTTADSVSDEAELLVRGPPGPPGIVIVEEITESTATLSWSPAADNHSPISSYNLQARSPFSLGWQTVKTVPEIITGDMESAMAVDLNPWVEYEFRVVATNPIGTGDPSTPSRMIRTNEAVPKTAPTNVSGRSGRRHELVIAWEPVSEEFQNGEGFGYIVAFRPNGTRGWKEKMVTSSEASKFIYRDESVPPLTPFEVKVGVYNNKGDGPFSQIVVICSAEGEPSAAPTDVKATSVSVSEILVAWKHIKESLGRPQGFEVGYWKDMEQEDTAETVKTRGNESFVILTGLEGNTLYHFTVRAYNGAGYGPPSSEVSATTKKSPPSQAPSNLRWEQQGSQVSLGWEPVIPLANESEVVGYKVFYRQEGHSNSQVIETQKLQAVVPLPDAGVYIIEVRAYSEGGDGTASSQIRVPSYSGGKITSAQSTLHSLSTSSSSVTLLLALMIPSTSW

SEQ ID NO: 3157 - protein, 1100 aa, Homo Sapiens; identical to SEQ ID NO: 3156

SEQ ID NO: 3158 - protein, 911 aa, Homo Sapiens
MASSWKLMLFLSVTMCLSEYSKSLPGLSTSYAALLRIKKSSSSSLFGSKTRPRYSSPSLGTLSASSPSWLGAAQNYYSPINLYHSSDAFKQDESVDYGPVFVQEPDDIIFPTDSDEKKVALNCEVRGNPVPSYRWLRNGTEIDLESDYRYSLIDGTFIISNPSEAKDSGHYQCLATNTVGSILSREATLQFAYLGNFSGRTRSAVSVREGQGVVLMCSPPPHSPEIIYSWVFNEFPSFVAEDSRRFISQETGNLYISKVQTSDVGSYICLVKNTVTNARVLSPPTPLTLRNDGVMGEYEPKIEVHFPFTVTAAKGTTVKMECFALGNPVPTITWMKVNGYIPSKARLRKSQAVLEIPNVQLDDAGIYECRAENSRGKNSFRGQLQVYTYPHWVEKLNDTQLDSGSPLRWECKATGKPRPTYRWLKNGVPLSPQSRVEMVNGVLMIHNVNQSDAGMYQCLAENKYGAIYASAELKILASAPTFALNQLKKTIIVTKDQEVVIECKPQGSPKPTISWKKGDRAVRENKRIAILPDGSLRILNASKSDEGKYVCRGENVFGSAEIIASLSVKEPTRIELTPKRTELTVGESIVLNCKAIHDASLDVTFYWTLKGQPIDFEEEGGHFESIRAQASSADLMIRNILLMHAGRYGCRVQTTADSVSDEAELLVRGPPGPPGIVIVEEITESTATLSWSPAADNHSPISSYNLQARSPFSLGWQTVKTVPEIITGDMESAMAVDLNPWVEYEFRVVATNPIGTGDPSTPSRMIRTNEAVPKTAPTNVSGRSGRRHELVIAWEPVSEEFQNGEGFGYIVAFRPNGTRGWKEKMVTSSEASKFIYRDESVPPLTPFEVKVGVYNNKGDGPFSQIVVICSAEGEPSAAPTDVKATSVSVSEILVAWKHIKESLGRPQGFEV

SEQ ID NO: 3159 - protein, 390 aa, Homo Sapiens
MNGVTLDLEERAKVTSGFISGCSGHCTSYGTNCENGGKCLERYHGYSCDCSNTAYDGTFCNKDVGAFFEEGMWLRYNFQAPATNARDSSSRVDNAPDQQNSHPDLAQEEIRFSFSTTKAPCILLYISSFTTDFLAVLVKPTGSLQIRYNLGGTREPYNIDVDHRNMANGQPHSVNITRHEKTIFLKLDHYPSVSYHLPSSSDTLFNSPKSLFLGKVIETGKIDQEIHKYNTPGFTGCLSRVQFNQIAPLKAALRQTNASAHVHIQGELVESNCGASPLTLSPMSSATDPWHLDHLDSASADFPYNPGQGQAIRNGVNRNSAIIGGVIAVVIFTILCTLVFLIRYMFRHKGTYHTNEAKGAESAESADAAIMNNDPNFTETIDESKKEWLI

SEQ ID NO: 3160 - protein, 120 aa, Homo Sapiens
MQAAPRAGCGAALLLWIVSSCLCRAWTAPSTSQKCDEPLVSGLPHVAFSSSSSISGSYSPGYAKINKRGGAGGWSPSDSDHYQWLQVDFGNRKQISAIATQGRYSSSDWVTQYRMLYSDT

SEQ ID NO: 3161 - protein, 1331 aa, Homo Sapiens
MQAAPRAGCGAALLLWIVSSCLCRAWTAPSTSQKCDEPLVSGLPHVAFSSSSSISGSYSPGYAKINKRGGAGGWSPSDSDHYQWLQVDFGNRKQISAIATQGRYSSSDWVTQYRMLYSDTGRNWKPYHQDGNIWAFPGNINSDGVVRHELQHPIIARYVRIVPLDWNGEGRIGLRIEVYGCSYWADVINFDGHVVLPYRFRNKKMKTLKDVIALNFKTSESEGVILHGEGQQGDYITLELKKAKLVLSLNLGSNQLGPIYGHTSVMTGSLLDDHHWHSVVIERQGRSINLTLDRSMQHFRTNGEFDYLDLDYEITFGGIPFSGKPSSSSRKNFKGCMESINYNGVNITDLARRKKLEPSNVGNLSFSCVEPYTVPVFFNATSYLEVPGRLNQDLFSVSFQFRTWNPNGLLVFSHFADNLGNVEIDLTESKVGVHINITQTKMSQIDISSGSGLNDGQWHEVRFLAKENFAILTIDGDEASAVRTNSPLQVKTGEKYFFGGFLNQMNNSSHSVLQPSFQGCMQLIQVDDQLVNLYEVAQRKPGSFANVSIDMCAIIDRCVPNHCEHGGKCSQTWDSFKCTCDETGYSGATCHNSIYEPSCEAYKHLGQTSNYYWIDPDGSGPLGPLKVYCNMTEDKVWTIVSHDLQMQTPVVGYNPEKYSVTQLVYSASMDQISAITDSAEYCEQYVSYFCKMSRLLNTPDGSPYTWWVGKANEKHYYWGGSGPGIQKCACGIERNCTDPKYYCNCDADYKQWRKDAGFLSYKDHLPVSQVVVGDTDRQGSEAKLSVGPLRCQGDRNYWNAASFPNPSSYLHFSTFQGETSADISFYFKTLTPWGVFLENMGKEDFIKLELKSATEVSFSFDVGNGPVEIVVRSPTPLNDDQWHRVTAERNVKQASLQVDRLPQQIRKAPTEGHTRLELYSQLFVGGAGGQQGFLGCIRSLRMNGVTLDLEERAKVTSGFISGCSGHCTSYGTNCENGGKCLERYHGYSCDCSNTAYDGTFCNKDVGAFFEEGMWLRYNFQAPATNARDSSSRVDNAPDQQNSHPDLAQEEIRFSFSTTKAPCILLYISSFTTDFLAVLVKPTGSLQIRYNLGGTREPYNIDVDHRNMANGQPHSVNITRHEKTIFLKLDHYPSVSYHLPSSSDTLFNSPKSLFLGKVIETGKIDQEIHKYNTPGFTGCLSRVQFNQIAPLKAALRQTNASAHVHIQGELVESNCGASPLTLSPMSSATDPWHLDHLDSASADFPYNPGQGQAIRNGVNRNSAIIGGVIAVVIFTILCTLVFLIRYMFRHKGTYHTNEAKGAESAESADAAIMNNDPNFTETIDESKKEWLI

SEQ ID NO: 3162 - protein, 108 aa, Homo Sapiens
MSSATDPWHLDHLDSASADFPYNPGQGQAIRNGVNRNSAIIGGVIAVVIFTILCTLVFLIRYMFRHKGTYHTNEAKGAESAESADAAIMNNDPNFTETIDESKKEWLI

SEQ ID NO: 3163 - protein, 1288 aa, Homo Sapiens
MASVAWAVLKVLLLLPTQTWSPVGAGNPPDCDAPLASALPRSSFSSSSELSSSHGPGFSRLNRRDGAGGWTPLVSNKYQWLQIDLGERMEVTAVATQGGYGSSDWVTSYLLMFSDGGRNWKQYRREESIWGFPGNTNADSVVHYRLQPPFEARFLRFLPLAWNPRGRIGMRIEVYGCAYKSEVVYFDGQSALLYRLDKKPLKPIRDVISLKFKAMQSNGILLHREGQHGNHITLELIKGKLVFFLNSGNAKLPSTIAPVTLTLGSLLDDQHWHSVLIELLDTQVNFTVDKHTHHFQAKGDSSYLDLNFEISFGGIPTPGRSRAFRRKSFHGCLENLYYNGVDVTELAKKHKPQILMMGNVSFSCPQPQTVPVTFLSSRSYLALPGNSGEDKVSVTFQFRTWNRAGHLLFGELRRGSGSFVLFLKDGKLKLSLFQPGQSPRNVTAGAGLNDGQWHSVSFSAKWSHMNVVVDDDTAVQPLVAVLIDSGDTYYFGGCLDNSSGSGCKSPLGGFQGCLRLITIGDKAVDPILVQQGALGSFRDLQIDSCGITDRCLPSYCEHGGECSQSWDTFSCDCLGTGYTGETCHSSLYEQSCEAHKHRGNPSGLYYIDADGSGPLGPFLVYCNMTADAAWTVVQHGGPDAVTLRGAPSGHPRSAVSFAYAAGAGQLRSAVNLAERCEQRLALRCGTARRPDSRDGTPLSWWVGRTNETHTSWGGSLPDAQKCTCGLEGNCIDSQYYCNCDAGRNEWTSDTIVLSQKEHLPVTQIVMTDAGRPHSEAAYTLGPLLCRGDQSFWNSASFNTETSYLHFPAFHGELTADVCFFFKTTVSSGVFMENLGITDFIRIELRAPTEVTFSFDVGNGPCEVTVQSPTPFNDNQWHHVRAERNVKGASLQVDQLPQKMQPAPADGHVRLQLNSQLFIGGTATRQRGFLGCIRSLQLNGVALDLEERATVTPGVEPGCAGHCSTYGHLCRNGGRCREKRRGVTCDCAFSAYDGPFCSNEISAYFATGSSMTYHFQEHYTLSENSSSLVSSLHRDVTLTREMITLSFRTTRTPSLLLYVSSFYEEYLSVILANNGSLQIRYKLDRHQNPDAFTFDFKNMADGQLHQVKINREEAVVMVEVNQSTKKQVILSSGTEFNAVKSLILGKVLEAAGADPDTRRAATSGFTGCLSAVRFGRAAPLKAALRPSGPSRVTVRGHVAPMARCAAGAASGSPARELAPRLAGGAGRSGPADEGEPLVNADRRDSAVIGGVIAVVIFILLCITAIAIRIYQQRKLRKENESKVSKKEEC

SEQ ID NO: 3164 - protein, 1207 aa, Homo Sapiens
MASVAWAVLKVLLLLPTQTWSPVGAGNPPDCDAPLASALPRSSFSSSSELSSSHGPGFSRLNRRDGAGGWTPLVSNKYQWLQIDLGERMEVTAVATQGGYGSSDWVTSYLLMFSDGGRNWKQYRREESIWGFPGNTNADSVVHYRLQPPFEARFLRFLPLAWNPRGRIGMRIEVYGCAYKSEVVYFDGQSALLYRLDKKPLKPIRDVISLKFKAMQSNGILLHREGQHGNHITLELIKGKLVFFLNSGNAKLPSTIAPVTLTLGSLLDDQHWHSVLIELLDTQVNFTVDKHTHHFQAKGDSSYLDLNFEISFGGIPTPGRSRAFRRKSFHGCLENLYYNGVDVTELAKKHKPQILMMGNVSFSCPQPQTVPVTFLSSRSYLALPGNSGEDKVSVTFQFRTWNRAGHLLFGELRRGSGSFVLFLKDGKLKLSLFQPGQSPRNVTAGAGLNDGQWHSVSFSAKWSHMNVVVDDDTAVQPLVAVLIDSGDTYYFGGCLDNSSGSGCKSPLGGFQGCLRLITIGDKAVDPILVQQGALGSFRDLQIDSCGITDRCLPSYCEHGGECSQSWDTFSCDCLGTGYTGETCHSSLYEQSCEAHKHRGNPSGLYYIDADGSGPLGPFLVYCNMTDAAWTVVQHGGPDAVTLRGAPSGHPRSAVSFAYAAGAGQLRSAVNLAERCEQRLALRCGTARRPDSRDGTPLSWWVGRTNETHTSWGGSLPDAQKCTCGLEGNCIDSQYYCNCDAGRNEWTSDTIVLSQKEHLPVTQIVMTDAGRPHSEAAYTLGPLLCRGDQSFWNSASFNTETSYLHFPAFHGELTADVCFFFKTTVSSGVFMENLGITDFIRIELRAPTEVTFSFDVGNGPCEVTVQSPTPFNDNQWHHVRAERNVKGASLQVDQLPQKMQPAPADGHVRLQLNSQLFIEISAYFATGSSMTYHFQEHYTLSENSSSLVSSLHRDVTLTREMITLSFRTTRTPSLLLYVSSFYEEYLSVILANNGSLQIRYKLDRHQNPDAFTFDFKNMADGQLHQVKINREEAVVMVEVNQSTKKQVILSSGTEFNAVKSLILGKVLEAAGADPDTRRAATSGFTGCLSAVRFGRAAPLKAALRPSGPSRVTVRGHVAPMARCAAGAASGSPARELAPRLAGGAGRSGPADEGEPLVNADRRDSAVIGGVIAVVIFILLCITAIAIRIYQQRKLRKENESKVSKKEEC

SEQ ID NO: 3165 - protein, 745 aa, Homo Sapiens
MASVAWAVLKVLLLLPTQTWSPVGAGNPPDCDAPLASALPRSSFSSSSELSSSHGPGFSRLNRRDGAGGWTPLVSNKYQWLQIDLGERMEVTAVATQGGYGSSDWVTSYLLMFSDGGRNWKQYRREESIWGFPGNTNADSVVHYRLQPPFEARFLRFLPLAWNPRGRIGMRIEVYGCAYKSEVVYFDGQSALLYRLDKKPLKPIRDVISLKFKAMQSNGILLHREGQHGNHITLELIKGKLVFFLNSGNAKLPSTIAPVTLTLGSLLDDQHWHSVLIELLDTQVNFTVDKHTHHFQAKGDSSYLDLNFEISFGGIPTPGRSRAFRRKSFHGCLENLYYNGVDVTELAKKHKPQILMMGNVSFSCPQPQTVPVTFLSSRSYLALPGNSGEDKVSVTFQFRTWNRAGHLLFGELRRGSGSFVLFLKDGKLKLSLFQPGQSPRNVTAGAGLNDGQWHSVSFSAKWSHMNVVVDDDTAVQPLVAVLIDSGDTYYFGGCLDNSSGSGCKSPLGGFQGCLRLITIGDKAVDPILVQQGALGSFRDLQIDSCGITDRCLPSYCEHGGECSQSWDTFSCDCLGTGYTGETCHSSLYEQSCEAHKHRGNPSGLYYIDADGSGPLGPFLVYCNMTDAAWTVVQHGGPDAVTLRGAPSGHPRSAVSFAYAAGAGQLRSAVNLAERCEQRLALRCGTARRPDSRDGTPLSWWVGRTNETHTSWGGSLPDAQKCTCGLEGNCIDSQYYCNCDAGRNEW

SEQ ID NO: 3166 - protein, 604 aa, Homo Sapiens
MASVAWAVLKVLLLLPTQTWSPVGAGNPPDCDAPLASALPRSSFSSSSELSSSHGPGFSRLNRRDGAGGWTPLVSNKYQWLQIDLGERMEVTAVATQGGYGSSDWVTSYLLMFSDGGRNWKQYRREESIWGFPGNTNADSVVHYRLQPPFEARFLRFLPLAWNPRGRIGMRIEVYGCAYKSEVVYFDGQSALLYRLDKKPLKPIRDVISLKFKAMQSNGILLHREGQHGNHITLELIKGKLVFFLNSGNAKLPSTIAPVTLTLGSLLDDQHWHSVLIELLDTQVNFTVDKHTHHFQAKGDSSYLDLNFEISFGGIPTPGRSRAFRRKSFHGCLENLYYNGVDVTELAKKHKPQILMMGNVSFSCPQPQTVPVTFLSSRSYLALPGNSGEDKVSVTFQFRTWNRAGHLLFGELRRGSGSFVLFLKDGKLKLSLFQPGQSPRNVTAGAGLNDGQWHSVSFSAKWSHMNVVVDDDTAVQPLVAVLIDSGDTYYFGALYEQSCEAHKHRGNPSGLYYIDADGSGPLGPFLVYCNMTDAAWTVVQHGGPDAVTLRGAPSGHPRSAVSFAYAAGAGQLRSAVNLAERCEQRLALRCGTARRPDSRGLVTQ

SEQ ID NO: 3167 - protein, 1039 aa, Homo Sapiens
MEVTAVATQGGYGSSDWVTSYLLMFSDGGRNWKQYRREESIWGFPGNTNADSVVHYRLQPPFEARFLRFLPLAWNPRGRIGMRIEVYGCAYKSEVVYFDGQSALLYRLDKKPLKPIRDVISLKFKAMQSNGILLHREGQHGNHITLELIKGKLVFFLNSGNAKLPSTIAPVTLTLGSLLDDQHWHSVLIELLDTQVNFTVDKHTHHFQAKGDSSYLDLNFEISFGGIPTPGRSRAFRRKSFHGCLENLYYNGVDVTELAKKHKPQILMMGNVSFSCPQPQTVPVTFLSSRSYLALPGNSGEDKVSVTFQFRTWNRAGHLLFGELRRGSGSFVLFLKDGKLKLSLFQPGQSPRNVTAGAGLNDGQWHSVSFSAKWSHMNVVVDDDTAVQPLVAVLIDSGDTYYFGGCLDNSSGSGCKSPLGGFQGCLRLITIGDKAVDPILVQQGALGSFRDLQIDSCGITDRCLPSYCEHGGECSQSWDTFSCDCLGTGYTGETCHSSLYEQSCEAHKHRGNPSGLYYIDADGSGPLGPFLVYCNMTADAAWTVVQHGGPDAVTLRGAPSGHPRSAVSFAYAAGAGQLRSAVNLAERCEQRLALRCGTARRPDSRDGTPLSWWVGRTNETHTSWGGSLPDAQKCTCGLEGNCIDSQYYCNCDAGRNEWTSDTIVLSQKEHLPVTQIVMTDAGRPHSEAAYTLGPLLCRGDQSFWNSASFNTETSYLHFPAFHGELTADVCFFFKTTVSSGVFMENLGITDFIRIELRAPTEVTFSFDVGNGPCEVTVQSPTPFNDNQWHHVRAERNVKGASLQVDQLPQKMQPAPADGHVRLQLNSQLFIGGTATRQRGFLGCIRSLQLNGVALDLEERATVTPGVEPGCAGHCSTYGHLCRNGGRCREKRRGVTCDCAFSAYDGPFCSNEISAYFATGSSMTYHFQEHYTLSENSSSLVSSLHRDVTLTREMITLSFRTTRTPSLLLYVSSFYEEYLSVILANNGSLQIRYKLDRHQNPDAFTFDFKNMADGQLHQVKINREEAVVMVEVIPQMQKSN

SEQ ID NO: 3168 - protein, 380 aa, Homo Sapiens
MASVAWAVLKVLLLLPTQTWSPVGAGNPPDCDSPLASALPRSSFSSSSELSSSHGPGFSRLNRRDGAGGWTPLVSNKYQWLQIDLGERMEVTAVATQGGYGSSDWVTSYLLMFSDGGRNWKQYRREESIWGFPGNTNADSVVHYRLQPPFEARFLRFLPLAWNPRGRIGMRIEVYGCAYKSEVVYFDGQSALLYTLDKKPLKPIRDVISLKFKAMQSNGILLHREGQHGNHITLELIKGKLVFFLNSGNAKLPSTIAPVTLTLGSLLDDQHWHSVLIELLDTQVNFTVDKHTHHFQAKGDSSNLDLNFEISFGGILSPGRSRAFTRKSFHGCLENLYYNGVDVTELAKKHKPQILMMELAHGLQDQNLKISLTVCHQTTQ

SEQ ID NO: 3169 - protein, 745 aa, Homo Sapiens
MASVAWAVLKVLLLLPTQTWSPVGAGNPPDCDSPLASALPRSSFSSSSELSSSHGPGFSRLNRRDGAGGWTPLVSNKYQWLQIDLGERMEVTAVATQGGYGSSDWVTSYLLMFSDGGRNWKQYRREESIWGFPGNTNADSVVHYRLQPPFEARFLRFLPLAWNPRGRIGMRIEVYGCAYKSEVVYFDGQSALLYTLDKKPLKPIRDVISLKFKAMQSNGILLHREGQHGNHITLELIKGKLVFFLNSGNAKLPSTIAPVTLTLGSLLDDQHWHSVLIELLDTQVNFTVDKHTHHFQAKGDSSNLDLNFEISFGGILSPGRSRAFTRKSFHGCLENLYYNGVDVTELAKKHKPQILMMGNVSFSCPQPQTVPVTFLSSRSYLALPGNSGEDKVSVTFQFRTWNRAGHLLFGELQRGSGSFVLFLKDGKLKLSLFQAGQSPRNVTAGAGLNDGQWHSVSFSAKWSHMNVVVDDDTAVQPLVAVLIDSGDTYYFGGCLGNSSGSGCKSPLGGFQGCLRLITIGDKAVDPILVQQGALGSFRDLQIDSCGITDRCLPSYCEHGGECSQSWDTFSCDCLGTGYTGETCHSSLYEQSCEAHKHRGNPSGLYYIDADGSGPLGPFLVYCNMTDSAWTVVRHGGPDAVTLRGAPSGHPLSAVSFAYAAGAGQLRAAVNLAERCEQRLALRCGTARRPDSRDGTPLSWWVGRTNETHTSWGGSLPDAQKCTCGLEGNCIDSQYYCNCDAGQNEW

SEQ ID NO: 3170 - protein, 1288 aa, Homo Sapiens
MASVAWAVLKVLLLLPTQTWSPVGAGNPPDCDSPLASALPRSSFSSSSELSSSHGPGFSRLNRRDGAGGWTPLVSNKYQWLQIDLGERMEVTAVATQGGYGSSDWVTSYLLMFSDGGRNWKQYRREESIWGFPGNTNADSVVHYRLQPPFEARFLRFLPLAWNPRGRIGMRIEVYGCAYKSEVVYFDGQSALLYTLDKKPLKPIRDVISLKFKAMQSNGILLHREGQHGNHITLELIKGKLVFFLNSGNAKLPSTIAPVTLTLGSLLDDQHWHSVLIELLDTQVNFTVDKHTHHFQAKGDSSNLDLNFEISFGGILSPGRSRAFTRKSFHGCLENLYYNGVDVTELAKKHKPQILMMGNVSFSCPQPQTVPVTFLSSRSYLALPGNSGEDKVSVTFQFRTWNRAGHLLFGELQRGSGSFVLFLKDGKLKLSLFQAGQSPRNVTAGAGLNDGQWHSVSFSAKWSHMNVVVDDDTAVQPLVAVLIDSGDTYYFGGCLGNSSGSGCKSPLGGFQGCLRLITIGDKAVDPILVQQGALGSFRDLQIDSCGITDRCLPSYCEHGGECSQSWDTFSCDCLGTGYTGETCHSSLYEQSCEAHKHRGNPSGLYYIDADGSGPLGPFLVYCNMTADSAWTVVRHGGPDAVTLRGAPSGHPLSAVSFAYAAGAGQLRAAVNLAERCEQRLALRCGTARRPDSRDGTPLSWWVGRTNETHTSWGGSLPDAQKCTCGLEGNCIDSQYYCNCDAGQNEWTSDTIVLSQKEHLPVTQIVMTDTGQPHSEADYTLGPLLCRGDKSFWNSASFNTETSYLHFPAFHGELTADVCFFFKTTVSSGVFMENLGITDFIRIELRAPTEVTFSFDVGNGPCEVTVQSPTPFNDNQWHHVRAERNVKGASLQVDQLPQKMQPAPADGHVRLQLNSQLFIGGTATRQRGFLGCIRSLQLNGVALDLEERATVTPGVEPGCAGHCSTYGHLCRNGGRCREKRRGVTCDCAFSAYDGPFCSNEISAYFATGSSMTYHFQEHYTLSENSSSLVSSLHRDVTLTREMITLSFRTTRTPSLLLYVSSFYEEYLSVILANNGSLQIRYKLDRHQNPDAFTFDFKNMADGQLHQVKINREEAVVMVEVNQSAKKQVILSSGTEFNAVKSLILGKVLEAAGADPDTRRAATSGFTGCLSAVRFGCAAPLKAALRPSGPSRVTVRGHVAPMARCAAGAASGSPARELAPRLAGGAGRSGPVDEGEPLVNADRRDSAVIGGVIAVEIFILLCITAIAIRIYQQRKLRKENESKVSKKEEC

SEQ ID NO: 3171 - protein, 605 aa, Homo Sapiens
MASVAWAVLKVLLLLPTQTWSPVGAGNPPDCDSPLASALPRSSFSSSSELSSSHGPGFSRLNRRDGAGGWTPLVSNKYQWLQIDLGERMEVTAVATQGGYGSSDWVTSYLLMFSDGGRNWKQYRREESIWGFPGNTNADSVVHYRLQPPFEARFLRFLPLAWNPRGRIGMRIEVYGCAYKSEVVYFDGQSALLYTLDKKPLKPIRDVISLKFKAMQSNGILLHREGQHGNHITLELIKGKLVFFLNSGNAKLPSTIAPVTLTLGSLLDDQHWHSVLIELLDTQVNFTVDKHTHHFQAKGDSSNLDLNFEISFGGILSPGRSRAFTRKSFHGCLENLYYNGVDVTELAKKHKPQILMMGNVSFSCPQPQTVPVTFLSSRSYLALPGNSGEDKVSVTFQFRTWNRAGHLLFGELQRGSGSFVLFLKDGKLKLSLFQAGQSPRNVTAGAGLNDGQWHSVSFSAKWSHMNVVVDDDTAVQPLVAVLIDSGDTYYFGALYEQSCEAHKHRGNPSGLYYIDADGSGPLGPFLVYCNMTADSAWTVVRHGGPDAVTLRGAPSGHPLSAVSFAYAAGAGQLRAAVNLAERCEQRLALRCGTARRPDSRGLVTQ

SEQ ID NO: 3172 - protein, 1207 aa, Homo Sapiens
MASVAWAVLKVLLLLPTQTWSPVGAGNPPDCDSPLASALPRSSFSSSSELSSSHGPGFSRLNRRDGAGGWTPLVSNKYQWLQIDLGERMEVTAVATQGGYGSSDWVTSYLLMFSDGGRNWKQYRREESIWGFPGNTNADSVVHYRLQPPFEARFLRFLPLAWNPRGRIGMRIEVYGCAYKSEVVYFDGQSALLYTLDKKPLKPIRDVISLKFKAMQSNGILLHREGQHGNHITLELIKGKLVFFLNSGNAKLPSTIAPVTLTLGSLLDDQHWHSVLIELLDTQVNFTVDKHTHHFQAKGDSSNLDLNFEISFGGILSPGRSRAFTRKSFHGCLENLYYNGVDVTELAKKHKPQILMMGNVSFSCPQPQTVPVTFLSSRSYLALPGNSGEDKVSVTFQFRTWNRAGHLLFGELQRGSGSFVLFLKDGKLKLSLFQAGQSPRNVTAGAGLNDGQWHSVSFSAKWSHMNVVVDDDTAVQPLVAVLIDSGDTYYFGGCLGNSSGSGCKSPLGGFQGCLRLITIGDKAVDPILVQQGALGSFRDLQIDSCGITDRCLPSYCEHGGECSQSWDTFSCDCLGTGYTGETCHSSLYEQSCEAHKHRGNPSGLYYIDADGSGPLGPFLVYCNMTDSAWTVVRHGGPDAVTLRGAPSGHPLSAVSFAYAAGAGQLRAAVNLAERCEQRLALRCGTARRPDSRDGTPLSWWVGRTNETHTSWGGSLPDAQKCTCGLEGNCIDSQYYCNCDAGQNEWTSDTIVLSQKEHLPVTQIVMTDTGQPHSEADYTLGPLLCRGDKSFWNSASFNTETSYLHFPAFHGELTADVCFFFKTTVSSGVFMENLGITDFIRIELRAPTEVTFSFDVGNGPCEVTVQSPTPFNDNQWHHVRAERNVKGASLQVDQLPQKMQPAPADGHVRLQLNSQLFIEISAYFATGSSMTYHFQEHYTLSENSSSLVSSLHRDVTLTREMITLSFRTTRTPSLLLYVSSFYEEYLSVILANNGSLQIRYKLDRHQNPDAFTFDFKNMADGQLHQVKINREEAVVMVEVNQSAKKQVILSSGTEFNAVKSLILGKVLEAAGADPDTRRAATSGFTGCLSAVRFGCAAPLKAALRPSGPSRVTVRGHVAPMARCAAGAASGSPARELAPRLAGGAGRSGPVDEGEPLVNADRRDSAVIGGVIAVEIFILLCITAIAIRIYQQRKLRKENESKVSKKEEC

SEQ ID NO: 3173 - protein, 652 aa, Homo Sapiens
MASVAWAVLKVLLLLPTQTWSPVGAGNPPDCDSPLASALPRSSFSSSSELSSSHGPGFSRLNRRDGAGGWTPLVSNKYQWLQIDLGERMEVTAVATQGGYGSSDWVTSYLLMFSDGGRNWKQYRREESIWGFPGNTNADSVVHYRLQPPFEARFLRFLPLAWNPRGRIGMRIEVYGCAYKSEVVYFDGQSALLYTLDKKPLKPIRDVISLKFKAMQSNGILLHREGQHGNHITLELIKGKLVFFLNSGNAKLPSTIAPVTLTLGSLLDDQHWHSVLIELLDTQVNFTVDKHTHHFQAKGDSSNLDLNFEISFGGILSPGRSRAFTRKSFHGCLENLYYNGVDVTELAKKHKPQILMMGNVSFSCPQPQTVPVTFLSSRSYLALPGNSGEDKVSVTFQFRTWNRAGHLLFGELQRGSGSFVLFLKDGKLKLSLFQAGQSPRNVTAGAGLNDGQWHSVSFSAKWSHMNVVVDDDTAVQPLVAVLIDSGDTYYFGALYEQSCEAHKHRGNPSGLYYIDADGSGPLGPFLVYCNMTDSAWTVVRHGGPDAVTLRGAPSGHPLSAVSFAYAAGAGQLRAAVNLAERCEQRLALRCGTARRPDSRDGTPLSWWVGRTNETHTSWGGSLPDAQKCTCGLEGNCIDSQYYCNCDAGQNEW

SEQ ID NO: 3174 - protein, 966 aa, Homo Sapiens
MASVAWAVLKVLLLLPTQTWSPVGAGNPPDCDSPLASALPRSSFSSSSELSSSHGPGFSRLNRRDGAGGWTPLVSNKYQWLQIDLGERMEVTAVATQGGYGSSDWVTSYLLMFSDGGRNWKQYRREESIWGFPGNTNADSVVHYRLQPPFEARFLRFLPLAWNPRGRIGMRIEVYGCAYKSEVVYFDGQSALLYTLDKKPLKPIRDVISLKFKAMQSNGILLHREGQHGNHITLELIKGKLVFFLNSGNAKLPSTIAPVTLTLGSLLDDQHWHSVLIELLDTQVNFTVDKHTHHFQAKGDSSNLDLNFEISFGGILSPGRSRAFTRKSFHGCLENLYYNGVDVTELAKKHKPQILMMGNVSFSCPQPQTVPVTFLSSRSYLALPGNSGEDKVSVTFQFRTWNRAGHLLFGELQRGSGSFVLFLKDGKLKLSLFQAGQSPRNVTAGAGLNDGQWHSVSFSAKWSHMNVVVDDDTAVQPLVAVLIDSGDTYYFGALYEQSCEAHKHRGNPSGLYYIDADGSGPLGPFLVYCNMTDSAWTVVRHGGPDAVTLRGAPSGHPLSAVSFAYAAGAGQLRAAVNLAERCEQRLALRCGTARRPDSRDGTPLSWWVGRTNETHTSWGGSLPDAQKCTCGLEGNCIDSQYYCNCDAGQNEWTSDTIVLSQKEHLPVTQIVMTDTGQPHSEADYTLGPLLCRGDKSFWNSASFNTETSYLHFPAFHGELTADVCFFFKTTVSSGVFMENLGITDFIRIELRAPTEVTFSFDVGNGPCEVTVQSPTPFNDNQWHHVRAERNVKGASLQVDQLPQKMQPAPADGHVRLQLNSQLFIGGTATRQRGFLGCIRSLQLNGVALDLEERATVTPGVEPGCAGHCSTYGHLCRNGGRCREKRRGVTCDCAFSAYDGPFCSNEISAYFATGSSMTYHFQEHYTLSENSSSLVSSLHRDVTLTREMITLSFRTTRTPSLLLKFAD

SEQ ID NO: 3175 - protein, 180 aa, Homo Sapiens
  misc_feature (1)..(1): Xaa can be any naturally occurring amino acid
XRDVTLTREMITLSFRTTRTPSLLLYVSSFYEEYLSVILANNGSLQIRYKLDRHQNPDAFTFDFKNMADGQLHQVKINREEAVVMVEVNQSAKKQVILSSGTEFNAVKSLILGKVLGRSGPVDEGEPLVNADRRDSAVIGGVIAVEIFILLCITAIAIRIYQQRKLRKENESKVSKKEEC

SEQ ID NO: 3176 - protein, 167 aa, Homo Sapiens
  misc_feature (1)..(1): Xaa can be any naturally occurring amino acid
XSAAPGLTRTSDTIVLSQKEHLPVTQIVMTDTGQPHSEADYTLGPLLCRGDTRLLKVWRRESVIFEIFPSLFGRLRWEDGLSQGVQHKPGQDESFWNSASFNTETSYLHFPAFHGELTADVCFFFKTTVSSGVFMENLGITDFIRIELRGRLATLDKSQGTHYLAIK

SEQ ID NO: 3177 - protein, 116 aa, Homo Sapiens
MAINRFRLENDLEELALYQIQLLKDLRHTENEEDKVSSSSFRQRMLGNLLRPPYERPELPTCLYVIGLTGISGSGKSSIAQRLKGLGAFVIDSDHLGHRAYAPGGPAYQPVVEAFG

SEQ ID NO: 3178 - protein, 91 aa, Homo Sapiens
MAVFRSGLLVLTTPLASLAPRLASILTSAARLVNHTLYVHLQPGMSLEGPAQPQSSPVQATFEVLDFITHLYAGADVHRHLDVRILLTNIR

SEQ ID NO: 3179 - protein, 147 aa, Homo Sapiens
MAVFRSGLLVLTTPLASLAPRLASILTSAARLVNHTLYVHLQPGMSLEGPAQPQSSPVQATFEVLDFITHLYAGADVHRHLDVRILLTNIRTKSTFLPPLPTSVQNLAHPPEVVLTDFQTLDGSQYNPVKQQLVRYATSCYSCCPRL

SEQ ID NO: 3180 - protein, 219 aa, Homo Sapiens
MAVFRSGLLVLTTPLASLAPRLASILTSAARLVNHTLYVHLQPGMSLEGPAQPQSSPVQATFEVLDFITHLYAGADVHRHLDVRILLTNIRTKSTFLPPLPTSVQNLAHPPEVVLTDFQTLDGSQYNPVKQQLVRYATSCYSCCPRLASVLLYSDYGIGEVPVEPLDVPLPSTIRPASPVAGSPKQPVRGYYRGAVGGTFDRLHNAHKVLLSVACILAQ

SEQ ID NO: 3181 - protein, 564 aa, Homo Sapiens
MAVFRSGLLVLTTPLASLAPRLASILTSAARLVNHTLYVHLQPGMSLEGPAQPQSSPVQATFEVLDFITHLYAGADVHRHLDVRILLTNIRTKSTFLPPLPTSVQNLAHPPEVVLTDFQTLDGSQYNPVKQQLVRYATSCYSCCPRLASVLLYSDYGIGEVPVEPLDVPLPSTIRPASPVAGSPKQPVRGYYRGAVGGTFDRLHNAHKVLLSVACILAQEQLVVGVADKDLLKSKLLPELLQPYTERVEHLSEFLVDIKPSLTFDVIPLLDPYGPAGSDPSLEFLVVSEETYRGGMAINRFRLENDLEELALYQIQLLKDLRHTENEEDKVSSSSFRQRMLGNLLRPPYERPELPTCLYVIGLTGISGSGKSSIAQRLKGLGAFVIDSDHLGHRAYAPGGPAYQPVVEAFGTDILHKDGIINRKVLGSRVFGNKKQLKILTDIMWPIIAKLAREEMDRAVAEGKRVCVIDAAVLLEAGWQNLVHEVWTAVIPETEAVRRIVERDGLSEAAAQSRLQSQMSGQQLVEQSHVVLSTLWEPHITQRQVEKAWALLQKRIPKTHQALD

SEQ ID NO: 3182 - protein, 564 aa, Homo Sapiens; identical to SEQ ID NO: 3181

SEQ ID NO: 3183 - protein, 98 aa, Homo Sapiens
MRTPRLRAQPRGAVYQAPSPPPAPVGLGSMAVFRSGLLVLTTPLASLAPRLASILTSAARLVNHTLYVHLQPGMSLEGPAQPQSSPVQATFEVLDFIT

SEQ ID NO: 3184 - protein, 128 aa, Homo Sapiens
MRTPRLRAQPRGAVYQAPSPPPAPVGLGSMAVFRSGLLVLTTPLASLAPRLASILTSAARLVNHTLYVHLQPGMSLEGPAQPQSSPVQATFEVLDFITHLYAGADVHRHLDVRILLTNIRTKSTFLPP

SEQ ID NO: 3185 - protein, 593 aa, Homo Sapiens
MRTPRLRAQPRGAVYQAPSPPPAPVGLGSMAVFRSGLLVLTTPLASLAPRLASILTSAARLVNHTLYVHLQPGMSLEGPAQPQSSPVQATFEVLDFITHLYAGADVHRHLDVRILLTNIRTKSTFLPPLPTSVQNLAHPPEVVLTDFQTLDGSQYNPVKQQLVRYATSCYSCCPRLASVLLYSDYGIGEVPVEPLDVPLPSTIRPASPVAGSPKQPVRGYYRGAVGGTFDRLHNAHKVLLSVACILAQEQLVVGVADKDLLKSKLLPELLQPYTERVEHLSEFLVDIKPSLTFDVIPLLDPYGPAGSDPSLEFLVVSEETYRGGMAINRFRLENDLEELALYQIQLLKDLRHTENEEDKVSSSSFRQRMLGNLLRPPYERPELPTCLYVIGLTGISGSGKSSIAQRLKGLGAFVIDSDHLGHRAYAPGGPAYQPVVEAFGTDILHKDGIINRKVLGSRVFGNKKQLKILTDIMWPIIAKLAREEMDRAVAEGKRVCVIDAAVLLEAGWQNLVHEVWTAVIPETEAVRRIVERDGLSEAAAQSRLQSQMSGQQLVEQSHVVLSTLWEPHITQRQVEKAWALLQKRIPKTHQALD

SEQ ID NO: 3186 - protein, 96 aa, Homo Sapiens
MRTPRLRAQPRGAVYQAPSPPPAPVVQNLAHPPEVVLTDFQTLDGSQYNPVKQQLVRYATSCYSCCPRLASVLLYSDYGIGEVPVEPLDVPLPSTI

SEQ ID NO: 3187 - protein, 438 aa, Homo Sapiens
MLSRWSASFTVTKGKSSTQEATGQAVSTAHPPTGKRLKKTPEKKTGNKDCKADIAFLIDGSFNIGQRRFNLQKNFVGKVALMLGIGTEGPHVGLVQASEHPKIEFYLKNFTSAKDVLFAIKEVGFRGGNSNTGKALKHTAQKFFTVDAGVRKGIPKVVVVFIDGWPSDDIEEAGIVAREFGVNVFIVSVAKPIPEELGMVQDVTFVDKAVCRNNGFFSYHMPNWFGTTKYVKPLVQKLCTHEQMMCSKTCYNSVNIAFLIDGSSSVGDSNFRLMLEFVSNIAKTFEISDIGAKIAAVQFTYDQRTEFSFTDYSTKENVLAVIRNIRYMSGGTATGDAISFTVRNVFGPIRESPNKNFLVIVTDGQSYDDVQGPAAAAHDAGITIFSVGVAWAPLDDLKDMASKPKESHAFFTREFTGLEPIVSDVIRGICRDFLESQQ

SEQ ID NO: 3188 - protein, 193 aa, Homo Sapiens
MSAAWIPALGLAPIAITCFTRGLDIRKEKADVLCPGGCPLEEFSVYGNIVYASVSSICGAAVHRGVISNSGGPVRVYSLPGRENYSSVDANGIQSQMLSRWSASFTVTKGKSSTQEATGQAVSTAHPPTGKRLKKTPEKKTGNKDCKADIAFLIDGSFNIGQRRFNLQKNFVGKVALMLGIGTEGPHVGLVQA

SEQ ID NO: 3189 - protein, 80 aa, Homo Sapiens
MSAAWIPALGLGVCLLLLPGPAGSEGAAPIAITCFTRGLDIRKEKADVLCPGGCPLEEFSVYGNIVYASVSSICGAAVHR

SEQ ID NO: 3190 - protein, 513 aa, Homo Sapiens
MSAAWIPALGLGVCLLLLPGPAGSEGAAPIAITCFTRGLDIRKEKADVLCPGGCPLEEFSVYGNIVYASVSSICGAAVHRGVISNSGGPVRVYSLPGRENYSSVDANGIQSQMLSRWSASFTVTKGKSSTQEATGQAVSTAHPPTGKRLKKTPEKKTGNKDCKADIAFLIDGSFNIGQRRFNLQKNFVGKVALMLGIGTEGPHVGLVQASEHPKIEFYLKNFTSAKDVLFAIKEVGFRGGNSNTDVAERMSSTTVDSEERLLRGKALKHTAQKFFTVDAGVRKGIPKVVVVFIDGWPSDDIEEAGIVAREFGVNVFIVSVAKPIPEELGMVQDVTFVDKAVCRNNGFFSYHMPNWFGTTKYVKPLVQKLCTHEQMMCSKTCYNSVNIAFLIDGSSSVGDSNFRLMLEFVSNIAKTFEISDIGAKIAAVQFTYDQRTEFSFTDYSTKENVLAVIRNIRYMSGGTATGDAISFTVRNVFGPIRESPNKNFLVIVTDGQSYDDVQGPAAAAHDAAK

SEQ ID NO: 3191 - protein, 550 aa, Homo Sapiens
MSAAWIPALGLGVCLLLLPGPAGSEGAAPIAITCFTRGLDIRKEKADVLCPGGCPLEEFSVYGNIVYASVSSICGAAVHRGVISNSGGPVRVYSLPGRENYSSVDANGIQSQMLSRWSASFTVTKGKSSTQEATGQAVSTAHPPTGKRLKKTPEKKTGNKDCKADIAFLIDGSFNIGQRRFNLQKNFVGKVALMLGIGTEGPHVGLVQASEHPKIEFYLKNFTSAKDVLFAIKEVGFRGGNSNTGKALKHTAQKFFTVDAGVRKGIPKVVVVFIDGWPSDDIEEAGIVAREFGVNVFIVSVAKPIPEELGMVQDVTFVDKAVCRNNGFFSYHMPNWFGTTKYVKPLVQKLCTHEQMMCSKTCYNSVNIAFLIDGSSSVGDSNFRLMLEFVSNIAKTFEISDIGAKIAAVQFTYDQRTEFSFTDYSTKENVLAVIRNIRYMSGGTATGDAISFTVRNVFGPIRESPNKNFLVIVTDGQSYDDVQGPAAAAHDAGITIFSVGVAWAPLDDLKDMASKPKESHAFFTREFTGLEPIVSDVIRGICRDFLESQQ

SEQ ID NO: 3192 - protein, 494 aa, Homo Sapiens
MSAAWIPALGLGVCLLLLPGPAGSEGAAPIAITCFTRGLDIRKEKADVLCPGGCPLEEFSVYGNIVYASVSSICGAAVHRGVISNSGGPVRVYSLPGRENYSSVDANGIQSQMLSRWSASFTVTKGKSSTQEATGQAVSTAHPPTGKRLKKTPEKKTGNKDCKADIAFLIDGSFNIGQRRFNLQKNFVGKVALMLGIGTEGPHVGLVQASEHPKIEFYLKNFTSAKDVLFAIKEVGFRGGNSNTGKALKHTAQKFFTVDAGVRKGIPKVVVVFIDGWPSDDIEEAGIVAREFGVNVFIVSVAKPIPEELGMVQDVTFVDKAVCRNNGFFSYHMPNWFGTTKYVKPLVQKLCTHEQMMCSKTCYNSVNIAFLIDGSSSVGDSNFRLMLEFVSNIAKTFEISDIGAKIAAVQFTYDQRTEFSFTDYSTKENVLAVIRNIRYMSGGTATGDAISFTVRNVFGPIRESPNKNFLVIVTDGQSYDDVQGPAAAAHDAAK

SEQ ID NO: 3193 - protein, 550 aa, Homo Sapiens; identical to SEQ ID NO: 3191

SEQ ID NO: 3194 - protein, 550 aa, Homo Sapiens; identical to SEQ ID NO: 3191

SEQ ID NO: 3195 - protein, 615 aa, Homo Sapiens
MSAAWIPALGLGVCLLLLPGPAGSEGAGEWGSWGASRRSQGLSTSGYKRDSDPAPWASALPPEEEGAKVEPPRGAPALTPAADLLLLTCFSHAPIAITCFTRGLDIRKEKADVLCPGGCPLEEFSVYGNIVYASVSSICGAAVHRGVISNSGGPVRVYSLPGRENYSSVDANGIQSQMLSRWSASFTVTKGKSSTQEATGQAVSTAHPPTGKRLKKTPEKKTGNKDCKADIAFLIDGSFNIGQRRFNLQKNFVGKVALMLGIGTEGPHVGLVQASEHPKIEFYLKNFTSAKDVLFAIKEVGFRGGNSNTGKALKHTAQKFFTVDAGVRKGIPKVVVVFIDGWPSDDIEEAGIVAREFGVNVFIVSVAKPIPEELGMVQDVTFVDKAVCRNNGFFSYHMPNWFGTTKYVKPLVQKLCTHEQMMCSKTCYNSVNIAFLIDGSSSVGDSNFRLMLEFVSNIAKTFEISDIGAKIAAVQFTYDQRTEFSFTDYSTKENVLAVIRNIRYMSGGTATGDAISFTVRNVFGPIRESPNKNFLVIVTDGQSYDDVQGPAAAAHDAGITIFSVGVAWAPLDDLKDMASKPKESHAFFTREFTGLEPIVSDVIRGICRDFLESQQ

SEQ ID NO: 3196 - protein, 202 aa, Homo Sapiens
MSAAWIPALGLGVCLLLLPGPAGSEGAGKRLKKTPEKKTGNKDCKADIAFLIDGSFNIGQRRFNLQKNFVGKVALMLGIGTEGPHVGLVQASEHPKIEFYLKNFTSAKDVLFAIKEVGFRGGNSNTGKALKHTAQKFFTVDAGVRKGIPKVVVVFIDGWPSDDIEEAGIVAREFGVNVFIVSVAKPIPEELGMVQDVTFVDK

SEQ ID NO: 3197 - protein, 55 aa, Homo Sapiens
PIAITCFTRGLDIRKEKADVLCPGGCPLEEFSVYGNIVYASVSSICGAAVHRRQK

SEQ ID NO: 3198 - protein, 434 aa, Homo Sapiens
  misc_feature (1)..(1): Xaa can be any naturally occurring amino acid
XCKADIAFLIDGSFNIGQRRFNLQKNFVGKVALMLGIGTEGPHVGLVQASEHPKIEFYLKNFTSAKDVLFAIKEVGFRGGNSNTDITLEKYLFVMLKRSENQQTYLMNADVAERMSSTTVDSEERLLRGKALKHTAQKFFTVDAGVRKGIPKVVVVFIDGWPSDDIEEAGIVAREFGVNVFIVSVAKPIPEELGMVQDVTFVDKAVCRNNGFFSYHMPNWFGTTKYVKPLVQKLCTHEQMMCSKTCYNSVNIAFLIDGSSSVGDSNFRLMLEFVSNIAKTFEISDIGAKIAAVQFTYDQRTEFSFTDYSTKENVLAVIRNIRYMSGGTATGDAISFTVRNVFGPIRESPNKNFLVIVTDGQSYDDVQGPAAAAHDAGITIFSVGVAWAPLDDLKDMASKPKESHAFFTREFTGLEPIVSDVIRGICRDFLESQQ

SEQ ID NO: 3199 - protein, 828 aa, Homo Sapiens
MAEAALLLLPEAAAERDAREKLALWDRRPDTTAPLTDRQTDSVLELKAAAENLPVPAELPIEDLCSLTSQSLPIELTSVVPESTEDILLKGFTSLGMEEERIETAQQFFSWFAKLQTQMDQDEGTKYRQMRDYLSGFQEQCDAILNDVNSALQHLESLQKQYLFVSNKTGTLHEACEQLLKEQSELVDLAENIQQKLSYFNELETINTKLNSPTLSVNSDGFIPMLAKLDDCITYISSHPNFKDYPIYLLKFKQCLSKALHLMKTYTVNTLQTLTSQLLKRDPSSVPNADNAFTLFYVKFRAAAPKVRTLIEQIELRSEKIPEYQQLLNDIHQCYLDQRELLLGPSIACTVAELTSQNNRDHCALVRSGCAFMVHVCQDEHQLYNEFFTKPTSKLDELLEKLCVSLYDVFRPLIIHVIHLETLSELCGILKNEVLEDHVQNNAEQLGAFAAGVKQMLEDVQERLVYRTHIYIQTDITGYKPAPGDLAYPDKLVMMEQIAQSLKDEQKKVPSEASFSDVHLEEGESNSLTKSGSTESLNPRPQTTISPADLHGMWYPTVRRTLVCLSKLYRCIDRAVFQGLSQEALSACIQSLLGASESISKNKTQIDGQLFLIKHLLILREQIAPFHTEFTIKEISLDLKKTRDAAFKILNPMTVPRFFRLNSNNALIEFLLEGTPEIREHYLDSKKDVDRHLKSACEQFIQQQTKLFVEQLEEFMTKVSALKTMASQGGPKYTLSQQPWAQPAKVNDLAATAYKTIKTKLPVTLRSMSLYLSNKDTEFILFKPVRNNIQQVFQKFHALLKEEFSPEDIQIIACPSMEQLSLLLLVSK

SEQ ID NO: 3200 - protein, 444 aa, Homo Sapiens
MAEAALLLLPEAAAERDAREKLALWDRRPDTTAPLTDRQTDSVLELKAAAENLPVPAELPIEDLCSLTSQSLPIELTSVVPESTEDILLKGFTSLGMEEERIETAQQFFSWFAKLQTQMDQDEGTKYRQMRDYLSGFQEQCDAILNDVNSALQHLESLQKQYLFVSNKTGTLHEACEQLLKEQSELVDLAENIQQKLSYFNELETINTKLNSPTLSVNSDGFIPMLAKLDDCITYISSHPNFKDYPIYLLKFKQCLSKALHLMKTYTVNTLQTLTSQLLKRDPSSVPNADNAFTLFYVKFRAAAPKVRTLIEQIELRSEKIPEYQQLLNDIHQCYLDQRELLLGPSIACTVAELTSQNNRDHCALVRSGCAFMVHVCQDEHQLYNEFFTKPTSKLDELLEKLCVSLYDVFRPLIIHVIHLETLSELCGILKNEVLEDHVQNNGK

SEQ ID NO: 3201 - protein, 85 aa, Homo Sapiens
PEAAAERDAREKLALWDRRPDTTAPLTDRQTDSVLELKAAAENLPVPAEDMVPEVDLKSMKAQVEISLAQLSNSFIPWIIKVVCS

SEQ ID NO: 3202 - protein, 68 aa, Homo Sapiens
  misc_feature (1)..(1): Xaa can be any naturally occurring amino acid
XIDGQLFLIKHLLILREQIAPFHTEFTIKEISLDLKKTRGFSVKNNGQSGRPQVYSLTAALGTTSKGQ

SEQ ID NO: 3203 - protein, 51 aa, Homo Sapiens
MLPQIPFLLLVSLNLVHGVFYAERYQMPTGIKGPLPNTKTQFFIPYTIKSK

SEQ ID NO: 3204 - protein, 216 aa, Homo Sapiens
MLPQIPFLLLVSLNLVHGVFYAERYQMPTGIKGPLPNTKTQFFIPYTIKSKGIAVRGEQGTPGPPGPAGPRGHPGPSGPPGKPGYGSPGLQGEPGLPGPPGPSAVGKPGVPGLPGKPGERGPYGPKGDVGPAGLPGPRGPPGPPGIPGPAGISVPGKPGQQGPTGAPGPRGFPGEKGAPGVPGMNGQKGEMGYGAPGRPGERGLPGPQGPTGPSGP

SEQ ID NO: 3205 - protein, 680 aa, Homo Sapiens
MLPQIPFLLLVSLNLVHGVFYAERYQMPTGIKGPLPNTKTQFFIPYTIKSKGIAVRGEQGTPGPPGPAGPRGHPGPSGPPGKPGYGSPGLQGEPGLPGPPGPSAVGKPGVPGLPGKPGERGPYGPKGDVGPAGLPGPRGPPGPPGIPGPAGISVPGKPGQQGPTGAPGPRGFPGEKGAPGVPGMNGQKGEMGYGAPGRPGERGLPGPQGPTGPSGPPGVGKRGENGVPGQPGIKGDRGFPGEMGPIGPPGPQGPPGERGPEGIGKPGAAGAPGQPGIPGTKGLPGAPGIAGPPGPPGFGKPGLPGLKGERGPAGLPGGPGAKGEQGPAGLPGKPGLTGPPGNMGPQGPKGIPGSHGLPGPKGETGPAGPAGYPGAKGERGSPGSDGKPGYPGKPGLDGPKGNPGLPGPKGDPGVGGPPGLPGPVGPAGAKGMPGHNGEAGPRGAPGIPGTRGPIGPPGIPGFPGSKGDPGSPGPPGPAGIATKGLNGPTGPPGPPGPRGHSGEPGLPGPPGPPGPPGQAVMPEGFIKAGQRPSLSGTPLVSANQGVTGMPVSAFTVILSKAYPAIGTPIPFDKILYNRQQHYDPRTGIFTCQIPGIYYFSYHVHVKGTHVWVGLYKNGTPVMYTYDEYTKGYLDQASGSAIIDLTENDQVWLQLPNAESNGLYSSEYVHSSFSGFLVAPM

SEQ ID NO: 3206 - protein, 680 aa, Homo Sapiens; identical to SEQ ID NO: 3205

SEQ ID NO: 3207 - protein, 1767 aa, Homo Sapiens
MEPWSSRWKTKRWLWDFTVTTLALTFLFQAREVRGAAPVDVLKALDFHNSPEGISKTTGFCTNRKNSKGSDTAYRVSKQAQLSAPTKQLFPGGTFPEDFSILFTVKPKKGIQSFLLSIYNEHGIQQIGVEVGRSPVFLFEDHTGKPAPEDYPLFRTVNIADGKWHRVAISVEKKTVTMIVDCKKKTTKPLDRSERAIVDTNGITVFGTRILDEEVFEGDIQQFLITGDPKAAYDYCEHYSPDCDSSAPKAAQAQEPQIDEANIVDDFQEYNYGTMESYQTEAPRHVSGTNEPNPVEEIFTEEYLTGEDYDSQRKNSEDTLYENKEIDGRDSDLLVDGDLGEYDFYEYKEYEDKPTSPPNEEFGPGVPAETDITETSINGHGAYGEKGQKGEPAVVEPGMLVEGPPGPAGPAGIMGPPGLQGPTGPPGDPGDRGPPGRPGLPGADGLPGPPGTMLMLPFRYGGDGSKGPTISAQEAQAQAILQQARIALRGPPGPMGLTGRPGPVGGPGSSGAKGESGDPGPQGPRGVQGPPGPTGKPGKRGRPGADGGRGMPGEPGAKGDRGFDGLPGLPGDKGHRGERGPQGPPGPPGDDGMRGEDGEIGPRGLPGEAGPRGLLGPRGTPGAPGQPGMAGVDGPPGPKGNMGPQGEPGPPGQQGNPGPQGLPGPQGPIGPPGEKGPQGKPGLAGLPGADGPPGHPGKEGQSGEKGALGPPGPQGPIGYPGPRGVKGADGVRGLKGSKGEKGEDGFPGFKGDMGLKGDRGEVGQIGPRGEDGPEGPKGRAGPTGDPGPSGQAGEKGKLGVPGLPGYPGRQGPKGSTGFPGFPGANGEKGARGVAGKPGPRGQRGPTGPRGSRGARGPTGKPGPKGTSGGDGPPGPPGERGPQGPQGPVGFPGPKGPPGPPGKDGLPGHPGQRGETGFQGKTGPPGPGGVVGPQGPTGETGPIGERGHPGPPGPPGEQGLPGAAGKEGAKGDPGPQGISGKDGPAGLRGFPGERGLPGAQGAPGLKGGEGPQGPPGPVGSPGERGSAGTAGPIGLPGRPGPQGPPGPAGEKGAPGEKGPQGPAGRDGVQGPVGLPGPAGPAGSPGEDGDKGEIGEPGQKGSKGDKGENGPPGPPGLQGPVGAPGIAGGDGEPGPRGQQGMFGQKGDEGARGFPGPPGPIGLQGLPGPPGEKGENGDVGPMGPPGPPGPRGPQGPNGADGPQGPPGSVGSVGGVGEKGEPGEAGNPGPPGEAGVGGPKGERGEKGEAGPPGAAGPPGAKGPPGDDGPKGNPGPVGFPGDPGPPGEPGPAGQDGVGGDKGEDGDPGQPGPPGPSGEAGPPGPPGKRGPPGAAGAEGRQGEKGAKGEAGAEGPPGKTGPVGPQGPAGKPGPEGLRGIPGPVGEQGLPGAAGQDGPPGPMGPPGLPGLKGDPGSKGEKGHPGLIGLIGPPGEQGEKGDRGLPGTQGSPGAKGDGGIPGPAGPLGPPGPPGLPGPQGPKGNKGSTGPAGQKGDSGLPGPPGSPGPPGEVIQPLPILSSKKTRRHTEGMQADADDNILDYSDGMEEIFGSLNSLKQDIEHMKFPMGTQTNPARTCKDLQLSHPDFPDGEYWIDPNQGCSGDSFKVYCNFTSGGETCIYPDKKSEGVRISSWPKEKPGSWFSEFKRGKLLSYLDVEGNSINMVQMTFLKLLTASARQNFTYHCHQSAAWYDVSSGSYDKALRFLGSNDEEMSYDNNPFIKTLYDGCASRKGYEKTVIEINTPKIDQVPIVDVMINDFGDQNQKFGFEVGPVCFLG

SEQ ID NO: 3208 - protein, 1806 aa, Homo Sapiens
MEPWSSRWKTKRWLWDFTVTTLALTFLFQAREVRGAAPVDVLKALDFHNSPEGISKTTGFCTNRKNSKGSDTAYRVSKQAQLSAPTKQLFPGGTFPEDFSILFTVKPKKGIQSFLLSIYNEHGIQQIGVEVGRSPVFLFEDHTGKPAPEDYPLFRTVNIADGKWHRVAISVEKKTVTMIVDCKKKTTKPLDRSERAIVDTNGITVFGTRILDEEVFEGDIQQFLITGDPKAAYDYCEHYSPDCDSSAPKAAQAQEPQIDEYAPEDIIEYDYEYGEAEYKEAESVTEGPTVTEETIAQTEANIVDDFQEYNYGTMESYQTEAPRHVSGTNEPNPVEEIFTEEYLTGEDYDSQRKNSEDTLYENKEIDGRDSDLLVDGDLGEYDFYEYKEYEDKPTSPPNEEFGPGVPAETDITETSINGHGAYGEKGQKGEPAVVEPGMLVEGPPGPAGPAGIMGPPGLQGPTGPPGDPGDRGPPGRPGLPGADGLPGPPGTMLMLPFRYGGDGSKGPTISAQEAQAQAILQQARIALRGPPGPMGLTGRPGPVGGPGSSGAKGESGDPGPQGPRGVQGPPGPTGKPGKRGRPGADGGRGMPGEPGAKGDRGFDGLPGLPGDKGHRGERGPQGPPGPPGDDGMRGEDGEIGPRGLPGEAGPRGLLGPRGTPGAPGQPGMAGVDGPPGPKGNMGPQGEPGPPGQQGNPGPQGLPGPQGPIGPPGEKGPQGKPGLAGLPGADGPPGHPGKEGQSGEKGALGPPGPQGPIGYPGPRGVKGADGVRGLKGSKGEKGEDGFPGFKGDMGLKGDRGEVGQIGPRGEDGPEGPKGRAGPTGDPGPSGQAGEKGKLGVPGLPGYPGRQGPKGSTGFPGFPGANGEKGARGVAGKPGPRGQRGPTGPRGSRGARGPTGKPGPKGTSGGDGPPGPPGERGPQGPQGPVGFPGPKGPPGPPGKDGLPGHPGQRGETGFQGKTGPPGPGGVVGPQGPTGETGPIGERGHPGPPGPPGEQGLPGAAGKEGAKGDPGPQGISGKDGPAGLRGFPGERGLPGAQGAPGLKGGEGPQGPPGPVGSPGERGSAGTAGPIGLPGRPGPQGPPGPAGEKGAPGEKGPQGPAGRDGVQGPVGLPGPAGPAGSPGEDGDKGEIGEPGQKGSKGDKGENGPPGPPGLQGPVGAPGIAGGDGEPGPRGQQGMFGQKGDEGARGFPGPPGPIGLQGLPGPPGEKGENGDVGPMGPPGPPGPRGPQGPNGADGPQGPPGSVGSVGGVGEKGEPGEAGNPGPPGEAGVGGPKGERGEKGEAGPPGAAGPPGAKGPPGDDGPKGNPGPVGFPGDPGPPGEPGPAGQDGVGGDKGEDGDPGQPGPPGPSGEAGPPGPPGKRGPPGAAGAEGRQGEKGAKGEAGAEGPPGKTGPVGPQGPAGKPGPEGLRGIPGPVGEQGLPGAAGQDGPPGPMGPPGLPGLKGDPGSKGEKGHPGLIGLIGPPGEQGEKGDRGLPGTQGSPGAKGDGGIPGPAGPLGPPGPPGLPGPQGPKGNKGSTGPAGQKGDSGLPGPPGSPGPPGEVIQPLPILSSKKTRRHTEGMQADADDNILDYSDGMEEIFGSLNSLKQDIEHMKFPMGTQTNPARTCKDLQLSHPDFPDGEYWIDPNQGCSGDSFKVYCNFTSGGETCIYPDKKSEGVRISSWPKEKPGSWFSEFKRGKLLSYLDVEGNSINMVQMTFLKLLTASARQNFTYHCHQSAAWYDVSSGSYDKALRFLGSNDEEMSYDNNPFIKTLYDGCASRKGYEKTVIEINTPKIDQVPIVDVMINDFGDQNQKFGFEVGPVCFLG

SEQ ID NO: 3209 - protein, 1818 aa, Homo Sapiens
MEPWSSRWKTKRWLWDFTVTTLALTFLFQAREVRGAAPVDVLKALDFHNSPEGISKTTGFCTNRKNSKGSDTAYRVSKQAQLSAPTKQLFPGGTFPEDFSILFTVKPKKGIQSFLLSIYNEHGIQQIGVEVGRSPVFLFEDHTGKPAPEDYPLFRTVNIADGKWHRVAISVEKKTVTMIVDCKKKTTKPLDRSERAIVDTNGITVFGTRILDEEVFEGDIQQFLITGDPKAAYDYCEHYSPDCDSSAPKAAQAQEPQIDEKKKSNFKKKMRTVATKSKEKSKKFTPPKSEKFSSKKKKSYQASAKAKLGVKANIVDDFQEYNYGTMESYQTEAPRHVSGTNEPNPVEEIFTEEYLTGEDYDSQRKNSEDTLYENKEIDGRDSDLLVDGDLGEYDFYEYKEYEDKPTSPPNEEFGPGVPAETDITETSINGHGAYGEKGQKGEPAVVEPGMLVEGPPGPAGPAGIMGPPGLQGPTGPPGDPGDRGPPGRPGLPGADGLPGPPGTMLMLPFRYGGDGSKGPTISAQEAQAQAILQQARIALRGPPGPMGLTGRPGPVGGPGSSGAKGESGDPGPQGPRGVQGPPGPTGKPGKRGRPGADGGRGMPGEPGAKGDRGFDGLPGLPGDKGHRGERGPQGPPGPPGDDGMRGEDGEIGPRGLPGEAGPRGLLGPRGTPGAPGQPGMAGVDGPPGPKGNMGPQGEPGPPGQQGNPGPQGLPGPQGPIGPPGEKGPQGKPGLAGLPGADGPPGHPGKEGQSGEKGALGPPGPQGPIGYPGPRGVKGADGVRGLKGSKGEKGEDGFPGFKGDMGLKGDRGEVGQIGPRGEDGPEGPKGRAGPTGDPGPSGQAGEKGKLGVPGLPGYPGRQGPKGSTGFPGFPGANGEKGARGVAGKPGPRGQRGPTGPRGSRGARGPTGKPGPKGTSGGDGPPGPPGERGPQGPQGPVGFPGPKGPPGPPGKDGLPGHPGQRGETGFQGKTGPPGPGGVVGPQGPTGETGPIGERGHPGPPGPPGEQGLPGAAGKEGAKGDPGPQGISGKDGPAGLRGFPGERGLPGAQGAPGLKGGEGPQGPPGPVGSPGERGSAGTAGPIGLPGRPGPQGPPGPAGEKGAPGEKGPQGPAGRDGVQGPVGLPGPAGPAGSPGEDGDKGEIGEPGQKGSKGDKGENGPPGPPGLQGPVGAPGIAGGDGEPGPRGQQGMFGQKGDEGARGFPGPPGPIGLQGLPGPPGEKGENGDVGPMGPPGPPGPRGPQGPNGADGPQGPPGSVGSVGGVGEKGEPGEAGNPGPPGEAGVGGPKGERGEKGEAGPPGAAGPPGAKGPPGDDGPKGNPGPVGFPGDPGPPGEPGPAGQDGVGGDKGEDGDPGQPGPPGPSGEAGPPGPPGKRGPPGAAGAEGRQGEKGAKGEAGAEGPPGKTGPVGPQGPAGKPGPEGLRGIPGPVGEQGLPGAAGQDGPPGPMGPPGLPGLKGDPGSKGEKGHPGLIGLIGPPGEQGEKGDRGLPGTQGSPGAKGDGGIPGPAGPLGPPGPPGLPGPQGPKGNKGSTGPAGQKGDSGLPGPPGSPGPPGEVIQPLPILSSKKTRRHTEGMQADADDNILDYSDGMEEIFGSLNSLKQDIEHMKFPMGTQTNPARTCKDLQLSHPDFPDGEYWIDPNQGCSGDSFKVYCNFTSGGETCIYPDKKSEGVRISSWPKEKPGSWFSEFKRGKLLSYLDVEGNSINMVQMTFLKLLTASARQNFTYHCHQSAAWYDVSSGSYDKALRFLGSNDEEMSYDNNPFIKTLYDGCASRKGYEKTVIEINTPKIDQVPIVDVMINDFGDQNQKFGFEVGPVCFLG

SEQ ID NO: 3210 - protein, 780 aa, Homo Sapiens
MEPWSSRWKTKRWLWDFTVTTLALTFLFQAREVRGAAPVDVLKALDFHNSPEGISKTTGFCTNRKNSKGSDTAYRVSKQAQLSAPTKQLFPGGTFPEDFSILFTVKPKKGIQSFLLSIYNEHGIQQIGVEVGRSPVFLFEDHTGKPAPEDYPLFRTVNIADGKWHRVAISVEKKTVTMIVDCKKKTTKPLDRSERAIVDTNGITVFGTRILDEEVFEGDIQQFLITGDPKAAYDYCEHYSPDCDSSAPKAAQAQEPQIDEYAPEDIIEYDYEYGEAEYKEAESVTEGPTVTEETIAQTEKKKSNFKKKMRTVATKSKEKSKKFTPPKSEKFSSKKKKSYQASAKAKLGVKANIVDDFQEYNYGTMESYQTEAPRHVSGTNEPNPVEEIFTEEYLTGEDYDSQRKNSEDTLYENKEIDGRDSDLLVDGDLGEYDFYEYKEYEDKPTSPPNEEFGPGVPAETDITETSINGHGAYGEKGQKGEPAVVEPGMLVEGPPGPAGPAGIMGPPGLQGPTGPPGDPGDRGPPGRPGLPGADGLPGPPGTMLMLPFRYGGDGSKGPTISAQEAQAQAILQQARIALRGPPGPMGLTGRPGPVGGPGSSGAKGESGDPGPQGPRGVQGPPGPTGKPGKRGRPGADGGRGMPGEPGAKGDRGFDGLPGLPGDKGHRGERGPQGPPGPPGDDGMRGEDGEIGPRGLPGEAGPRGLLGPRGTPGAPGQPGMAGVDGPPGPKGNMGPQGEPGPPGQQGNPGPQGLPGPQGPIGPPGEKMCCNLSFGILIPLQK

SEQ ID NO: 3211 - protein, 570 aa, Homo Sapiens
MEPWSSRWKTKRWLWDFTVTTLALTFLFQAREVRGAAPVDVLKALDFHNSPEGISKTTGFCTNRKNSKGSDTAYRVSKQAQLSAPTKQLFPGGTFPEDFSILFTVKPKKGIQSFLLSIYNEHGIQQIGVEVGRSPVFLFEDHTGKPAPEDYPLFRTVNIADGKWHRVAISVEKKTVTMIVDCKKKTTKPLDRSERAIVDTNGITVFGTRILDEEVFEGDIQQFLITGDPKAAYDYCEHYSPDCDSSAPKAAQAQEPQIDEKKKSNFKKKMRTVATKSKEKSKKFTPPKSEKFSSKKKKSYQASAKAKLGVKANIVDDFQEYNYGTMESYQTEAPRHVSGTNEPNPVEEIFTEEYLTGEDYDSQRKNSEDTLYENKEIDGRDSDLLVDGDLGEYDFYEYKEYEDKPTSPPNEEFGPGVPAETDITETSINGHGAYGEKGQKGEPAVVEPGMLVEGPPGPAGPAGIMGPPGLQGPTGPPGDPGDRGPPGRPGLPGADGLPGPPGTMLMLPFRYGGDGSKGPTISAQEAQAQAILQQARIALRGPPGPMGLTGRPGPVGGPGSSGAKGESGDP

SEQ ID NO: 3212 - protein, 1690 aa, Homo Sapiens
MEPWSSRWKTKRWLWDFTVTTLALTFLFQAREVRGAAPVDVLKALDFHNSPEGISKTTGFCTNRKNSKGSDTAYRVSKQAQLSAPTKQLFPGGTFPEDFSILFTVKPKKGIQSFLLSIYNEHGIQQIGVEVGRSPVFLFEDHTGKPAPEDYPLFRTVNIADGKWHRVAISVEKKTVTMIVDCKKKTTKPLDRSERAIVDTNGITVFGTRILDEEVFEGDIQQFLITGDPKAAYDYCEHYSPDCDSSAPKAAQAQEPQIDEYAPEDIIEYDYEYGEAEYKEAESVTEGPTVTEETIAQTEINGHGAYGEKGQKGEPAVVEPGMLVEGPPGPAGPAGIMGPPGLQGPTGPPGDPGDRGPPGRPGLPGADGLPGPPGTMLMLPFRYGGDGSKGPTISAQEAQAQAILQQARIALRGPPGPMGLTGRPGPVGGPGSSGAKGESGDPGPQGPRGVQGPPGPTGKPGKRGRPGADGGRGMPGEPGAKGDRGFDGLPGLPGDKGHRGERGPQGPPGPPGDDGMRGEDGEIGPRGLPGEAGPRGLLGPRGTPGAPGQPGMAGVDGPPGPKGNMGPQGEPGPPGQQGNPGPQGLPGPQGPIGPPGEKGPQGKPGLAGLPGADGPPGHPGKEGQSGEKGALGPPGPQGPIGYPGPRGVKGADGVRGLKGSKGEKGEDGFPGFKGDMGLKGDRGEVGQIGPRGEDGPEGPKGRAGPTGDPGPSGQAGEKGKLGVPGLPGYPGRQGPKGSTGFPGFPGANGEKGARGVAGKPGPRGQRGPTGPRGSRGARGPTGKPGPKGTSGGDGPPGPPGERGPQGPQGPVGFPGPKGPPGPPGKDGLPGHPGQRGETGFQGKTGPPGPGGVVGPQGPTGETGPIGERGHPGPPGPPGEQGLPGAAGKEGAKGDPGPQGISGKDGPAGLRGFPGERGLPGAQGAPGLKGGEGPQGPPGPVGSPGERGSAGTAGPIGLPGRPGPQGPPGPAGEKGAPGEKGPQGPAGRDGVQGPVGLPGPAGPAGSPGEDGDKGEIGEPGQKGSKGDKGENGPPGPPGLQGPVGAPGIAGGDGEPGPRGQQGMFGQKGDEGARGFPGPPGPIGLQGLPGPPGEKGENGDVGPMGPPGPPGPRGPQGPNGADGPQGPPGSVGSVGGVGEKGEPGEAGNPGPPGEAGVGGPKGERGEKGEAGPPGAAGPPGAKGPPGDDGPKGNPGPVGFPGDPGPPGEPGPAGQDGVGGDKGEDGDPGQPGPPGPSGEAGPPGPPGKRGPPGAAGAEGRQGEKGAKGEAGAEGPPGKTGPVGPQGPAGKPGPEGLRGIPGPVGEQGLPGAAGQDGPPGPMGPPGLPGLKGDPGSKGEKGHPGLIGLIGPPGEQGEKGDRGLPGTQGSPGAKGDGGIPGPAGPLGPPGPPGLPGPQGPKGNKGSTGPAGQKGDSGLPGPPGSPGPPGEVIQPLPILSSKKTRRHTEGMQADADDNILDYSDGMEEIFGSLNSLKQDIEHMKFPMGTQTNPARTCKDLQLSHPDFPDGEYWIDPNQGCSGDSFKVYCNFTSGGETCIYPDKKSEGVRISSWPKEKPGSWFSEFKRGKLLSYLDVEGNSINMVQMTFLKLLTASARQNFTYHCHQSAAWYDVSSGSYDKALRFLGSNDEEMSYDNNPFIKTLYDGCASRKGYEKTVIEINTPKIDQVPIVDVMINDFGDQNQKFGFEVGPVCFLG

SEQ ID NO: 3213 - protein, 736 aa, Homo Sapiens
MEPWSSRWKTKRWLWDFTVTTLALTFLFQAREVRGAAPVDVLKALDFHNSPEGISKTTGFCTNRKNSKGSDTAYRVSKQAQLSAPTKQLFPGGTFPEDFSILFTVKPKKGIQSFLLSIYNEHGIQQIGVEVGRSPVFLFEDHTGKPAPEDYPLFRTVNIADGKWHRVAISVEKKTVTMIVDCKKKTTKPLDRSERAIVDTNGITVFGTRILDEEVFEGDIQQFLITGDPKAAYDYCEHYSPDCDSSAPKAAQAQEPQIDEYAPEDIIEYDYEYGEAEYKEAESVTEGPTVTEETIAQTEANIVDDFQEYNYGTMESYQTEAPRHVSGTNEPNPVEEIFTEEYLTGEDYDSQRKNSEDTLYENKEIDGRDSDLLVDGDLGEYDFYEYKEYEDKPTSPPNEEFGPGVPAETDITETSINGHGAYGEKGQKGEPAVVEPGMLVEGPPGPAGPAGIMGPPGLQGPTGPPGDPGDRGPPGRPGLPGADGLPGPPGTMLMLPFRYGGDGSKGPTISAQEAQAQAILQQARIALRGPPGPMGLTGRPGPVGGPGSSGAKGESGDPGPQGPRGVQGPPGPTGKPGKRGRPGADGGRGMPGEPGAKGDRGFDGLPGLPGDKGHRGERGPQGPPGPPGDDGMRGEDGEIGPRGLPGEAGPRGLLGPRGTPGAPGQPGMAGVDGPPGPKGNMGPQGEPGPPGQQGNPGPQGLPGPQGPIGPPGEKVSYSVVLVKPGEHVCFSNLRQV

SEQ ID NO: 3214 - protein, 729 aa, Homo Sapiens
MEPWSSRWKTKRWLWDFTVTTLALTFLFQAREVRGAAPVDVLKALDFHNSPEGISKTTGFCTNRKNSKGSDTAYRVSKQAQLSAPTKQLFPGGTFPEDFSILFTVKPKKGIQSFLLSIYNEHGIQQIGVEVGRSPVFLFEDHTGKPAPEDYPLFRTVNIADGKWHRVAISVEKKTVTMIVDCKKKTTKPLDRSERAIVDTNGITVFGTRILDEEVFEGDIQQFLITGDPKAAYDYCEHYSPDCDSSAPKAAQAQEPQIDEYAPEDIIEYDYEYGEAEYKEAESVTEGPTVTEETIAQTEANIVDDFQEYNYGTMESYQTEAPRHVSGTNEPNPVEEIFTEEYLTGEDYDSQRKNSEDTLYENKEIDGRDSDLLVDGDLGEYDFYEYKEYEDKPTSPPNEEFGPGVPAETDITETSINGHGAYGEKGQKGEPAVVEPGMLVEGPPGPAGPAGIMGPPGLQGPTGPPGDPGDRGPPGRPGLPGADGLPGPPGTMLMLPFRYGGDGSKGPTISAQEAQAQAILQQARIALRGPPGPMGLTGRPGPVGGPGSSGAKGESGDPGPQGPRGVQGPPGPTGKPGKRGRPGADGGRGMPGEPGAKGDRGFDGLPGLPGDKGHRGERGPQGPPGPPGDDGMRGEDGEIGPRGLPGEAGPRGLLGPRGTPGAPGQPGMAGVDGPPGPKGNMGPQGEPGPPGQQGNPGPQGLPGPQGPIGPPGEKMCCNLSFGILIPLQK

SEQ ID NO: 3215 - protein, 756 aa, Homo Sapiens
MEPWSSRWKTKRWLWDFTVTTLALTFLFQAREVRGAAPVDVLKALDFHNSPEGISKTTGFCTNRKNSKGSDTAYRVSKQAQLSAPTKQLFPGGTFPEDFSILFTVKPKKGIQSFLLSIYNEHGIQQIGVEVGRSPVFLFEDHTGKPAPEDYPLFRTVNIADGKWHRVAISVEKKTVTMIVDCKKKTTKPLDRSERAIVDTNGITVFGTRILDEEVFEGDIQQFLITGDPKAAYDYCEHYSPDCDSSAPKAAQAQEPQIDEYAPEDIIEYDYEYGEAEYKEAESVTEGPTVTEETIAQTEANIVDDFQEYNYGTMESYQTEAPRHVSGTNEPNPVEEIFTEEYLTGEDYDSQRKNSEDTLYENKEIDGRDSDLLVDGDLGEYDFYEYKEYEDKPTSPPNEEFGPGVPAETDITETSINGHGAYGEKGQKGEPAVVEPGMLVEGPPGPAGPAGIMGPPGLQGPTGPPGDPGDRGPPGRPGLPGADGLPGPPGTMLMLPFRYGGDGSKGPTISAQEAQAQAILQQARIALRGPPGPMGLTGRPGPVGGPGSSGAKGESGDPGPQGPRGVQGPPGPTGKPGKRGRPGADGGRGMPGEPGAKGDRGFDGLPGLPGDKGHRGERGPQGPPGPPGDDGMRGEDGEIGPRGLPGEAGPRGLLGPRGTPGAPGQPGMAGVDGPPGPKGNMGPQGEPGPPGQQGNPGPQGLPGPQGPIGPPGEKVSFSFSLFYKKVIKFACDKRFVGRHDERKVVKLSLPLYLIYE

SEQ ID NO: 3216 - protein, 694 aa, Homo Sapiens
  misc_feature (1)..(1): Xaa can be any naturally occurring amino acid
XPKAAYDYCEHYSPDCDSSAPKAAQAQEPQIDEYAPEDIIEYDYEYGEAEYKEAESVTEGPTVTEETIAQTEANIVDDFQEYNYGTMESYQTEAPRHVSGTNEPNPVEEIFTEEYLTGEDYDSQRKNSEDTLYENKEIDGRDSDLLVDGDLGEYDFYEYKEYEDKPTSPPNEEFGPGVPAETDITETSINGHGAYGEKGQKGEPAVVEPGMLVEGPPGPAGPAGIMGPPGLQGPTGPPGDPGDRGPPGRPGLPGADGLPGPPGTMLMLPFRYGGDGSKGPTISAQEAQAQAILQQARIALRGPPGPMGLTGRPGPVGGPGSSGAKGESGDPGPQGPRGVQGPPGPTGKPGKRGRPGADGGRGMPGEPGAKGDRGFDGLPGLPGDKGHRGERGPQGPPGPPGDDGMRGEDGEIGPRGLPGEAGPRGLLGPRGTPGAPGQPGMAGVDGPPGPKGNMGPQGEPGPPGQQGNPGPQGLPGPQGPIGPPGEKGPQGKPGLAGLPGADGPPGHPGKEGQSGEKGALGPPGPQGPIGYPGPRGVKGADGVRGLKGSKGEKGEDGFPGFKGDMGLKGDRGEVGQIGPRGEDGPEGPKGRAGPTGDPGPSGQAGEKGKLGVPGLPGYPGRQGPKDFRCHWFHWIPWVSRCQWRERCTGSSWQTRPSGSAWSNGSSRFKRCKRSHWETWAKGHFRWRWPSWPSR

SEQ ID NO: 3217 - protein, 200 aa, Homo Sapiens
YRVSKQAQLSAPTKQLFPGGTFPEDFSILFTVKPKKGIQSFLLSIYNEHGIQQIGVEVGRSPVFLFEDHTGKPAPEDYPLFRTVNIADGKWHRVAISVEKKTVTMIVDCKKKTTKPLDRSERAIVDTNGITVFGTRILDEEVFEGDIQQFLITGDPKAAYDYCEHYSPDCDSSAPKAAQAQEPQIDEVRSTRPEKVFVFQ

SEQ ID NO: 3218 - protein, 1736 aa, Homo Sapiens
MERCSRCHRLLLLLPLVLGLSAAPGWAGAPPVDVLRALRFPSLPDGVRRAKGICPADVAYRVARPAQLSAPTRQLFPGGFPKDFSLLTVVRTRPGLQAPLLTLYSAQGVRQLGLELGRPVRFLYEDQTGRPQPPSQPVFRGLSLADGKWHRVAVAVKGQSVTLIVDCKKRVTRPLPRSARPVLDTHGVIIFGARILDEEVFEGDVQELAIVPGVQAAYESCEQKELECEGGQRERPQNQQPHRAQRSPQQQPSRLHRPQNQEPQSQPTESLYYDYEPPYYDVMTTGTTPDYQDPTPGEEEEILESSLLPPLEEEQTDLQVPPTADRFQAEEYGEGGTDPPEGPYDYTYGYGDDYREETELGPALSAETAHSGAAAHGPRGLKGEKGEPAVLEPGMLVEGPPGPEGPAGLIGPPGIQGNPGPVGDPGERGPPGRAGLPGSDGAPGPPGTSLMLPFRFGSGGGDKGPVVAAQEAQAQAILQQARLALRGPPGPMGYTGRPGPLGQPGSPGLKGESGDLGPQGPRGPQGLTGPPGKAGRRGRAGADGARGMPGDPGVKGDRGFDGLPGLPGEKGHRGDTGAQGLPGPPGEDGERGDDGEIGPRGLPGESGPRGLLGPKGPPGIPGPPGVRGMDGPQGPKGSLGPQGEPGPPGQQGTPGTQGLPGPQGAIGPHGEKGPQGKPGLPGMPGSDGPPGHPGKEGPPGTKGNQGPSGPQGPLGYPGPRGVKGVDGIRGLKGHKGEKGEDGFPGFKGDIGVKGDRGEVGVPGSRGEDGPEGPKGRTGPTGDPGPPGLMGEKGKLGVPGLPGYPGRQGPKGSLGFPGFPGASGEKGARGLSGKSGPRGERGPTGPRGQRGPRGATGKSGAKGTSGGDGPHGPPGERGLPGPQGPNGFPGPKGPPGPPGKDGLPGHPGQRGEVGFQGKTGPPGPPGVVGPQGAAGETGPMGERGHPGPPGPPGEQGLPGTAGKEGTKGDPGPPGAPGKDGPAGLRGFPGERGLPGTAGGPGLKGNEGPSGPPGPAGSPGERGAAGSGGPIGPPGRPGPQGPPGAAGEKGVPGEKGPIGPTGRDGVQGPVGLPGPAGPPGVAGEDGDKGEVGDPGQKGTKGNKGEHGPPGPPGPIGPVGQPGAAGADGEPGARGPQGHFGAKGDEGTRGFNGPPGPIGLQGLPGPSGEKGETGDVGPMGPPGPPGPRGPAGPNGADGPQGPPGGVGNLGPPGEKGEPGESGSPGIQGEPGVKGPRGERGEKGESGQPGEPGPPGPKGPTGDDGPKGNPGPVGFPGDPGPPGEGGPRGQDGAKGDRGEDGEPGQPGSPGPTGENGPPGPLGKRGPAGSPGSEGRQGGKGAKGDPGAIGAPGKTGPVGPAGPAGKPGPDGLRGLPGSVGQQGRPGATGQAGPPGPVGPPGLPGLRGDAGAKGEKGHPGLIGLIGPPGEQGEKGDRGLPGPQGSPGQKGEMGIPGASGPIGPGGPPGLPGPAGPKGAKGATGPGGPKGEKGVQGPPGHPGPPGEVIQPLPIQMPKKTRRSVDGSRLMQEDEAIPTGGAPGSPGGLEEIFGSLDSLREEIEQMRRPTGTQDSPARTCQDLKLCHPELPDGEYWVDPNQGCARDAFRVFCNFTAGGETCVTPRDDVTQFSYVDSEGSPVGVVQLTFLRLLSVSAHQDVSYPCSGAARDGPLRLRGANEDELSPETSPYVKEFRDGCQTQQGRTVLEVRTPVLEQLPVLDASFSDLGAPPRRGGVLLGPVCFMG

SEQ ID NO: 3219 - protein, 1629 aa, Homo Sapiens
MERCSRCHRLLLLLPLVLGLSAAPGWAGAPPVDVLRALRFPSLPDGVRRAKGICPADVAYRVARPAQLSAPTRQLFPGGFPKDFSLLTVVRTRPGLQAPLLTLYSAQGVRQLGLELGRPVRFLYEDQTGRPQPPSQPVFRGLSLADGKWHRVAVAVKGQSVTLIVDCKKRVTRPLPRSARPVLDTHGVIIFGARILDEEVFEGDVQELAIVPGVQAAYESCEQKELECEGGQRERPQNQQPHRAQRSPQQQPSRLHRPQNQEPQSQAAHGPRGLKGEKGEPAVLEPGMLVEGPPGPEGPAGLIGPPGIQGNPGPVGDPGERGPPGRAGLPGSDGAPGPPGTSLMLPFRFGSGGGDKGPVVAAQEAQAQAILQQARLALRGPPGPMGYTGRPGPLGQPGSPGLKGESGDLGPQGPRGPQGLTGPPGKAGRRGRAGADGARGMPGDPGVKGDRGFDGLPGLPGEKGHRGDTGAQGLPGPPGEDGERGDDGEIGPRGLPGESGPRGLLGPKGPPGIPGPPGVRGMDGPQGPKGSLGPQGEPGPPGQQGTPGTQGLPGPQGAIGPHGEKGPQGKPGLPGMPGSDGPPGHPGKEGPPGTKGNQGPSGPQGPLGYPGPRGVKGVDGIRGLKGHKGEKGEDGFPGFKGDIGVKGDRGEVGVPGSRGEDGPEGPKGRTGPTGDPGPPGLMGEKGKLGVPGLPGYPGRQGPKGSLGFPGFPGASGEKGARGLSGKSGPRGERGPTGPRGQRGPRGATGKSGAKGTSGGDGPHGPPGERGLPGPQGPNGFPGPKGPPGPPGKDGLPGHPGQRGEVGFQGKTGPPGPPGVVGPQGAAGETGPMGERGHPGPPGPPGEQGLPGTAGKEGTKGDPGPPGAPGKDGPAGLRGFPGERGLPGTAGGPGLKGNEGPSGPPGPAGSPGERGAAGSGGPIGPPGRPGPQGPPGAAGEKGVPGEKGPIGPTGRDGVQGPVGLPGPAGPPGVAGEDGDKGEVGDPGQKGTKGNKGEHGPPGPPGPIGPVGQPGAAGADGEPGARGPQGHFGAKGDEGTRGFNGPPGPIGLQGLPGPSGEKGETGDVGPMGPPGPPGPRGPAGPNGADGPQGPPGGVGNLGPPGEKGEPGESGSPGIQGEPGVKGPRGERGEKGESGQPGEPGPPGPKGPTGDDGPKGNPGPVGFPGDPGPPGEGGPRGQDGAKGDRGEDGEPGQPGSPGPTGENGPPGPLGKRGPAGSPGSEGRQGGKGAKGDPGAIGAPGKTGPVGPAGPAGKPGPDGLRGLPGSVGQQGRPGATGQAGPPGPVGPPGLPGLRGDAGAKGEKGHPGLIGLIGPPGEQGEKGDRGLPGPQGSPGQKGEMGIPGASGPIGPGGPPGLPGPAGPKGAKGATGPGGPKGEKGVQGPPGHPGPPGEVIQPLPIQMPKKTRRSVDGSRLMQEDEAIPTGGAPGSPGGLEEIFGSLDSLREEIEQMRRPTGTQDSPARTCQDLKLCHPELPDGEYWVDPNQGCARDAFRVFCNFTAGGETCVTPRDDVTQFSYVDSEGSPVGVVQLTFLRLLSVSAHQDVSYPCSGAARDGPLRLRGANEDELSPETSPYVKEFRDGCQTQQGRTVLEVRTPVLEQLPVLDASFSDLGAPPRRGGVLLGPVCFMG

SEQ ID NO: 3220 - protein, 290 aa, Homo Sapiens
MERCSRCHRLLLLLPLVLGLSAAPGWAGAPPVDVLRALRFPSLPDGVRRAKGICPADVAYRVARPAQLSAPTRQLFPGGFPKDFSLLTVVRTRPGLQAPLLTLYSAQGVRQLGLELGRPVRFLYEDQTGRPQPPSQPVFRGLSLADGKWHRVAVAVKGQSVTLIVDCKKRVTRPLPRSARPVLDTHGVIIFGARILDEEVFEGDVQELAIVPGVQAAYESCEQKELECEGGQRERPQNQQPHRAQRSPQQQPSRLHRPQNQEPQSQVRELGEPPSAAHPREGRHPGISPP

SEQ ID NO: 3221 - protein, 1650 aa, Homo Sapiens
MERCSRCHRLLLLLPLVLGLSAAPGWAGAPPVDVLRALRFPSLPDGVRRAKGICPADVAYRVARPAQLSAPTRQLFPGGFPKDFSLLTVVRTRPGLQAPLLTLYSAQGVRQLGLELGRPVRFLYEDQTGRPQPPSQPVFRGLSLADGKWHRVAVAVKGQSVTLIVDCKKRVTRPLPRSARPVLDTHGVIIFGARILDEEVFEGDVQELAIVPGVQAAYESCEQKELECEGGQRERPQNQQPHRAQRSPQQQPSRLHRPQNQEPQSQDPTPGEEEEILESSLLPPLEEAAHGPRGLKGEKGEPAVLEPGMLVEGPPGPEGPAGLIGPPGIQGNPGPVGDPGERGPPGRAGLPGSDGAPGPPGTSLMLPFRFGSGGGDKGPVVAAQEAQAQAILQQARLALRGPPGPMGYTGRPGPLGQPGSPGLKGESGDLGPQGPRGPQGLTGPPGKAGRRGRAGADGARGMPGDPGVKGDRGFDGLPGLPGEKGHRGDTGAQGLPGPPGEDGERGDDGEIGPRGLPGESGPRGLLGPKGPPGIPGPPGVRGMDGPQGPKGSLGPQGEPGPPGQQGTPGTQGLPGPQGAIGPHGEKGPQGKPGLPGMPGSDGPPGHPGKEGPPGTKGNQGPSGPQGPLGYPGPRGVKGVDGIRGLKGHKGEKGEDGFPGFKGDIGVKGDRGEVGVPGSRGEDGPEGPKGRTGPTGDPGPPGLMGEKGKLGVPGLPGYPGRQGPKGSLGFPGFPGASGEKGARGLSGKSGPRGERGPTGPRGQRGPRGATGKSGAKGTSGGDGPHGPPGERGLPGPQGPNGFPGPKGPPGPPGKDGLPGHPGQRGEVGFQGKTGPPGPPGVVGPQGAAGETGPMGERGHPGPPGPPGEQGLPGTAGKEGTKGDPGPPGAPGKDGPAGLRGFPGERGLPGTAGGPGLKGNEGPSGPPGPAGSPGERGAAGSGGPIGPPGRPGPQGPPGAAGEKGVPGEKGPIGPTGRDGVQGPVGLPGPAGPPGVAGEDGDKGEVGDPGQKGTKGNKGEHGPPGPPGPIGPVGQPGAAGADGEPGARGPQGHFGAKGDEGTRGFNGPPGPIGLQGLPGPSGEKGETGDVGPMGPPGPPGPRGPAGPNGADGPQGPPGGVGNLGPPGEKGEPGESGSPGIQGEPGVKGPRGERGEKGESGQPGEPGPPGPKGPTGDDGPKGNPGPVGFPGDPGPPGEGGPRGQDGAKGDRGEDGEPGQPGSPGPTGENGPPGPLGKRGPAGSPGSEGRQGGKGAKGDPGAIGAPGKTGPVGPAGPAGKPGPDGLRGLPGSVGQQGRPGATGQAGPPGPVGPPGLPGLRGDAGAKGEKGHPGLIGLIGPPGEQGEKGDRGLPGPQGSPGQKGEMGIPGASGPIGPGGPPGLPGPAGPKGAKGATGPGGPKGEKGVQGPPGHPGPPGEVIQPLPIQMPKKTRRSVDGSRLMQEDEAIPTGGAPGSPGGLEEIFGSLDSLREEIEQMRRPTGTQDSPARTCQDLKLCHPELPDGEYWVDPNQGCARDAFRVFCNFTAGGETCVTPRDDVTQFSYVDSEGSPVGVVQLTFLRLLSVSAHQDVSYPCSGAARDGPLRLRGANEDELSPETSPYVKEFRDGCQTQQGRTVLEVRTPVLEQLPVLDASFSDLGAPPRRGGVLLGPVCFMG

SEQ ID NO: 3222 - protein, 624 aa, Homo Sapiens
MERCSRCHRLLLLLPLVLGLSAAPGWAGAPPVDVLRALRFPSLPDGVRRAKGICPADVAYRVARPAQLSAPTRQLFPGGFPKDFSLLTVVRTRPGLQAPLLTLYSAQGVRQLGLELGRPVRFLYEDQTGRPQPPSQPVFRGLSLADGKWHRVAVAVKGQSVTLIVDCKKRVTRPLPRSARPVLDTHGVIIFGARILDEEVFEGDVQELAIVPGVQAAYESCEQKELECEGGQRERPQNQQPHRAQRSPQQQPSRLHRPQNQEPQSQPTESLYYDYEPPYYDVMTTGTTPDYQDPTPGEEEEILESSLLPPLEEEQTDLQVPPTADRFQAEEYGEGGTDPPEGPYDYTYGYGDDYREETELGPALSAETAHSGAAAHGPRGLKGEKGEPAVLEPGMLVEGPPGPEGPAGLIGPPGIQGNPGPVGDPGERGPPGRAGLPGSDGAPGPPGTSLMLPFRFGSGGGDKGPVVAAQEAQAQAILQQARLALRGPPGPMGYTGRPGPLGQPGSPGLKGESGDLGPQGPRGPQGLTGPPGKAGRRGRAGADGARGMPGDPGVKGDRGFDGLPGLPGEKGHRGDTGAQGLPGPPGEDGERGDDGEIGPRGLPGESGPRGLLGPKGPPGIPGPP

SEQ ID NO: 3223 - protein, 1874 aa, Homo Sapiens
MECLTRAEADIVLLVDGSWSIGRANFRTVRSFISRIVEVFDIGPKRVQIALAQYSGDPRTEWQLNAHRDKKSLLQAVANLPYKGGNTLTGMALNFIRQQNFRTQAGMRPRARKIGVLITDGKSQDDVEAPSKKLKDEGVELFAIGIKNADEVELKMIATDPDDTHAYNVADFESLSRIVDDLTINLCNSVKGPGDLEAPSNLVISERTHRSFRVSWTPPSDSVDRYKVEYYPVSGGKRQEFYVSRMETSTVLKDLKPETEYVVNVYSVVEDEYSEPLKGTEKTLPVPVVSLNIYDVGPTTMHVQWQPVGGATGYILSYKPVKDTEPTRPKEVRLGPTVNDMQLTDLVPNTEYAVTVQAVLHDLTSEPVTVREVTLPLPRPQDLKLRDVTHSTMNVFWEPVPGKVRKYIVRYKTPEEDVKEVEVDRSETSTSLKDLFSQTLYTVSVSAVHDEGESPPVTAQETTRPVPAPTNLKITEVTSEGFRGTWDHGASDVSLYRITWAPFGSSDKMETILNGDENTLVFENLNPNTIYEVSITAIYPDESESDDLIGSERTLPILTTQAPKSGPRNLQVYNATSNSLTVKWDPASGRVQKYRITYQPSTGEGNEQTTTIGGRQNSVVLQKLKPDTPYTITVSSLYPDGEGGRMTGRGKTKPLNTVRNLRVYDPSTSTLNVRWDHAEGNPRQYKLFYAPAAGGPEELVPIPGNTNYAILRNLQPDTSYTVTVVPVYTEGDGGRTSDTGRTLMRGLARNVQVYNPTPNSLDVRWDPAPGPVLQYRVVYSPVDGTRPSESIVVPGNTRMVHLERLIPDTLYSVNLVALYSDGEGNPSPAQGRTLPRSGPRNLRVFGETTNSLSVAWDHADGPVQQYRIIYSPTVGDPIDEYTTVPGRRNNVILQPLQPDTPYKITVIAVYEDGDGGHLTGNGRTVGLLPPQNIHISDEWYTRFRVSWDPSPSPVLGYKIVYKPVGSNEPMEAFVGEMTSYTLHNLNPSTTYDVNVYAQYDSGLSVPLTDQGTTLYLNVTDLKTYQIGWDTFCVKWSPHRAATSYRLKLSPADGTRGQEITVRGSETSHCFTGLSPDTDYGVTVFVQTPNLEGPGVSVKEHTTVKPTEAPTEPPTPPPPPTIPPARDVCKGAKADIVFLTDASWSIGDDNFNKVVKFIFNTVGGFDEISPAGIQVSFVQYSDEVKSEFKLNTYNDKALALGALQNIRYRGGNTRTGKALTFIKEKVLTWESGMRKNVPKVLVVVTDGRSQDEVKKAALVIQHSRFSVFVVGVADVDYNELANIASKPSERHVFIVDDFESFEKIEDNLITFVCETATSSCPLIYLDGYTSPGFKMLEAYNLTEKNFASVQGVSLESGSFPSYSAYRIQKNAFVNQPTADLHPNGLPPSYTIILLFRLLPETPSDPFAIWQITDRDYKPQVGVIADPSSKTLSFFNKDTRGEVQTVTFDTEEVKTLFYGSFHKVHIVVTSKSVKIYIDCYEIIEKDIKEAGNITTDGYEILGKLLKGERKSAAFQIQSFDIVCSPVWTSRDRCCDIPSRRDEGKCPAFPNSCTCTQDSVGPPGPPGPAGGPGAKGPRGERGISGAIGPPGPRGDIGPPGPQGPPGPQGPNGLSIPGEQGRQGMKGDAGEPGLPGRTGTPGLPGPPGPMGPPGDRGFTGKDGAMGPRGPPGPPGSPGSPGVTGPSGKPGKPGDHGRPGPSGLKGEKGDRGDIASQNMMRAVARQVCEQLISGQMNRFNQMLNQIPNDYQSSRNQPGPPGPPGPPGSAGARGEPGPGGRPGFPGTPGMQGPPGERGLPGEKGERGTGSSGPRGLPGPPGPQGESRTGPPGSTGSRGPPGPPGRPGNSGIRGPPGPPGYCDSSQCASIPYNGQGYPGSG

SEQ ID NO: 3224 - protein, 1899 aa, Homo Sapiens
MRSRLPPALAALGAALLLSSIEAEGMECLTRAEADIVLLVDGSWSIGRANFRTVRSFISRIVEVFDIGPKRVQIALAQYSGDPRTEWQLNAHRDKKSLLQAVANLPYKGGNTLTGMALNFIRQQNFRTQAGMRPRARKIGVLITDGKSQDDVEAPSKKLKDEGVELFAIGIKNADEVELKMIATDPDDTHAYNVADFESLSRIVDDLTINLCNSVKGPGDLEAPSNLVISERTHRSFRVSWTPPSDSVDRYKVEYYPVSGGKRQEFYVSRMETSTVLKDLKPETEYVVNVYSVVEDEYSEPLKGTEKTLPVPVVSLNIYDVGPTTMHVQWQPVGGATGYILSYKPVKDTEPTRPKEVRLGPTVNDMQLTDLVPNTEYAVTVQAVLHDLTSEPVTVREVTLPLPRPQDLKLRDVTHSTMNVFWEPVPGKVRKYIVRYKTPEEDVKEVEVDRSETSTSLKDLFSQTLYTVSVSAVHDEGESPPVTAQETTRPVPAPTNLKITEVTSEGFRGTWDHGASDVSLYRITWAPFGSSDKMETILNGDENTLVFENLNPNTIYEVSITAIYPDESESDDLIGSERTLPILTTQAPKSGPRNLQVYNATSNSLTVKWDPASGRVQKYRITYQPSTGEGNEQTTTIGGRQNSVVLQKLKPDTPYTITVSSLYPDGEGGRMTGRGKTKPLNTVRNLRVYDPSTSTLNVRWDHAEGNPRQYKLFYAPAAGGPEELVPIPGNTNYAILRNLQPDTSYTVTVVPVYTEGDGGRTSDTGRTLMRGLARNVQVYNPTPNSLDVRWDPAPGPVLQYRVVYSPVDGTRPSESIVVPGNTRMVHLERLIPDTLYSVNLVALYSDGEGNPSPAQGRTLPRSGPRNLRVFGETTNSLSVAWDHADGPVQQYRIIYSPTVGDPIDEYTTVPGRRNNVILQPLQPDTPYKITVIAVYEDGDGGHLTGNGRTVGLLPPQNIHISDEWYTRFRVSWDPSPSPVLGYKIVYKPVGSNEPMEAFVGEMTSYTLHNLNPSTTYDVNVYAQYDSGLSVPLTDQGTTLYLNVTDLKTYQIGWDTFCVKWSPHRAATSYRLKLSPADGTRGQEITVRGSETSHCFTGLSPDTDYGVTVFVQTPNLEGPGVSVKEHTTVKPTEAPTEPPTPPPPPTIPPARDVCKGAKADIVFLTDASWSIGDDNFNKVVKFIFNTVGGFDEISPAGIQVSFVQYSDEVKSEFKLNTYNDKALALGALQNIRYRGGNTRTGKALTFIKEKVLTWESGMRKNVPKVLVVVTDGRSQDEVKKAALVIQQSGFSVFVVGVADVDYNELANIASKPSERHVFIVDDFESFEKIEDNLITFVCETATSSCPLIYLDGYTSPGFKMLEAYNLTEKNFASVQGVSLESGSFPSYSAYRIQKNAFVNQPTADLHPNGLPPSYTIILLFRLLPETPSDPFAIWQITDRDYKPQVGVIADPSSKTLSFFNKDTRGEVQTVTFDTEEVKTLFYGSFHKVHIVVTSKSVKIYIDCYEIIEKDIKEAGNITTDGYEILGKLLKGERKSAAFQIQSFDIVCSPVWTSRDRCCDIPSRRDEGKCPAFPNSCTCTQDSVGPPGPPGPAGGPGAKGPRGERGISGAIGPPGPRGDIGPPGPQGPPGPQGPNGLSIPGEQGRQGMKGDAGEPGLPGRTGTPGLPGPPGPMGPPGDRGFTGKDGAMGPRGPPGPPGSPGSPGVTGPSGKPGKPGDHGRPGPSGLKGEKGDRGDIASQNMMRAVARQVCEQLISGQMNRFNQMLNQIPNDYQSSRNQPGPPGPPGPPGSAGARGEPGPGGRPGFPGTPGMQGPPGERGLPGEKGERGTGSSGPRGLPGPPGPQGESRTGPPGSTGSRGPPGPPGRPGNSGIRGPPGPPGYCDSSQCASIPYNGQGYPGSG

SEQ ID NO: 3225 - protein, 3063 aa, Homo Sapiens
MRSRLPPALAALGAALLLSSIEAEVDPPSDLNFKIIDENTVHMSWAKPVDPIVGYRITVDPTTDGPTKEFTLSASTTETLLSELVPETEYVVTITSYDEVEESVPVIGQLTIQTGSSTKPVEKKPGKTEIQKCSVSAWTDLVFLVDGSWSVGRNNFKYILDFIAALVSAFDIGEEKTRVGVVQYSSDTRTEFNLNQYYQRDELLAAIKKIPYKGGNTMTGDAIDYLVKNTFTESAGARVGFPKVAIIITDGKSQDEVEIPARELRNVGVEVFSLGIKAADAKELKQIASTPSLNHVFNVANFDAIVDIQNEIISQVCSGVDEQLGELVSGEEVVEPPSNLIAMEVSSKYVKLNWNPSPSPVTGYKVILTPMTAGSRQHALSVGPQTTTLSVRDLSADTEYQISVSAMKGMTSSEPISIMEKTQPMKVQVECSRGVDIKADIVFLVDGSYSIGIANFVKVRAFLEVLVKSFEISPNRVQISLVQYSRDPHTEFTLKKFTKVEDIIEAINTFPYRGGSTNTGKAMTYVREKIFVPSKGSRSNVPKVMILITDGKSSDAFRDPAIKLRNSDVEIFAVGVKDAVRSELEAIASPPAETHVFTVEDFDAFQRISFELTQSICLRIEQELAAIKKKAYVPPKDLSFSEVTSYGFKTNWSPAGENVFSYHITYKEAAGDDEVTVVEPASSTSVVLSSLKPETLYLVNVTAEYEDGFSIPLAGEETTEEVKGAPRNLKVTDETTDSFKITWTQAPGRVLRYRIIYRPVAGGESREVTTPPNQRRRTLENLIPDTKYEVSVIPEYFSGPGTPLTGNAATEEVRGNPRDLRVSDPTTSTMKLSWSGAPGKVKQYLVTYTPVAGGETQEVTVRGDTTNTVLQGLKEGTQYALSVTALYASGAGDALFGEGTTLEERGSPQDLVTKDITDTSIGAYWTSAPGMVRGYRVSWKSLYDDVDTGEKNLPEDAIHTMIENLQPETKYRISVFATYSSGEGEPLTGDATTELSQDSKTLKVDEETENTMRVTWKPAPGKVVNYRVVYRPHGRGKQMVAKVPPTVTSTVLKRLQPQTTYDITVLPIYKMGEGKLRQGSGTTASRFKSPRNLKTSDPTMSSFRVTWEPAPGEVKGYKVTFHPTGDDRRLGELVVGPYDNTVVLEELRAGTTYKVNVFGMFDGGESSPLVGQEMTTLSDTTVMPILSSGMECLTRAEADIVLLVDGSWSIGRANFRTVRSFISRIVEVFDIGPKRVQIALAQYSGDPRTEWQLNAHRDKKSLLQAVANLPYKGGNTLTGMALNFIRQQNFRTQAGMRPRARKIGVLITDGKSQDDVEAPSKKLKDEGVELFAIGIKNADEVELKMIATDPDDTHAYNVADFESLSRIVDDLTINLCNSVKGPGDLEAPSNLVISERTHRSFRVSWTPPSDSVDRYKVEYYPVSGGKRQEFYVSRMETSTVLKDLKPETEYVVNVYSVVEDEYSEPLKGTEKTLPVPVVSLNIYDVGPTTMHVQWQPVGGATGYILSYKPVKDTEPTRPKEVRLGPTVNDMQLTDLVPNTEYAVTVQAVLHDLTSEPVTVREVTLPLPRPQDLKLRDVTHSTMNVFWEPVPGKVRKYIVRYKTPEEDVKEVEVDRSETSTSLKDLFSQTLYTVSVSAVHDEGESPPVTAQETTRPVPAPTNLKITEVTSEGFRGTWDHGASDVSLYRITWAPFGSSDKMETILNGDENTLVFENLNPNTIYEVSITAIYPDESESDDLIGSERTLPILTTQAPKSGPRNLQVYNATSNSLTVKWDPASGRVQKYRITYQPSTGEGNEQTTTIGGRQNSVVLQKLKPDTPYTITVSSLYPDGEGGRMTGRGKTKPLNTVRNLRVYDPSTSTLNVRWDHAEGNPRQYKLFYAPAAGGPEELVPIPGNTNYAILRNLQPDTSYTVTVVPVYTEGDGGRTSDTGRTLMRGLARNVQVYNPTPNSLDVRWDPAPGPVLQYRVVYSPVDGTRPSESIVVPGNTRMVHLERLIPDTLYSVNLVALYSDGEGNPSPAQGRTLPRSGPRNLRVFGETTNSLSVAWDHADGPVQQYRIIYSPTVGDPIDEYTTVPGRRNNVILQPLQPDTPYKITVIAVYEDGDGGHLTGNGRTVGLLPPQNIHISDEWYTRFRVSWDPSPSPVLGYKIVYKPVGSNEPMEAFVGEMTSYTLHNLNPSTTYDVNVYAQYDSGLSVPLTDQGTTLYLNVTDLKTYQIGWDTFCVKWSPHRAATSYRLKLSPADGTRGQEITVRGSETSHCFTGLSPDTDYGVTVFVQTPNLEGPGVSVKEHTTVKPTEAPTEPPTPPPPPTIPPARDVCKGAKADIVFLTDASWSIGDDNFNKVVKFIFNTVGGFDEISPAGIQVSFVQYSDEVKSEFKLNTYNDKALALGALQNIRYRGGNTRTGKALTFIKEKVLTWESGMRKNVPKVLVVVTDGRSQDEVKKAALVIQQSGFSVFVVGVADVDYNELANIASKPSERHVFIVDDFESFEKIEDNLITFVCETATSSCPLIYLDGYTSPGFKMLEAYNLTEKNFASVQGVSLESGSFPSYSAYRIQKNAFVNQPTADLHPNGLPPSYTIILLFRLLPETPSDPFAIWQITDRDYKPQVGVIADPSSKTLSFFNKDTRGEVQTVTFDTEEVKTLFYGSFHKVHIVVTSKSVKIYIDCYEIIEKDIKEAGNITTDGYEILGKLLKGERKSAAFQIQSFDIVCSPVWTSRDRCCDIPSRRDEGKCPAFPNSCTCTQDSVGPPGPPGPAGGPGAKGPRGERGISGAIGPPGPRGDIGPPGPQGPPGPQGPNGLSIPGEQGRQGMKGDAGEPGLPGRTGTPGLPGPPGPMGPPGDRGFTGKDGAMGPRGPPGPPGSPGSPGVTGPSGKPGKPGDHGRPGPSGLKGEKGDRGDIASQNMMRAVARQVCEQLISGQMNRFNQMLNQIPNDYQSSRNQPGPPGPPGPPGSAGARGEPGPGGRPGFPGTPGMQGPPGERGLPGEKGERGTGSSGPRGLPGPPGPQGESRTGPPGSTGSRGPPGPPGRPGNSGIRGPPGPPGYCDSSQCASIPYNGQGYPGSG

SEQ ID NO: 3226 - protein, 3062 aa, Homo Sapiens
MRSRLPPALAALGAALLLSSIEAEVDPPSDLNFKIIDENTVHMSWAKPVDPIVGYRITVDPTTDGPTKEFTLSASTTETLLSELVPETEYVVTITSYDEVEESVPVIGQLTIQTGSSTKPVEKKPGKTEIQKCSVSAWTDLVFLVDGSWSVGRNNFKYILDFIAALVSAFDIGEEKTRVGVVQYSSDTRTEFNLNQYYQRDELLAAIKKIPYKGGNTMTGDAIDYLVKNTFTESAGARVGFPKVAIIITDGKSQDEVEIPARELRNVGVEVFSLGIKAADAKELKQIASTPSLNHVFNVANFDAIVDIQNEIISQVCSGVDEQLGELVSGEEVVEPPSNLIAMEVSSKYVKLNWNPSPSPVTGYKVILTPMTAGSRQHALSVGPQTTTLSVRDLSADTEYQISVSAMKGMTSSEPISIMEKTQPMKVQVECSRGVDIKADIVFLVDGSYSIGIANFVKVRAFLEVLVKSFEISPNRVQISLVQYSRDPHTEFTLKKFTKVEDIIEAINTFPYRGGSTNTGKAMTYVREKIFVPSKGSRSNVPKVMILITDGKSSDAFRDPAIKLRNSDVEIFAVGVKDAVRSELEAIASPPAETHVFTVEDFDAFQRISFELTQSICLRIEQELAAIKKKAYVPPKDLSFSEVTSYGFKTNWSPAGENVFSYHITYKEAAGDDEVTVVEPASSTSVVLSSLKPETLYLVNVTAEYEDGFSIPLAGEETTEEVKGAPRNLKVTDETTDSFKITWTQAPGRVLRYRIIYRPVAGGESREVTTPPNQRRRTLENLIPDTKYEVSVIPEYFSGPGTPLTGNAATEEVRGNPRDLRVSDPTTSTMKLSWSGAPGKVKQYLVTYTPVAGGETQEVTVRGDTTNTVLQGLKEGTQYALSVTALYASGAGDALFGEGTTLEERGSPQDLVTKDITDTSIGAYWTSAPGMVRGYRVSWKSLYDDVDTGEKNLPEDAIHTMIENLQPETKYRISVFATYSSGEGEPLTGDATTELSQDSKTLKVDEETENTMRVTWKPAPGKVVNYRVVYRPHGRGKQMVAKVPPTVTSTVLKRLQPQTTYDITVLPIYKMGEGKLRQGSGTTASRFKSPRNLKTSDPTMSSFRVTWEPAPGEVKGYKVTFHPTGDDRRLGELVVGPYDNTVVLEELRAGTTYKVNVFGMFDGGESSPLVGQEMTTLSDTTVMPILSSGMECLTRAEADIVLLVDGSWSIGRANFRTVRSFISRIVEVFDIGPKRVQIALAQYSGDPRTEWQLNAHRDKKSLLQAVANLPYKGGNTLTGMALNFIRQQNFRTQAGMRPRARKIGVLITDGKSQDDVEAPSKKLKDEGVELFAIGIKNADEVELKMIATDPDDTHAYNVADFESLSRIVDDLTINLCNSVKGPGDLEAPSNLVISERTHRSFRVSWTPPSDSVDRYKVEYYPVSGGKRQEFYVSRMETSTVLKDLKPETEYVVNVYSVVEDEYSEPLKGTEKTLPVPVVSLNIYDVGPTTMHVQWQPVGGATGYILSYKPVKDTEPTRPKEVRLGPTVNDMQLTDLVPNTEYAVTVQAVLHDLTSEPVTVREVTLPLPRPQDLKLRDVTHSTMNVFWEPVPGKVRKYIVRYKTPEEDVKEVEVDRSETSTSLKDLFSQTLYTVSVSAVHDEGESPPVTAQETTRPVPAPTNLKITEVTSEGFRGTWDHGASDVSLYRITWAPFGSSDKMETILNGDENTLVFENLNPNTIYEVSITAIYPDESESDDLIGSERTLPILTTQAPKSGPRNLQVYNATSNSLTVKWDPASGRVQKYRITYQPSTGEGNEQTTTIGGRQNSVVLQKLKPDTPYTITVSSLYPDGEGGRMTGRGKTKPLNTVRNLRVYDPSTSTLNVRWDHAEGNPRQYKLFYAPAAGGPEELVPIPGNTNYAILRNLQPDTSYTVTVVPVYTEGDGGRTSDTGRTLMRGLARNVQVYNPTPNSLDVRWDPAPGPVLQYRVVYSPVDGTRPSESIVVPGNTRMVHLERLIPDTLYSVNLVALYSDGEGNPSPAQGRTLPRSGPRNLRVFGETTNSLSVAWDHADGPVQQYRIIYSPTVGDPIDEYTTVPGRRNNVILQPLQPDTPYKITVIAVYEDGDGGHLTGNGRTVGLLPPQNIHISDEWYTRFRVSWDPSPSPVLGYKIVYKPVGSNEPMEAFVGEMTSYTLHNLNPSTTYDVNVYAQYDSGLSVPLTDQGTTLYLNVTDLKTYQIGWDTFCVKWSPHRAATSYRLKLSPADGTRGQEITVRGSETSHCFTGLSPDTDYGVTVFVQTPNLEGPGVSVKEHTTVKPTEAPTEPPTPPPPPTIPPARDVCKGAKADIVFLTDASWSIGDDNFNKVVKFIFNTVGGFDEISPAGIQVSFVQYSDEVKSEFKLNTYNDKALALGALQNIRYRGGNTRTGKALTFIKEKVLTWESGMRKNVPKVLVVVTDGRSQDEVKKAALVIQQSGFSVFVVGVADVDYNELANIASKPSERHVFIVDDFESFEKIEDNLITFVCETATSSCPLIYLDGYTSPGFKMLEAYNLTEKNFASVQGVSLESGSFPSYSAYRIQKNAFVNQPTADLHPNGLPPSYTIILLFRLLPETPSDPFAIWQITDRDYKPQVGVIADPSSKTLSFFNKDTRGEVQTVTFDTEEVKTLFYGSFHKVHIVVTSKSVKIYIDCYEIIEKDIKEAGNITTDGYEILGKLLKGERKSAAFQIQSFDIVCSPVWTSRDRCCDIPSRRDEGKCPAFPNSCTCTQDSVGPPGPPGPAGGPGAKGPRGERGISGAIGPPGPRGDIGPPGPQGPPGPQGPNGLSIPGEQGRQGMKGDAGEPGLPGRTGTPGLPGPPGPMGPPGDRGFTGKDGAMGPRGPPGPGSPGVTGPSGKPGKPGDHGRPGPSGLKGEKGDRGDIASQNMMRAVARQVCEQLISGQMNRFNQMLNQIPNDYQSSRNQPGPPGPPGPPGSAGARGEPGPGGRPGFPGTPGMQGPPGERGLPGEKGERGTGSSGPRGLPGPPGPQGESRTGPPGSTGSRGPPGPPGRPGNSGIRGPPGPPGYCDSSQCASIPYNGQGYPGTLLPL

SEQ ID NO: 3227 - protein, 2987 aa, Homo Sapiens
MRSRLPPALAALGAALLLSSIEAEVDPPSDLNFKIIDENTVHMSWAKPVDPIVGYRITVDPTTDGPTKEFTLSASTTETLLSELVPETEYVVTITSYDEVEESVPVIGQLTIQTGSSTKPVEKKPGKTEIQKCSVSAWTDLVFLVDGSWSVGRNNFKYILDFIAALVSAFDIGEEKTRVGVVQYSSDTRTEFNLNQYYQRDELLAAIKKIPYKGGNTMTGDAIDYLVKNTFTESAGARVGFPKVAIIITDGKSQDEVEIPARELRNVGVEVFSLGIKAADAKELKQIASTPSLNHVFNVANFDAIVDIQNEIISQVCSGVDEQLGELVSGEEVVEPPSNLIAMEVSSKYVKLNWNPSPSPVTGYKVILTPMTAGSRQHALSVGPQTTTLSVRDLSADTEYQISVSAMKGMTSSEPISIMEKTQPMKVQVECSRGVDIKADIVFLVDGSYSIGIANFVKVRAFLEVLVKSFEISPNRVQISLVQYSRDPHTEFTLKKFTKVEDIIEAINTFPYRGGSTNTGKAMTYVREKIFVPSKGSRSNVPKVMILITDGKSSDAFRDPAIKLRNSDVEIFAVGVKDAVRSELEAIASPPAETHVFTVEDFDAFQRISFELTQSICLRIEQELAAIKKKAYVPPKDLSFSEVTSYGFKTNWSPAGENVFSYHITYKEAAGDDEVTVVEPASSTSVVLSSLKPETLYLVNVTAEYEDGFSIPLAGEETTEEVKGAPRNLKVTDETTDSFKITWTQAPGRVLRYRIIYRPVAGGESREVTTPPNQRRRTLENLIPDTKYEVSVIPEYFSGPGTPLTGNAATEEVRGNPRDLRVSDPTTSTMKLSWSGAPGKVKQYLVTYTPVAGGETQEVTVRGDTTNTVLQGLKEGTQYALSVTALYASGAGDALFGEGTTLEERGSPQDLVTKDITDTSIGAYWTSAPGMVRGYRVSWKSLYDDVDTGEKNLPEDAIHTMIENLQPETKYRISVFATYSSGEGEPLTGDATTELSQDSKTLKVDEETENTMRVTWKPAPGKVVNYRVVYRPHGRGKQMVAKVPPTVTSTVLKRLQPQTTYDITVLPIYKMGEGKLRQGSGTTASRFKSPRNLKTSDPTMSSFRVTWEPAPGEVKGYKVTFHPTGDDRRLGELVVGPYDNTVVLEELRAGTTYKVNVFGMFDGGESSPLVGQEMTTLSDTTVMPILSSGMECLTRAEADIVLLVDGSWSIGRANFRTVRSFISRIVEVFDIGPKRVQIALAQYSGDPRTEWQLNAHRDKKSLLQAVANLPYKGGNTLTGMALNFIRQQNFRTQAGMRPRARKIGVLITDGKSQDDVEAPSKKLKDEGVELFAIGIKNADEVELKMIATDPDDTHAYNVADFESLSRIVDDLTINLCNSVKGPGDLEAPSNLVISERTHRSFRVSWTPPSDSVDRYKVEYYPVSGGKRQEFYVSRMETSTVLKDLKPETEYVVNVYSVVEDEYSEPLKGTEKTLPVPVVSLNIYDVGPTTMHVQWQPVGGATGYILSYKPVKDTEPTRPKEVRLGPTVNDMQLTDLVPNTEYAVTVQAVLHDLTSEPVTVREVTLPLPRPQDLKLRDVTHSTMNVFWEPVPGKVRKYIVRYKTPEEDVKEVEVDRSETSTSLKDLFSQTLYTVSVSAVHDEGESPPVTAQETTRPVPAPTNLKITEVTSEGFRGTWDHGASDVSLYRITWAPFGSSDKMETILNGDENTLVFENLNPNTIYEVSITAIYPDESESDDLIGSERTLPILTTQAPKSGPRNLQVYNATSNSLTVKWDPASGRVQKYRITYQPSTGEGNEQTTTIGGRQNSVVLQKLKPDTPYTITVSSLYPDGEGGRMTGRGKTKPLNTVRNLRVYDPSTSTLNVRWDHAEGNPRQYKLFYAPAAGGPEELVPIPGNTNYAILRNLQPDTSYTVTVVPVYTEGDGGRTSDTGRTLMRGLARNVQVYNPTPNSLDVRWDPAPGPVLQYRVVYSPVDGTRPSESIVVPGNTRMVHLERLIPDTLYSVNLVALYSDGEGNPSPAQGRTLPRSGPRNLRVFGETTNSLSVAWDHADGPVQQYRIIYSPTVGDPIDEYTTVPGRRNNVILQPLQPDTPYKITVIAVYEDGDGGHLTGNGRTVGLLPPQNIHISDEWYTRFRVSWDPSPSPVLGYKIVYKPVGSNEPMEAFVGEMTSYTLHNLNPSTTYDVNVYAQYDSGLSVPLTDQGTTLYLNVTDLKTYQIGWDTFCVKWSPHRAATSYRLKLSPADGTRGQEITVRGSETSHCFTGLSPDTDYGVTVFVQTPNLEGPGVSVKEHTTVKPTEAPTEPPTPPPPPTIPPARDVCKGAKADIVFLTDASWSIGDDNFNKVVKFIFNTVGGFDEISPAGIQVSFVQYSDEVKSEFKLNTYNDKALALGALQNIRYRGGNTRTGKALTFIKEKVLTWESGMRKNVPKVLVVVTDGRSQDEVKKAALVIQQSGFSVFVVGVADVDYNELANIASKPSERHVFIVDDFESFEKIEDNLITFVCETATSSCPLIYLDGYTSPGFKMLEAYNLTEKNFASVQGVSLESGSFPSYSAYRIQKNAFVNQPTADLHPNGLPPSYTIILLFRLLPETPSDPFAIWQITDRDYKPQVGVIADPSSKTLSFFNKDTRGEVQTVTFDTEEVKTLFYGSFHKRDEGKCPAFPNSCTCTQDSVGPPGPPGPAGGPGAKGPRGERGISGAIGPPGPRGDIGPPGPQGPPGPQGPNGLSIPGEQGRQGMKGDAGEPGLPGRTGTPGLPGPPGPMGPPGDRGFTGKDGAMGPRGPPGPPGSPGSPGVTGPSGKPGKPGDHGRPGPSGLKGEKGDRGDIASQNMMRAVARQVCEQLISGQMNRFNQMLNQIPNDYQSSRNQPGPPGPPGPPGSAGARGEPGPGGRPGFPGTPGMQGPPGERGLPGEKGERGTGSSGPRGLPGPPGPQGESRTGPPGSTGSRGPPGPPGRPGNSGIRGPPGPPGYCDSSQCASIPYNGQGYPGSG

SEQ ID NO: 3228 - protein, 207 aa, Homo Sapiens
VIQQSGFSVFVVGVADVDYNELANIASKPSERHVFIVDDFESFEKIEDNLITFVCETATSSCPLIYLDGYTSPGFKMLEAYNLTEKNFASVQGVSLESGSFPSYSAYRIQKNAFVNQPTADLHPNGLPPSYTIILLFRLLPETPSDPFAIWQITDRDYKPQVGVIADPSSKTLSFFNKDTRGEVQTVTFDTEEVKTLFYGSFHKVKT

SEQ ID NO: 3229 - protein, 756 aa, Homo Sapiens
VSFVQYSDEVKSEFKLNTYNDKALALGALQNIRYRGGNTRTGKALTFIKEKVLTWESGMRKNVPKVLVVVTDGRSQDEVKKAALVIQQSGFSVFVVGVADVDYNELANIASKPSERHVFIVDDFESFEKIEDNLITFVCETATSSCPLIYLDGYTSPGFKMLEAYNLTEKNFASVQGVSLESGSFPSYSAYRIQKNAFVNQPTADLHPNGLPPSYTIILLFRLLPETPSDPFAIWQITDRDYKPQVGVIADPSSKTLSFFNKDTRGEVQTVTFDTEEVKTLFYGSFHKVHIVVTSKSVKIYIDCYEIIEKDIKEAGNITTDGYEILGKLLKGERKSAAFQIQSFDIVCSPVWTSRDRCCDIPSRRDEGKCPAFPNSCTCTQDSVGPPGPPGPAGGPGAKGPRGERGISGAIGPPGPRGDIGPPGPQGPPGPQGPNGLSIPGEQGRQGMKGDAGEPGLPGRTGTPGLPGPPGPMGPPGDRGFTGKDGAMGPRGPPGPPGSPGSPGVTGPSGKPGKPGDHGRPGPSGLKGEKGDRGDIASQNMMRAVARQVCEQLISGQMNRFNQMLNQIPNDYQSSRNQPGPPGPPGPPGSAGARGEPGPGGRPGFPGTPGMQGPPGERGLPGEKGERGTGSSGPRGLPGPPGPQGESRTGPPGSTGSRGPPGPPGRPGNSGIRGPPGPPGYCDSSQCASIPYNGQGYPEPYVPEGGAYLPEREPFIVPVEPERTAEYEDYGADEPAEEPPEPHRRWRRALPHGPGQ

SEQ ID NO: 3230 - protein, 638 aa, Homo Sapiens
  misc_feature (1)..(1): Xaa can be any naturally occurring amino acid
XKSLLQAVANLPYKGGNTLTGMALNFIRQQNFRTQAGMRPRARKIGVLITDGKSQDDVEAPSKKLKDEGVELFAIGIKNADEVELKMIATDPDDTHAYNVADFESLSRIVDDLTINLCNSVKGPGDLEAPSNLVISERTHRSFRVSWTPPSDSVDRYKVEYYPVSGGKRQEFYVSRMETSTVLKDLKPETEYVVNVYSVVEDEYSEPLKGTEKTLPVPVVSLNIYDVGPTTMHVQWQPVGGATGYILSYKPVKDTEPTRPKEVRLGPTVNDMQLTDLVPNTEYAVTVQAVLHDLTSEPVTVREVTLPLPRPQDLKLRDVTHSTMNVFWEPVPGKVRKYIVRYKTPEEDVKEVEVDRSETSTSLKDLFSQTLYTVSVSAVHDEGESPPVTAQETTRPVPAPTNLKITEVTSEGFRGTWDHGASDVSLYRITWAPFGSSDKMETILNGDENTLVFENLNPNTIYEVSITAIYPDESESDDLIGSERTPPKSGPRNLQVYNATSNSLTVKWDPASGRVQKYRITYQPSTGEGNEQTTTIGGRQNSVVLQKLKPDTPYTITVSSLYPDGEGGRMTGRGKTKPLNTVRNLRVYDPSTSTLNVRWDHAEGNPRQYKLFYAPAAGGPEELVPIPGNTNYAILRNL

SEQ ID NO: 3231 - protein, 843 aa, Homo Sapiens
FDVGSEKTRIGLAQYSGDPRIEWHLNAFSTKDEVIEAVRNLPYKGGNTLTGLALNYIFENSFKPEAGSRTGVSKIGILITDGKSQDDIIPPSRNLRESGVELFAIGVKNADVNELQEIASEPDSTHVYNVAEFDLMHTVVESLTRTLCSRVEEQDREIKASAHAITGPPTELITSEVTARSFMVNWTHAPGNVEKYRVVYYPTRGGKPDEVVVDGTVSSTVLKNLMSLTEYQIAVFAIYAHTASEGLRGTETTLALPMASDLLLYDVTENSMRVKWDAVPGASGYLILYAPLTEGLAGDEKEMKIGETHTDIELSGLLPNTEYTVTVYAMFGEEASDPVTGQETTLALSPPRNLRISNVGSNSARLTWDPTSRQINGYRIVYNNADGTEINEVEVDPITTFPLKGLTPLTEYTIAIFSIYDEGQSEPLTGVFTTEEVPAQQYLEIDEVTTDSFRVTWHPLSADEGLHKLMWIPVYGGKTEEVVLKEEQDSHVIEGLEPGTEYEVSLLAVLDDGSESEVVTAVGTTLDSFWTEPATTIVPTTSVTSVFQTGIRNLVVGDETTSSLRVKWDISDSDVQQFRVTYMTAQGDPEEEVIGTVMVPGSQNNLLLKPLLPDTEYKVTVTPIYTDGEGVSVSAPGKTLPSSGPQNLRVSEEWYNRLRITWDPPSSPVKGYRIVYKPVSVPGPTLETFVGADINTILITNLLSGMDYNVKIFASQASGFSDALTGMVKTLFLGVTNLQAKHVEMTSLCAHWQVHRHATAYRVVIESLQDRQKQESTVGGGTTRHCFYGLQPDSEYKISVYTKLQEIEGPSVSIMEKTQSLPTRPPTFPPTIPPAKEGKRIIE

SEQ ID NO: 3232 - protein, 149 aa, Homo Sapiens
GPPGEPGRPGSPGAPGEQGPPGTPGFPGNAGVPGTPGERGLTGIKGEKGNPGVGTQGPRGPPGPAGPSGESRPGSPGPPGSPGPRGPPGHLGVPGPQGPSGQPGYCDPSSCSAYGVRGWMGIFLLDHPTLPSSPDHLPSLLFPGDGLLT

SEQ ID NO: 3233 - protein, 757 aa, Homo Sapiens [sequence omitted]

SEQ ID NO: 3234 - protein, 1796 aa, Homo Sapiens
MKIFQRKMRYWLLPPFLAIVYFCTIVQGQVAPPTRLRYNVISHDSIQISWKAPRGKFGGYKLLVTPTSGGKTNQLNLQNTATKAIIQGLMPDQNYTVQIIAYNKDKESKPAQGQFRIKDLEKRKDPKPRVKVVDRGNGSRPSSPEEVKFVCQTPAIADIVILVDGSWSIGRFNFRLVRHFLENLVTAFDVGSEKTRIGLAQYSGDPRIEWHLNAFSTKDEVIEAVRNLPYKGGNTLTGLALNYIFENSFKPEAGSRTGVSKIGILITDGKSQDDIIPPSRNLRESGVELFAIGVKNADVNELQEIASEPDSTHVYNVAEFDLMHTVVESLTRTLCSRVEEQDREIKASAHAITGPPTELITSEVTARSFMVNWTHAPGNVEKYRVVYYPTRGGKPDEVVVDGTVSSTVLKNLMSLTEYQIAVFAIYAHTASEGLRGTETTLALPMASDLLLYDVTENSMRVKWDAVPGASGYLILYAPLTEGLAGDEKEMKIGETHTDIELSGLLPNTEYTVTVYAMFGEEASDPVTGQETTLALSPPRNLRISNVGSNSARLTWDPTSRQINGYRIVYNNADGTEINEVEVDPITTFPLKGLTPLTEYTIAIFSIYDEGQSEPLTGVFTTEEVPAQQYLEIDEVTTDSFRVTWHPLSADEGLHKLMWIPVYGGKTEEVVLKEEQDSHVIEGLEPGTEYEVSLLAVLDDGSESEVVTAVGTTLDSFWTEPATTIVPTTSVTSVFQTGIRNLVVGDETTSSLRVKWDISDSDVQQFRVTYMTAQGDPEEEVIGTVMVPGSQNNLLLKPLLPDTEYKVTVTPIYTDGEGVSVSAPGKTLPSSGPQNLRVSEEWYNRLRITWDPPSSPVKGYRIVYKPVSVPGPTLETFVGADINTILITNLLSGMDYNVKIFASQASGFSDALTGMVKTLFLGVTNLQAKHVEMTSLCAHWQVHRHATAYRVVIESLQDRQKQESTVGGGTTRHCFYGLQPDSEYKISVYTKLQEIEGPSVSIMEKTQSLPTRPPTFPPTIPPAKEVCKAAKADLVFMVDGSWSIGDENFNKIISFLYSTVGALNKIGTDGTQVAMVQFTDDPRTEFKLNAYKTKETLLDAIKHISYKGGNTKTGKAIKYVRDTLFTAESGTRRGIPKVIVVITDGRSQDDVNKISREMQLDGYSIFAIGVADADYSELVSIGSKPSARHVFFVDDFDAFKKIEDELITFVCETASATCPVVHKDGIDLAGFKMMEMFGLVEKDFSSVEGVSMEPGTFNVFPCYQLHKDALVSQPTRYLHPEGLPSDYTISFLFRILPDTPQEPFALWEILNKNSDPLVGVILDNGGKTLTYFNYDQSGDFQTVTFEGPEIRKIFYGSFHKLHIVVSETLVKVVIDCKQVGEKAMNASANITSDGVEVLGKMVRSRGPGGNSAPFQLQMFDIVCSTSWANTDKCCELPGLRDDESCPDLPHSCSCSETNEVALGPAGPPGGPGLRGPKGQQGEPGPKGPDGPRGEIGLPGPQGPPGPQGPSGLSIQGMPGMPGEKGEKGDTGLPGPQGIPGGVGSPGRDGSPGQRGLPGKDGSSGPPGPPGPIGIPGTPGVPGITGSMGPQGALGPPGVPGAKGERGERGDLQSQAMVRSVARQVCEQLIQSHMARYTAILNQIPSHSSSIRTVQGPPGEPGRPGSPGAPGEQGPPGTPGFPGNAGVPGTPGERGLTGIKGEKGNPGVGTQGPRGPPGPAGPSGESRPGSPGPPGSPGPRGPPGHLGVPGPQGPSGQPGYCDPSSCSAYGVRAPHPDQPEFTPVQDELEAMELWGPGV

SEQ ID NO: 3235 - protein, 1780 aa, Homo Sapiens
MKIFQRKMRYWLLPPFLAIVYFCTIVQGQVAPPTRLRYNVISHDSIQISWKAPRGKFGGYKLLVTPTSGGKTNQLNLQNTATKAIIQGLMPDQNYTVQIIAYNKDKESKPAQGQFRIKDLEKRKDPKPRVKVVDRGNGSRPSSPEEVKFVCQTPAIADIVILVDGSWSIGRFNFRLVRHFLENLVTAFDVGSEKTRIGLAQYSGDPRIEWHLNAFSTKDEVIEAVRNLPYKGGNTLTGLALNYIFENSFKPEAGSRTGVSKIGILITDGKSQDDIIPPSRNLRESGVELFAIGVKNADVNELQEIASEPDSTHVYNVAEFDLMHTVVESLTRTLCSRVEEQDREIKASAHAITGPPTELITSEVTARSFMVNWTHAPGNVEKYRVVYYPTRGGKPDEVVVDGTVSSTVLKNLMSLTEYQIAVFAIYAHTASEGLRGTETTLALPMASDLLLYDVTENSMRVKWDAVPGASGYLILYAPLTEGLAGDEKEMKIGETHTDIELSGLLPNTEYTVTVYAMFGEEASDPVTGQETTLALSPPRNLRISNVGSNSARLTWDPTSRQINGYRIVYNNADGTEINEVEVDPITTFPLKGLTPLTEYTIAIFSIYDEGQSEPLTGVFTTEEVPAQQYLEIDEVTTDSFRVTWHPLSADEGLHKLMWIPVYGGKTEEVVLKEEQDSHVIEGLEPGTEYEVSLLAVLDDGSESEVVTAVGTTLDSFWTEPATTIVPTTSVTSVFQTGIRNLVVGDETTSSLRVKWDISDSDVQQFRVTYMTAQGDPEEEVIGTVMVPGSQNNLLLKPLLPDTEYKVTVTPIYTDGEGVSVSAPGKTLPSSGPQNLRVSEEWYNRLRITWDPPSSPVKGYRIVYKPVSVPGPTLETFVGADINTILITNLLSGMDYNVKIFASQASGFSDALTGMVKTLFLGVTNLQAKHVEMTSLCAHWQVHRHATAYRVVIESLQDRQKQESTVGGGTTRHCFYGLQPDSEYKISVYTKLQEIEGPSVSIMEKTQSLPTRPPTFPPTIPPAKEVCKAAKADLVFMVDGSWSIGDENFNKIISFLYSTVGALNKIGTDGTQVAMVQFTDDPRTEFKLNAYKTKETLLDAIKHISYKGGNTKTGKAIKYVRDTLFTAESGTRRGIPKVIVVITDGRSQDDVNKISREMQLDGYSIFAIGVADADYSELVSIGSKPSARHVFFVDDFDAFKKIEDELITFVCETASATCPVVHKDGIDLAGFKMMEMFGLVEKDFSSVEGVSMEPGTFNVFPCYQLHKDALVSQPTRYLHPEGLPSDYTISFLFRILPDTPQEPFALWEILNKNSDPLVGVILDNGGKTLTYFNYDQSGDFQTVTFEGPEIRKIFYGSFHKLHIVVSETLVKVVIDCKQVGEKAMNASANITSDGVEVLGKMVRSRGPGGNSAPFQLQMFDIVCSTSWANTDKCCELPGLRDDESCPDLPHSCSCSETNEVALGPAGPPGGPGLRGPKGQQGEPGPKGPDGPRGEIGLPGPQGPPGPQGPSGLSIQGMPGMPGEKGEKGDTGLPGPQGIPGGVGSPGRDGSPGQRGLPGKDGSSGPPGPPGPIGIPGTPGVPGITGSMGPQGALGPPGVPGAKGERGERGDLQSQAMVRSVARQVCEQLIQSHMARYTAILNQIPSHSSSIRTVQGPPGEPGRPGSPGAPGEQGPPGTPGFPGNAGVPGTPGERGLTGIKGEKGNPGVGTQGPRGPPGPAGPSGESRPGSPGPPGSPGPRGPPGHLGVPGPQGPSGQPGYCDPSSCSAYGVRDLIPYNDYQH

SEQ ID NO: 3236 - protein, 534 aa, Homo Sapiens
MKIFQRKMRYWLLPPFLAIVYFCTIVQGQVAPPTRLRYNVISHDSIQISWKAPRGKFGGYKLLVTPTSGGKTNQLNLQNTATKAIIQGLMPDQNYTVQIIAYNKDKESKPAQGQFRIKDLEKRKDPKPRVKVVDRGNGSRPSSPEEVKFVCQTPAIADIVILVDGSWSIGRFNFRLVRHFLENLVTAFDVGSEKTRIGLAQYSGDPRIEWHLNAFSTKDEVIEAVRNLPYKGGNTLTGLALNYIFENSFKPEAGSRTGVSKIGILITDGKSQDDIIPPSRNLRESGVELFAIGVKNADVNELQEIASEPDSTHVYNVAEFDLMHTVVESLTRTLCSRVEEQDREIKASAHAITGPPTELITSEVTARSFMVNWTHAPGNVEKYRVVYYPTRGGKPDEVVVDGTVSSTVLKNLMSLTEYQIAVFAIYAHTASEGLRGTETTLALPMASDLLLYDVTENSMRVKWDAVPGASGYLILYAPLTEGLAGDEKEMKIGETHTDIELSGLLPNTEYTVTVYAMFGEEASDPVTGQETTSP

SEQ ID NO: 3237 - protein, 534 aa, Homo Sapiens; identical to SEQ ID NO: 3236

SEQ ID NO: 3238 - protein, 337 aa, Homo Sapiens
  misc_feature (1)..(1): Xaa can be any naturally occurring amino acid
XVCQTPAIADIVILVDGSWSIGRFNFRLVRHFLENLVTAFDVGSEKTRIGVKNADVNELQEIASEPDSTHVYNVAEFDLMHTVVESLTRTLCSRVEEQDREIKASAHAITGPPTELITSEVTARSFMVNWTHAPGNVEKYRVVYYPTRGGKPDEVVVDGTVSSTVLKNLMSLTEYQIAVFAIYAHTASEGLRGTETTLALPMASDLLLYDVTENSMRVKWDAVPGASGYLILYAPLTEGLAGDEKEMKIGETHTDIELSGLLPNTEYTVTVYAMFGEEASDPVTGQETTLALSPPRNLRISNVGSNSARLTWDPTSRQINGYRIVYNNADGTEINEV

SEQ ID NO: 3239 - protein, 1388 aa, Homo Sapiens
MAPRRNNGQCWCLLMLLSVSTPLPAVTQTRGATETASQGHLDLTQLIGVPLPSSVSFVTGYGGFPAYSFGPGANVGRPARTLIPSTFFRDFAISVVVKPSSTRGGVLFAITDAFQKVIYLGLRLSGVEDGHQRIILYYTEPGSHVSQEAAAFSVPVMTHRWNRFAMIVQGEEVTLLVNCEEHSRIPFQRSSQALAFESSAGIFMGNAGATGLERFTGSLQQLTVHPDPRTPEELCDPEESSASGETSGLQEADGVAEILEAVTYTQASPKEAKVEPINTPPTPSSPFEDMELSGEPVPEGTLETTNMSIIQHSSPKQGSGEILNDTLEGVHSVDGDPITDSGSGAGAFLDIAEEKNLAATAAGLAEVPISTAGEAEASSVPTGGPTLSMSTENPEEGVTPGPDNEERLAATAAGEAEALASMPGEVEASGVAPGELDLSMSAQSLGEEATVGPSSEDSLTTAAAATEVSLSTFEDEEASGVPTDGLAPLTATMAPERAVTSGPGDEEDLAAATTEEPLITAGGEESGSPPPDGPPLPLPTVAPERWITPAQREHVGMKGQAGPKGEKGDAGEELPGPPEPSGPVGPTAGAEAEGSGLGWGSDVGSGSGDLVGSEQLLRGPPGPPGPPGLPGIPGKPGTDVFMGPPGSPGEDGPAGEPGPPGPEGQPGVDGATGLPGMKGEKGARGPNGSVGEKGDPGNRGLPGPPGKKGQAGPPGVMGPPGPPGPPGPPGPGCTMGLGFEDTEGSGSTQLLNEPKLSRPTAAIGLKGEKGDRGPKGERGMDGASIVGPPGPRGPPGHIKVLSNSLINITHGFMNFSDIPELVGPPGPDGLPGLPGFPGPRGPKGDTGLPGFPGLKGEQGEKGEPGAILTEDIPLERLMGKKGEPGMHGAPGPMGPKGPPGHKGEFGLPGRPGRPGLNGLKGTKGDPGVIMQGPPGLPGPPGPPGPPGAVINIKGAIFPIPVRPHCKMPVDTAHPGSPELITFHGVKGEKGSWGLPGSKGEKGDQGAQGPPGPPLDLAYLRHFLNNLKGENGDKGFKGEKGEKGDINGSFLMSGPPGLPGNPGPAGQKGETVVGPQGPPGAPGLPGPPGFGRPGDPGPPGPPGPPGPPAILGAAVALPGPPGPPGQPGLPGSRNLVTAFSNMDDMLQKAHLVIEGTFIYLRDSTEFFIRVRDGWKKLQLGELIPIPADSPPPPALSSNPHQLLPPPNPISSANYEKPALHLAALNMPFSGDIRADFQCFKQARAAGLLSTYRAFLSSHLQDLSTIVRKAERYSLPIVNLKGQVLFNNWDSIFSGHGGQFNMHIPIYSFDGRDIMTDPSWPQKVIWHGSSPHGVRLVDNYCEAWRTADTAVTGLASPLSTGKILDQKAYSCANRLIVLCIENSFMTDARK

SEQ ID NO: 3240 - protein, 1374 aa, Homo Sapiens
MLLSVSTPLPAVTQTRGATETASQGHLDLTQLIGVPLPSSVSFVTGYGGFPAYSFGPGANVGRPARTLIPSTFFRDFAISVVVKPSSTRGGVLFAITDAFQKVIYLGLRLSGVEDGHQRIILYYTEPGSHVSQEAAAFSVPVMTHRWNRFAMIVQGEEVTLLVNCEEHSRIPFQRSSQALAFESSAGIFMGNAGATGLERFTGSLQQLTVHPDPRTPEELCDPEESSASGETSGLQEADGVAEILEAVTYTQASPKEAKVEPINTPPTPSSPFEDMELSGEPVPEGTLETTNMSIIQHSSPKQGKGAILNDTLEGVHSVDGDPITDSGSGAGAFLDIAEEKNLAATAAGLAEVPISTAGEAEASSVPTGGPTLSMSTENPEEGVTPGPDNEERLAATAAGEAEALASMPGEVEASGVAPGELDLSMSAQSLGEEATVGPSSEDSLTTAAAATEVSLSTFEDEEASGVPTDGLAPLTATMAPERAVTSGPGDEEDLAAATTEEPLITAGGEESGSPPPDGPPLPLPTVAPERWITPAQREHVGMKGQAGPKGEKGDAGEELPGPPEPSGPVGPTAGAEAEGSGLGWGSDVGSGSGDLVGSEQLLRGPPGPPGPPGLPGIPGKPGTDVFMGPPGSPGEDGPAGEPGPPGPEGQPGVDGATGLPGMKGEKGARGPNGSVGEKGDPGNRGLPGPPGKKGQAGPPGVMGPPGPPGPPGPPGPGCTMGLGFEDTEGSGSTQLLNEPKLSRPTAAIGLKGEKGDRGPKGERGMDGASIVGPPGPRGPPGHIKVLSNSLINITHGFMNFSDIPELVGPPGPDGLPGLPGFPGPRGPKGDTGLPGFPGLKGEQGEKGEPGAILTEDIPLERLMGKKGEPGMHGAPGPMGPKGPPGHKGEFGLPGRPGRPGLNGLKGTKGDPGVIMQGPPGLPGPPGPPGPPGAVINIKGAIFPIPVRPHCKMPVDTAHPGSPELITFHGVKGEKGSWGLPGSKGEKGDQGAQGPPGPPLDLAYLRHFLNNLKGENGDKGFKGEKGEKGDINGSFLMSGPPGLPGNPGPAGQKGETVVGPQGPPGAPGLPGPPGFGRPGDPGPPGPPGPPGPPAILGAAVALPGPPGPPGQPGLPGSRNLVTAFSNMDDMLQKAHLVIEGTFIYLRDSTEFFIRVRDGWKKLQLGELIPIPADSPPPPALSSNPHQLLPPPNPISSANYEKPALHLAALNMPFSGDIRADFQCFKQARAAGLLSTYRAFLSSHLQDLSTIVRKAERYSLPIVNLKGQVLFNNWDSIFSGHGGQFNMHIPIYSFDGRDIMTDPSWPQKVIWHGSSPHGVRLVDNYCEAWRTADTAVTGLASPLSTGKILDQKAYSCANRLIVLCIENSFMTDARK

SEQ ID NO: 3241 - protein, 235 aa, Homo Sapiens
GEPGPPGRGVQGPQGEPGAPGLPGIQGLPGPRGPPGPTGEKGAQGSPGVKGATGPVGPPGASVSGPPGRDGQQGQTGLRGTPGEKGPRGEKGEPGECSCPSQGDLIFSGMPGPPGIPGPPGPPGVPGLQGVPGNNGLPGQPGLTAELGSLPIEQHLLKSICGDCVQGQRAHPGYLVEKGEKGDQGIPGVPGLDNCAQCFLSLERPRAEEARGDNSEGDPGCVGSPGLPGPPGLPG

SEQ ID NO: 3242 - protein, 224 aa, Homo Sapiens
GPPGSEGLPGPPGPAGPRGERGPQGNSGEKGDQGFQGQPGFPGPPGPPGFPGKVGSPGPPGPQAEKGPAGLDGLDGKDGKPGLRGDPGPAGPPGLMGPPGFKGKTGHPGLPGPKGDCGKPGPPGSTGRPGAEGEPGAMGPQGRPGPPGHVGPPGPPGQPGPAGISAVGLKGDRGATGERGLAGLPGQPGPPGHPGPPGEPGTDGAAGKEGPPGKQGFYGPPGPK

SEQ ID NO: 3243 - protein, 308 aa, Homo Sapiens
KVYTRCFCLEEPQNSEVDAQLTGRISQKAERGAKVHQETAADECPPCVHGARDSNGGKGERGLPGPPGSKGEKGARGNDCVRISPDAPLQCAEGPKGEKGESGALGPSGLPGSTGEKGQKGEKGDGGIKGVPGKPGRDGRPGEICVIGPKGQKGDPGFVGPEGLAGEPGPPGLPGPPGIGLPGTPGDPGGPPGPKGDKGSSGIPGKEGPGGKPGKPGVKGEKGDPCEVCPTLPEGFQNFVGLPGKPGPKGEPGDPVPARGDPGIQGIKGEKGEPCLSCSSVVGAQHLVSSTGASGDVGSPGFGLPGLP

SEQ ID NO: 3244 - protein, 1604 aa, Homo Sapiens
MWVSWAPGLWLLGLWATFGHGANTGAQCPPSQQEGLKLEHSSSLPANVTGFNLIHRLSLMKTSAIKKIRNPKGPLILRLGAAPVTQPTRRVFPRGLPEEFALVLTLLLKKHTHQKTWYLFQVTDANGYPQISLEVNSQERSLELRAQGQDGDFVSCIFPVPQLFDLRWHKLMLSVAGRVASVHVDCSSASSQPLGPRRPMRPVGHVFLGLDAEQGKPVSFDLQQVHIYCDPELVLEEGCCEILPAGCPPETSKARRDTQSNELIEINPQSEGKVYTRCFCLEEPQNSEVDAQLTGRISQKAERGAKVHQETAADECPPCVHGARDSNVTLAPSGPKGGKGERGLPGPPGSKGEKGARGNDCVRISPDAPLQCAEGPKGEKGESGALGPSGLPGSTGEKGQKGEKGDGGIKGVPGKPGRDGRPGEICVIGPKGQKGDPGFVGPEGLAGEPGPPGLPGPPGIGLPGTPGDPGGPPGPKGDKGSSGIPGKEGPGGKPGKPGVKGEKGDPCEVCPTLPEGFQNFVGLPGKPGPKGEPGDPVPARGDPGIQGIKGEKGEPCLSCSSVVGAQHLVSSTGASGDVGSPGFGLPGLPGRAGVPGLKGEKGNFGEAGPAGSPGPPGPVGPAGIKGAKGEPCEPCPALSNLQDGDVRVVALPGPSGEKGEPGPPGFGLPGKQGKAGERGLKGQKGDAGNPGDPGTPGTTGRPGLSGEPGVQGPAGPKGEKGDGCTACPSLQGTVTDMAGRPGQPGPKGEQGPEGVGRPGKPGQPGLPGVQGPPGLKGVQGEPGPPGRGVQGPQGEPGAPGLPGIQGLPGPRGPPGPTGEKGAQGSPGVKGATGPVGPPGASVSGPPGRDGQQGQTGLRGTPGEKGPRGEKGEPGECSCPSQGDLIFSGMPGAPGLWMGSSWQPGPQGPPGIPGPPGPPGVPGLQGVPGNNGLPGQPGLTAELGSLPIEQHLLKSICGDCVQGQRAHPGYLVEKGEKGDQGIPGVPGLDNCAQCFLSLERPRAEEARGDNSEGDPGCVGSPGLPGPPGLPGQRGEEGPPGMRGSPGPPGPIGPPGFPGAVGSPGLPGLQGERGLTGLTGDKGEPGPPGQPGYPGATGPPGLPGIKGERGYTGSAGEKGEPGPPGSEGLPGPPGPAGPRGERGPQGNSGEKGDQGFQGQPGFPGPPGPPGFPGKVGSPGPPGPQAEKGSEGIRGPSGLPGSPGPPGPPGIQGPAGLDGLDGKDGKPGLRGDPGPAGPPGLMGPPGFKGKTGHPGLPGPKGDCGKPGPPGSTGRPGAEGEPGAMGPQGRPGPPGHVGPPGPPGQPGPAGISAVGLKGDRGATGERGLAGLPGQPGPPGHPGPPGEPGTDGAAGKEGPPGKQGFYGPPGPKGDPGAAGQKGQAGEKGRAGMPGGPGKSGSMGPVGPPGPAGERGHPGAPGPSGSPGLPGVPGSMGDMVNYDEIKRFIRQEIIKMFDERMAYYTSRMQFPMEMAAAPGRPGPPGKDGAPGRPGAPGSPGLPGQIGREGRQGLPGVRGLPGTKGEKGDIGIGIAGENGLPGPPGPQGPPGYGKMGATGPMGQQGIPGIPGPPGPMGQPGKAGHCNPSDCFGAMPMEQQYPPMKTMKGPFG

SEQ ID NO: 3245 - protein, 966 aa, Homo Sapiens
MWVSWAPGLWLLGLWATFGHGANTGAQCPPSQQEGLKLEHSSSLPANVTGFNLIHRLSLMKTSAIKKIRNPKGPLILRLGAAPVTQPTRRVFPRGLPEEFALVLTLLLKKHTHQKTWYLFQVTDANGYPQISLEVNSQERSLELRAQGQDGDFVSCIFPVPQLFDLRWHKLMLSVAGRVASVHVDCSSASSQPLGPRRPMRPVGHVFLGLDAEQGKPVSFDLQQVHIYCDPELVLEEGCCEILPAGCPPETSKARRDTQSNELIEINPQSEGKVYTRCFCLEEPQNSEVDAQLTGRISQKAERGAKVHQETAADECPPCVHGARDSNVTLAPSGPKGGKGERGLPGPPGSKGEKGARGNDCVRISPDAPLQCAEGPKGEKGESGALGPSGLPGSTGEKGQKGEKGDGGIKGVPGKPGRDGRPGEICVIGPKGQKGDPGFVGPEGLAGEPGPPGLPGPPGIGLPGTPGDPGGPPGPKGDKGSSGIPGKEGPGGKPGKPGVKGEKGDPCEVCPTLPEGFQNFVGLPGKPGPKGEPGDPVPARGDPGIQGIKGEKGEPCLSCSSVVGAQHLVSSTGASGDVGSPGFGLPGLPGRAGVPGLKGEKGNFGEAGPAGSPGPPGPVGPAGIKGAKGEPCEPCPALSNLQDGDVRVVALPGPSGEKGEPGPPGFGLPGKQGKAGERGLKGQKGDAGNPGDPGTPGTTGRPGLSGEPGVQGPAGPKGEKGDGCTACPSLQGTVTDMAGRPGQPGPKGEQGPEGVGRPGKPGQPGLPGVQGPPGLKGVQGEPGPPGRGVQGPQGEPGAPGLPGIQGLPGPRGPPGPTGEKGAQGSPGVKGATGPVGPPGASVSGPPGRDGQQGQTGLRGTPGEKGPRGEKGEPGECSCPSQGDLIFSGMPGPPGIPGPPGPPGVPGLQVKGEKRMRSLGGRAHGSGWLLPAGPQGCCSPTPKTQTCHFSLLCLPASQGGKEGPLSL

SEQ ID NO: 3246 - protein, 687 aa, Homo Sapiens
GEVGADGVPGFPGLPGREGIAGPQGPKGDRGSRGEKGDPGKDGVGQPGLPGPPGPPGPVVYVSEQDGSVLSVPGPEGRPGFAGFPGPAGPKGNLGSKGERGSPGPKGEKGEPGSIFSPDGGALGPAQKGAKGEPGFRGPPGPYGRPGYKGEIGFPGRPGRPGMNGLKGEKGEPGDASLGFGMRGMPGPPGPPGPPGPPGTPVYDSNVFAESSRPGPPGLPGNQGPPGPKGAKGEVGPPGPPGQFPFDFLQLEAEMKGEKGDRGDAGQKGERGEPGGGGFFGSSLPGPPGPPGPPGPRGYPGIPGPKGESIRGQPGPPGPQGPPGIGYEGRQGPPGPPGPPGPPSFPGPHRQTISVPGPPGPPGPPGPPGTMGASSGQVRLWATRQAMLGQVHEVPEGWLIFVAEQEELYVRVQNGFRKVQLEARTPLPRGTDNEVAALQPPVVQLHDSNPYPRREHPHPTARPWRADDILASPPRLPEPQPYPGAPHHSSYVHLRPARPTSPPAHSHRDFQPVLHLVALNSPLSGGMRGIRGADFQCFQQARAVGLAGTFRAFLSSRLQDLYSIVRRADRAAVPIVNLKDELLFPSWEALFSGSEGPLKPGARIFSFDGKDVLRHPTWPQKSVWHGSDPNGRRLTESYCETWRTEAPSATGQASSLLGGRLLGQSAASCHHAYIVLCIENSFMTASK

SEQ ID NO: 3247 - protein, 1339 aa, Homo Sapiens
MAPRCPWPWPRRRRLLDVLAPLVLLLGVRAASAEPERISEEVGLLQLLGDPPPQQVTQTDDPDVGLAYVFGPDANSGQVARYHFPSLFFRDFSLLFHIRPATEGPGVLFAITDSAQAMVLLGVKLSGVQDGHQDISLLYTEPGAGQTHTAASFRLPAFVGQWTHLALSVAGGFVALYVDCEEFQRMPLARSSRGLELEPGAGLFVAQAGGADPDKFQGVIAELKVRRDPQVSPMHCLDEEGDDSDGASGDSGSGLGDARELLREETGAALKPRLPAPPPVTTPPLAGGSSTEDSRSEEVEEQTTVASLGAQTLPGSDSVSTWDGSVRTPGGRVKEGGLKGQKGEPGVPGPPGRAGPPGSPCLPGPPGLPCPVSPLGPAGPALQTVPGPQGPPGPPGRDGTPGRDGEPGDPGEDGKPGDTGPQGFPGTPGDVGPKGDKGDPGVGERGPPGPQGPPGPPGPSFRHDKLTFIDMEGSGFGGDLEALRGPRGFPGPPGPPGVPGLPGEPGRFGVNSSDVPGPAGLPGVPGREGPPGFPGLPGPPGPPGREGPPGRTGQKGSLGEAGAPGHKGSKGAPGPAGARGESGLAGAPGPAGPPGPPGPPGPPGPGLPAGFDDMEGSGGPFWSTARSADGPQGPPGLPGLKGDPGVPGLPGAKGEVGADGVPGFPGLPGREGIAGPQGPKGDRGSRGEKGDPGKDGVGQPGLPGPPGPPGPVVYVSEQDGSVLSVPGPEGRPGFAGFPGPAGPKGNLGSKGERGSPGPKGEKGEPGSIFSPDGGALGPAQKGAKGEPGFRGPPGPYGRPGYKGEIGFPGRPGRPGMNGLKGEKGEPGDASLGFGMRGMPGPPGPPGPPGPPGTPVYDSNVFAESSRPGPPGLPGNQGPPGPKGAKGEVGPPGPPGQFPFDFLQLEAEMKGEKGDRGDAGQKGERGEPGGGGFFGSSLPGPPGPPGPPGPRGYPGIPGPKGESIRGQPGPPGPQGPPGIGYEGRQGPPGPPGPPGPPSFPGPHRQTISVPGPPGPPGPPGPPGTMGASSGVRLWATRQAMLGQVHEVPEGWLIFVAEQEELYVRVQNGFRKVQLEARTPLPRGTDNEVAALQPPVVQLHDSNPYPRREHPHPTARPWRADDILASPPRLPEPQPYPGAPHHSSYVHLRPARPTSPPAHSHRDFQPVLHLVALNSPLSGGMRGIRGADFQCFQQARAVGLAGTFRAFLSSRLQDLYSIVRRADRAAVPIVNLKDELLFPSWEALFSGSEGPLKPGARIFSFDGKDVLRHPTWPQKSVWHGSDPNGRRLTESYCETWRTEAPSATGQASSLLGGRLLGQSAASCHHAYIVLCIENSFMTASK

SEQ ID NO: 3248 - protein, 1519 aa, Homo Sapiens
MAPYPCGCHILLLLFCCLAAARANLLNLNWLWFNNEDTSHAATTIPEPQGPLPVQPTADTTTHVTPRNGSTEPATAPGSPEPPSELLEDGQDTPTSAESPDAPEENIAGVGAEILNVAKGIRSFVQLWNDTVPTESLARAETLVLETPVGPLALAGPSSTPQENGTTLWPSRGIPSSPGAHTTEAGTLPAPTPSPPSLGRPWAPLTGPSVPPPSSERISEEVGLLQLLGDPPPQQVTQTDDPDVGLAYVFGPDANSGQVARYHFPSLFFRDFSLLFHIRPATEGPGVLFAITDSAQAMVLLGVKLSGVQDGHQDISLLYTEPGAGQTHTAASFRLPAFVGQWTHLALSVAGGFVALYVDCEEFQRMPLARSSRGLELEPGAGLFVAQAGGADPDKFQGVIAELKVRRDPQVSPMHCLDEEGDDSDGASGDSGSGLGDARELLREETGAALKPRLPAPPPVTTPPLAGGSSTEDSRSEEVEEQTTVASLGAQTLPGSDSVSTWDGSVRTPGGRVKEGGLKGQKGEPGVPGPPGRAGPPGSPCLPGPPGLPCPVSPLGPAGPALQTVPGPQGPPGPPGRDGTPGRDGEPGDPGEDGKPGDTGPQGFPGTPGDVGPKGDKGDPGVGERGPPGPQGPPGPPGPSFRHDKLTFIDMEGSGFGGDLEALRGPRGFPGPPGPPGVPGLPGEPGRFGVNSSDVPGPAGLPGVPGREGPPGFPGLPGPPGPPGREGPPGRTGQKGSLGEAGAPGHKGSKGAPGPAGARGESGLAGAPGPAGPPGPPGPPGPPGPGLPAGFDDMEGSGGPFWSTARSADGPQGPPGLPGLKGDPGVPGLPGAKGEVGADGVPGFPGLPGREGIAGPQGPKGDRGSRGEKGDPGKDGVGQPGLPGPPGPPGPVVYVSEQDGSVLSVPGPEGRPGFAGFPGPAGPKGNLGSKGERGSPGPKGEKGEPGSIFSPDGGALGPAQKGAKGEPGFRGPPGPYGRPGYKGEIGFPGRPGRPGMNGLKGEKGEPGDASLGFGMRGMPGPPGPPGPPGPPGTPVYDSNVFAESSRPGPPGLPGNQGPPGPKGAKGEVGPPGPPGQFPFDFLQLEAEMKGEKGDRGDAGQKGERGEPGGGGFFGSSLPGPPGPPGPPGPRGYPGIPGPKGESIRGQPGPPGPQGPPGIGYEGRQGPPGPPGPPGPPSFPGPHRQTISVPGPPGPPGPPGPPGTMGASSGVRLWATRQAMLGQVHEVPEGWLIFVAEQEELYVRVQNGFRKVQLEARTPLPRGTDNEVAALQPPVVQLHDSNPYPRREHPHPTARPWRADDILASPPRLPEPQPYPGAPHHSSYVHLRPARPTSPPAHSHRDFQPVLHLVALNSPLSGGMRGIRGADFQCFQQARAVGLAGTFRAFLSSRLQDLYSIVRRADRAAVPIVNLKDELLFPSWEALFSGSEGPLKPGARIFSFDGKDVLRHPTWPQKSVWHGSDPNGRRLTESYCETWRTEAPSATGQASSLLGGRLLGQSAASCHHAYIVLCIENSFMTASK

SEQ ID NO: 3249 - protein, 1754 aa, Homo Sapiens
MAPYPCGCHILLLLFCCLAAARANLLNLNWLWFNNEDTSHAATTIPEPQGPLPVQPTADTTTHVTPRNGSTEPATAPGSPEPPSELLEDGQDTPTSAESPDAPEENIAGVGAEILNVAKGIRSFVQLWNDTVPTESLARAETLVLETPVGPLALAGPSSTPQENGTTLWPSRGIPSSPGAHTTEAGTLPAPTPSPPSLGRPWAPLTGPSVPPPSSGRASLSSLLGGAPPWGSLQDPDSQGLSPAAAAPSQQLQRPDVRLRTPLLHPLVMGSLGKHAAPSAFSSGLPGALSQVAVTTLTRDSGAWVSHVANSVGPGLANNSALLGADPEAPAGRCLPLPPSLPVCGHLGISRFWLPNHLHHESGEQVRAGARAWGGLLQTHCHPFLAWFFCLLLVPPCGSVPPPAPPPCCQFCEALQDACWSRLGGGRLPVACASLPTQEDGYCVLIGPAAERISEEVGLLQLLGDPPPQQVTQTDDPDVGLAYVFGPDANSGQVARYHFPSLFFRDFSLLFHIRPATEGPGVLFAITDSAQAMVLLGVKLSGVQDGHQDISLLYTEPGAGQTHTAASFRLPAFVGQWTHLALSVAGGFVALYVDCEEFQRMPLARSSRGLELEPGAGLFVAQAGGADPDKFQGVIAELKVRRDPQVSPMHCLDEEGDDSDGASGDSGSGLGDARELLREETGAALKPRLPAPPPVTTPPLAGGSSTEDSRSEEVEEQTTVASLGAQTLPGSDSVSTWDGSVRTPGGRVKEGGLKGQKGEPGVPGPPGRAGPPGSPCLPGPPGLPCPVSPLGPAGPALQTVPGPQGPPGPPGRDGTPGRDGEPGDPGEDGKPGDTGPQGFPGTPGDVGPKGDKGDPGVGERGPPGPQGPPGPPGPSFRHDKLTFIDMEGSGFGGDLEALRGPRGFPGPPGPPGVPGLPGEPGRFGVNSSDVPGPAGLPGVPGREGPPGFPGLPGPPGPPGREGPPGRTGQKGSLGEAGAPGHKGSKGAPGPAGARGESGLAGAPGPAGPPGPPGPPGPPGPGLPAGFDDMEGSGGPFWSTARSADGPQGPPGLPGLKGDPGVPGLPGAKGEVGADGVPGFPGLPGREGIAGPQGPKGDRGSRGEKGDPGKDGVGQPGLPGPPGPPGPVVYVSEQDGSVLSVPGPEGRPGFAGFPGPAGPKGNLGSKGERGSPGPKGEKGEPGSIFSPDGGALGPAQKGAKGEPGFRGPPGPYGRPGYKGEIGFPGRPGRPGMNGLKGEKGEPGDASLGFGMRGMPGPPGPPGPPGPPGTPVYDSNVFAESSRPGPPGLPGNQGPPGPKGAKGEVGPPGPPGQFPFDFLQLEAEMKGEKGDRGDAGQKGERGEPGGGGFFGSSLPGPPGPPGPPGPRGYPGIPGPKGESIRGQPGPPGPQGPPGIGYEGRQGPPGPPGPPGPPSFPGPHRQTISVPGPPGPPGPPGPPGTMGASSGVRLWATRQAMLGQVHEVPEGWLIFVAEQEELYVRVQNGFRKVQLEARTPLPRGTDNEVAALQPPVVQLHDSNPYPRREHPHPTARPWRADDILASPPRLPEPQPYPGAPHHSSYVHLRPARPTSPPAHSHRDFQPVLHLVALNSPLSGGMRGIRGADFQCFQQARAVGLAGTFRAFLSSRLQDLYSIVRRADRAAVPIVNLKDELLFPSWEALFSGSEGPLKPGARIFSFDGKDVLRHPTWPQKSVWHGSDPNGRRLTESYCETWRTEAPSATGQASSLLGGRLLGQSAASCHHAYIVLCIENSFMTASK

SEQ ID NO: 3250 - protein, 280 aa, Homo Sapiens
  misc_feature (1)..(1): Xaa can be any naturally occurring amino acid
XISVPGPPGPPGPPGPPGTMGASSGVRLWATRQAMLGQVHEVPEGWLIFVAEQEELYVRVQNGFRKVQDNEVAALQPPVVQLHDSNPYPRREHPHPTARPWRADDILASPPRLPEPQPYPGAPHHSSYVHLRPARPTSPPAHSHRDFQPVLHLVALNSPLSGGMRGIRGADFQCFQQARAVGLAGTFRAFLSSRLQDLYSIVRRADRAAVPIVNLKDELLFPSWEALFSGSEGPLKPGARIFSFDGKDVLRHPTWPQKSVWHGSDPNGRRLTESYCETWR

SEQ ID NO: 3251 - protein, 36 aa, Homo Sapiens
GPPGIQGIHQTLGGYYNKDNKGNDEHEAGGLKGDKV

SEQ ID NO: 3252 - protein, 1142 aa, Homo Sapiens
MRLTGPWKLWLWMSIFLLPASTSVTVRDKTEESCPILRIEGHQLTYDNINKLEVSGFDLGDSFSLRRAFCESDKTCFKLGSALLIRDTIKIFPKGLPEEYSVAAMFRVRRNAKKERWFLWQVLNQQNIPQISIVVDGGKKVVEFMFQATEGDVLNYIFRNRELRPLFDRQWHKLGISIQSQVISLYMDCNLIARRQTDEKDTVDFHGRTVIATRASDGKPVDIELHQLKIYCSANLIAQETCCEISDTKCPEQDGFGNIASSWVTAHASKMSSYLPAKQELKDQCQCIPNKGEAGLPGAPGSPGQKGHKGEPGENGLHGAPGFPGQKGEQGFEGSKGETGEKGEQGEKGDPALAGLNGENGLKGDLGPHGPPGPKGEKGDTGPPGPPALPGSLGIQGPQGPPGKEGQRGRRGKTGPPGKPGPPGPPGPPGIQGIHQTLGGYYNKDNKGNDEHEAGGLKGDKGETGLPGFPGSVGPKGQKGEPGEPFTKGEKGDRGEPGVIGSQGVKGEPGDPGPPGLIGSPGLKGQQGSAGSMGPRGPPGDVGLPGEHGIPGKQGIKGEKGDPGGIIGPPGLPGPKGEAGPPGKSLPGEPGLDGNPGAPGPRGPKGERGLPGVHGSPGDIGPQGIGIPGRTGAQGPAGEPGIQGPRGLPGLPGTPGTPGNDGVPGRDGKPGLPGPPGDPIALPLLGDIGALLKNFCGNCQASVPGLKSNKGEEGGAGEPGKYDSMARKGDIGPRGPPGIPGREGPKGSKGERGYPGIPGEKGDEGLQGIPGIPGAPGPTGPPGLMGRTGHPGPTGAKGEKGSDGPPGKPGPPGPPGIPFNERNGMSSLYKIKGGVNVPSYPGPPGPPGPKGDPGPVGEPGAMGLPGLEGFPGVKGDRGPAGPPGIAGMSGKPGAPGPPGVPGEPGERGPVGDIGFPGPEGPSGKPGINGKDGIPGAQGIMGKPGDRGPKGERGDQGIPGDRGSQGERGKPGLTGMKGAIGPMGPPGNKGSMGSPGHQGPPGSPGIPGIPADAVSFEEIKKYINQEVLRIFEERMAVFLSQLKLPAAMLAAQAYGRPGPPGKDGLPGPPGDPGPQGYRGQKGERGEPGIGLPGSPGLPGTSALGLPGSPGAPGPQGPPGPSGRCNPEDCLYPVSHAHQRTGGN

SEQ ID NO: 3253 - protein, 60 aa, Homo Sapiens
MRLTGPWKLWLWMSIFLLPASTSVTVRDKTGIQANSLPNHQMLFIAFKSLKQILLRLKRP

SEQ ID NO: 3254 - protein, 1464 aa, Homo Sapiens
MFSFVDLRLLLLLAATALLTHGQEEGQVEGQDEDIPPITCVQNGLRYHDRDVWKPEPCRICVCDNGKVLCDDVICDETKNCPGAEVPEGECCPVCPDGSESPTDQETTGVEGPKGDTGPRGPRGPAGPPGRDGIPGQPGLPGPPGPPGPPGPPGLGGNFAPQLSYGYDEKSTGGISVPGPMGPSGPRGLPGPPGAPGPQGFQGPPGEPGEPGASGPMGPRGPPGPPGKNGDDGEAGKPGRPGERGPPGPQGARGLPGTAGLPGMKGHRGFSGLDGAKGDAGPAGPKGEPGSPGENGAPGQMGPRGLPGERGRPGAPGPAGARGNDGATGAAGPPGPTGPAGPPGFPGAVGAKGEAGPQGPRGSEGPQGVRGEPGPPGPAGAAGPAGNPGADGQPGAKGANGAPGIAGAPGFPGARGPSGPQGPGGPPGPKGNSGEPGAPGSKGDTGAKGEPGPVGVQGPPGPAGEEGKRGARGEPGPTGLPGPPGERGGPGSRGFPGADGVAGPKGPAGERGSPGPAGPKGSPGEAGRPGEAGLPGAKGLTGSPGSPGPDGKTGPPGPAGQDGRPGPPGPPGARGQAGVMGFPGPKGAAGEPGKAGERGVPGPPGAVGPAGKDGEAGAQGPPGPAGPAGERGEQGPAGSPGFQGLPGPAGPPGEAGKPGEQGVPGDLGAPGPSGARGERGFPGERGVQGPPGPAGPRGANGAPGNDGAKGDAGAPGAPGSQGAPGLQGMPGERGAAGLPGPKGDRGDAGPKGADGSPGKDGVRGLTGPIGPPGPAGAPGDKGESGPSGPAGPTGARGAPGDRGEPGPPGPAGFAGPPGADGQPGAKGEPGDAGAKGDAGPPGPAGPAGPPGPIGNVGAPGAKGARGSAGPPGATGFPGAAGRVGPPGPSGNAGPPGPPGPAGKEGGKGPRGETGPAGRPGEVGPPGPPGPAGEKGSPGADGPAGAPGTPGPQGIAGQRGVVGLPGQRGERGFPGLPGPSGEPGKQGPSGASGERGPPGPMGPPGLAGPPGESGREGAPGAEGSPGRDGSPGAKGDRGETGPAGPPGAPGAPGAPGPVGPAGKSGDRGETGPAGPAGPVGPVGARGPAGPQGPRGDKGETGEQGDRGIKGHRGFSGLQGPPGPPGSPGEQGPSGASGPAGPRGPPGSAGAPGKDGLNGLPGPIGPPGPRGRTGDAGPVGPPGPPGPPGPPGPPSAGFDFSFLPQPPQEKAHDGGRYYRADDANVVRDRDLEVDTTLKSLSQQIENIRSPEGSRKNPARTCRDLKMCHSDWKSGEYWIDPNQGCNLDAIKVFCNMETGETCVYPTQPSVAQKNWYISKNPKDKRHVWFGESMTDGFQFEYGGQGSDPADVAIQLTFLRLMSTEASQNITYHCKNSVAYMDQQTGNLKKALLLQGSNEIEIRAEGNSRFTYSVTVDGCTSHTGAWGKTVIEYKTTKTSRLPIIDVAPLDVGAPDQEFGFDVGPVCFL

SEQ ID NO: 3255 - protein, 154 aa, Homo Sapiens
MRSRRAFKDLRKEERGEGREVKNPSVPLRPGGKVVKLGVAVTTDNAPLPPVPVPPITCVQNGLRYHDRDVWKPEPCRICVCDNGKVLCDDVICDETKNCPGAEVPEGECCPVCPDGSESPTDQETTGVEGPKGDTGPRGPRGPAGPPGRDGIPG

SEQ ID NO: 3256 - protein, 1364 aa, Homo Sapiens
MLSFVDTRTLLLLAVTLCLATCQFFETVRKGPAGDRGPRGERGPPGPPGRDGEDGPTGPPGPPGPPGPPGLGGNFAAQYDGKGVGLGPGPMGLMGPRGPPGAAGAPGPQGFQGPAGEPGEPGQTGPAGARGPAGPPGKAGEDGHPGKPGRPGERGVVGPQGARGFPGTPGLPGFKGIRGHNGLDGLKGQPGAPGVKGEPGAPGENGTPGQTGARGLPGERGRVGAPGPAGARGSDGSVGPVGPAGPIGSAGPPGFPGAPGPKGEIGAVGNAGPAGPAGPRGEVGLPGLSGPVGPPGNPGANGLTGAKGAAGLPGVAGAPGLPGPRGIPGPVGAAGATGARGLVGEPGPAGSKGESGNKGEPGSAGPQGPPGPSGEEGKRGPNGEAGSAGPPGPPGLRGSPGSRGLPGADGRAGVMGPPGSRGASGPAGVRGPNGDAGRPGEPGLMGPRGLPGSPGNIGPAGKEGPVGLPGIDGRPGPIGPAGARGEPGNIGFPGPKGPTGDPGKNGDKGHAGLAGARGAPGPDGNNGAQGPPGPQGVQGGKGEQGPPGPPGFQGLPGPSGPAGEVGKPGERGLHGEFGLPGPAGPRGERGPPGESGAAGPTGPIGSRGPSGPPGPDGNKGEPGVVGAVGTAGPSGPSGLPGERGAAGIPGGKGEKGEPGLRGEIGNPGRDGARGAPGAVGAPGPAGATGDRGEAGAAGPAGPAGPRGSPGERGEVGPAGPNGFAGPAGAAGQPGAKGERGAKGPKGENGVVGPTGPVGAAGPAGPNGPPGPAGSRGDGGPPGMTGFPGAAGRTGPPGPSGISGPPGPPGPAGKEGLRGPRGDQGPVGRTGEVGAVGPPGFAGEKGPSGEAGTAGPPGTPGPQGLLGAPGILGLPGSRGERGLPGVAGAVGEPGPLGIAGPPGARGPPGAVGSPGVNGAPGEAGRDGNPGNDGPPGRDGQPGHKGERGYPGNIGPVGAAGAPGPHGPVGPAGKHGNRGETGPSGPVGPAGAVGPRGPSGPQGIRGDKGEPGEKGPRGLPGLKGHNGLQGLPGIAGHHGDQGAPGSVGPAGPRGPAGPSGPAGKDGRTGHPGTVGPAGIRGPQGHQGPAGPPGPPGPPGPPGVSGGGYDFGYDGDFYRADQPRSAPSLRPKDYEVDATLKSLNNQIETLLTPEGSRKNPARTCRDLRLSHPEWSSGYYWIDPNQGCTMDAIKVYCDFSTGETCIRAQPENIPAKNWYRSSKDKKHVWLGETINAGSQFEYNVEGVTSKEMATQLAFMRLLANYASQNITYHCKNSIAYMDEETGNLKKAVILQGSNDVELVAEGNSRFTYTVLVDGCSKKTNEWGKTIIEYKTNKPSRLPFLDIAPLDIGGADQEFFVDIGPVCFK

SEQ ID NO: 3257 - protein, 1366 aa, Homo Sapiens
MLSFVDTRTLLLLAVTLCLATCQSLQEETVRKGPAGDRGPRGERGPPGPPGRDGEDGPTGPPGPPGPPGPPGLGGNFAAQYDGKGVGLGPGPMGLMGPRGPPGAAGAPGPQGFQGPAGEPGEPGQTGPAGARGPAGPPGKAGEDGHPGKPGRPGERGVVGPQGARGFPGTPGLPGFKGIRGHNGLDGLKGQPGAPGVKGEPGAPGENGTPGQTGARGLPGERGRVGAPGPAGARGSDGSVGPVGPAGPIGSAGPPGFPGAPGPKGEIGAVGNAGPAGPAGPRGEVGLPGLSGPVGPPGNPGANGLTGAKGAAGLPGVAGAPGLPGPRGIPGPVGAAGATGARGLVGEPGPAGSKGESGNKGEPGSAGPQGPPGPSGEEGKRGPNGEAGSAGPPGPPGLRGSPGSRGLPGADGRAGVMGPPGSRGASGPAGVRGPNGDAGRPGEPGLMGPRGLPGSPGNIGPAGKEGPVGLPGIDGRPGPIGPAGARGEPGNIGFPGPKGPTGDPGKNGDKGHAGLAGARGAPGPDGNNGAQGPPGPQGVQGGKGEQGPPGPPGFQGLPGPSGPAGEVGKPGERGLHGEFGLPGPAGPRGERGPPGESGAAGPTGPIGSRGPSGPPGPDGNKGEPGVVGAVGTAGPSGPSGLPGERGAAGIPGGKGEKGEPGLRGEIGNPGRDGARGAPGAVGAPGPAGATGDRGEAGAAGPAGPAGPRGSPGERGEVGPAGPNGFAGPAGAAGQPGAKGERGAKGPKGENGVVGPTGPVGAAGPAGPNGPPGPAGSRGDGGPPGMTGFPGAAGRTGPPGPSGISGPPGPPGPAGKEGLRGPRGDQGPVGRTGEVGAVGPPGFAGEKGPSGEAGTAGPPGTPGPQGLLGAPGILGLPGSRGERGLPGVAGAVGEPGPLGIAGPPGARGPPGAVGSPGVNGAPGEAGRDGNPGNDGPPGRDGQPGHKGERGYPGNIGPVGAAGAPGPHGPVGPAGKHGNRGETGPSGPVGPAGAVGPRGPSGPQGIRGDKGEPGEKGPRGLPGLKGHNGLQGLPGIAGHHGDQGAPGSVGPAGPRGPAGPSGPAGKDGRTGHPGTVGPAGIRGPQGHQGPAGPPGPPGPPGPPGVSGGGYDFGYDGDFYRADQPRSAPSLRPKDYEVDATLKSLNNQIETLLTPEGSRKNPARTCRDLRLSHPEWSSGYYWIDPNQGCTMDAIKVYCDFSTGETCIRAQPENIPAKNWYRSSKDKKHVWLGETINAGSQFEYNVEGVTSKEMATQLAFMRLLANYASQNITYHCKNSIAYMDEETGNLKKAVILQGSNDVELVAEGNSRFTYTVLVDGCSKKTNEWGKTIIEYKTNKPSRLPFLDIAPLDIGGADQEFFVDIGPVCFK

SEQ ID NO: 3258 - protein, 401 aa, Homo Sapiens
EHTIVFLVRLLPETPREAFALWQMTAEDFQPLLGVLLDAGKKSLTYFHRDPRAALQEATFDPQEVRKIFFGSFHKVHVAVGRSKVRLYVDCRKVAERPLGEMGSPPAAGFVTLGRLAKARGPRSSSAAFQLQMLQIVCSDTWADEDRCCELPASRDGETCPAFVSACSCSSETPGPPGPQGPPGLPGRNGTPGEQGFPGPRGEPGPPGQMGPEGPGGQQGSPGTQGRAVQGPVGPPGVKGEKGDHGLPGLQGHPGHQGIPGRVGLQGPKGMRGLEGTAGLPGPPGPRGFQGMAGARGTSGERGPPGTVGPTGLPGPKGERGEKGEPQSLATLYQLVSQACESAIQTHVSKFDSFHENTRPPMPILEQKLEPGTEPLGSPGTRSKALVPGEWGRGGRHLEGR

SEQ ID NO: 3259 - protein, 250 aa, Homo Sapiens
ERPLGEMGSPPAAGFVTLGRLAKARGPRSSSAAFQLQMLQIVCSDTWADEDRCCELPASRDGETCPAFVSACSCSSETPGPPGPQGPPGPPGVKGEKGDHGLPGLQGHPGHQGIPGRVGLQGPKGMRGLEGTAGLPGPPGPRGFQGMAGARGTSGERGPPGTVGPTGLPGPKGERGEKGEPQSLATLYQLVSQACESAIQTHVSKFDSFHENTRPPMPILEQKLEPGTEPLGSPGTRSKALVPGEWGRGG

SEQ ID NO: 3260 - protein, 1284 aa, Homo Sapiens
MSSGDPAHLGLCLWLWLGATLGREQVQASGLLRLAVLPEDRLQMKWRESEGSGLGYLVQVKPMAGDSEQEVILTTKTPKATVGGLSPSKGYTLQIFELTGSGRFLLARREFVIEDLKSSSLDRSSQRPLGSGAPEPTPSHTGSPDPEQASEPQVAFTPSQDPRTPAGPQFRCLPPVPADMVFLVDGSWSIGHSHFQQVKDFLASVIAPFEIGPDKVQVGLTQYSGDAQTEWDLNSLSTKEQVLAAVRRLRYKGGNTFTGLALTHVLGQNLQPAAGLRPEAAKVVILVTDGKSQDDVHTAARVLKDLGVNVFAVGVKNADEAELRLLASPPRDITVHSVLDFLQLGALAGLLSRLICQRLQGGSPRQGPAAAPALDTLPAPTSLVLSQVTSSSIRLSWTPAPRHPLKYLIVWRASRGGTPREVVVEGPAASTELHNLASRTEYLVSVFPIYEGGVGEGLRGLVTTAPLPPPRALTLAAVTPRTVHLTWQPSAGATHYLVRCSPASPKGEEEEREVQVGRPEVLLDGLEPGRDYEVSVQSLRGPEGSEARGIRARTPTLAPPRHLGFSDVSHDAARVFWEGAPRPVRLVRVTYVSSEGGHSGQTEAPGNATSATLGPLSSSTTYTVRVTCLYPGGGSSTLTGRVTTKKAPSPSQLSMTELPGDAVQLAWVAAAPSGVLVYQITWTPLGEGKAHEISVPGNLGTAVLPGLGRHTEYDVTILAYYRDGARSDPVSLRYTPSTVSRSPPSNLALASETPDSLQVSWTPPLGRVLHYWLTYAPASGLGPEKSVSVPGARSHVTLPDLQAATKYRVLVSAIYAAGRSEAVSATGQTACPALRPDGSLPGFDLMVAFSLVEKAYASIRGVAMEPSAFGGTPTFTLFKDAQLTRRVSDVYPAPLPPEHTIVFLVRLLPETPREAFALWQMTAEDFQPLLGVLLDAGKKSLTYFHRDPRAALQEATFDPQEVRKIFFGSFHKVHVAVGRSKVRLYVDCRKVAERPLGEMGSPPAAGFVTLGRLAKARGPRSSSAAFQLQMLQIVCSDTWADEDRCCELPASRDGETCPAFVSACSCSSETPGPPGPQGPPGLPGRNGTPGEQGFPGPRGPPGVKGEKGDHGLPGLQGHPGHQGIPGRVGLQGPKGMRGLEGTAGLPGPPGPRGFQGMAGARGTSGERGPPGTVGPTGLPGPKGERGEKGEPQSLATLYQLVSQASHVSKFDSFHENTRPPMPILEQKLEPGTEPLGSPGTRSKALVPGEWGRGGRHLEGRGEPGAVGQMGSPGQQGASTQGLWE

SEQ ID NO: 3261 - protein, 1297 aa, Homo Sapiens
MSSGDPAHLGLCLWLWLGATLGREQVQASGLLRLAVLPEDRLQMKWRESEGSGLGYLVQVKPMAGDSEQEVILTTKTPKATVGGLSPSKGYTLQIFELTGSGRFLLARREFVIEDLKSSSLDRSSQRPLGSGAPEPTPSHTGSPDPEQASEPQVAFTPSQDPRTPGGSEWRETGPQFRCLPPVPADMVFLVDGSWSIGHSHFQQVKDFLASVIAPFEIGPDKVQVGLTQYSGDAQTEWDLNSLSTKEQVLAAVRRLRYKGGNTFTGLALTHVLGQNLQPAAGLRPEAAKVVILVTDGKSQDDVHTAARVLKDLGVNVFAVGVKNADEAELRLLASPPRDITVHSVLDFLQLGALAGLLSRLICQRLQGGSPRQGPAAAPALDTLPAPTSLVLSQVTSSSIRLSWTPAPRHPLKYLIVWRASRGGTPREVVVEGPAASTELHNLASRTEYLVSVFPIYEGGVGEGLRGLVTTAPLPPPRALTLAAVTPRTVHLTWQPSAGATHYLVRCSPASPKGEEEEREVQVGRPEVLLDGLEPGRDYEVSVQSLRGPEGSEARGIRARTPTLAPPRHLGFSDVSHDAARVFWEGAPRPVRLVRVTYVSSEGGHSGQTEAPGNATSATLGPLSSSTTYTVRVTCLYPGGGSSTLTGRVTTKKAPSPSQLSMTELPGDAVQLAWVAAAPSGVLVYQITWTPLGEGKAHEISVPGNLGTAVLPGLGRHTEYDVTILAYYRDGARSDPVSLRYTPSTVSRSPPSNLALASETPDSLQVSWTPPLGRVLHYWLTYAPASGLGPEKSVSVPGARSHVTLPDLQAATKYRVLVSAIYAAGRSEAVSATGQTACPALRPDGSLPGFDLMVAFSLVEKAYASIRGVAMEPSAFGGTPTFTLFKDAQLTRRVSDVYPAPLPPEHTIVFLVRLLPETPREAFALWQMTAEDFQPLLGVLLDAGKKSLTYFHRDPRAALQEATFDPQEVRKIFFGSFHKVHVAVGRSKVRLYVDCRKVAERPLGEMGSPPAAGFVTLGRLAKARGPRSSSAAFQLQMLQIVCSDTWADEDRCCELPASRDGETCPAFVSACSCSSETPGPPGPQGPPGLPGRNGTPGEQGFPGPRGPPGVKGEKGDHGLPGLQGHPGHQGIPGRVGLQGPKGMRGLEGTAGLPGPPGPRGFQGMAGARGTSGERGPPGTVGPTGLPGPKGERGEKGEPQSLATLYQLVSQACESAIQTHVSKFDSFHENTRPPMPILEQKLEPGTEPLGSPGTRSKALVPGEWGRGGRHLEGRGEPGAVGQMGSPGQQGASTQGLWE

SEQ ID NO: 3262 - protein, 79 aa, Homo Sapiens
AKGDKGSPGFYGKKGAKGEKGNAGFPGLPGPAGEPGRHGKDGLMGSPGFKGEAGSPGAPGQDGTRGEPTCAYEFSHVKE

SEQ ID NO: 3263 - protein, 136 aa, Homo Sapiens
MAHYITFLCMVLVLLLQNSVLAEDGEVRSSCRTAPTDLVFILDGSYSVGPENFEIVKKWLVNITKNFDIGPKFIQVGVVQYSDYPVLEIPLGSYDSGEHLTAAVESILYLGGNTKTGKAIQFALDYLFAKSSRFLT

SEQ ID NO: 3264 - protein, 957 aa, Homo Sapiens
MAHYITFLCMVLVLLLQNSVLAEDGEVRSSCRTAPTDLVFILDGSYSVGPENFEIVKKWLVNITKNFDIGPKFIQVGVVQYSDYPVLEIPLGSYDSGEHLTAAVESILYLGGNTKTGKAIQFALDYLFAKSSRFLTKIAVVLTDGKSQDDVKDAAQAARDSKITLFAIGVGSETEDAELRAIANKPSSTYVFYVEDYIAISKIREVMKQKLCEESVCPTRIPVAARDERGFDILLGLDVNKKVKKRIQLSPKKIKGYEVTSKVDLSELTSNVFPEGLPPSYVFVSTQRFKVKKIWDLWRILTIDGRPQIAVTLNGVDKILLFTTTSVINGSQVVTFANPQVKTLFDEGWHQIRLLVTEQDVTLYIDDQQIENKPLHPVLGILINGQTQIGKYSGKEETVQFDVQKLRIYCDPEQNNRETACEIPGFNGECLNGPSDVGSTPAPCICPPGKPGLQGPKGDPGLPGNPGYPGQPGQDGKPGYQGIAGTPGVPGSPGIQGARGLPGYKGEPGRDGDKGDRGLPGFPGLHGMPGSKGEMGAKGDKGSPGFYGKKGAKGEKGNAGFPGLPGPAGEPGRHGKDGLMGSPGFKGEAGSPGAPGQDGTRGEPGIPGFPGNRGLMGQKGEIGPPGQQGKKGAPGMPGLMGSNGSPGQPGTPGSKGSKGEPGIQGMPGASGLKGEPGATGSPGEPGYMGLPGIQGKKGDKGNQGEKGIQGQKGENGRQGIPGQQGIQGHHGAKGERGEKGEPGVRGAIGSKGESGVDGLMGPAGPKGQPGDPGPQGPPGLDGKPGREFSEQFIRQVCTDVIRAQLPVLLQSGRIRNCDHCLSQHGSPGIPGPPGPIGPEGPRGLPGLPGRDGVPGLVGVPGRPGVRGLKGLPGRNGEKGSQGFGYPGEQGPPGPPGPEGPPGISKEGPPGDPGLPGKDGDHGKPGIQGQPGPPGICDPSLCFSVIARRDPFRKGPNY

SEQ ID NO: 3265 - protein, 954 aa, Homo Sapiens
MAHYITFLCMVLVLLLQNSVLAEDGEVRSSCRTAPTDLVFILDGSYSVGPENFEIVKKWLVNITKNFDIGPKFIQVGVVQYSDYPVLEIPLGSYDSGEHLTAAVESILYLGGNTKTGKAIQFALDYLFAKSSRFLTKIAVVLTDGKSQDDVKDAAQAARDSKITLFAIGVGSETEDAELRAIANKPSSTYVFYVEDYIAISKIREVMKQKLCEESVCPTRIPVAARDERGFDILLGLDVNKKVKKRIQLSPKKIKGYEVTSKVDLSELTSNVFPEGLPPSYVFVSTQRFKVKKIWDLWRILTIDGRPQIAVTLNGVDKILLFTTTSVINGSQVVTFANPQVKTLFDEGWHQIRLLVTEQDVTLYIDDQQIENKPLHPVLGILINGQTQIGKYSGKEETVQFDVQKLRIYCDPEQNNRETACEIPGFCLNGPSDVGSTPAPCICPPGKPGLQGPKGDPGLPGNPGYPGQPGQDGKPGYQGIAGTPGVPGSPGIQGARGLPGYKGEPGRDGDKGDRGLPGFPGLHGMPGSKGEMGAKGDKGSPGFYGKKGAKGEKGNAGFPGLPGPAGEPGRHGKDGLMGSPGFKGEAGSPGAPGQDGTRGEPGIPGFPGNRGLMGQKGEIGPPGQQGKKGAPGMPGLMGSNGSPGQPGTPGSKGSKGEPGIQGMPGASGLKGEPGATGSPGEPGYMGLPGIQGKKGDKGNQGEKGIQGQKGENGRQGIPGQQGIQGHHGAKGERGEKGEPGVRGAIGSKGESGVDGLMGPAGPKGQPGDPGPQGPPGLDGKPGREFSEQFIRQVCTDVIRAQLPVLLQSGRIRNCDHCLSQHGSPGIPGPPGPIGPEGPRGLPGLPGRDGVPGLVGVPGRPGVRGLKGLPGRNGEKGSQGFGYPGEQGPPGPPGPEGPPGISKEGPPGDPGLPGKDGDHGKPGIQGQPGPPGICDPSLCFSVIARRDPFRKGPNY

SEQ ID NO: 3266 - protein, 956 aa, Homo Sapiens [sequence omitted]

SEQ ID NO: 3267 - protein, 125 aa, Homo Sapiens
  misc_feature (1)..(1): Xaa can be any naturally occurring amino acid
XRETACEIPGFNGECLNGPSDVGSTPAPCICPPGKPGLQGPKGYQGIAGTPGVPGSPGIQGARGLPGYKGEPGRDGDKGDRGLPGFPGLHGMPGSKGEMGAKGDKGSPGFYGKKGSIDHTTKYSY

SEQ ID NO: 3268 - protein, 65 aa, Homo Sapiens
GEPGELGEPGLPGEVGMRGPQGPPGLPGPPGRVGAPVSEGTCLGRGSTPSPGIKNQVLASSSTCI

SEQ ID NO: 3269 - protein, 1626 aa, Homo Sapiens
MAGLRGNAVAGLLWMLLLWSGGGGCQAQRAGCKSVHYDLVFLLDTSSSVGKEDFEKVRQWVANLVDTFEVGPDRTRVGVVRYSDRPTTAFELGLFGSQEEVKAAARRLAYHGGNTNTGDALRYITARSFSPHAGGRPRDRAYKQVAILLTDGRSQDLVLDAAAAAHRAGIRIFAVGVGEALKEELEEIASEPKSAHVFHVSDFNAIDKIRGKLRRRLCENVLCPSVRVEGDRFKHTNGGTKEITGFDLMDLFSVKEILGKRENGAQSSYVRMGSFPVVQSTEDVFPQGLPDEYAFVTTFRFRKTSRKEDWYIWQVIDQYSIPQVSIRLDGENKAVEYNAVGAMKDAVRVVFRGSRVNDLFDRDWHKMALSIQAQNVSLHIDCALVQTLPIEERENIDIQGKTVIGKRLYDSVPIDFDLQRIVIYCDSRHAELETCCDIPSGPCQVTVVTEPPPPPPPQRPPTPGSEQIGFLKTINCSCPAGEKGEMGVAGPMGLPGPKGDIGAIGPVGAPGPKGEKGDVGIGPFGQGEKGEKGSLGLPGPPGRDGSKGMRGEPGELGEPGLPGEVGMRGPQGPPGLPGPPGRVGAPGLQGERGEKGTRGEKGERGLDGFPGKPGDTGQQGRPGPSGVAGPQGEKGDVGPAGPPGVPGSVVQQEGLKGEQGAPGPRGHQGAPGPPGARGPIGPEGRDGPPGLQGLRGKKGDMGPPGIPGLLGLQGPPGPPGVPGPPGPGGSPGLPGEIGFPGKPGPPGPTGPPGKDGPNGPPGPPGTKGEPGERGEDGLPGKPGLRGEIGEQGLAGRPGEKGEAGLPGAPGFPGVRGEKGDQGEKGELGLPGLKGDRGEKGEAGPAGPPGLPGTTSLFTPHPRMPGEQGPKGEKGDPGLPGEPGLQGRPGELGPQGPTGPPGAKGQEGAHGAPGAAGNPGAPGHVGAPGPSGPPGSVGAPGLRGTPGKDGERGEKGAAGEEGSPGPVGPRGDPGAPGLPGPPGKGKDGEPGLRGSPGLPGPLGTKAACGKVRGSENCALGGQCVKGDRGAPGIPGSPGSRGDPGIGVAGPPGPSGPPGDKGSPGSRGLPGFPGPQGPAGRDGAPGNPGERGPPGKPGLSSLLSPGDINLLAKDVCNDCPPGPPGLPGLPGFKGDKGVPGKPGREGTEGKKGEAGPPGLPGPPGIAGPQGSQGERGADGEVGQKGDQGHPGVPGFMGPPGNPGPPGADGIAGAAGPPGIQGSPGKEGPPGPQGPSGLPGIPGEEGKEGRDGKPGPPGEPGKAGEPGLPGPEGARGPPGFKGHTGDSGAPGPRGESGAMGLPGQEGLPGKDGDTGPTGPQGPQGPRGPPGKNGSPGSPGEPGPSGTPGQKGSKGENGSPGLPGFLGPRGPPGEPGEKGVPGKEGVPGKPGEPGFKGERGDPGIKGDKGPPGGKGQPGDPGIPGHKGHTGLMGPQGLPGENGPVGPPGPPGQPGFPGLRGESPSMETLRRLIQEELGKQLETRLAYLLAQMPPAYMKSSQGRPGPPGPPGKDGLPGRAGPMGEPGRPGQGGLEGPSGPIGPKGERGAKGDPGAPGVGLRGEMGPPGIPGQPGEPGYAKDGLPGIPGPQGETGPAGHPGLPGPPGPPGQCDPSQCAYFASLAARPGNVKGP

SEQ ID NO: 3270 - protein, 1319 aa, Homo Sapiens
MAGLRGNAVAGLLWMLLLWSGGGGCQAQRAGCKSVHYDLVFLLDTSSSVGKEDFEKVRQWVANLVDTFEVGPDRTRVGVVRYSDRPTTAFELGLFGSQEEVKAAARRLAYHGGNTNTGDALRYITARSFSPHAGGRPRDRAYKQVAILLTDGRSQDLVLDAAAAAHRAGIRIFAVGVGEALKEELEEIASEPKSAHVFHVSDFNAIDKIRGKLRRRLCENVLCPSVRVEGDRFKHTNGGTKEITGFDLMDLFSVKEILGKRENGAQSSYVRMGSFPVVQSTEDVFPQGLPDEYAFVTTFRFRKTSRKEDWYIWQVIDQYSIPQVSIRLDGENKAVEYNAVAGPQGEKGDVGPAGPPGVPGSVVQQEGLKGEQGAPGPRGHQGAPGPPGARGPIGPEGRDGPPGLQGLRGKKGDMGPPGIPGLLGLQGPPGPPGVPGPPGPGGSPGLPGEIGFPGKPGPPGPTGPPGKDGPNGPPGPPGTKGEPGERGEDGLPGKPGLRGEIGEQGLAGRPGEKGEAGLPGAPGFPGVRGEKGDQGEKGELGLPGLKGDRGEKGEAGPAGPPGLPGTTSLFTPHPRMPGEQGPKGEKGDPGLPGEPGLQGRPGELGPQGPTGPPGAKGQEGAHGAPGAAGNPGAPGHVGAPGPSGPPGSVGAPGLRGTPGKDGERGEKGAAGEEGSPGPVGPRGDPGAPGLPGPPGKGKDGEPGLRGSPGLPGPLGTKGDRGAPGIPGSPGSRGDPGIGVAGPPGPSGPPGDKGSPGSRGLPGFPGPQGPAGRDGAPGNPGERGPPGKPGLSSLLSPGDINLLAKDVCNDCPPGPPGLPGLPGFKGDKGVPGKPGREGTEGKKGEAGPPGLPGPPGIAGPQGSQGERGADGEVGQKGDQGHPGVPGFMGPPGNPGPPGADGIAGAAGPPGIQGSPGKEGPPGPQGPSGLPGIPGEEGKEGRDGKPGPPGEPGKAGEPGLPGPEGARGPPGFKGHTGDSGAPGPRGESGAMGLPGQEGLPGKDGDTGPTGPQGPQGPRGPPGKNGSPGSPGEPGPSGTPGQKGSKGENGSPGLPGFLGPRGPPGEPGEKGVPGKEGVPGKPGEPGFKGERGDPGIKGDKGPPGGKGQPGDPGIPGHKGHTGLMGPQGLPGENGPVGPPGPPGQPGFPGLRGESPSMETLRRLIQEELGKQLETRLAYLLAQMPPAYMKSSQGRPGPPGPPGKDGLPGRAGPMGEPGRPGQGGLEGPSGPIGPKGERGAKGDPGAPGVGLRGEMGPPGIPGQPGEPGYAKDGLPGIPGPQGETGPAGHPGLPGPPGPPGQCDPSQCAYFASLAARPGNVKGP

SEQ ID NO: 3271 - protein, 81 aa, Homo Sapiens
MHLRAHRTRRGKVSPTAKTKSLLHFIVLCVAGVVVHAQEQGIDILHQLGLGGKDVRHSSPATAVPSASTPLPQGVHLTESG

SEQ ID NO: 3272 - protein, 1714 aa, Homo Sapiens
MHLRAHRTRRGKVSPTAKTKSLLHFIVLCVAGVVVHAQEQGIDILHQLGLGGKDVRHSSPATAVPSASTPLPQGVHLTESGVIFKNDAYIETPFVKILPVNLGQPFTILTGLQSHRVNNAFLFSIRNKNRLQLGVQLLPKKLVVHIRGKQPAVFNYSVHDEQWHSFAITIRNQSVSMFVECGKKYFSTETIPEVQTFDSNSVFTLGSMNNNSIHFEGIVCQLDIIPSAEASADYCRYVKQQCRQADKYQPETSIPCTTLIPTKIPEHSPPPKLFAEKVLSEDTFTEGKSIPNIIKNDSETVYKRQEHQISRSQLSSLQSGNVSAVDLTNHGIQAKEMITEEDTQTNFSLSVTTHRISEAKMNTKEKFSSLLNMSDNITQHDDRVTGLSLFKKMPSILPQIKQDTITNLKKAITANLHTNELMEMQPILNTSLHRVTNEPSVDNHLDLRKEGEFYPDATYPIENSYETELYDYYYYEDLNTMLEMEYLRGPKGDTGPPGPPGPAGIPGPSGKRGPRGIPGPHGNPGLPGLPGPKGPKGDPGFSPGQPVPGEKGDQGLSGLMGPPGMQGDKGLKGHPGLPGLPGEQGIPGFAGNIGSPGYPGRQGLAGPEGNPGPKGAQGFIGSPGEAGQLGPEGERGIPGIRGKKGFKGRQGFPGDFGDRGPAGLDGSPGLVGGTGPPGFPGLRGSVGPVGPIGPAGIPGPMGLSGNKGLPGIKGDKGEQGTAGELGEPGYPGDKGAVGLPGPPGMRGKSGPSGQTGDPGLQGPSGPPGPEGFPGDIGIPGQNGPEGPKGLLGNRGPPGPPGLKGTQGEEGPIGAFGELGPRGKPGQKGYAGEPGPEGLKGEVGDQGNIGKIGETGPVGLPGEVGMTGSIGEKGERGSPGPLGPQGEKGVMGYPGPPGVPGPIGPLGLPGHVGARGPPGSQGPKGQRGSRGPDGLLGEQGIQGAKGEKGDQGKRGPHGLIGKTGNPGERGFQGKPGLQGLPGSTGDRGLPGEPGLRGLQGDVGPPGEMGMEGPPGTEGESGLQGEPGAKGDVGTAGSVGGTGEPGLRGEPGAPGEEGLQGKDGLKGVPGGRGLPGEDGEKGEMGLPGIIGPLGRSGQTGLPGPEGIVGIPGQRGRPGKKGDKGQIGPTGEVGSRGPPGKIGKSGPKGARGTRGAVGHLGLMGPDGEPGIPGYRGHQGQPGPSGLPGPKGEKGYPGEDSTVLGPPGPRGEPGPVGDQGERGEPGAEGYKGHVGVPGLRGATGQQGPPGEPGDQGEQGLKGERGSEGNKGKKGAPGPSGKPGIPGLQGLLGPKGIQGYHGADGISGNPGKIGPPGKQGLPGIRGGPGRTGLAGAPGPPGVKGSSGLPGSPGIQGPKGEQGLPGQPGIQGKRGHRGAQGDQGPCGDPGLKGQPGEYGVQGLTGFQGFPGPKGPEGDAGIVGISGPKGPIGHRGNTGPLGREGIIGPTGRTGPRGEKGFRGETGPQGPRGQPGPPGPPGAPGPRKQMDINAAIQALIESNTALQMESYQNTEVTLIDHSEEIFKTLNYLSNLLHSIKNPLGTRDNPARICKDLLNCEQKVSDGKYWIDPNLGCPSDAIEVFCNFSAGGQTCLPPVSVTKLEFGVGKVQMNFLHLLSSEATHIITIHCLNTPRWTSTQTSGPGLPIGFKGWNGQIFKVNTLLEPKVLSDDCKIQDGSWHKATFLFHTQEPNQLPVIEVQKLPHLKTERKYYIDSSSVCFL

SEQ ID NO: 3273 - protein, 890 aa, Homo Sapiens
MHLRAHRTRRGKVSPTAKTKSLLHFIVLCVAGVVVHAQEQGIDILHQLGLGGKDVRHSSPATAVPSASTPLPQGVHLTESGVIFKNDAYIETPFVKILPVNLGQPFTILTGLQSHRVNNAFLFSIRNKNRLQLGVQLLPKKLVVHIRGKQPAVFNYSVHDEQWHSFAITIRNQSVSMFVECGKKYFSTETIPEVQTFDSNSVFTLGSMNNNSIHFEGIVCQLDIIPSAEASADYCRYVKQQCRQADKYQPETSIPCTTLIPTKIPEHSPPPKLFAEKVLSEDTFTEGKSIPNIIKNDSETVYKRQEHQISRSQLSSLQSGNVSAVDLTNHGIQAKEMITEEDTQTNFSLSVTTHRISEAKMNTKEKFSSLLNMSDNITQHDDRVTGLSLFKKMPSILPQIKQDTITNLKKAITANLHTNELMEMQPILNTSLHRVTNEPSVDNHLDLRKEGEFYPDATYPIENSYETELYDYYYYEDLNTMLEMEYLRGPKGDTGPPGPPGPAGIPGPSGKRGPRGIPGPHGNPGLPGLPGPKGPKGDPGFSPGQPVPGEKGDQGLSGLMGPPGMQGDKGLKGHPGLPGLPGEQGIPGFAGNIGSPGYPGRQGLAGPEGNPGPKGAQGFIGSPGEAGQLGPEGERGIPGIRGKKGFKGRQGFPGDFGDRGPAGLDGSPGLVGGTGPPGFPGLRGSVGPVGPIGPAGIPGPMGLSGNKGLPGIKGDKGEQGTAGELGEPGYPGDKGAVGLPGPPGMRGKSGPSGQTGDPGLQGPSGPPGPEGFPGDIGIPGQNGPEGPKGLLGNRGPPGPPGLKGTQGEEGPIGAFGELGPRGKPGQKGYAGEPGPEGLKGEVGDQGNIGKIGETMESCSVTQAGAQWHDLGSLHPLPPGFKRFSCLSLPG

SEQ ID NO: 3274 - protein, 166 aa, Homo Sapiens
  misc_feature (1)..(1): Xaa can be any naturally occurring amino acid
XIKNPLGTRDNPARICKDLLNCEQKVSDGKYWIDPNLGCPSDAIEVFCNFSAGGQTCLPPVSVTKAFTIITPEIEEGRILPFLGNHEPLIKSSMIVLLPKYPHHHPHSSGSWHRIIIEGKKMGLCELCRGNRSSGEADSSCFHDQITSLISLIHKLNPRKTREVLG

SEQ ID NO: 3275 - protein, 439 aa, Homo Sapiens
MKLALLLPWACCCLCGSALATGFLYPFSAAALQQHGYPEPGAGSPGSGYASRRHWCHHTVTRTVSCQVQNGSETVVQRVYQSCRWPGPCANLVRTLIRPTYRVSYRTVTVLEWRCCPGFTGSNCDEECMNCTRLSDMSERLTTLEAKVLLLEAAERPSSPDNDLPAPESTPPTWNEDFLPDAIPLAHPVPRQRRPTGPAGPPGQTGPPGPAGPPGSKGDRGQTGEKGPAGPPGLLGPPGPRGLPGEMGRPGPPGPPGPAGNPGPSPNSPQGALYSLQPPTDKDNGDSRLASAIVDTVLAGVPGPRGPPGPPGPPGPRGPPGPPGTPGSQGLAGERGTVGPSGEPGVKGEEGEKAATAEGEGVQQLREALKILAERVLILEHMIGIHDPLASPEGGSGQDAALRANLKMKRGGAQPDGVLAALLGPDPGQKSVDQASSRK

SEQ ID NO: 3276 - protein, 441 aa, Homo Sapiens
MKLALLLPWACCCLCGSALATGFLYPFSAAALQQHGYPEPGAGSPGSGYASRRHWCHHTVTRTVSCQVQNGSETVVQRVYQSCRWPGPCANLVSYRTLIRPTYRVSYRTVTVLEWRCCPGFTGSNCDEECMNCTRLSDMSERLTTLEAKVLLLEAAERPSSPDNDLPAPESTPPTWNEDFLPDAIPLAHPVPRQRRPTGPAGPPGQTGPPGPAGPPGSKGDRGQTGEKGPAGPPGLLGPPGPRGLPGEMGRPGPPGPPGPAGNPGPSPNSPQGALYSLQPPTDKDNGDSRLASAIVDTVLAGVPGPRGPPGPPGPPGPRGPPGPPGTPGSQGLAGERGTVGPSGEPGVKGEEGEKAATAEGEGVQQLREALKILAERVLILEHMIGIHDPLASPEGGSGQDAALRANLKMKRGGAQPDGVLAALLGPDPGQKSVDQASSRK

SEQ ID NO: 3277 - protein, 714 aa, Homo Sapiens
LSWTKAGSPAPPGVIPFQSGFIFTQRARLQAPTGTVIPAALGTELALVLSLCSHRVNHAFLFAVRSQKRKLQLGLQFLPGKTVVHLGSRRSVAFDLDMHDGRWHHLALELRGRTVTLVTACGQRRVPVLLPFHRDPALDPGGSFLFGKMNPHAVQFEGALCQFSIYPVTQVAHNYCTHLRKQCGQADTYQSPLGPLFSQDSGRPFTFQSDLALLGLENLTTATPALGSLPAGRGPRGTVAPATPTKPQRTSPTNPHQHMAVGGPAQTPLLPAKLSASNALDPMLPASVGGSTRTPRPAAAQPSQKITATKIPKSLPTKPSAPSTSIVPIKSPHPTQKTAPSSFTKSALPTQKQVPPTSRPVPARVSRPAEKPIQRNPGMPRPPPPSTRPLPPTTSSSKKPIPTLARTEAKITSHASKPASARTSTHKPPPFTALSSSPAPTPGSTRSTRPPATMVPPTSGTSTPRTAPAVPTPGSAPTGSKKPIGSEASKKAGPKSSPRKPVPLRPGKAARDVPLSDLTTRPSPRQPQPSQQTTPALVLAPAQFLSSSPRPTSSGYSIFHLAGSTPFPLLMGPPGPKGDCGLPGPPGLPGLPGIPGARGPRGPPGPYGNPGLPGPPGAKGDMGLPGLSGNPGPPGRKGLPGPVGDPGPKGSRGYIGLPGLFGLPGSDGERGLPGVPGKRGKMGMPVLLPQSSEARGGNSMPSEGALAGRHGSHL

SEQ ID NO: 3278 - protein, 1860 aa, Homo Sapiens
MGAGSARGARGTAAAAAARGGGFLFSWILVSFACHLASTQGAPEDVDILQRLGLSWTKAGSPAPPGVIPFQSGFIFTQRARLQAPTGTVIPAALGTELALVLSLCSHRVNHAFLFAVRSQKRKLQLGLQFLPGKTVVHLGSRRSVAFDLDMHDGRWHHLALELRGRTVTLVTACGQRRVPVLLPFHRDPALDPGGSFLFGKMNPHAVQFEGALCQFSIYPVTQVAHNYCTHLRKQCGQADTYQSPLGPLFSQDSGRPFTFQSDLALLGLENLTTATPALGSLPAGRGPRGTVAPATPTKPQRTSPTNPHQHMAVGGPAQTPLLPAKLSASNALDPMLPASVGGSTRTPRPAAAQPSQKITATKIPKSLPTKPSAPSTSIVPIKSPHPTQKTAPSSFTKSALPTQKQVPPTSRPVPARVSRPAEKPIQRNPGMPRPPPPSTRPLPPTTSSSKKPIPTLARTEAKITSHASKPASARTSTHKPPPFTALSSSPAPTPGSTRSTRPPATMVPPTSGTSTPRTAPAVPTPGSAPTGSKKPIGSEASKKAGPKSSPRKPVPLRPGKAARDVPLSDLTTRPSPRQPQPSQQTTPALVLAPAQFLSSSPRPTSSGYSIFHLAGSTPFPLLMGPPGPKGDCGLPGPPGLPGLPGIPGARGPRGPPGPYGNPGLPGPPGAKGQKGDPGLSPGKAHDGAKGDMGLPGLSGNPGPPGRKGHKGYPGPAGHPGEQGQPGPEGSPGAKGYPGRQGLPGPVGDPGPKGSRGYIGLPGLFGLPGSDGERGLPGVPGKRGKMGMPGFPGVFGERGPPGLDGNPGELGLPGPPGVPGLIGDLGVLGPIGYPGPKGMKGLMGSVGEPGLKGDKGEQGVPGVSGDPGFQGDKGSQGLPGFPGARGKPGPLGKVGDKGSIGFPGPPGPEGFPGDIGPPGDNGPEGMKGKPGARGLPGPRGQLGPEGDEGPMGPPGAPGLEGQPGRKGFPGRPGLDGVKGEPGDPGRPGPVGEQGFMGFIGLVGEPGIVGEKGDRGMMGPPGVPGPKGSMGHPGMPGGMGTPGEPGPQGPPGSRGPPGMRGAKGRRGPRGPDGPAGEQGSRGLKGPPGPQGRPGRPGQQGVAGERGHLGSRGFPGIPGPSGPPGTKGLPGEPGPQGPQGPIGPPGEMGPKGPPGAVGEPGLPGEAGMKGDLGPLGTPGEQGLIGQRGEPGLEGDSGPMGPDGLKGDRGDPGPDGEHGEKGQEGLMGEDGPPGPPGVTGVRGPEGKSGKQGEKGRTGAKGAKGYQGQLGEMGVPGDPGPPGTPGPKGSRGSLGPTGAPGRMGAQGEPGLAGYDGHKGIVGPLGPPGPKGEKGEQGEDGKAEGPPGPPGDRGPVGDRGDRGEPGDPGYPGQEGVQGLRGKPGQQGQPGHPGPRGWPGPKGSKGAEGPKGKQGKAGAPGRRGVQGLQGLPGPRGVVGRQGLEGIAGPDGLPGRDGQAGQQGEQGDDGDPGPMGPAGKRGNPGVAGLPGAQGPPGFKGESGLPGQLGPPGKRGTEGRTGLPGNQGEPGSKGQPGDSGEMGFPGMAGLFGPKGPPGDIGFKGIQGPRGPPGLMGKEGIVGPLGILGPSGLPGPKGDKGSRGDWGLQGPRGPPGPRGRPGPPGPPGGPIQLQQDDLGAAFQTWMDTSGALRPESYSYPDRLVLDQGGEIFKTLHYLSNLIQSIKTPLGTKENPARVCRDLMDCEQKMVDGTYWVDPNLGCSSDTIEVSCNFTHGGQTCLKPITASKVEFAISRVQMNFLHLLSSEVTQHITIHCLNMTVWQEGTGQTPAKQAVRFRAWNGQIFEAGGQFRPEVSMDGCKVQDGRWHQTLFTFRTQDPQQLPIISVDNLPPASSGKQYRLEVGPACFL

SEQ ID NO: 3279 - protein, 485 aa, Homo Sapiens
  misc_feature (1)..(1): Xaa can be any naturally occurring amino acid
XAAQPSQKITATKIPKSLPTKPSAPSTSIVPIKSPHPTQKTAPSSFTKSALPTQKQVPPTSRPVPARVSRPAEKPIQRNPGMPRPPPPSTRPLPPTTSSSKKPIPTLARTEAKITSHASKPASARTSTHKPPPFTALSSSPAPTPGSTRSTRPPATMVPPTSGTSTPRTAPAVPTPGSAPTGSKKPIGSEASKKAGPKSSPRKPVPLRPGKAARDVPLSDLTTRPSPRQPQPSQQTTPALVLAPAQFLSSSPRPTSSGYSIFHLAGSTPFPLLMGPPGPKGDCGLPGPPGLPGLPGIPGARGPRGPPGPYGNPGLPGPPGAKGDMGLPGLSGNPGPPGRKGHKGYPGPAGHPGEQGQPGPEGSPGAKGYPGRQGLPGPVGDPGPKGSRGYIGLPGLFGLPGSDGERGLPGVPGKRGKMGMPGFPGVFGERGPPGLDGNPGELGLPGPPGVPGLIGDLGVLGPIGYPGPKGMKGLMGSVGEPGLKG

SEQ ID NO: 3280 - protein, 80 aa, Homo Sapiens
ATTSSEATTTPRPLLSTPVDGAEDPRCLEALKPGNCGEYVVRWYYDKQVNSCARFWFSGCNGSGNRFNSEKECQETCIQG

SEQ ID NO: 3281 - protein, 142 aa, Homo Sapiens
FDSYLVQIFGSSSPQPGFGMSGEELSESTPEPQKEISESLSVTRDQDEDDKAPEPTWADDLPATTSSEATTTPRPLLSTPVDGAEDPRCLEALKPGNCGEYVVRWYYDKQVNSCARFWFSGCNGSGNRFNSEKECQETCIQG

SEQ ID NO: 3282 - protein, 130 aa, Homo Sapiens
GMPGTSIPGPPGPKGDRGGPGIPGFKGEPGLSIRGPKGVQGPRGPVGAPGLKGDGYPGVPGPRGLPGPPGPMGLRGVGDTGAKTLNTSHGLEDPSCPDCSFCHFSLAADIQPKWPALLQLIPASGTRQDG

SEQ ID NO: 3283 - protein, 67 aa, Homo Sapiens
KGNPGNAQKGEAGERGPGGIPGYKGDKQYSREDREVEHNNEKYVACLLPSPALLQQSSLTHHGTCSH

SEQ ID NO: 3284 - protein, 1125 aa, Homo Sapiens
MWNRYFVFYLLLLSAFTSQTVSGQRKKGPKSNLLARKSDVQGSICFIDIVFIVDSSESSKIALFDKQKDFVDSLSDKIFQLTPGRSLEYDIKLAALQFSSSVQIDPPFSSWKDLQTFKQKVKSMNLIGQGTFSYYAISNATRLLKREGRKDGVKVVLLMTDGIDHPKNPDVQSISEDARISGISFITIALSTVVNEAKLRLISGDSSSEPTLLLSDPTLVDKIQDRLDILFEKKCERKICECEKGDPGDPGPPGTHGNPGIKGERGPKGNPGNAQKGEAGERGPGGIPGYKGDKGERGECGKPGIKGDKGSPGPYGPKGPRGIQGITGPPGDPGPKGFQGNKGEPGPPGPYGSPGAPGIGQQGIKGERGQEGRPGAPGPIGVGEPGQPGPRGPEGVPGERGLPGEGFPGPKGEKGSEGPTGPQGLQGLSIKGEKGDIGPVGPQGPMGIPGIGSQGEQGIQGPIGPPGPQGPAGQGLPGSKGEVGQMGPTGPRGPVGIGVQGPKGEPGSIGLPGQPGVPGEDGAAGKKGEAGLPGARGPEGPPGKGQPGPKGDEGKKGSKGNQGQRGLPGPEGPKGEPGIMGPFGMPGTSIPGPPGPKGDRGGPGIPGFKGEPGLSIRGPKGVQGPRGPVGAPGLKGDGYPGVPGPRGLPGPPGPMGLRGVGDTGAKGEPGVRGPPGPSGPRGVGTQGPKGDTGQKGLPGPPGPPGYGSQGIKGEQGPQGFPGPKGTMGHGLPGQKGEHGERGDVGKKGDKGEIGEPGSPGKQGLQGPKGDLGLTKEEIIKLITEICGCGPKCKETPLELVFVIDSSESVGPENFQIIKNFVKTMADRVALDLATARIGIINYSHKVEKVANLKQFSSKDDFKLAVDNMQYLGEGTYTATALQAANDMFEDARPGVKKVALVITDGQTDSRDKEKLTEVVKNASDTNVEIFVIGVVKKNDPNFEIFHKEMNLIATDPEHVYQFDDFFTLQDTLKQKLFQKICEDFDSYLVQIFGSSSPQPGFGMSGEELSESTPEPQKEISESLSVTRDQDEDDKAPEPTWADDLPATTSSEATTTPRPLLSTPVDGAEDPRCLEALKPGNCGEYVVRWYYDKQVNSCARFWFSGCNGSGNRFNSEKECQETCIQG

SEQ ID NO: 3285 - protein, 1487 aa, Homo Sapiens
MIRLGAPQTLVLLTLLVAAVLRCQGQDVQEAGSCVQDGQRYNDKDVWKPEPCRICVCDTGTVLCDDIICEDVKDCLSPEIPFGECCPICPTDLATASGQPGPKGQKGEPGDIKDIVGPKGPPGPQGPAGEQGPRGDRGDKGEKGAPGPRGRDGEPGTPGNPGPPGPPGPPGPPGLGGNFAAQMAGGFDEKAGGAQLGVMQGPMGPMGPRGPPGPAGAPGPQGFQGNPGEPGEPGVSGPMGPRGPPGPPGKPGDDGEAGKPGKAGERGPPGPQGARGFPGTPGLPGVKGHRGYPGLDGAKGEAGAPGVKGESGSPGENGSPGPMGPRGLPGERGRTGPAGAAGARGNDGQPGPAGPPGPVGPAGGPGFPGAPGAKGEAGPTGARGPEGAQGPRGEPGTPGSPGPAGASGNPGTDGIPGAKGSAGAPGIAGAPGFPGPRGPPGPQGATGPLGPKGQTGEPGIAGFKGEQGPKGEPGPAGPQGAPGPAGEEGKRGARGEPGGVGPIGPPGERGAPGNRGFPGQDGLAGPKGAPGERGPSGLAGPKGANGDPGRPGEPGLPGARGLTGRPGDAGPQGKVGPSGAPGEDGRPGPPGPQGARGQPGVMGFPGPKGANGEPGKAGEKGLPGAPGLRGLPGKDGETGAAGPPGPAGPAGERGEQGAPGPSGFQGLPGPPGPPGEGGKPGDQGVPGEAGAPGLVGPRGERGFPGERGSPGAQGLQGPRGLPGTPGTDGPKGASGPAGPPGAQGPPGLQGMPGERGAAGIAGPKGDRGDVGEKGPEGAPGKDGGRGLTGPIGPPGPAGANGEKGEVGPPGPAGSAGARGAPGERGETGPPGPAGFAGPPGADGQPGAKGEQGEAGQKGDAGAPGPQGPSGAPGPQGPTGVTGPKGARGAQGPPGATGFPGAAGRVGPPGSNGNPGPPGPPGPSGKDGPKGARGDSGPPGRAGEPGLQGPAGPPGEKGEPGDDGPSGAEGPPGPQGLAGQRGIVGLPGQRGERGFPGLPGPSGEPGKQGAPGASGDRGPPGPVGPPGLTGPAGEPGREGSPGADGPPGRDGAAGVKGDRGETGAVGAPGAPGPPGSPGPAGPTGKQGDRGEAGAQGPMGPSGPAGARGIQGPQGPRGDKGEAGEPGERGLKGHRGFTGLQGLPGPPGPSGDQGASGPAGPSGPRGPPGPVGPSGKDGANGIPGPIGPPGPRGRSGETGPAGPPGNPGPPGPPGPPGPGIDMSAFAGLGPREKGPDPLQYMRADQAAGGLRQHDAEVDATLKSLNNQIESIRSPEGSRKNPARTCRDLKLCHPEWKSGDYWIDPNQGCTLDAMKVFCNMETGETCVYPNPANVPKKNWWSSKSKEKKHIWFGETINGGFHFSYGDDNLAPNTANVQMTFLRLLSTEGSQNITYHCKNSIAYLDEAAGNLKKALLIQGSNDVEIRAEGNSRFTYTALKDGCTKHTGKWGKTVIEYRSQKTSRLPIIDIAPMDIGGPEQEFGVDIGPVCFL

SEQ ID NO: 3286 - protein, 1418 aa, Homo Sapiens
MIRLGAPQTLVLLTLLVAAVLRCQGQDVRQPGPKGQKGEPGDIKDIVGPKGPPGPQGPAGEQGPRGDRGDKGEKGAPGPRGRDGEPGTPGNPGPPGPPGPPGPPGLGGNFAAQMAGGFDEKAGGAQLGVMQGPMGPMGPRGPPGPAGAPGPQGFQGNPGEPGEPGVSGPMGPRGPPGPPGKPGDDGEAGKPGKAGERGPPGPQGARGFPGTPGLPGVKGHRGYPGLDGAKGEAGAPGVKGESGSPGENGSPGPMGPRGLPGERGRTGPAGAAGARGNDGQPGPAGPPGPVGPAGGPGFPGAPGAKGEAGPTGARGPEGAQGPRGEPGTPGSPGPAGASGNPGTDGIPGAKGSAGAPGIAGAPGFPGPRGPPGPQGATGPLGPKGQTGEPGIAGFKGEQGPKGEPGPAGPQGAPGPAGEEGKRGARGEPGGVGPIGPPGERGAPGNRGFPGQDGLAGPKGAPGERGPSGLAGPKGANGDPGRPGEPGLPGARGLTGRPGDAGPQGKVGPSGAPGEDGRPGPPGPQGARGQPGVMGFPGPKGANGEPGKAGEKGLPGAPGLRGLPGKDGETGAAGPPGPAGPAGERGEQGAPGPSGFQGLPGPPGPPGEGGKPGDQGVPGEAGAPGLVGPRGERGFPGERGSPGAQGLQGPRGLPGTPGTDGPKGASGPAGPPGAQGPPGLQGMPGERGAAGIAGPKGDRGDVGEKGPEGAPGKDGGRGLTGPIGPPGPAGANGEKGEVGPPGPAGSAGARGAPGERGETGPPGPAGFAGPPGADGQPGAKGEQGEAGQKGDAGAPGPQGPSGAPGPQGPTGVTGPKGARGAQGPPGATGFPGAAGRVGPPGSNGNPGPPGPPGPSGKDGPKGARGDSGPPGRAGEPGLQGPAGPPGEKGEPGDDGPSGAEGPPGPQGLAGQRGIVGLPGQRGERGFPGLPGPSGEPGKQGAPGASGDRGPPGPVGPPGLTGPAGEPGREGSPGADGPPGRDGAAGVKGDRGETGAVGAPGAPGPPGSPGPAGPTGKQGDRGEAGAQGPMGPSGPAGARGIQGPQGPRGDKGEAGEPGERGLKGHRGFTGLQGLPGPPGPSGDQGASGPAGPSGPRGPPGPVGPSGKDGANGIPGPIGPPGPRGRSGETGPAGPPGNPGPPGPPGPPGPGIDMSAFAGLGPREKGPDPLQYMRADQAAGGLRQHDAEVDATLKSLNNQIESIRSPEGSRKNPARTCRDLKLCHPEWKSGDYWIDPNQGCTLDAMKVFCNMETGETCVYPNPANVPKKNWWSSKSKEKKHIWFGETINGGFHFSYGDDNLAPNTANVQMTFLRLLSTEGSQNITYHCKNSIAYLDEAAGNLKKALLIQGSNDVEIRAEGNSRFTYTALKDGCTKHTGKWGKTVIEYRSQKTSRLPIIDIAPMDIGGPEQEFGVDIGPVCFL

SEQ ID NO: 3287 - protein, 1466 aa, Homo Sapiens
MMSFVQKGSWLLLALLHPTIILAQQEAVEGGCSHLGQSYADRDVWKPEPCQICVCDSGSVLCDDIICDDQELDCPNPEIPFGECCAVCPQPPTAPTRPPNGQGPQGPKGDPGPPGIPGRNGDPGIPGQPGSPGSPGPPGICESCPTGPQNYSPQYDSYDVKSGVAVGGLAGYPGPAGPPGPPGPPGTSGHPGSPGSPGYQGPPGEPGQAGPSGPPGPPGAIGPSGPAGKDGESGRPGRPGERGLPGPPGIKGPAGIPGFPGMKGHRGFDGRNGEKGETGAPGLKGENGLPGENGAPGPMGPRGAPGERGRPGLPGAAGARGNDGARGSDGQPGPPGPPGTAGFPGSPGAKGEVGPAGSPGSNGAPGQRGEPGPQGHAGAQGPPGPPGINGSPGGKGEMGPAGIPGAPGLMGARGPPGPAGANGAPGLRGGAGEPGKNGAKGEPGPRGERGEAGIPGVPGAKGEDGKDGSPGEPGANGLPGAAGERGAPGFRGPAGPNGIPGEKGPAGERGAPGPAGPRGAAGEPGRDGVPGGPGMRGMPGSPGGPGSDGKPGPPGSQGESGRPGPPGPSGPRGQPGVMGFPGPKGNDGAPGKNGERGGPGGPGPQGPPGKNGETGPQGPPGPTGPGGDKGDTGPPGPQGLQGLPGTGGPPGENGKPGEPGPKGDAGAPGAPGGKGDAGAPGERGPPGLAGAPGLRGGAGPPGPEGGKGAAGPPGPPGAAGTPGLQGMPGERGGLGSPGPKGDKGEPGGPGADGVPGKDGPRGPTGPIGPPGPAGQPGDKGEGGAPGLPGIAGPRGSPGERGETGPPGPAGFPGAPGQNGEPGGKGERGAPGEKGEGGPPGVAGPPGGSGPAGPPGPQGVKGERGSPGGPGAAGFPGARGLPGPPGSNGNPGPPGPSGSPGKDGPPGPAGNTGAPGSPGVSGPKGDAGQPGEKGSPGAQGPPGAPGPLGIAGITGARGLAGPPGMPGPRGSPGPQGVKGESGKPGANGLSGERGPPGPQGLPGLAGTAGEPGRDGNPGSDGLPGRDGSPGGKGDRGENGSPGAPGAPGHPGPPGPVGPAGKSGDRGESGPAGPAGAPGPAGSRGAPGPQGPRGDKGETGERGAAGIKGHRGFPGNPGAPGSPGPAGQQGAIGSPGPAGPRGPVGPSGPPGKDGTSGHPGPIGPPGPRGNRGERGSEGSPGHPGQPGPPGPPGAPGPCCGGVGAAAIAGIGGEKAGGFAPYYGDEPMDFKINTDEIMTSLKSVNGQIESLISPDGSRKNPARNCRDLKFCHPELKSGEYWVDPNQGCKLDAIKVFCNMETGETCISANPLNVPRKHWWTDSSAEKKHVWFGESMDGGFQFSYGNPELPEDVLDVHLAFLRLLSSRASQNITYHCKNSIAYMDQASGNVKKALKLMGSNEGEFKAEGNSKFTYTVLEDGCTKHTGEWSKTVFEYRTRKAVRLPIVDIAPYDIGGPDQEFGVDVGPVCFL

SEQ ID NO: 3288 - protein, 1163 aa, Homo Sapiens
MMSFVQKGSWLLLALLHPTIILAQQEAVEGGCSHLGQSYADRDVWKPEPCQICVCDSGSVLCDDIICDDQELDCPNPEIPFGECCAVCPQPPTAPTRPPNGQGPQGPKGDPGPPGIPGRNGDPGIPGQPGSPGSPGPPGICESCPTGPQNYSPQYDSYDVKSGVAVGGLAGYPGPAGPPGPPGPPGTSGHPGSPGSPGYQGPPGEPGQAGPSGPPGPPGAIGPSGPAGKDGESGRPGRPGERGLPGPPGIKGPAGIPGFPGMKGHRGFDGRNGEKGETGAPGLKGENGLPGENGAPGPMGPRGAPGERGRPGLPGAAGARGNDGARGSDGQPGPPGPPGTAGFPGSPGAKGEVGPAGSPGSNGAPGQRGEPGPQGHAGAQGPPGPPGINGSPGGKGEMGPAGIPGAPGLMGARGPPGPAGANGAPGLRGGAGEPGKNGAKGEPGPRGERGEAGIPGVPGAKGEDGKDGSPGEPGANGLPGAAGERGAPGFRGPAGPNGIPGEKGPAGERGAPGPAGPRGAAGEPGRDGVPGGPGMRGMPGSPGGPGSDGKPGPPGSQGESGRPGPPGPSGPRGQPGVMGFPGPKGNDGAPGKNGERGGPGGPGPQGPPGKNGETGPQGPPGPTGPGGDKGDTGPPGPQGLQGLPGTGGPPGENGKPGEPGPKGDAGAPGAPGGKGDAGAPGERGPPGLAGAPGLRGGAGPPGPEGGKGAAGPPGPPGAAGTPGLQGMPGERGGLGSPGPKGDKGEPGGPGADGVPGKDGPRGPTGPIGPPGPAGQPGDKGEGGAPGLPGIAGPRGSPGERGETGPPGPAGFPGAPGQNGEPGGKGERGAPGEKGEGGPPGVAGPPGKDGTSGHPGPIGPPGPRGNRGERGSEGSPGHPGQPGPPGPPGAPGPCCGGVGAAAIAGIGGEKAGGFAPYYGDEPMDFKINTDEIMTSLKSVNGQIESLISPDGSRKNPARNCRDLKFCHPELKSGEYWVDPNQGCKLDAIKVFCNMETGETCISANPLNVPRKHWWTDSSAEKKHVWFGESMDGGFQFSYGNPELPEDVLDVHLAFLRLLSSRASQNITYHCKNSIAYMDQASGNVKKALKLMGSNEGEFKAEGNSKFTYTVLEDGCTKHTGEWSKTVFEYRTRKAVRLPIVDIAPYDIGGPDQEFGVDVGPVCFL

SEQ ID NO: 3289 - protein, 90 aa, Homo Sapiens
  misc_feature (1)..(1): Xaa can be any naturally occurring amino acid
XRGAPGERGRPGLPGAAGARGNDGARGSDGQPGPPGPPGTAGFPGSPGAKGPPGINGSPGGKGEMGPAGIPGAPGLMGARGPPGPAGANG

SEQ ID NO: 3290 - protein, 1669 aa, Homo Sapiens
MGPRLSVWLLLLPAALLLHEEHSRAAAKGGCAGSGCGKCDCHGVKGQKGERGLPGLQGVIGFPGMQGPEGPQGPPGQKGDTGEPGLPGTKGTRGPPGASGYPGNPGLPGIPGQDGPPGPPGIPGCNGTKGERGPLGPPGLPGFAGNPGPPGLPGMKGDPGEILGHVPGMLLKGERGFPGIPGTPGPPGLPGLQGPVGPPGFTGPPGPPGPPGPPGEKGQMGLSFQGPKGDKGDQGVSGPPGVPGQAQVQEKGDFATKGEKGQKGEPGFQGMPGVGEKGEPGKPGPRGKPGKDGDKGEKGSPGFPGEPGYPGLIGRQGPQGEKGEAGPPGPPGIVIGTGPLGEKGERGYPGTPGPRGEPGPKGFPGLPGQPGPPGLPVPGQAGAPGFPGERGEKGDRGFPGTSLPGPSGRDGLPGPPGSPGPPGQPGYTNGIVECQPGPPGDQGPPGIPGQPGFIGEIGEKGQKGESCLICDIDGYRGPPGPQGPPGEIGFPGQPGAKGDRGLPGRDGVAGVPGPQGTPGLIGQPGAKGEPGEFYFDLRLKGDKGDPGFPGQPGMPGRAGSPGRDGHPGLPGPKGSPGSVGLKGERGPPGGVGFPGSRGDTGPPGPPGYGPAGPIGDKGQAGFPGGPGSPGLPGPKGEPGKIVPLPGPPGAEGLPGSPGFPGPQGDRGFPGTPGRPGLPGEKGAVGQPGIGFPGPPGPKGVDGLPGDMGPPGTPGRPGFNGLPGNPGVQGQKGEPGVGLPGLKGLPGLPGIPGTPGEKGSIGVPGVPGEHGAIGPPGLQGIRGEPGPPGLPGSVGSPGVPGIGPPGARGPPGGQGPPGLSGPPGIKGEKGFPGFPGLDMPGPKGDKGAQGLPGITGQSGLPGLPGQQGAPGIPGFPGSKGEMGVMGTPGQPGSPGPVGAPGLPGEKGDHGFPGSSGPRGDPGLKGDKGDVGLPGKPGSMDKVDMGSMKGQKGDQGEKGQIGPIGEKGSRGDPGTPGVPGKDGQAGQPGQPGPKGDPGISGTPGAPGLPGPKGSVGGMGLPGTPGEKGVPGIPGPQGSPGLPGDKGAKGEKGQAGPPGIGIPGLRGEKGDQGIAGFPGSPGEKGEKGSIGIPGMPGSPGLKGSPGSVGYPGSPGLPGEKGDKGLPGLDGIPGVKGEAGLPGTPGPTGPAGQKGEPGSDGIPGSAGEKGEPGLPGRGFPGFPGAKGDKGSKGEVGFPGLAGSPGIPGSKGEQGFMGPPGPQGQPGLPGSPGHATEGPKGDRGPQGQPGLPGLPGPMGPPGLPGIDGVKGDKGNPGWPGAPGVPGPKGDPGFQGMPGIGGSPGITGSKGDMGPPGVPGFQGPKGLPGLQGIKGDQGDQGVPGAKGLPGPPGPPGPYDIIKGEPGLPGPEGPPGLKGLQGLPGPKGQQGVTGLVGIPGPPGIPGFDGAPGQKGEMGPAGPTGPRGFPGPPGPDGLPGSMGPPGTPSVDHGFLVTRHSQTIDDPQCPSGTKILYHGYSLLYVQGNERAHGQDLGTAGSCLRKFSTMPFLFCNINNVCNFASRNDYSYWLSTPEPMPMSMAPITGENIRPFISRCAVCEAPAMVMAVHSQTIQIPPCPSGWSSLWIGYSFVMHTSAGAEGSGQALASPGSCLEEFRSAPFIECHGRGTCNYYANAYSFWLATIERSEMFKKPTPSTLKAGELRTHVSRCQVCMRRT

SEQ ID NO: 3291 - protein, 519 aa, Homo Sapiens
MGPRLSVWLLLLPAALLLHEEHSRAAAKGGCAGSGCGKCDCHGVKGQKGERGLPGLQGVIGFPGMQGPEGPQGPPGQKGDTGEPGLPGTKGTRGPPGASGYPGNPGLPGIPGQDGPPGPPGIPGCNGTKGERGPLGPPGLPGFAGNPGPPGLPGMKGDPGEILGHVPGMLLKGERGFPGIPGTPGPPGLPGLQGPVGPPGFTGPPGPPGPPGPPGEKGQMGLSFQGPKGDKGDQGVSGPPGVPGQAQVQEKGDFATKGEKGQKGEPGFQGMPGVGEKGEPGKPGPRGKPGKDGDKGEKGSPGFPGEPGYPGLIGRQGPQGEKGEAGPPGPPGIVIGTGPLGEKGERGYPGTPGPRGEPGPKGFPGLPGQPGPPGLPVPGQAGAPGFPGERGEKGDRGFPGTSLPGPSGRDGLPGPPGSPGPPGQPGYTNGIVECQPGPPGDQGPPGIPGQPGFIGEIGEKGQKGESCLICDIDGYRGPPGPQGPPGEIGFPGQPGAKGDRGLPGRDGVAGVPLLFQIHK

SEQ ID NO: 3292 - protein, 223 aa, Homo Sapiens
MQGPEGPQGPPGQKGDTGEPGLPGTKGTRGPPGASGYPGNPGLPGIPGQDGPPGPPGIPGCNGTKGERGPLGPPGLPGFAGNPGPPGLPGMKGDPGEILGHVPGMLLKGERGFPGIPGTPGPPGLPGLQGPVGPPGFTGPPGPPGPPGPPGEKGQMGLSFQGPKGDKGDQGVSGPPGVPGQAQVQEKGDFATKGEKGQKGEPGFQGMPGVGEKGEPGKPGPRV

SEQ ID NO: 3293 - protein, 105 aa, Homo Sapiens
MGRDQRAVAGPALRRWLLLGTVTVGFLAQSVLAGVKKFDVPCGGRDCSGGCQCYPEKGGRGQPGPVGPQGYNGPPGLQGFPGLQGRKGDKGERGAPGVTGPKGDV

SEQ ID NO: 3294 - protein, 1712 aa, Homo Sapiens
MGRDQRAVAGPALRRWLLLGTVTVGFLAQSVLAGVKKFDVPCGGRDCSGGCQCYPEKGGRGQPGPVGPQGYNGPPGLQGFPGLQGRKGDKGERGAPGVTGPKGDVGARGVSGFPGADGIPGHPGQGGPRGRPGYDGCNGTQGDSGPQGPPGSEGFTGPPGPQGPKGQKGEPYALPKEERDRYRGEPGEPGLVGFQGPPGRPGHVGQMGPVGAPGRPGPPGPPGPKGQQGNRGLGFYGVKGEKGDVGQPGPNGIPSDTLHPIIAPTGVTFHPDQYKGEKGSEGEPGIRGISLKGEEGIMGFPGLRGYPGLSGEKGSPGQKGSRGLDGYQGPDGPRGPKGEAGDPGPPGLPAYSPHPSLAKGARGDPGFPGAQGEPGSQGEPGDPGLPGPPGLSIGDGDQRRGLPGEMGPKGFIGDPGIPALYGGPPGPDGKRGPPGPPGLPGPPGPDGFLFGLKGAKGRAGFPGLPGSPGARGPKGWKGDAGECRCTEGDEAIKGLPGLPGPKGFAGINGEPGRKGDRGDPGQHGLPGFPGLKGVPGNIGAPGPKGAKGDSRTITTKGERGQPGVPGVPGMKGDDGSPGRDGLDGFPGLPGPPGDGIKGPPGDPGYPGIPGTKGTPGEMGPPGLGLPGLKGQRGFPGDAGLPGPPGFLGPPGPAGTPGQIDCDTDVKRAVGGDRQEAIQPGCIGGPKGLPGLPGPPGPTGAKGLRGIPGFAGADGGPGPRGLPGDAGREGFPGPPGFIGPRGSKGAVGLPGPDGSPGPIGLPGPDGPPGERGLPGEVLGAQPGPRGDAGVPGQPGLKGLPGDRGPPGFRGSQGMPGMPGLKGQPGLPGPSGQPGLYGPPGLHGFPGAPGQEGPLGLPGIPGREGLPGDRGDPGDTGAPGPVGMKGLSGDRGDAGFTGEQGHPGSPGFKGIDGMPGTPGLKGDRGSPGMDGFQGMPGLKGRPGFPGSKGEAGFFGIPGLKGLAGEPGFKGSRGDPGPPGPPPVILPGMKDIKGEKGDEGPMGLKGYLGAKGIQGMPGIPGLSGIPGLPGRPGHIKGVKGDIGVPGIPGLPGFPGVAGPPGITGFPGFIGSRGDKGAPGRAGLYGEIGATGDFGDIGDTINLPGRPGLKGERGTTGIPGLKGFFGEKGTEGDIGFPGITGVTGVQGPPGLKGQTGFPGLTGPPGSQGELGRIGLPGGKGDDGWPGAPGLPGFPGLRGIRGLHGLPGTKGFPGSPGSDIHGDPGFPGPPGERGDPGEANTLPGPVGVPGQKGDQGAPGERGPPGSPGLQGFPGITPPSNISGAPGDKGAPGIFGLKGYRGPPGPPGSAALPGSKGDTGNPGAPGTPGTKGWAGDSGPQGRPGVFGLPGEKGPRGEQGFMGNTGPTGAVGDRGPKGPKGDPGFPGAPGTVGAPGIAGIPQKIAVQPGTVGPQGRRGPPGAPGEMGPQGPPGEPGFRGAPGKAGPQGRGGVSAVPGFRGDEGPIGHQGPIGQEGAPGRPGSPGLPGMPGRSVSIGYLLVKHSQTDQEPMCPVGMNKLWSGYSLLYFEGQEKAHNQDLGLAGSCLARFSTMPFLYCNPGDVCYYASRNDKSYWLSTTAPLPMMPVAEDEIKPYISRCSVCEAPAIAIAVHSQDVSIPHCPAGWRSLWIGYSFLMHTAAGDEGGGQSLVSPGSCLEDFRATPFIECNGGRGTCHYYANKYSFWLTTIPEQSFQGSPSADTLKAGLIRTHISRCQVCMKNL

SEQ ID NO: 3295 - protein, 42 aa, Homo Sapiens
  misc_feature (1)..(1): Xaa can be any naturally occurring amino acid
XGDPGQHGLPGFPGLKVRSNFIMKLARHSEASPGVPFLPFIS

SEQ ID NO: 3296 - protein, 199 aa, Homo Sapiens
ATWTTRGFVFTRHSQTTAIPSCPEGTVPLYSGFSFLFVQGNQRAHGQDLGTLGSCLQRFTTMPFLFCNVNDVCNFASRNDYSYWLSTPALMPMNMAPITGRALEPYISRCTVCEGPAIAIAVHSQTTDIPPCPHGWISLWKGFSFIMKAYSINCESWGIRKNNKSLSGVHEEKTLKLKKTAELLFFILKNKVMTEHAVI

SEQ ID NO: 3297 - protein, 156 aa, Homo Sapiens
GNPGEKGNRGVPGMPGLKGLKGLPGPAGPPGPRGDLGSTGNPGEPGLRGIPGSMGNMGMPGSKGKRGTLGFPGRAGRPGLPGIHGLQGDKGEPGYSEGTRPGPPGPTGDPGLPGDMGKKGEMGQPGPPGHLGPAGPEGAPGSPGSPGLPVPAAPSL

SEQ ID NO: 3298 - protein, 1670 aa, Homo Sapiens
MSARTAPRPQVLLLPLLLVLLAAAPAASKGCVCKDKGQCFCDGAKGEKGEKGFPGPPGSPGQKGFTGPEGLPGPQGPKGFPGLPGLTGSKGVRGISGLPGFSGSPGLPGTPGNTGPYGLVGVPGCSGSKGEQGFPGLPGTLGYPGIPGAAGLKGQKGAPAKEEDIELDAKGDPGLPGAPGPQGLPGPPGFPGPVGPPGPPGFFGFPGAMGPRGPKGHMGERVIGHKGERGVKGLTGPPGPPGTVIVTLTGPDNRTDLKGEKGDKGAMGEPGPPGPSGLPGESYGSEKGAPGDPGLQGKPGKDGVPGFPGSEGVKGNRGFPGLMGEDGIKGQKGDIGPPGFRGPTEYYDTYQEKGDEGTPGPPGPRGARGPQGPSGPPGVPGSPGSSRPGLRGAPGWPGLKGSKGERGRPGKDAMGTPGSPGCAGSPGLPGSPGPPGPPGDIVFRKGPPGDHGLPGYLGSPGIPGVDGPKGEPGLLCTQCPYIPGPPGLPGLPGLHGVKGIPGRQGAAGLKGSPGSPGNTGLPGFPGFPGAQGDPGLKGEKGETLQPEGQVGVPGDPGLRGQPGRKGLDGIPGTPGVKGLPGPKGELALSGEKGDQGPPGDPGSPGSPGPAGPAGPPGYGPQGEPGLQGTQGVPGAPGPPGEAGPRGELSVSTPVPGPPGPPGPPGHPGPQGPPGIPGSLGKCGDPGLPGPDGEPGIPGIGFPGPPGPKGDQGFPGTKGSLGCPGKMGEPGLPGKPGLPGAKGEPAVAMPGGPGTPGFPGERGNSGEHGEIGLPGLPGLPGTPGNEGLDGPRGDPGQPGPPGEQGPPGRCIEGPRGAQGLPGLNGLKGQQGRRGKTGPKGDPGIPGLDRSGFPGETGSPGIPGHQGEMGPLGQRGYPGNPGILGPPGEDGVIGMMGFPGAIGPPGPPGNPGTPGQRGSPGIPGVKGQRGTPGAKGEQGDKGNPGPSEISHVIGDKGEPGLKGFAGNPGEKGNRGVPGMPGLKGLKGLPGPAGPPGPRGDLGSTGNPGEPGLRGIPGSMGNMGMPGSKGKRGTLGFPGRAGRPGLPGIHGLQGDKGEPGYSEGTRPGPPGPTGDPGLPGDMGKKGEMGQPGPPGHLGPAGPEGAPGSPGSPGLPGKPGPHGDLGFKGIKGLLGPPGIRGPPGLPGFPGSPGPMGIRGDQGRDGIPGPAGEKGETGLLRAPPGPRGNPGAQGAKGDRGAPGFPGLPGRKGAMGDAGPRGPTGIEGFPGPPGLPGAIIPGQTGNRGPPGSRGSPGAPGPPGPPGSHVIGIKGDKGSMGHPGPKGPPGTAGDMGPPGRLGAPGTPGLPGPRGDPGFQGFPGVKGEKGNPGFLGSIGPPGPIGPKGPPGVRGDPGTLKIISLPGSPGPPGTPGEPGMQGEPGPPGPPGNLGPCGPRGKPGKDGKPGTPGPAGEKGNKGSKGEPGPAGSDGLPGLKGKRGDSGSPATWTTRGFVFTRHSQTTAIPSCPEGTVPLYSGFSFLFVQGNQRAHGQDLGTLGSCLQRFTTMPFLFCNVNDVCNFASRNDYSYWLSTPALMPMNMAPITGRALEPYISRCTVCEGPAIAIAVHSQTTDIPPCPHGWISLWKGFSFIMFTSAGSEGTGQALASPGSCLEEFRASPFLECHGRGTCNYYSNSYSFWLASLNPERMFRKPIPSTVKAGELEKIISRCQVCMKKRH

SEQ ID NO: 3299 - protein, 155 aa, Homo Sapiens
VRGDPGTLKIISLPGSPGPPGTPGEPGMQGEPGPPGPPGNLGPCGPRGKPGKDGKPGTPGPAGEKGNKGSKGEPGPAGSDGLPGLKGKRGDSGSPATWTTRGFVFTRHSQTTAIPSCPEGTVPLYSGFSFLFVQGNQRAHGQDLDALFVKVLRSP

SEQ ID NO: 3300 - protein, 1690 aa, Homo Sapiens
MWSLHIVLMRCSFRLTKSLATGPWSLILILFSVQYVYGSGKKYIGPCGGRDCSVCHCVPEKGSRGPPGPPGPQGPIGPLGAPGPIGLSGEKGMRGDRGPPGAAGDKGDKGPTGVPGFPGLDGIPGHPGPPGPRGKPGMSGHNGSRGDPGFPGGRGALGPGGPLGHPGEKGEKGNSVFILGAVKGIQGDRGDPGLPGLPGSWGAGGPAGPTGYPGEPGLVGPPGQPGRPGLKGNPGVGVKGQMGDPGEVGQQGSPGPTLLVEPPDFCLYKGEKGIKGIPGMVGLPGPPGRKGESGIGAKGEKGIPGFPGPRGDPGSYGSPGFPGLKGELGLVGDPGLFGLIGPKGDPGNRGHPGPPGVLVTPPLPLKGPPGDPGFPGRYGETGDVGPPGPPGLLGRPGEACAGMIGPPGPQGFPGLPGLPGEAGIPGRPDSAPGKPGKPGSPGLPGAPGLQGLPGSSVIYCSVGNPGPQGIKGKVGPPGGRGPKGEKGNEGLCACEPGPMGPPGPPGLPGRQGSKGDLGLPGWLGTKGDPGPPGAEGPPGLPGKHGASGPPGNKGAKGDMVVSRVKGHKGERGPDGPPGFPGQPGSHGRDGHAGEKGDPGPPGDHEDATPGGKGFPGPLGPPGKAGPVGPPGLGFPGPPGERGHPGVPGHPGVRGPDGLKGQKGDTISCNVTYPGRHGPPGFDGPPGPKGFPGPQGAPGLSGSDGHKGRPGTPGTAEIPGPPGFRGDMGDPGFGGEKGSSPVGPPGPPGSPGVNGQKGIPGDPAFGHLGPPGKRGLSGVPGIKGPRGDPGCPGAEGPAGIPGFLGLKGPKGREGHAGFPGVPGPPGHSCERGAPGIPGQPGLPGYPGSPGAPGGKGQPGDVGPPGPAGMKGLPGLPGRPGAHGPPGLPGIPGPFGDDGLPGPPGPKGPRGLPGFPGFPGERGKPGAEGCPGAKGEPGEKGMSGLPGDRGLRGAKGAIGPPGDEGEMAIISQKGTPGEPGPPGDDGFPGERGDKGTPGMQGRRGEPGRYGPPGFHRGEPGEKGQPGPPGPPGPPGSTGLRGFIGFPGLPGDQGEPGSPGPPGFSGIDGARGPKGNKGDPASHFGPPGPKGEPGSPGCPGHFGASGEQGLPGIQGPRGSPGRPGPPGSSGPPGCPGDHGMPGLRGQPGEMGDPGPRGLQGDPGIPGPPGIKGPSGSPGLNGLHGLKGQKGTKGASGLHDVGPPGPVGIPGLKGERGDPGSPGISPPGPRGKKGPPGPPGSSGPPGPAGATGRAPKDIPDPGPPGDQGPPGPDGPRGAPGPPGLPGSVDLLRGEPGDCGLPGPPGPPGPPGPPGYKGFPGCDGKDGQKGPVGFPGPQGPHGFPGPPGEKGLPGPPGRKGPTGLPGPRGEPGPPADVDDCPRIPGLPGAPGMRGPEGAMGLPGMRGPSGPGCKGEPGLDGRRGVDGVPGSPGPPGRKGDTGEDGYPGGPGPPGPIGDPGPKGFGPGYLGGFLLVLHSQTDQEPTCPLGMPRLWTGYSLLYLEGQEKAHNQDLGLAGSCLPVFSTLPFAYCNIHQVCHYAQRNDRSYWLASAAPLPMMPLSEEAIRPYVSRCAVCEAPAQAVAVHSQDQSIPPCPQTWRSLWIGYSFLMHTGAGDQGGGQALMSPGSCLEDFRAAPFLECQGRQGTCHFFANKYSFWLTTVKADLQFSSAPAPDTLKESQAQRQKISRCQVCVKYS

SEQ ID NO: 3301 - protein, 296 aa, Homo Sapiens
MWSLHIVLMRCSFRLTKSLATGPWSLILILFSVQYVYGSGKKYIGPCGGRDCSVCHCVPEKGSRGPPGPPGPQGPIGPLGAPGPIGLSGEKGMRGDRGPPGAAGDKGDKGPTGVPGFPGLDGIPGHPGPPGPRGKPGMSGHNGSRGDPGFPGGRGALGPGGPLGHPGEKGEKGNSVFILGAVKGIQGDRGDPGLPGLPGSWGAGGPAGPTGYPGEPGLVGPPGQPGRPGLKGNPGVGVKGQMGDPGEVGQQGSPGPTLLVEPPDFCLYKGEKGIKGIPGMVGLPGPPGRKGESGIG

SEQ ID NO: 3302 - protein, 73 aa, Homo Sapiens
FASRNDYSYWLSTPEPMPMSMQPLKGQSIQPFISRCAVCEAPAVVIAVHSQTIQIPHCPQGWDSLWIGYSFMM

SEQ ID NO: 3303 - protein, 695 aa, Homo Sapiens
MGPPGPPGFPGERGQKGDEGPPGISIPGPPGLDGQPGAPGLPGPPGPAGPHIPPSDEICEPGPPGPPGSPGDKGLQGEQGVKGDKGDTCFNCIGTGISGPPGQPGLPGLPGPPGSLGFPGQKGEKGQAGATGPKGLPGIPGAPGAPGFPGSKGEPGDILTFPGMKGDKGELGSPGAPGLPGLPGTPGQDGLPGLPGPKGEPGGITFKGERGPPGNPGLPGLPGNIGPMGPPGFGPPGPVGEKGIQGVAGNPGQPGIPGPKGDPGQTITQPGKPGLPGNPGRDGDVGLPGDPGLPGQPGLPGIPGSKGEPGIPGIGLPGPPGPKGFPGIPGPPGAPGTPGRIGLEGPPGPPGFPGPKGEPGFALPGPPGPPGLPGFKGALGPKGDRGFPGPPGPPGRTGLDGLPGPKGDVGPNGQPGPMGPPGLPGIGVQGPPGPPGIPGPIGQPGLHGIPGEKGDPGPPGLDVPGPPGERGSPGIPGAPGPIGPPGSPGLPGKAGASGFPGTKGEMGMMGPPGPPGPLGIPGRSGVPGLKGDDGLQGQPGLPGPTGEKGSKGEPGLPGPPGPMDPNLLGSKGEKGEPGLPGIPGVSGPKGYQGLPGDPGQPGLSGQPGLPGPPGPKGNPGLPGQPGLIGPPGLKGTIGDMGFPGPQGVEGPPGPSGVPGQPGSPGLPGQKGDKGDPGISSIGLPGLPGPKVIFGI

SEQ ID NO: 3304 - protein, 1691 aa, Homo Sapiens
MKLRGVSLAAGLFLLALSLWGQPAEAAACYGCSPGSKCDCSGIKGEKGERGFPGLEGHPGLPGFPGPEGPPGPRGQKGDDGIPGPPGPKGIRGPPGLPGFPGTPGLPGMPGHDGAPGPQGIPGCNGTKGERGFPGSPGFPGLQGPPGPPGIPGMKGEPGSIIMSSLPGPKGNPGYPGPPGIQGLPGPTGIPGPIGPPGPPGLMGPPGPPGLPGPKGNMGLNFQGPKGEKGEQGLQGPPGPPGQISEQKRPIDVEFQKGDQGLPGDRGPPGPPGIRGPPGPPGGEKGEKGEQGEPGKRGKPGKDGENGQPGIPGLPGDPGYPGEPGRDGEKGQKGDTGPPGPPGLVIPRPGTGITIGEKGNIGLPGLPGEKGERGFPGIQGPPGLPGPPGAAVMGPPGPPGFPGERGQKGDEGPPGISIPGPPGLDGQPGAPGLPGPPGPAGPHIPPSDEICEPGPPGPPGSPGDKGLQGEQGVKGDKGDTCFNCIGTGISGPPGQPGLPGLPGPPGSLGFPGQKGEKGQAGATGPKGLPGIPGAPGAPGFPGSKGEPGDILTFPGMKGDKGELGSPGAPGLPGLPGTPGQDGLPGLPGPKGEPGGITFKGERGPPGNPGLPGLPGNIGPMGPPGFGPPGPVGEKGIQGVAGNPGQPGIPGPKGDPGQTITQPGKPGLPGNPGRDGDVGLPGDPGLPGQPGLPGIPGSKGEPGIPGIGLPGPPGPKGFPGIPGPPGAPGTPGRIGLEGPPGPPGFPGPKGEPGFALPGPPGPPGLPGFKGALGPKGDRGFPGPPGPPGRTGLDGLPGPKGDVGPNGQPGPMGPPGLPGIGVQGPPGPPGIPGPIGQPGLHGIPGEKGDPGPPGLDVPGPPGERGSPGIPGAPGPIGPPGSPGLPGKAGASGFPGTKGEMGMMGPPGPPGPLGIPGRSGVPGLKGDDGLQGQPGLPGPTGEKGSKGEPGLPGPPGPMDPNLLGSKGEKGEPGLPGIPGVSGPKGYQGLPGDPGQPGLSGQPGLPGPPGPKGNPGLPGQPGLIGPPGLKGTIGDMGFPGPQGVEGPPGPSGVPGQPGSPGLPGQKGDKGDPGISSIGLPGLPGPKGEPGLPGYPGNPGIKGSVGDPGLPGLPGTPGAKGQPGLPGFPGTPGPPGPKGISGPPGNPGLPGEPGPVGGGGHPGQPGPPGEKGKPGQDGIPGPAGQKGEPGQPGFGNPGPPGLPGLSGQKGDGGLPGIPGNPGLPGPKGEPGFHGFPGVQGPPGPPGSPGPALEGPKGNPGPQGPPGRPGPTGFQGLPGPEGPPGLPGNGGIKGEKGNPGQPGLPGLPGLKGDQGPPGLQGNPGRPGLNGMKGDPGLPGVPGFPGMKGPSGVPGSAGPEGEPGLIGPPGPPGLPGPSGQSIIIKGDAGPPGIPGQPGLKGLPGPQGPQGLPGPTGPPGDPGRNGLPGFDGAGGRKGDPGLPGQPGTRGLDGPPGPDGLQGPPGPPGTSSVAHGFLITRHSQTTDAPQCPQGTLQVYEGFSLLYVQGNKRAHGQDLGTAGSCLRRFSTMPFMFCNINNVCNFASRNDYSYWLSTPEPMPMSMQPLKGQSIQPFISRCAVCEAPAVVIAVHSQTIQIPHCPQGWDSLWIGYSFMMHTSAGAEGSGQALASPGSCLEEFRSAPFIECHGRGTCNYYANSYSFWLATVDVSDMFSKPQSETLKAGDLRTRISRCQVCMKRT

SEQ ID NO: 3305 - protein, 1685 aa, Homo Sapiens
MKLRGVSLAAGLFLLALSLWGQPAEAAACYGCSPGSKCDCSGIKGEKGERGFPGLEGHPGLPGFPGPEGPPGPRGQKGDDGIPGPPGPKGIRGPPGLPGFPGTPGLPGMPGHDGAPGPQGIPGCNGTKGERGFPGSPGFPGLQGPPGPPGIPGMKGEPGSIIMSSLPGPKGNPGYPGPPGIQGLPGPTGIPGPIGPPGPPGLMGPPGPPGLPGPKGNMGLNFQGPKGEKGEQGLQGPPGPPGQISEQKRPIDVEFQKGDQGLPGDRGPPGPPGIRGPPGPPGGEKGEKGEQGEPGKRGKPGKDGENGQPGIPGLPGDPGYPGEPGRDGEKGQKGDTGPPGPPGLVIPRPGTGITIGEKGNIGLPGLPGEKGERGFPGIQGPPGLPGPPGAAVMGPPGPPGFPGERGQKGDEGPPGISIPGPPGLDGQPGAPGLPGPPGPAGPHIPPSDEICEPGPPGPPGSPGDKGLQGEQGVKGDKGDTCFNCIGTGISGPPGQPGLPGLPGPPGSLGFPGQKGEKGQAGATGPKGLPGIPGAPGAPGFPGSKGEPGDILTFPGMKGDKGELGSPGAPGLPGLPGTPGQDGLPGLPGPKGEPGGITFKGERGPPGNPGLPGLPGNIGPMGPPGFGPPGPVGEKGIQGVAGNPGQPGIPGPKGDPGQTITQPGKPGLPGNPGRDGDVGLPGDPGLPGQPGLPGIPGSKGEPGIPGIGLPGPPGPKGFPGIPGPPGAPGTPGRIGLEGPPGPPGFPGPKGEPGFALPGPPGPPGLPGFKGALGPKGDRGFPGPPGPPGRTGLDGLPGPKGDVGPNGQPGPMGPPGLPGIGVQGPPGPPGIPGPIGQPGLHGIPGEKGDPGPPGLDVPGPPGERGSPGIPGAPGPIGPPGSPGLPGKAGASGFPGTKGEMGMMGPPGPPGPLGIPGRSGVPGLKGDDGLQGQPGLPGPTGEKGSKGEPGLPGPPGPMDPNLLGSKGEKGEPGLPGIPGVSGPKGYQGLPGDPGQPGLSGQPGLPGPPGPKGNPGLPGQPGLIGPPGLKGTIGDMGFPGPQGVEGPPGPSGVPGQPGSPGLPGQKGDKGDPGISSIGLPGLPGPKGEPGLPGYPGNPGIKGSVGDPGLPGLPGTPGAKGQPGLPGFPGTPGPPGPKGISGPPGNPGLPGEPGPVGGGGHPGQPGPPGEKGKPGQDGIPGPAGQKGEPGQPGFGNPGPPGLPGLSGQKGDGGLPGIPGNPGLPGPKGEPGFHGFPGVQGPPGPPGSPGPALEGPKGNPGPQGPPGRPGLPGPEGPPGLPGNGGIKGEKGNPGQPGLPGLPGLKGDQGPPGLQGNPGRPGLNGMKGDPGLPGVPGFPGMKGPSGVPGSAGPEGEPGLIGPPGPPGLPGPSGQSIIIKGDAGPPGIPGQPGLKGLPGPQGPQGLPGPTGPPGDPGRNGLPGFDGAGGRKGDPGLPGQPGTRGLDGPPGPDGLQGPPGPPGTSSVAHGFLITRHSQTTDAPQCPQGTLQVYEGFSLLYVQGNKRAHGQDLGTAGSCLRRFSTMPFMFCNINNVCNFASRNDYSYWLSTPEPMPMSMQPLKGQSIQPFISRCAVCEAPAVVIAVHSQTIQIPHCPQGWDSLWIGYSFMMHTSAGAEGSGQALASPGSCLEEFRSAPFIECHGRGTCNYYANSYSFWLATVDVSDMFSKPQSETLKAGDLRTRISRCQVCMKRT

SEQ ID NO: 3306 - protein, 40 aa, Homo Sapiens
MKLRGVSLAAGLFLLALSLWGQPAEAAEETLFATPVTQAF

SEQ ID NO: 3307 - protein, 174 aa, Homo Sapiens
  misc_feature (1)..(1): Xaa can be any naturally occurring amino acid
XDDGLQGQPGLPGPTGEKGSKGEPGLPGPPGPMDPNLLGSKGEKGEPGLPGIPGVSGPKGYQGLPGDPGQPGLSGQPGLPGPPGPKGNPGLPGQPGLIGPPGLKGTIGDMGFPGPQGVEGPPGPSGVPGQPGSPGLPGQKGDKGDPGISSIGLPGLPGPKMIRRYVLGFVASPK

SEQ ID NO: 3308 - protein, 115 aa, Homo Sapiens
  misc_feature (1)..(1): Xaa can be any naturally occurring amino acid
XGLPGPTGPPGDPGRNGLPGFDGAGGRKGDPGLPGQPGTRGLDGPPGPDGLQGPPGPPGTSSVAHGFLITRHSQTTDAPQCPQGTLQVYEGFSLLYVQGNKRAHGQDLVNLSQKR

SEQ ID NO: 3309 - protein, 1690 aa, Homo Sapiens
MHPGLWLLLVTLCLTEELAAAGEKSYGKPCGGQDCSGSCQCFPEKGARGRPGPIGIQGPTGPQGFTGSTGLSGLKGERGFPGLLGPYGPKGDKGPMGVPGFLGINGIPGHPGQPGPRGPPGLDGCNGTQGAVGFPGPDGYPGLLGPPGLPGQKGSKGDPVLAPGSFKGMKGDPGLPGLDGITGPQGAPGFPGAVGPAGPPGLQGPPGPPGPLGPDGNMGLGFQGEKGVKGDVGLPGPAGPPPSTGELEFMGFPKGKKGSKGEPGPKGFPGISGPPGFPGLGTTGEKGEKGEKGIPGLPGPRGPMGSEGVQGPPGQQGKKGTLGFPGLNGFQGIEGQKGDIGLPGPDVFIDIDGAVISGNPGDPGVPGLPGLKGDEGIQGLRGPSGVPGLPALSGVPGALGPQGFPGLKGDQGNPGRTTIGAAGLPGRDGLPGPPGPPGPPSPEFETETLHNKESGFPGLRGEQGPKGNLGLKGIKGDSGFCACDGGVPNTGPPGEPGPPGPWGLIGLPGLKGARGDRGSGGAQGPAGAPGLVGPLGPSGPKGKKGEPILSTIQGMPGDRGDSGSQGFRGVIGEPGKDGVPGLPGLPGLPGDGGQGFPGEKGLPGLPGEKGHPGPPGLPGNGLPGLPGPRGLPGDKGKDGLPGQQGLPGSKGITLPCIIPGSYGPSGFPGTPGFPGPKGSRGLPGTPGQPGSSGSKGEPGSPGLVHLPELPGFPGPRGEKGLPGFPGLPGKDGLPGMIGSPGLPGSKGATGDIFGAENGAPGEQGLQGLTGHKGFLGDSGLPGLKGVHGKPGLLGPKGERGSPGTPGQVGQPGTPGSSGPYGIKGKSGLPGAPGFPGISGHPGKKGTRGKKGPPGSIVKKGLPGLKGLPGNPGLVGLKGSPGSPGVAGLPALSGPKGEKGSVGFVGFPGIPGLPGIPGTRGLKGIPGSTGKMGPSGRAGTPGEKGDRGNPGPVGIPSPRRPMSNLWLKGDKGSQGSAGSNGFPGPRGDKGEAGRPGPPGLPGAPGLPGIIKGVSGKPGPPGFMGIRGLPGLKGSSGITGFPGMPGESGSQGIRGSPGLPGASGLPGLKGDNGQTVEISGSPGPKGQPGESGFKGTKGRDGLIGNIGFPGNKGEDGKVGVSGDVGLPGAPGFPGVAGMRGEPGLPGSSGHQGAIGPLGSPGLIGPKGFPGFPGLHGLNGLPGTKGTHGTPGPSITGVPGPAGLPGPKGEKGYPGIGIGAPGKPGLRGQKGDRGFPGLQGPAGLPGAPGISLPSLIAGQPGDPGRPGLDGERGRPGPAGPPGPPGPSSNQGDTGDPGFPGIPGPKGPKGDQGIPGFSGLPGELGLKGMRGEPGFMGTPGKVGPPGDPGFPGMKGKAGPRGSSGLQGDPGQTPTAEAVQVPPGPLGLPGIDGIPGLTGDPGAQGPVGLQGSKGLPGIPGKDGPSGLPGPPGALGDPGLPGLQGPPGFEGAPGQQGPFGMPGMPGQSMRVGYTLVKHSQSEQVPPCPIGMSQLWVGYSLLFVEGQEKAHNQDLGFAGSCLPRFSTMPFIYCNINEVCHYARRNDKSYWLSTTAPIPMMPVSQTQIPQYISRCSVCEAPSQAIAVHSQDITIPQCPLGWRSLWIGYSFLMHTAAGAEGGGQSLVSPGSCLEDFRATPFIECSGARGTCHYFANKYSFWLTTVEERQQFGELPVSETLKAGQLHTRVSRCQVCMKSL

SEQ ID NO: 3310 - protein, 1707 aa, Homo Sapiens
MHPGLWLLLVTLCLTEELAAAGEKSYGKPCGGQDCSGSCQCFPEKGARGRPGPIGIQGPTGPQGFTGSTGLSGLKGERGFPGLLGPYGPKGDKGPMGVPGFLGINGIPGHPGQPGPRGPPGLDGCNGTQGAVGFPGPDGYPGLLGPPGLPGQKGSKGDPVLAPGSFKGMKGDPGLPGLDGITGPQGAPGFPGAVGPAGPPGLQGPPGPPGPLGPDGNMGLGFQGEKGVKGDVGLPGPAGPPPSTGELEFMGFPKGKKGSKGEPGPKGFPGISGPPGFPGLGTTGEKGEKGEKGIPGLPGPRGPMGSEGVQGPPGQQGKKGTLGFPGLNGFQGIEGQKGDIGLPGPDVFIDIDGAVISGNPGDPGVPGLPGLKGDEGIQGLRGPSGVPGLPALSGVPGALGPQGFPGLKGDQGNPGRTTIGAAGLPGRDGLPGPPGPPGPPSPEFETETLHNKESGFPGLRGEQGPKGNLGLKGIKGDSGFCACDGGVPNTGPPGEPGPPGPWGLIGLPGLKGARGDRGSGGAQGPAGAPGLVGPLGPSGPKGKKGEPILSTIQGMPGDRGDSGSQGFRGVIGEPGKDGVPGLPGLPGLPGDGGQGFPGEKGLPGLPGEKGHPGPPGLPGNGLPGLPGPRGLPGDKGKDGLPGQQGLPGSKGDCCCREVGKGDLDTERGITLPCIIPGSYGPSGFPGTPGFPGPKGSRGLPGTPGQPGSSGSKGEPGSPGLVHLPELPGFPGPRGEKGLPGFPGLPGKDGLPGMIGSPGLPGSKGATGDIFGAENGAPGEQGLQGLTGHKGFLGDSGLPGLKGVHGKPGLLGPKGERGSPGTPGQVGQPGTPGSSGPYGIKGKSGLPGAPGFPGISGHPGKKGTRGKKGPPGSIVKKGLPGLKGLPGNPGLVGLKGSPGSPGVAGLPALSGPKGEKGSVGFVGFPGIPGLPGIPGTRGLKGIPGSTGKMGPSGRAGTPGEKGDRGNPGPVGIPSPRRPMSNLWLKGDKGSQGSAGSNGFPGPRGDKGEAGRPGPPGLPGAPGLPGIIKGVSGKPGPPGFMGIRGLPGLKGSSGITGFPGMPGESGSQGIRGSPGLPGASGLPGLKGDNGQTVEISGSPGPKGQPGESGFKGTKGRDGLIGNIGFPGNKGEDGKVGVSGDVGLPGAPGFPGVAGMRGEPGLPGSSGHQGAIGPLGSPGLIGPKGFPGFPGLHGLNGLPGTKGTHGTPGPSITGVPGPAGLPGPKGEKGYPGIGIGAPGKPGLRGQKGDRGFPGLQGPAGLPGAPGISLPSLIAGQPGDPGRPGLDGERGRPGPAGPPGPPGPSSNQGDTGDPGFPGIPGPKGPKGDQGIPGFSGLPGELGLKGMRGEPGFMGTPGKVGPPGDPGFPGMKGKAGPRGSSGLQGDPGQTPTAEAVQVPPGPLGLPGIDGIPGLTGDPGAQGPVGLQGSKGLPGIPGKDGPSGLPGPPGALGDPGLPGLQGPPGFEGAPGQQGPFGMPGMPGQSMRVGYTLVKHSQSEQVPPCPIGMSQLWVGYSLLFVEGQEKAHNQDLGFAGSCLPRFSTMPFIYCNINEVCHYARRNDKSYWLSTTAPIPMMPVSQTQIPQYISRCSVCEAPSQAIAVHSQDITIPQCPLGWRSLWIGYSFLMHTAAGAEGGGQSLVSPGSCLEDFRATPFIECSGARGTCHYFANKYSFWLTTVEERQQFGELPVSETLKAGQLHTRVSRCQVCMKSL

SEQ ID NO: 3311 - protein, 1633 aa, Homo Sapiens
MHPGLWLLLVTLCLTEELAAAGEKSYGKPCGGQDCSGSCQCFPEKGARGRPGPIGIQGPTGPQGFTGSTGLSGLKGERGFPGLLGPYGPKGDKGPMGVPGFLGINGIPGHPGQPGPRGPPGLDGCNGTQGAVGFPGPDGYPGLLGPPGLPGQKGSKGDPVLAPGSFKGMKGDPGLPGLDGITGPQGAPGFPGAVGPAGPPGLQGPPGPPGPLGPDGNMGLGFQGEKGVKGDVGLPGPAGPPPSTGELEFMGFPKGKKGSKGEPGPKGFPGISGPPGFPGLGTTGEKGEKGEKGIPGLPGPRGPMGSEGVQGPPGQQGKKGTLGFPGLNGFQGIEGQKGDIGLPGPDVFIDIDGAVISGNPGDPGVPGLPGLKGDEGIQGLRGPSGVPGLPALSGVPGALGPQGFPGLKGDQGNPGRTTIGAAGLPGRDGLPGPPGPPGPPSPEFETETLHNKESGFPGLRGEQGPKGNLGLKGIKGDSGFCACDGGVPNTGPPGEPGPPGPWGLIGLPGLKGARGDRGSGGAQGPAGAPGLVGPLGPSGPKGKKGEPILSTIQGMPGDRGDSGSQGFRGVIGEPGKDGVPGLPGLPGLPGDGGQGFPGEKGLPGLPGEKGHPGPPGLPGNGLPGLPGPRGLPGDKGKDGLPGQQGLPGSKGITLPCIIPGSYGPSGFPGTPGFPGPKGSRGLPGTPGQPGSSGSKGEPGSPGLVHLPELPGFPGPRGEKGLPGFPGLPGKDGLPGMIGSPGLPGSKGATGDIFGAENGAPGEQGLQGLTGHKGFLGDSGLPGLKGVHGKPGLLGPKGERGSPGTPGQVGQPGTPGSSGPYGIKGKSGLPGAPGFPGISGHPGKKGTRGKKGPPGSIVKKGLPGLKGLPGNPGLVGLKGSPGSPGVAGLPALSGPKGEKGSVGFVGFPGIPGLPGIPGTRGLKGIPGSTGKMGPSGRAGTPGEKGDRGNPGPVGIPSPRRPMSNLWLKGDKGSQGSAGSNGFPGPRGDKGEAGRPGPPGLPGAPGLPGIIKGVSGKPGPPGFMGIRGLPGLKGSSGITGFPGMPGESGSQGIRGSPGLPGASGLPGLKGDNGQTVEISGSPGPKGQPGESGFKGTKGRDGLIGNIGFPGNKGEDGKVGVSGDVGLPGAPGFPGVAGMRGEPGLPGSSGHQGAIGPLGSPGLIGPKGPSITGVPGPAGLPGPKGEKGYPGIGIGAPGKPGLRGQKGDRGFPGLQGPAGLPGAPGISLPSLIAGQPGDPGRPGLDGERGRPGPAGPPGPPGPSSNQGDTGDPGFPGIPGPKGPKGDQGIPGFSGLPGELGLKGSSGLQGDPGQTPTAEAVQVPPGPLGLPGIDGIPGLTGDPGAQGPVGLQGSKGLPGIPGKDGPSGLPGPPGALGDPGLPGLQGPPGFEGAPGQQGPFGMPGMPGQSMRVGYTLVKHSQSEQVPPCPIGMSQLWVGYSLLFVEGQEKAHNQDLGFAGSCLPRFSTMPFIYCNINEVCHYARRNDKSYWLSTTAPIPMMPVSQTQIPQYISRCSVCEAPSQAIAVHSQDITIPQCPLGWRSLWIGYSFLMHTAAGAEGGGQSLVSPGSCLEDFRATPFIECSGARGTCHYFANKYSFWLTTVEERQQFGELPVSETLKAGQLHTRVSRCQVCMKSL

SEQ ID NO: 3312 - protein, 1678 aa, Homo Sapiens
MHPGLWLLLVTLCLTEELAAAGEKSYGKPCGGQDCSGSCQCFPEKGARGRPGPIGIQGPTGPQGFTGSTGLSGLKGERGFPGLLGPYGPKGDKGPMGVPGFLGINGIPGHPGQPGPRGPPGLDGCNGTQGAVGFPGPDGYPGLLGPPGLPGQKGSKGDPVLAPGSFKGMKGDPGLPGLDGITGPQGAPGFPGAVGPAGPPGLQGPPGPPGPLGPDGNMGLGFQGEKGVKGDVGLPGPAGPPPSTGELEFMGFPKGKKGSKGEPGPKGFPGISGPPGFPGLGTTGEKGEKGEKGIPGLPGPRGPMGSEGVQGPPGQQGKKGTLGFPGLNGFQGIEGQKGDIGLPGPDVFIDIDGAVISGNPGDPGVPGLPGLKGDEGIQGLRGPSGVPGLPALSGVPGALGPQGFPGLKGDQGNPGRTTIGAAGLPGRDGLPGPPGPPGPPSPEFETETLHNKESGFPGLRGEQGPKGNLGLKGIKGDSGFCACDGGVPNTGPPGEPGPPGPWGLIGLPGLKGARGDRGSGGAQGPAGAPGLVGPLGPSGPKGKKGEPILSTIQGMPGDRGDSGSQGFRGVIGEPGKDGVPGLPGLPGLPGDGGQGFPGEKGLPGLPGEKGHPGPPGLPGNGLPGLPGPRGLPGDKGKDGLPGQQGLPGSKGITLPCIIPGSYGPSGFPGTPGFPGPKGSRGLPGTPGQPGSSGSKGEPGSPGLVHLPELPGFPGPRGEKGLPGFPGLPGKDGLPGMIGSPGLPGSKGATGDIFGAENGAPGEQGLQGLTGHKGFLGDSGLPGLKGVHGKPGLLGPKGERGSPGTPGQVGQPGTPGSSGPYGIKGKSGLPGAPGFPGISGHPGKKGTRGKKGPPGSIVKKGLPGLKGLPGNPGLVGLKGSPGSPGVAGLPALSGPKGEKGSVGFVGFPGIPGLPGIPGTRGLKGIPGSTGKMGPSGRAGTPGEKGDRGNPGPVGIPSPRRPMSNLWLKGDKGSQGSAGSNGFPGPRGDKGEAGRPGPPGLPGAPGLPGIIKGVSGKPGPPGFMGIRGLPGLKGSSGITGFPGMPGESGSQGIRGSPGLPGASGLPGLKGDNGQTVEISGSPGPKGQPGESGFKGTKGRDGLIGNIGFPGNKGEDGKVGVSGDVGLPGAPGFPGVAGMRGEPGLPGSSGHQGAIGPLGSPGLIGPKGFPGFPGLHGLNGLPGTKGTHGTPGPSITGVPGPAGLPGPKGEKGYPGIGIGAPGKPGLRGQKGDRGFPGLQGPAGLPGAPGISLPSLIAGQPGDPGRPGLDGERGRPGPAGPPGPPGPSSNQGDTGDPGFPGIPGFSGLPGELGLKGMRGEPGFMGTPGKVGPPGDPGFPGMKGKAGPRGSSGLQGDPGQTPTAEAVQVPPGPLGLPGIDGIPGLTGDPGAQGPVGLQGSKGLPGIPGKDGPSGLPGPPGALGDPGLPGLQGPPGFEGAPGQQGPFGMPGMPGQSMRVGYTLVKHSQSEQVPPCPIGMSQLWVGYSLLFVEGQEKAHNQDLGFAGSCLPRFSTMPFIYCNINEVCHYARRNDKSYWLSTTAPIPMMPVSQTQIPQYISRCSVCEAPSQAIAVHSQDITIPQCPLGWRSLWIGYSFLMHTAAGAEGGGQSLVSPGSCLEDFRATPFIECSGARGTCHYFANKYSFWLTTVEERQQFGELPVSETLKAGQLHTRVSRCQVCMKSL

SEQ ID NO: 3313 - protein, 1666 aa, Homo Sapiens
MHPGLWLLLVTLCLTEELAAAGEKSYGKPCGGQDCSGSCQCFPEKGARGRPGPIGIQGPTGPQGFTGSTGLSGLKGERGFPGLLGPYGPKGDKGPMGVPGFLGINGIPGHPGQPGPRGPPGLDGCNGTQGAVGFPGPDGYPGLLGPPGLPGQKGSKGDPVLAPGSFKGMKGDPGLPGLDGITGPQGAPGFPGAVGPAGPPGLQGPPGPPGPLGPDGNMGLGFQGEKGVKGDVGLPGPAGPPPSTGELEFMGFPKGKKGSKGEPGPKGFPGISGPPGFPGLGTTGEKGEKGEKGIPGLPGPRGPMGSEGVQGPPGQQGKKGTLGFPGLNGFQGIEGQKGDIGLPGPDVFIDIDGAVISGNPGDPGVPGLPGLKGDEGIQGLRGPSGVPGLPALSGVPGALGPQGFPGLKGDQGNPGRTTIGAAGLPGRDGLPGPPGPPGPPSPEFETETLHNKESGFPGLRGEQGPKGNLGLKGIKGDSGFCACDGGVPNTGPPGEPGPPGPWGLIGLPGLKGARGDRGSGGAQGPAGAPGLVGPLGPSGPKGKKGEPILSTIQGMPGDRGDSGSQGFRGVIGEPGKDGVPGLPGLPGLPGDGGQGFPGEKGLPGLPGEKGHPGPPGLPGNGLPGLPGPRGLPGDKGKDGLPGQQGLPGSKGITLPCIIPGSYGPSGFPGTPGFPGPKGSRGLPGTPGQPGSSGSKGEPGSPGLVHLPELPGFPGPRGEKGLPGFPGLPGKDGLPGMIGSPGLPGSKGATGDIFGAENGAPGEQGLQGLTGHKGFLGDSGLPGLKGVHGKPGLLGPKGERGSPGTPGQVGQPGTPGSSGPYGIKGKSGLPGAPGFPGISGHPGKKGTRGKKGPPGSIVKKGLPGLKGLPGNPGLVGLKGSPGSPGVAGLPALSGPKGEKGSVGFVGFPGIPGLPGIPGTRGLKGIPGSTGKMGPSGRAGTPGEKGDRGNPGPVGIPSPRRPMSNLWLKGDKGSQGSAGSNGFPGPRGDKGEAGRPGPPGLPGAPGLPGIIKGVSGKPGPPGFMGIRGLPGLKGSSGITGFPGMPGESGSQGIRGSPGLPGASGLPGLKGDNGQTVEISGSPGPKGQPGESGFKGTKGRDGLIGNIGFPGNKGEDGKVGVSGDVGLPGAPGFPGVAGMRGEPGLPGSSGHQGAIGPLGSPGLIGPKGPSITGVPGPAGLPGPKGEKGYPGIGIGAPGKPGLRGQKGDRGFPGLQGPAGLPGAPGISLPSLIAGQPGDPGRPGLDGERGRPGPAGPPGPPGPSSNQGDTGDPGFPGIPGPKGPKGDQGIPGFSGLPGELGLKGMRGEPGFMGTPGKVGPPGDPGFPGMKGKAGPRGSSGLQGDPGQTPTAEAVQVPPGPLGLPGIDGIPGLTGDPGAQGPVGLQGSKGLPGIPGKDGPSGLPGPPGALGDPGLPGLQGPPGFEGAPGQQGPFGMPGMPGQSMRVGYTLVKHSQSEQVPPCPIGMSQLWVGYSLLFVEGQEKAHNQDLGFAGSCLPRFSTMPFIYCNINEVCHYARRNDKSYWLSTTAPIPMMPVSQTQIPQYISRCSVCEAPSQAIAVHSQDITIPQCPLGWRSLWIGYSFLMHTAAGAEGGGQSLVSPGSCLEDFRATPFIECSGARGTCHYFANKYSFWLTTVEERQQFGELPVSETLKAGQLHTRVSRCQVCMKSL

SEQ ID NO: 3314 - protein, 1691 aa, Homo Sapiens
MLINKLWLLLVTLCLTEELAAAGEKSYGKPCGGQDCSGSCQCFPEKGARGRPGPIGIQGPTGPQGFTGSTGLSGLKGERGFPGLLGPYGPKGDKGPMGVPGFLGINGIPGHPGQPGPRGPPGLDGCNGTQGAVGFPGPDGYPGLLGPPGLPGQKGSKGDPVLAPGSFKGMKGDPGLPGLDGITGPQGAPGFPGAVGPAGPPGLQGPPGPPGPLGPDGNMGLGFQGEKGVKGDVGLPGPAGPPPSTGELEFMGFPKGKKGSKGEPGPKGFPGISGPPGFPGLGTTGEKGEKGEKGIPGLPGPRGPMGSEGVQGPPGQQGKKGTLGFPGLNGFQGIEGQKGDIGLPGPDVFIDIDGAVISGNPGDPGVPGLPGLKGDEGIQGLRGPSGVPGLPALSGVPGALGPQGFPGLKGDQGNPGRTTIGAAGLPGRDGLPGPPGPPGPPSPEFETETLHNKESGFPGLRGEQGPKGNLGLKGIKGDSGFCACDGGVPNTGPPGEPGPPGPWGLIGLPGLKGARGDRGSGGAQGPAGAPGLVGPLGPSGPKGKKGEPILSTIQGMPGDRGDSGSQGFRGVIGEPGKDGVPGLPGLPGLPGDGGQGFPGEKGLPGLPGEKGHPGPPGLPGNGLPGLPGPRGLPGDKGKDGLPGQQGLPGSKGITLPCIIPGSYGPSGFPGTPGFPGPKGSRGLPGTPGQPGSSGSKGEPGSPGLVHLPELPGFPGPRGEKGLPGFPGLPGKDGLPGMIGSPGLPGSKGATGDIFGAENGAPGEQGLQGLTGHKGFLGDSGLPGLKGVHGKPGLLGPKGERGSPGTPGQVGQPGTPGSSGPYGIKGKSGLPGAPGFPGISGHPGKKGTRGKKGPPGSIVKKGLPGLKGLPGNPGLVGLKGSPGSPGVAGLPALSGPKGEKGSVGFVGFPGIPGLPGIPGTRGLKGIPGSTGKMGPSGRAGTPGEKGDRGNPGPVGIPSPRRPMSNLWLKGDKGSQGSAGSNGFPGPRGDKGEAGRPGPPGLPGAPGLPGIIKGVSGKPGPPGFMGIRGLPGLKGSSGITGFPGMPGESGSQGIRGSPGLPGASGLPGLKGDNGQTVEISGSPGPKGQPGESGFKGTKGRDGLIGNIGFPGNKGEDGKVGVSGDVGLPGAPGFPGVAGMRGEPGLPGSSGHQGAIGPLGSPGLIGPKGFPGFPGLHGLNGLPGTKGTHGTPGPSITGVPGPAGLPGPKGEKGYPGIGIGAPGKPGLRGQKGDRGFPGLQGPAGLPGAPGISLPSLIAGQPGDPGRPGLDGERGRPGPAGPPGPPGPSSNQGDTGDPGFPGIPGPKGPKGDQGIPGFSGLPGELGLKGMRGEPGFMGTPGKVGPPGDPGFPGMKGKAGPRGSSGLQGDPGQTPTAEAVQVPPGPLGLPGIDGIPGLTGDPGAQGPVGLQGSKGLPGIPGKDGPSGLPGPPGALGDPGLPGLQGPPGFEGAPGQQGPFGMPGMPGQSMRVGYTLVKHSQSEQVPPCPIGMSQLWVGYSLLFVEGQEKAHNQDLGFAGSCLPRFSTMPFIYCNINEVCHYARRNDKSYWLSTTAPIPMMPVSQTQIPQYISRCSVCEAPSQAIAVHSQDITIPQCPLGWRSLWIGYSFLMHTAAGAEGGGQSLVSPGSCLEDFRATPFIECSGARGTCHYFANKYSFWLTTVEERQQFGELPVSETLKAGQLHTRVSRCQVCMKSL

SEQ ID NO: 3315 - protein, 1838 aa, Homo Sapiens
MDVHTRWKARSALRPGAPLLPPLLLLLLWAPPPSRAAQPADLLKVLDFHNLPDGITKTTGFCATRRSSKGPDVAYRVTKDAQLSAPTKQLYPASAFPEDFSILTTVKAKKGSQAFLVSIYNEQGIQQIGLELGRSPVFLYEDHTGKPGPEDYPLFRGINLSDGKWHRIALSVHKKNVTLILDCKKKTTKFLDRSDHPMIDINGIIVFGTRILDEEVFEGDIQQLLFVSDHRAAYDYCEHYSPDCDTAVPDTPQSQDPNPDEYYTEGDGEGETYYYEYPYYEDPEDLGKEPTPSKKPVEAAKETTEVPEELTPTPTEAAPMPETSEGAGKEEDVGIGDYDYVPSEDYYTPSPYDDLTYGEGEENPDQPTDPGAGAEIPTSTADTSNSSNPAPPPGEGADDLEGEFTEETIRNLDENYYDPYYDPTSSPSEIGPGMPANQDTIYEGIGGPRGEKGQKGEPAIIEPGMLIEGPPGPEGPAGLPGPPGTMGPTGQVGDPGERGPPGRPGLPGADGLPGPPGTMLMLPFRFGGGGDAGSKGPMVSAQESQAQAILQQARLALRGPAGPMGLTGRPGPVGPPGSGGLKGEPGDVGPQGPRGVQGPPGPAGKPGRRGRAGSDGARGMPGQTGPKGDRGFDGLAGLPGEKGHRGDPGPSGPPGPPGDDGERGDDGEVGPRGLPGEPGPRGLLGPKGPPGPPGPPGVTGMDGQPGPKGNVGPQGEPGPPGQQGNPGAQGLPGPQGAIGPPGEKGPLGKPGLPGMPGADGPPGHPGKEGPPGEKGGQGPPGPQGPIGYPGPRGVKGADGIRGLKGTKGEKGEDGFPGFKGDMGIKGDRGEIGPPGPRGEDGPEGPKGRGGPNGDPGPLGPPGEKGKLGVPGLPGYPGRQGPKGSIGFPGFPGANGEKGGRGTPGKPGPRGQRGPTGPRGERGPRGITGKPGPKGNSGGDGPAGPPGERGPNGPQGPTGFPGPKGPPGPPGKDGLPGHPGQRGETGFQGKTGPPGPPGVVGPQGPTGETGPMGERGHPGPPGPPGEQGLPGLAGKEGTKGDPGPAGLPGKDGPPGLRGFPGDRGLPGPVGALGLKGNEGPPGPPGPAGSPGERGPAGAAGPIGIPGRPGPQGPPGPAGEKGAPGEKGPQGPAGRDGLQGPVGLPGPAGPVGPPGEDGDKGEIGEPGQKGSKGDKGEQGPPGPTGPQGPIGQPGPSGADGEPGPRGQQGLFGQKGDEGPRGFPGPPGPVGLQGLPGPPGEKGETGDVGQMGPPGPPGPRGPSGAPGADGPQGPPGGIGNPGAVGEKGEPGEAGEPGLPGEGGPPGPKGERGEKGESGPSGAAGPPGPKGPPGDDGPKGSPGPVGFPGDPGPPGEPGPAGQDGPPGDKGDDGEPGQTGSPGPTGEPGPSGPPGKRGPPGPAGPEGRQGEKGAKGEAGLEGPPGKTGPIGPQGAPGKPGPDGLRGIPGPVGEQGLPGSPGPDGPPGPMGPPGLPGLKGDSGPKGEKGHPGLIGLIGPPGEQGEKGDRGLPGPQGSSGPKGEQGITGPSGPIGPPGPPGLPGPPGPKGAKGSSGPTGPKGEAGHPGPPGPPGPPGEVIQPLPIQASRTRRNIDASQLLDDGNGENYVDYADGMEEIFGSLNSLKLEIEQMKRPLGTQQNPARTCKDLQLCHPDFPDGEYWVDPNQGCSRDSFKVYCNFTAGGSTCVFPDKKSEGARITSWPKENPGSWFSEFKRGKLLSYVDAEGNPVGVVQMTFLRLLSASAHQNVTYHCYQSVAWQDAATGSYDKALRFLGSNDEEMSYDNNPYIRALVDGCATKKGYQKTVLEIDTPKVEQVPIVDIMFNDFGEASQKFGFEVGPACFMG

SEQ ID NO: 3316 - protein, 1838 aa, Homo Sapiens
MDVHTRWKARSALRPGAPLLPPLLLLLLWAPPPSRAAQPADLLKVLDFHNLPDGITKTTGFCATRRSSKGPDVAYRVTKDAQLSAPTKQLYPASAFPEDFSILTTVKAKKGSQAFLVSIYNEQGIQQIGLELGRSPVFLYEDHTGKPGPEDYPLFRGINLSDGKWHRIALSVHKKNVTLILDCKKKTTKFLDRSDHPMIDINGIIVFGTRILDEEVFEGDIQQLLFVSDHRAAYDYCEHYSPDCDTAVPDTPQSQDPNPDEYYTEGDGEGETYYYEYPYYEDPEDLGKEPTPSKKPVEAAKETTEVPEELTPTPTEAAPMPETSEGAGKEEDVGIGDYDYVPSEDYYTPSPYDDLTYGEGEENPDQPTDPGAGAEIPTSTADTSNSSNPAPPPGEGADDLEGEFTEETIRNLDENYYDPYYDPTSSPSEIGPGMPANQDTIYEGIGGPRGEKGQKGEPAIIEPGMLIEGPPGPEGPAGLPGPPGTMGPTGQVGDPGERGPPGRPGLPGADGLPGPPGTMLMLPFRFGGGGDAGSKGPMVSAQESQAQAILQQARLALRGPAGPMGLTGRPGPVGPPGSGGLKGEPGDVGPQGPRGVQGPPGPAGKPGRRGRAGSDGARGMPGQTGPKGDRGFDGLAGLPGEKGHRGDPGPSGPPGPPGDDGERGDDGEVGPRGLPGEPGPRGLLGPKGPPGPPGPPGVTGMDGQPGPKGNVGPQGEPGPPGQQGNPGAQGLPGPQGAIGPPGEKGPLGKPGLPGMPGADGPPGHPGKEGPPGEKGGQGPPGPQGPIGYPGPRGVKGADGIRGLKGTKGEKGEDGFPGFKGDMGIKGDRGEIGPPGPRGEDGPEGPKGRGGPNGDPGPLGPPGEKGKLGVPGLPGYPGRQGPKGSIGFPGFPGANGEKGGRGTPGKPGPRGQRGPTGPRGERGPRGITGKPGPKGNSGGDGPAGPPGERGPNGPQGPTGFPGPKGPPGPPGKDGLPGHPGQRGETGFQGKTGPPGPPGVVGPQGPTGETGPMGERGHPGPPGPPGEQGLPGLAGKEGTKGDPGPAGLPGKDGPPGLRGFPGDRGLPGPVGALGLKGNEGPPGPPGPAGSPGERGPAGAAGPIGIPGRPGPQGPPGPAGEKGAPGEKGPQGPAGRDGLQGPVGLPGPAGPVGPPGEDGDKGEIGEPGQKGSKGDKGEQGPPGPTGPQGPIGQPGPSGADGEPGPRGQQGLFGQKGDEGPRGFPGPPGPVGLQGLPGPPGEKGETGDVGQMGPPGPPGPRGPSGAPGADGPQGPPGGIGNPGAVGEKGEPGEAGEPGLPGEGGPPGPKGERGEKGESGPSGAAGPPGPKGPPGDDGPKGSPGPVGFPGDPGPPGEPGPAGQDGPPGDKGDDGEPGQTGSPGPTGEPGPSGPPGKRGPPGPAGPEGRQGEKGAKGEAGLEGPPGKTGPIGPQGAPGKPGPDGLRGIPGPVGEQGLPGSPGPDGPPGPMGPPGLPGLKGDSGPKGEKGHPGLIGLIGPPGEQGEKGDRGLPGPQGSSGPKGEQGITGPSGPIGPPGPPGLPGPPGPKGAKGSSGPTGPKGEAGHPGPPGPPGPPGEVIQPLPIQASRTRRNIDASQLLDDGNGENYVDYADGMEEIFGSLNSLKLEIEQMKRPLGTQQNPARTCKDLQLCHPDFPDGEYWVDPNQGCSRDSFKVYCNFTAGGSTCVFPDKKSEGSKMARWPKEQPSTWYSQYKRGSLLSYVDAEGNPVGVVQMTFLRLLSASAHQNVTYHCYQSVAWQDAATGSYDKALRFLGSNDEEMSYDNNPYIRALVDGCATKKGYQKTVLEIDTPKVEQVPIVDIMFNDFGEASQKFGFEVGPACFMG

SEQ ID NO: 3317 - protein, 210 aa, Homo Sapiens
  misc_feature (1)..(1): Xaa can be any naturally occurring amino acid
XRTRRNIDASQLLDDGNGENYVDYADGMEEIFGSLNSLKLEIEQMKRPLGTQQNPARTCKDLQLCHPDFPDGEYWVDPNQGCSRDSFKVYCNFTAGGSTCVFPDKKSEGSKMARWPKEQPSTWYSQYKRGSLLSYVDAEGNPVGVVQMTFLRLLSASAHQNVTYHCYQSVAWQDAATGSYDKALRFLGSNDEEMSYDNNPYIRALVDGCA

SEQ ID NO: 3318 - protein, 1499 aa, Homo Sapiens
MMANWAEARPLLILIVLLGQFVSIKAQEEDEDEGYGEEIACTQNGQMYLNRDIWKPAPCQICVCDNGAILCDKIECQDVLDCADPVTPPGECCPVCSQTPGGGNTNFGRGRKGQKGEPGLVPVVTGIRGRPGPAGPPGSQGPRGERGPKGRPGPRGPQGIDGEPGVPGQPGAPGPPGHPSHPGPDGLSRPFSAQMAGLDEKSGLGSQVGLMPGSVGPVGPRGPQGLQGQQGGAGPTGPPGEPGDPGPMGPIGSRGPEGPPGKPGEDGEPGRNGNPGEVGFAGSPGARGFPGAPGLPGLKGHRGHKGLEGPKGEVGAPGSKGEAGPTGPMGAMGPLGPRGMPGERGRLGPQGAPGQRGAHGMPGKPGPMGPLGIPGSSGFPGNPGMKGEAGPTGARGPEGPQGQRGETGPPGPVGSPGLPGAIGTDGTPGAKGPTGSPGTSGPPGSAGPPGSPGPQGSTGPQGIRGQPGDPGVPGFKGEAGPKGEPGPHGIQGPIGPPGEEGKRGPRGDPGTVGPPGPVGERGAPGNRGFPGSDGLPGPKGAQGERGPVGSSGPKGSQGDPGRPGEPGLPGARGLTGNPGVQGPEGKLGPLGAPGEDGRPGPPGSIGIRGQPGSMGLPGPKGSSGDPGKPGEAGNAGVPGQRGAPGKDGEVGPSGPVGPPGLAGERGEQGPPGPTGFQGLPGPPGPPGEGGKPGDQGVPGDPGAVGPLGPRGERGNPGERGEPGITGLPGEKGMAGGHGPDGPKGSPGPSGTPGDTGPPGLQGMPGERGIAGTPGPKGDRGGIGEKGAEGTAGNDGARGLPGPLGPPGPAGPTGEKGEPGPRGLVGPPGSRGNPGSRGENGPTGAVGFAGPQGPDGQPGVKGEPGEPGQKGDAGSPGPQGLAGSPGPHGPNGVPGLKGGRGTQGPPGATGFPGSAGRVGPPGPAGAPGPAGPLGEPGKEGPPGLRGDPGSHGRVGDRGPAGPPGGPGDKGDPGEDGQPGPDGPPGPAGTTGQRGIVGMPGQRGERGMPGLPGPAGTPGKVGPTGATGDKGPPGPVGPPGSNGPVGEPGPEGPAGNDGTPGRDGAVGERGDRGDPGPAGLPGSQGAPGTPGPVGAPGDAGQRGDPGSRGPIGPPGRAGKRGLPGPQGPRGDKGDHGDRGDRGQKGHRGFTGLQGLPGPPGPNGEQGSAGIPGPFGPRGPPGPVGPSGKEGNPGPLGPIGPPGVRGSVGEAGPEGPPGEPGPPGPPGPPGHLTAALGDIMGHYDESMPDPLPEFTEDQAAPDDKNKTDPGVHATLKSLSSQIETMRSPDGSKKHPARTCDDLKLCHSAKQSGEYWIDPNQGSVEDAIKVYCNMETGETCISANPSSVPRKTWWASKSPDNKPVWYGLDMNRGSQFAYGDHQSPNTAITQMTFLRLLSKEASQNITYICKNSVGYMDDQAKNLKKAVVLKGANDLDIKAEGNIRFRYIVLQDTCSKRNGNVGKTVFEYRTQNVARLPIIDLAPVDVGGTDQEFGVEIGPVCFV

SEQ ID NO: 3319 - protein, 1112 aa, Homo Sapiens
MPGSVGPVGPRGPQGLQGQQGGAGPTGPPGEPGDPGPMGPIGSRGPEGPPGKPGEDGEPGRNGNPGEVGFAGSPGARGFPGAPGLPGLKGHRGHKGLEGPKGEVGAPGSKGEAGPTGPMGDPGTVGPPGPVGERGAPGNRGFPGSDGLPGPKGAQGERGPVGSSGPKGSQGDPGRPGEPGLPGARGLTGNPGVQGPEGKLGPLGAPGEDGRPGPPGSIGIRGQPGSMGLPGPKGSSGDPGKPGEAGNAGVPGQRGAPGKDGEVGPSGPVGPPGLAGERGEQGPPGPTGFQGLPGPPGPPGEGGKPGDQGVPGDPGAVGPLGPRGERGNPGERGEPGITGLPGEKGMAGGHGPDGPKGSPGPSGTPGDTGPPGLQGMPGERGIAGTPGPKGDRGGIGEKGAEGTAGNDGARGLPGPLGPPGPAGPTGEKGEPGPRGLVGPPGSRGNPGSRGENGPTGAVGFAGPQGPDGQPGVKGEPGEPGQKGDAGSPGPQGLAGSPGPHGPNGVPGLKGGRGTQGPPGATGFPGSAGRVGPPGPAGAPGPAGPLGEPGKEGPPGLRGDPGSHGRVGDRGPAGPPGGPGDKGDPGEDGQPGPDGPPGPAGTTGQRGIVGMPGQRGERGMPGLPGPAGTPGKVGPTGATGDKGPPGPVGPPGSNGPVGEPGPEGPAGNDGTPGRDGAVGERGDRGDPGPAGLPGSQGAPGTPGPVGAPGDAGQRGDPGSRGPIGPPGRAGKRGLPGPQGPRGDKGDHGDRGDRGQKGHRGFTGLQGLPGPPGPNGEQGSAGIPGPFGPRGPPGPVGPSGKEGNPGPLGPIGPPGVRGSVGEAGPEGPPGEPGPPGPPGPPGHLTAALGDIMGHYDESMPDPLPEFTEDQAAPDDKNKTDPGVHATLKSLSSQIETMRSPDGSKKHPARTCDDLKLCHSAKQSGEYWIDPNQGSVEDAIKVYCNMETGETCISANPSSVPRKTWWASKSPDNKPVWYGLDMNRGSQFAYGDHQSPNTAITQMTFLRLLSKEASQNITYICKNSVGYMDDQAKNLKKAVVLKGANDLDIKAEGNIRFRYIVLQDTCSKRNGNVGKTVFEYRTQNVARLPIIDLAPVDVGGTDQEFGVEIGPVCFV

SEQ ID NO: 3320 - protein, 1745 aa, Homo Sapiens
MGNRRDLGQPRAGLCLLLAALQLLPGTQADPVDVLKALGVQGGQAGVPEGPGFCPQRTPEGDRAFRIGQASTLGIPTWELFPEGHFPENFSLLITLRGQPANQSVLLSIYDERGARQLGLALGPALGLLGDPFRPLPQQVNLTDGRWHRVAVSIDGEMVTLVADCEAQPPVLGHGPRFISIAGLTVLGTQDLGEKTFEGDIQELLISPDPQAAFQACERYLPDCDNLAPAATVAPQGEPETPRPRRKGKGKGRKKGRGRKGKGRKKNKEIWTSSPPPDSAENQTSTDIPKTETPAPNLPPTPTPLVVTSTVTTGLNATILERSLDPDSGTELGTLETKAAREDEEGDDSTMGPDFRAAEYPSRTQFQIFPGAGEKGAKGEPAVIEKGQQFEGPPGAPGPQGVVGPSGPPGPPGFPGDPGPPGPAGLPGIPGIDGIRGPPGTVIMMPFQFAGGSFKGPPVSFQQAQAQAVLQQTQLSMKGPPGPVGLTGRPGPVGLPGHPGLKGEEGAEGPQGPRGLQGPHGPPGRVGKMGRPGADGARGLPGDTGPKGDRGFDGLPGLPGEKGQRGDFGHVGQPGPPGEDGERGAEGPPGPTGQAGEPGPRGLLGPRGSPGPTGRPGVTGIDGAPGAKGNVGPPGEPGPPGQQGNHGSQGLPGPQGLIGTPGEKGPPGNPGIPGLPGSDGPLGHPGHEGPTGEKGAQGPPGSAGPPGYPGPRGVKGTSGNRGLQGEKGEKGEDGFPGFKGDVGLKGDQGKPGAPGPRGEDGPEGPKGQAGQAGEEGPPGSAGEKGKLGVPGLPGYPGRPGPKGSIGFPGPLGPIGEKGKSGKTGQPGLEGERGPPGSRGERGQPGATGQPGPKGDVGQDGAPGIPGEKGLPGLQGPPGFPGPKGPPGHQGKDGRPGHPGQRGELGFQGQTGPPGPAGVLGPQGKTGEVGPLGERGPPGPPGPPGEQGLPGLEGREGAKGELGPPGPLGKEGPAGLRGFPGPKGGPGDPGPTGLKGDKGPPGPVGANGSPGERGPLGPAGGIGLPGQSGSEGPVGPAGKKGSRGERGPPGPTGKDGIPGPLGPLGPPGAAGPSGEEGDKGDVGAPGHKGSKGDKGDAGPPGQPGIRGPAGHPGPPGADGAQGRRGPPGLFGQKGDDGVRGFVGVIGPPGLQGLPGPPGEKGEVGDVGSMGPHGAPGPRGPQGPTGSEGTPGLPGGVGQPGAVGEKGERGDAGDPGPPGAPGIPGPKGDIGEKGDSGPSGAAGPPGKKGPPGEDGAKGSVGPTGLPGDLGPPGDPGVSGIDGSPGEKGDPGDVGGPGPPGASGEPGAPGPPGKRGPSGHMGREGREGEKGAKGEPGPDGPPGRTGPMGARGPPGRVGPEGLRGIPGPVGEPGLLGAPGQMGPPGPLGPSGLPGLKGDTGPKGEKGHIGLIGLIGPPGEAGEKGDQGLPGVQGPPGPKGDPGPPGPIGSLGHPGPPGVAGPLGQKGSKGSPGSMGPRGDTGPAGPPGPPGAPAELHGLRRRRRFVPVPLPVVEGGLEEVLASLTSLSLELEQLRRPPGTAERPGLVCHELHRNHPHLPDGEYWIDPNQGCARDSFRVFCNFTAGGETCLYPDKKFEIVKLASWSKEKPGGWYSTFRRGKKFSYVDADGSPVNVVQLNFLKLLSATARQNFTYSCQNAAAWLDEATGDYSHSARFLGTNGEELSFNQTTAATVSVPQDGCRLRKGQTKTLFEFSSSRAGFLPLWDVAATDFGQTNQKFGFELGPVCFSS

SEQ ID NO: 3321 - protein, 1028 aa, Homo Sapiens
MRAARALLPLLLQACWTAAQDEPETPRAVAFQDCPVDLFFVLDTSESVALRLKPYGALVDKVKSFTKRFIDNLRDRYYRCDRNLVWNAGALHYSDEVEIIQGLTRMPGGRDALKSSVDAVKYFGKGTYTDCAIKKGLEQLLVGGSHLKENKYLIVVTDGHPLEGYKEPCGGLEDAVNEAKHLGVKVFSVAITPDHLEPRLSIIATDHTYRRNFTAADWGQSRDAEEAISQTIDTIVDMIKNNVEQVCCSFECQPARGPPGLRGDPGFEGERGKPGLPGEKGEAGDPGRPGDLGPVGYQGMKGEKGSRGEKGSRGPKGYKGEKGKRGIDGVDGVKGEMGYPGLPGCKGSPGFDGIQGPPGPKGDPGAFGLKGEKGEPGADGEAGRPGSSGPSGDEGQPGEPGPPGEKGEAGDEGNPGPDGAPGERGGPGERGPRGTPGTRGPRGDPGEAGPQGDQGREGPVGVPGDPGEAGPIGPKGYRGDEGPPGSEGARGAPGPAGPPGDPGLMGERGEDGPAGNGTEGFPGFPGYPGNRGAPGINGTKGYPGLKGDEGEAGDPGDDNNDIAPRGVKGAKGYRGPEGPQGPPGHQGPPGPDECEILDIIMKMCSCCECKCGPIDLLFVLDSSESIGLQNFEIAKDFVVKVIDRLSRDELVKFEPGQSYAGVVQYSHSQMQEHVSLRSPSIRNVQELKEAIKSLQWMAGGTFTGEALQYTRDQLLPPSPNNRIALVITDGRSDTQRDTTPLNVLCSPGIQVVSVGIKDVFDFIPGSDQLNVISCQGLAPSQGRPGLSLVKENYAELLEDAFLKNVTAQICIDKKCPDYTCPITFSSPADITILLDGSASVGSHNFDTTKRFAKRLAERFLTAGRTDPAHDVRVAVVQYSGTGQQRPERASLQFLQNYTALASAVDAMDFINDATDVNDALGYVTRFYREASSGAAKKRLLLFSDGNSQGATPAAIEKAVQEAQRAGIEIFVVVVGRQVNEPHIRVLVTGKTAEYDVAYGESHLFRVPSYQALLRGVFHQTVSRKVALG

SEQ ID NO: 3322 - protein, 1026 aa, Homo Sapiens [sequence omitted]

SEQ ID NO: 3323 - protein, 250 aa, Homo Sapiens
GNKGAKGDRGLPGPRGPQGALGEPGKQGSRGDPGDAGPRGDSGQPGPKGDPGRPGFSYPGPRGAPGEKGEPGPRGPEGGRGDFGLKGEPGRKGEKGEPADPGPPGEPGPRGPRGVPGPEGEPGPPGDPGLTECDVMTYVRETCGCCGSEVSPVPPDDPATPPDCEKRCGALDVVFVIDSSESIGYTNFTLEKNFVINVVNRLGAIAKDPKSETGTRVGVVQYSHEGTFEAIQLDDERIDSLSSFKEAVKN

SEQ ID NO: 3324 - protein, 180 aa, Homo Sapiens
MLQGTCSVLLLWGILGAIQAQQQEVISPDTTERNNNCPEKTDCPIHVYFVLDTSESVTMQSPTDILLFHMKQFVPQFISQLQNEFYLDQVALSWRYGGLHFSDQVEVFSPPGSDRASFIKNLQGISSFRRGTFTDCALANMTEQIRQDRSKGTVHFAVVITDGHVTGSPCGGIKLQAERA

SEQ ID NO: 3325 - protein, 1019 aa, Homo Sapiens
MLQGTCSVLLLWGILGAIQAQQQEVISPDTTERNNNCPEKTDCPIHVYFVLDTSESVTMQSPTDILLFHMKQFVPQFISQLQNEFYLDQVALSWRYGGLHFSDQVEVFSPPGSDRASFIKNLQGISSFRRGTFTDCALANMTEQIRQDRSKGTVHFAVVITDGHVTGSPCGGIKLQAERAREEGIRLFAVAPNQNLKEQGLRDIASTPHELYRNDYATMLPDSTEIDQDTINRIIKVMKHEAYGECYKVSCLEIPGPSGPKGYRGQKGAKGNMGEPGEPGQKGRQGDPGIEGPIGFPGPKGVPGFKGEKGEFGADGRKGAPGLAGKNGTDGQKGKLGRIGPPGCKGDPGNRGPDGYPGEAGSPGERGDQGGKGDPGRPGRRGPPGEIGAKGSKGYQGNSGAPGSPGVKGAKGGPGPRGPKGEPGRRGDPGTKGSPGSDGPKGEKGDPGPEGPRGLAGEVGNKGAKGDRGLPGPRGPQGALGEPGKQGSRGDPGDAGPRGDSGQPGPKGDPGRPGFSYPGPRGAPGEKGEPGPRGPEGGRGDFGLKGEPGRKGEKGEPADPGPPGEPGPRGPRGVPGPEGEPGPPGDPGLTECDVMTYVRETCGCCDCEKRCGALDVVFVIDSSESIGYTNFTLEKNFVINVVNRLGAIAKDPKSETGTRVGVVQYSHEGTFEAIQLDDERIDSLSSFKEAVKNLEWIAGGTWTPSALKFAYDRLIKESRRQKTRVFAVVITDGRHDPRDDDLNLRALCDRDVTVTAIGIGDMFHEKHESENLYSIACDKPQQVRNMTLFSDLVAEKFIDDMEDVLCPDPQIVCPDLPCQTELSVAQCTQRPVDIVFLLDGSERLGEQNFHKARRFVEQVARRLTLARRDDDPLNARVALLQFGGPGEQQVAFPLSHNLTAIHEALETTQYLNSFSHVGAGVVHAINAIVRSPRGGARRHAELSFVFLTDGVTGNDSLHESAHSMRKQNVVPTVLALGSDVDMDVLTTLSLGDRAAVFHEKDYDSLAQPGFFDRFIRWIC

SEQ ID NO: 3326 - protein, 828 aa, Homo Sapiens
MLQGTCSVLLLWGILGAIQAQQQEVISPDTTERNNNCPEKTDCPIHVYFVLDTSESVTMQSPTDILLFHMKQFVPQFISQLQNEFYLDQVALSWRYGGLHFSDQVEVFSPPGSDRASFIKNLQGISSFRRGTFTDCALANMTEQIRQDRSKGTVHFAVVITDGHVTGSPCGGIKLQAERAREEGIRLFAVAPNQNLKEQGLRDIASTPHELYRNDYATMLPDSTEIDQDTINRIIKVMKHEAYGECYKVSCLEIPGPSGPKGYRGQKGAKGNMGEPGEPGQKGRQGDPGIEGPIGFPGPKGVPGFKGEKGEFGADGRKGAPGLAGKNGTDGQKGKLGRIGPPGCKGDPGNRGPDGYPGEAGSPGERGDQGGKGDPGRPGRRGPPGEIGAKGSKGYQGNSGAPGSPGVKGAKGGPGPRGPKGEPGRRGDPGTKGSPGSDGPKGEKGDPGPEGPRGLAGEVGNKGAKGDRGLPGPRGPQGALGEPGKQGSRGDPGDAGPRGDSGQPGPKGDPGRPGFSYPGPRGAPGEKGEPGPRGPEGGRGDFGLKGEPGRKGEKGEPADPGPPGEPGPRGPRGVPGPEGEPGPPGDPGLTECDVMTYVRETCGCCDCEKRCGALDVVFVIDSSESIGYTNFTLEKNFVINVVNRLGAIAKDPKSETGTRVGVVQYSHEGTFEAIQLDDERIDSLSSFKEAVKNLEWIAGGTWTPSALKFAYDRLIKESRRQKTRVFAVVITDGRHDPRDDDLNLRALCDRDVTVTAIGIGDMFHEKHESENLYSIACDKPQQVRNMTLFSDLVAEKFIDDMEDVLCPDPQIVCPDLPCQTGLDGAVLC

SEQ ID NO: 3327 - protein, 918 aa, Homo Sapiens
MLQGTCSVLLLWGILGAIQAQQQEVISPDTTERNNNCPEKTDCPIHVYFVLDTSESVTMQSPTDILLFHMKQFVPQFISQLQNEFYLDQVALSWRYGGLHFSDQVEVFSPPGSDRASFIKNLQGISSFRRGTFTDCALANMTEQIRQDRSKGTVHFAVVITDGHVTGSPCGGIKLQAERAREEGIRLFAVAPNQNLKEQGLRDIASTPHELYRNDYATMLPDSTEIDQDTINRIIKVMKHEAYGECYKVSCLEIPGPSGPKGYRGQKGAKGNMGEPGEPGQKGRQGDPGIEGPIGFPGPKGVPGFKGEKGEFGADGRKGAPGLAGKNGTDGQKGKLGRIGPPGCKGDPGNRGPDGYPGEAGSPGERGDQGGKGDPGRPGRRGPPGEIGAKGSKGYQGNSGAPGSPGVKGAKGGPGPRGPKGEPGRRGDPGTKGSPGSDGPKGEKGDPGPEGPRGLAGEVGNKGAKGDRGLPGPRGPQGALGEPGKQGSRGDPGDAGPRGDSGQPGPKGDPGRPGFSYPGPRGAPGEKGEPGPRGPEGGRGDFGLKGEPGRKGEKGEPADPGPPGEPGPRGPRGVPGPEGEPGPPGDPGLTECDVMTYVRETCGCCDCEKRCGALDVVFVIDSSESIGYTNFTLEKNFVINVVNRLGAIAKDPKSETGTRVGVVQYSHEGTFEAIQLDDERIDSLSSFKEAVKNLEWIAGGTWTPSALKFAYDRLIKESRRQKTRVFAVVITDGRHDPRDDDLNLRALCDRDVTVTAIGIGDMFHEKHESENLYSIACDKPQQVRNMTLFSDLVAEKFIDDMEDVLCPDPQIVCPDLPCQTDAPWPGGEPPVTFLRTEEGPDATFPRTIPLIQQLLNATELTQDPAAYSQLVAVLVYTAERAKFATGVERQDWMELFIDTFKLVHRDIVGDPETALALC

SEQ ID NO: 3328 - protein, 828 aa, Homo Sapiens; identical to SEQ ID NO: 3326

SEQ ID NO: 3329 - protein, 2971 aa, Homo Sapiens
MRKHRHLPLVAVFCLFLSGFPTTHAQQQQAAQDSADIIFLIDGSNNTGSVNFAVILDFLVNLLEKLPIGTQQIRVGVVQFSDEPRTMFSLDTYSTKAQVLGAVKALGFAGGELANIGLALDFVVENHFTRAGGSRVEEGVPQVLVLISAGPSSDEIRYGVVALKQASVFSFGLGAQAASRAELQHIATDDNLVFTVPEFRSFGDLQEKLLPYIVGVAQRHIVLKPPTIVTQVIEVNKRDIVFLVDGSSALGLANFNAIRDFIAKVIQRLEIGQDLIQVAVAQYADTVRPEFYFNTHPTKREVITAVRKMKPLDGSALYTGSALDFVRNNLFTSSAGYRAAEGIPKLLVLITGGKSLDEISQPAQELKRSSIMAFAIGNKGADQAELEEIAFDSSLVFIPAEFRAAPLQGMLPGLLAPLRTLSGTPEVHSNKRDIIFLLDGSANVGKTNFPYVRDFVMNLVNSLDIGNDNIRVGLVQFSDTPVTEFSLNTYQTKSDILGHLRQLQLQGGSGLNTGSALSYVYANHFTEAGGSRIREHVPQLLLLLTAGQSEDSYLQAANALTRAGILTFCVGASQANKAELEQIAFNPSLVYLMDDFSSLPALPQQLIQPLTTYVSGGVEEVPLAQPESKRDILFLFDGSANLVGQFPVVRDFLYKIIDELNVKPEGTRIAVAQYSDDVKVESRFDEHQSKPEILNLVKRMKIKTGKALNLGYALDYAQRYIFVKSAGSRIEDGVLQFLVLLVAGRSSDRVDGPASNLKQSGVVPFIFQAKNADPAELEQIVLSPAFILAAESLPKIGDLHPQIVNLLKSVHNGAPAPVSGEKDVVFLLDGSEGVRSGFPLLKEFVQRVVESLDVGQDRVRVAVVQYSDRTRPEFYLNSYMNKQDVVNAVRQLTLLGGPTPNTGAALEFVLRNILVSSAGSRITEGVPQLLIVLTADRSGDDVRNPSVVVKRGGAVPIGIGIGNADITEMQTISFIPDFAVAIPTFRQLGTVQQVISERVTQLTREELSRLQPVLQPLPSPGVGGKRDVVFLIDGSQSAGPEFQYVRTLIERLVDYLDVGFDTTRVAVIQFSDDPKVEFLLNAHSSKDEVQNAVQRLRPKGGRQINVGNALEYVSRNIFKRPLGSRIEEGVPQFLVLISSGKSDDEVDDPAVELKQFGVAPFTIARNADQEELVKISLSPEYVFSVSTFRELPSLEQKLLTPITTLTSEQIQKLLASTRYPPPAVESDAADIVFLIDSSEGVRPDGFAHIRDFVSRIVRRLNIGPSKVRVGVVQFSNDVFPEFYLKTYRSQAPVLDAIRRLRLRGGSPLNTGKALEFVARNLFVKSAGSRIEDGVPQHLVLVLGGKSQDDVSRFAQVIRSSGIVSLGVGDRNIDRTELQTITNDPRLVFTVREFRELPNIEERIMNSFGPSAATPAPPGVDTPPPSRPEKKKADIVFLLDGSINFRRDSFQEVLRFVSEIVDTVYEDGDSIQVGLVQYNSDPTDEFFLKDFSTKRQIIDAINKVVYKGGRHANTKVGLEHLRVNHFVPEAGSRLDQRVPQIAFVITGGKSVEDAQDVSLALTQRGVKVFAVGVRNIDSEEVGKIASNSATAFRVGNVQELSELSEQVLETLHDAMHETLCPGVTDAAKACNLDVILGFDGSRDQNVFVAQKGFESKVDAILNRISQMHRVSCSGGRSPTVRVSVVANTPSGPVEAFDFDEYQPEMLEKFRNMRSQHPYVLTEDTLKVYLNKFRQSSPDSVKVVIHFTDGADGDLADLHRASENLRQEGVRALILVGLERVVNLERLMHLEFGRGFMYDRPLRLNLLDLDYELAEQLDNIAEKACCGVPCKCSGQRGDRGPIGSIGPKGIPGEDGYRGYPGDEGGPGERGPPGVNGTQGFQGCPGQRGVKGSRGFPGEKGEVGEIGLDGLDGEDGDKGLPGSSGEKGNPGRRGDKGPRGEKGERGDVGIRGDPGNPGQDSQERGPKGETGDLGPMGVPGRDGVPGGPGETGKNGGFGRRGPPGAKGNKGGPGQPGFEGEQGTRGAQGPAGPAGPPGLIGEQGISGPRGSGGAAGAPGERGRTGPLGRKGEPGEPGPKGGIGNRGPRGETGDDGRDGVGSEGRRGKKGERGFPGYPGPKGNPGEPGLNGTTGPKGIRGRRGNSGPPGIVGQKGDPGYPGPAGPKGNRGDSIDQCALIQSIKDKCPCCYGPLECPVFPTELAFALDTSEGVNQDTFGRMRDVVLSIVNDLTIAESNCPRGARVAVVTYNNEVTTEIRFADSKRKSVLLDKIKNLQVALTSKQQSLETAMSFVARNTFKRVRNGFLMRKVAVFFSNTPTRASPQLREAVLKLSDAGITPLFLTRQEDRQLINALQINNTAVGHALVLPAGRDLTDFLENVLTCHVCLDICNIDPSCGFGSWRPSFRDRRAAGSDVDIDMAFILDSAETTTLFQFNEMKKYIAYLVRQLDMSPDPKASQHFARVAVVQHAPSESVDNASMPPVKVEFSLTDYGSKEKLVDFLSRGMTQLQGTRALGSAIEYTIENVFESAPNPRDLKIVVLMLTGEVPEQQLEEAQRVILQAKCKGYFFVVLGIGRKVNIKEVYTFASEPNDVFFKLVDKSTELNEEPLMRFGRLLPSFVSSENAFYLSPDIRKQCDWFQGDQPTKNLVKFGHKQVNVPNNVTSSPTSNPVTTTKPVTTTKPVTTTTKPVTTTTKPVTIINQPSVKPAAAKPAPAKPVAAKPVATKMATVRPPVAVKPATAAKPVAAKPAAVRPPAAAAAKPVATKPEVPRPQAAKPAATKPATTKPMVKMSREVQVFEITENSAKLHWERAEPPGPYFYDLTVTSAHDQSLVLKQNLTVTDRVIGGLLAGQTYHVAVVCYLRSQVRATYHGSFSTKKSQPPPPQPARSASSSTINLMVSTEPLALTETDICKLPKDEGTCRDFILKWYYDPNTKSCARFWYGGCGGNENKFGSQKECEKVCAPVLAKPGVISVMGT

SEQ ID NO: 3330 - protein, 1237 aa, Homo Sapiens
MRKHRHLPLVAVFCLFLSGFPTTHAQQQQAAQDSADIIFLIDGSNNTGSVNFAVILDFLVNLLEKLPIGTQQIRVGVVQFSDEPRTMFSLDTYSTKAQVLGAVKALGFAGGELANIGLALDFVVENHFTRAGGSRVEEGVPQVLVLISAGPSSDEIRYGVVALKQASVFSFGLGAQAASRAELQHIATDDNLVFTVPEFRSFGDLQEKLLPYIVGVAQRHIVLKPPTIVTQVIEVNKRDIVFLVDGSSALGLANFNAIRDFIAKVIQRLEIGQDLIQVAVAQYADTVRPEFYFNTHPTKREVITAVRKMKPLDGSALYTGSALDFVRNNLFTSSAGYRAAEGIPKLLVLITGGKSLDEISQPAQELKRSSIMAFAIGNKGADQAELEEIAFDSSLVFIPAEFRAAPLQGMLPGLLAPLRTLSGTPEVHSNKRDIIFLLDGSANVGKTNFPYVRDFVMNLVNSLDIGNDNIRVGLVQFSDTPVTEFSLNTYQTKSDILGHLRQLQLQGGSGLNTGSALSYVYANHFTEAGGSRIREHVPQLLLLLTAGQSEDSYLQAANALTRAGILTFCVGASQANKAELEQIAFNPSLVYLMDDFSSLPALPQQLIQPLTTYVSGGVEEVPLAQPESKRDILFLFDGSANLVGQFPVVRDFLYKIIDELNVKPEGTRIAVAQYSDDVKVESRFDEHQSKPEILNLVKRMKIKTGKALNLGYALDYAQRYIFVKSAGSRIEDGVLQFLVLLVAGRSSDRVDGPASNLKQSGVVPFIFQAKNADPAELEQIVLSPAFILAAESLPKIGDLHPQIVNLLKSVHNGAPAPVSGEKDVVFLLDGSEGVRSGFPLLKEFVQRVVESLDVGQDRVRVAVVQYSDRTRPEFYLNSYMNKQDVVNAVRQLTLLGGPTPNTGAALEFVLRNILVSSAGSRITEGVPQLLIVLTADRSGDDVRNPSVVVKRGGAVPIGIGIGNADITEMQTISFIPDFAVAIPTFRQLGTVQQVISERVTQLTREELSRLQPVLQPLPSPGVGGKRDVVFLIDGSQSAGPEFQYVRTLIERLVDYLDVGFDTTRVAVIQFSDDPKVEFLLNAHSSKDEVQNAVQRLRPKGGRQINVGNALEYVSRNIFKRPLGSRIEEGVPQFLVLISSGKSDDEVDDPAVELKQFGVAPFTIARNADQEELVKISLSPEYVFSVSTFRELPSLEQKLLTPITTLTSEQIQKLLASTRYPPPGEMGASEVLLGAFSI

SEQ ID NO: 3331 - protein, 2971 aa, Homo Sapiens; identical to SEQ ID NO: 3329

SEQ ID NO: 3332 - protein, 3177 aa, Homo Sapiens
MRKHRHLPLVAVFCLFLSGFPTTHAQQQQADVKNGAAADIIFLVDSSWTIGEEHFQLVREFLYDVVKSLAVGENDFHFALVQFNGNPHTEFLLNTYRTKQEVLSHISNMSYIGGTNQTGKGLEYIMQSHLTKAAGSRAGDGVPQVIVVLTDGHSKDGLALPSAELKSADVNVFAIGVEDADEGALKEIASEPLNMHMFNLENFTSLHDIVGNLVSCVHSSVSPERAGDTETLKDITAQDSADIIFLIDGSNNTGSVNFAVILDFLVNLLEKLPIGTQQIRVGVVQFSDEPRTMFSLDTYSTKAQVLGAVKALGFAGGELANIGLALDFVVENHFTRAGGSRVEEGVPQVLVLISAGPSSDEIRYGVVALKQASVFSFGLGAQAASRAELQHIATDDNLVFTVPEFRSFGDLQEKLLPYIVGVAQRHIVLKPPTIVTQVIEVNKRDIVFLVDGSSALGLANFNAIRDFIAKVIQRLEIGQDLIQVAVAQYADTVRPEFYFNTHPTKREVITAVRKMKPLDGSALYTGSALDFVRNNLFTSSAGYRAAEGIPKLLVLITGGKSLDEISQPAQELKRSSIMAFAIGNKGADQAELEEIAFDSSLVFIPAEFRAAPLQGMLPGLLAPLRTLSGTPEVHSNKRDIIFLLDGSANVGKTNFPYVRDFVMNLVNSLDIGNDNIRVGLVQFSDTPVTEFSLNTYQTKSDILGHLRQLQLQGGSGLNTGSALSYVYANHFTEAGGSRIREHVPQLLLLLTAGQSEDSYLQAANALTRAGILTFCVGASQANKAELEQIAFNPSLVYLMDDFSSLPALPQQLIQPLTTYVSGGVEEVPLAQPESKRDILFLFDGSANLVGQFPVVRDFLYKIIDELNVKPEGTRIAVAQYSDDVKVESRFDEHQSKPEILNLVKRMKIKTGKALNLGYALDYAQRYIFVKSAGSRIEDGVLQFLVLLVAGRSSDRVDGPASNLKQSGVVPFIFQAKNADPAELEQIVLSPAFILAAESLPKIGDLHPQIVNLLKSVHNGAPAPVSGEKDVVFLLDGSEGVRSGFPLLKEFVQRVVESLDVGQDRVRVAVVQYSDRTRPEFYLNSYMNKQDVVNAVRQLTLLGGPTPNTGAALEFVLRNILVSSAGSRITEGVPQLLIVLTADRSGDDVRNPSVVVKRGGAVPIGIGIGNADITEMQTISFIPDFAVAIPTFRQLGTVQQVISERVTQLTREELSRLQPVLQPLPSPGVGGKRDVVFLIDGSQSAGPEFQYVRTLIERLVDYLDVGFDTTRVAVIQFSDDPKVEFLLNAHSSKDEVQNAVQRLRPKGGRQINVGNALEYVSRNIFKRPLGSRIEEGVPQFLVLISSGKSDDEVDDPAVELKQFGVAPFTIARNADQEELVKISLSPEYVFSVSTFRELPSLEQKLLTPITTLTSEQIQKLLASTRYPPPAVESDAADIVFLIDSSEGVRPDGFAHIRDFVSRIVRRLNIGPSKVRVGVVQFSNDVFPEFYLKTYRSQAPVLDAIRRLRLRGGSPLNTGKALEFVARNLFVKSAGSRIEDGVPQHLVLVLGGKSQDDVSRFAQVIRSSGIVSLGVGDRNIDRTELQTITNDPRLVFTVREFRELPNIEERIMNSFGPSAATPAPPGVDTPPPSRPEKKKADIVFLLDGSINFRRDSFQEVLRFVSEIVDTVYEDGDSIQVGLVQYNSDPTDEFFLKDFSTKRQIIDAINKVVYKGGRHANTKVGLEHLRVNHFVPEAGSRLDQRVPQIAFVITGGKSVEDAQDVSLALTQRGVKVFAVGVRNIDSEEVGKIASNSATAFRVGNVQELSELSEQVLETLHDAMHETLCPGVTDAAKACNLDVILGFDGSRDQNVFVAQKGFESKVDAILNRISQMHRVSCSGGRSPTVRVSVVANTPSGPVEAFDFDEYQPEMLEKFRNMRSQHPYVLTEDTLKVYLNKFRQSSPDSVKVVIHFTDGADGDLADLHRASENLRQEGVRALILVGLERVVNLERLMHLEFGRGFMYDRPLRLNLLDLDYELAEQLDNIAEKACCGVPCKCSGQRGDRGPIGSIGPKGIPGEDGYRGYPGDEGGPGERGPPGVNGTQGFQGCPGQRGVKGSRGFPGEKGEVGEIGLDGLDGEDGDKGLPGSSGEKGNPGRRGDKGPRGEKGERGDVGIRGDPGNPGQDSQERGPKGETGDLGPMGVPGRDGVPGGPGETGKNGGFGRRGPPGAKGNKGGPGQPGFEGEQGTRGAQGPAGPAGPPGLIGEQGISGPRGSGGAAGAPGERGRTGPLGRKGEPGEPGPKGGIGNRGPRGETGDDGRDGVGSEGRRGKKGERGFPGYPGPKGNPGEPGLNGTTGPKGIRGRRGNSGPPGIVGQKGDPGYPGPAGPKGNRGDSIDQCALIQSIKDKCPCCYGPLECPVFPTELAFALDTSEGVNQDTFGRMRDVVLSIVNDLTIAESNCPRGARVAVVTYNNEVTTEIRFADSKRKSVLLDKIKNLQVALTSKQQSLETAMSFVARNTFKRVRNGFLMRKVAVFFSNTPTRASPQLREAVLKLSDAGITPLFLTRQEDRQLINALQINNTAVGHALVLPAGRDLTDFLENVLTCHVCLDICNIDPSCGFGSWRPSFRDRRAAGSDVDIDMAFILDSAETTTLFQFNEMKKYIAYLVRQLDMSPDPKASQHFARVAVVQHAPSESVDNASMPPVKVEFSLTDYGSKEKLVDFLSRGMTQLQGTRALGSAIEYTIENVFESAPNPRDLKIVVLMLTGEVPEQQLEEAQRVILQAKCKGYFFVVLGIGRKVNIKEVYTFASEPNDVFFKLVDKSTELNEEPLMRFGRLLPSFVSSENAFYLSPDIRKQCDWFQGDQPTKNLVKFGHKQVNVPNNVTSSPTSNPVTTTKPVTTTKPVTTTTKPVTTTTKPVTIINQPSVKPAAAKPAPAKPVAAKPVATKMATVRPPVAVKPATAAKPVAAKPAAVRPPAAAAAKPVATKPEVPRPQAAKPAATKPATTKPMVKMSREVQVFEITENSAKLHWERAEPPGPYFYDLTVTSAHDQSLVLKQNLTVTDRVIGGLLAGQTYHVAVVCYLRSQVRATYHGSFSTKKSQPPPPQPARSASSSTINLMVSTEPLALTETDICKLPKDEGTCRDFILKWYYDPNTKSCARFWYGGCGGNENKFGSQKECEKVCAPVLAKPGVISVMGT

SEQ ID NO: 3333 - protein, 708 aa, Homo Sapiens
MRKHRHLPLVAVFCLFLSGFPTTHAQQQQADVKNGAAADIIFLVDSSWTIGEEHFQLVREFLYDVVKSLAVGENDFHFALVQFNGNPHTEFLLNTYRTKQEVLSHISNMSYIGGTNQTGKGLEYIMQSHLTKAAGSRAGDGVPQVIVVLTDGHSKDGLALPSAELKSADVNVFAIGVEDADEGALKEIASEPLNMHMFNLENFTSLHDIVGNLVSCVHSSVSPERAGDTETLKDITAQDSADIIFLIDGSNNTGSVNFAVILDFLVNLLEKLPIGTQQIRVGVVQFSDEPRTMFSLDTYSTKAQVLGAVKALGFAGGELANIGLALDFVVENHFTRAGGSRVEEGVPQVLVLISAGPSSDEIRYGVVALKQASVFSFGLGAQAASRAELQHIATDDNLVFTVPEFRSFGDLQEKLLPYIVGVAQRHIVLKPPTIVTQVIEVNKRDIVFLVDGSSALGLANFNAIRDFIAKVIQRLEIGQDLIQVAVAQYADTVRPEFYFNTHPTKREVITAVRKMKPLDGSALYTGSALDFVRNNLFTSSAGYRAAEGIPKLLVLITGGKSLDEISQPAQELKRSSIMAFAIGNKGADQAELEEIAFDSSLVFIPAEFRAAPLQGMLPGLLAPLRTLSGTPEESKRDILFLFDGSANLVGQFPVVRDFLYKIIDELNVKPEGTRIAVAQYSDDVKVESRFDEHQSKPEILNLVKRMKI

SEQ ID NO: 3334 - protein, 2569 aa, Homo Sapiens
MRKHRHLPLVAVFCLFLSGFPTTHAQQQQAVIEVNKRDIVFLVDGSSALGLANFNAIRDFIAKVIQRLEIGQDLIQVAVAQYADTVRPEFYFNTHPTKREVITAVRKMKPLDGSALYTGSALDFVRNNLFTSSAGYRAAEGIPKLLVLITGGKSLDEISQPAQELKRSSIMAFAIGNKGADQAELEEIAFDSSLVFIPAEFRAAPLQGMLPGLLAPLRTLSGTPEESKRDILFLFDGSANLVGQFPVVRDFLYKIIDELNVKPEGTRIAVAQYSDDVKVESRFDEHQSKPEILNLVKRMKIKTGKALNLGYALDYAQRYIFVKSAGSRIEDGVLQFLVLLVAGRSSDRVDGPASNLKQSGVVPFIFQAKNADPAELEQIVLSPAFILAAESLPKIGDLHPQIVNLLKSVHNGAPAPVSGEKDVVFLLDGSEGVRSGFPLLKEFVQRVVESLDVGQDRVRVAVVQYSDRTRPEFYLNSYMNKQDVVNAVRQLTLLGGPTPNTGAALEFVLRNILVSSAGSRITEGVPQLLIVLTADRSGDDVRNPSVVVKRGGAVPIGIGIGNADITEMQTISFIPDFAVAIPTFRQLGTVQQVISERVTQLTREELSRLQPVLQPLPSPGVGGKRDVVFLIDGSQSAGPEFQYVRTLIERLVDYLDVGFDTTRVAVIQFSDDPKVEFLLNAHSSKDEVQNAVQRLRPKGGRQINVGNALEYVSRNIFKRPLGSRIEEGVPQFLVLISSGKSDDEVDDPAVELKQFGVAPFTIARNADQEELVKISLSPEYVFSVSTFRELPSLEQKLLTPITTLTSEQIQKLLASTRYPPPAVESDAADIVFLIDSSEGVRPDGFAHIRDFVSRIVRRLNIGPSKVRVGVVQFSNDVFPEFYLKTYRSQAPVLDAIRRLRLRGGSPLNTGKALEFVARNLFVKSAGSRIEDGVPQHLVLVLGGKSQDDVSRFAQVIRSSGIVSLGVGDRNIDRTELQTITNDPRLVFTVREFRELPNIEERIMNSFGPSAATPAPPGVDTPPPSRPEKKKADIVFLLDGSINFRRDSFQEVLRFVSEIVDTVYEDGDSIQVGLVQYNSDPTDEFFLKDFSTKRQIIDAINKVVYKGGRHANTKVGLEHLRVNHFVPEAGSRLDQRVPQIAFVITGGKSVEDAQDVSLALTQRGVKVFAVGVRNIDSEEVGKIASNSATAFRVGNVQELSELSEQVLETLHDAMHETLCPGVTDAAKACNLDVILGFDGSRDQNVFVAQKGFESKVDAILNRISQMHRVSCSGGRSPTVRVSVVANTPSGPVEAFDFDEYQPEMLEKFRNMRSQHPYVLTEDTLKVYLNKFRQSSPDSVKVVIHFTDGADGDLADLHRASENLRQEGVRALILVGLERVVNLERLMHLEFGRGFMYDRPLRLNLLDLDYELAEQLDNIAEKACCGVPCKCSGQRGDRGPIGSIGPKGIPGEDGYRGYPGDEGGPGERGPPGVNGTQGFQGCPGQRGVKGSRGFPGEKGEVGEIGLDGLDGEDGDKGLPGSSGEKGNPGRRGDKGPRGEKGERGDVGIRGDPGNPGQDSQERGPKGETGDLGPMGVPGRDGVPGGPGETGKNGGFGRRGPPGAKGNKGGPGQPGFEGEQGTRGAQGPAGPAGPPGLIGEQGISGPRGSGGAAGAPGERGRTGPLGRKGEPGEPGPKGGIGNRGPRGETGDDGRDGVGSEGRRGKKGERGFPGYPGPKGNPGEPGLNGTTGPKGIRGRRGNSGPPGIVGQKGDPGYPGPAGPKGNRGDSIDQCALIQSIKDKCPFHGPLECPVFPTELAFALDTSEGVNQDTFGRMRDVVLSIVNDLTIAESNCPRGARVAVVTYNNEVTTEIRFADSKRKSVLLDKIKNLQVALTSKQQSLETAMSFVARNTFKRVRNGFLMRKVAVFFSNTPTRASPQLREAVLKLSDAGITPLFLTRQEDRQLINALQINNTAVGHALVLPAGRDLTDFLENVLTCHVCLDICNIDPSCGFGSWRPSFRDRRAAGSDVDIDMAFILDSAETTTLFQFNEMKKYIAYLVRQLDMSPDPKASQHFARVAVVQHAPSESVDNASMPPVKVEFSLTDYGSKEKLVDFLSRGMTQLQGTRALGSAIEYTIENVFESAPNPRDLKIVVLMLTGEVPEQQLEEAQRVILQAKCKGYFFVVLGIGRKVNIKEVYTFASEPNDVFFKLVDKSTELNEEPLMRFGRLLPSFVSSENAFYLSPDIRKQCDWFQGDQPTKNLVKFGHKQVNVPNNVTSSPTSNPVTTTKPVTTTKPVTTTTKPVTTTTKPVTIINQPSVKPAAAKPAPAKPVAAKPVATKMATVRPPVAVKPATAAKPVAAKPAAVRPPAAAAAKPVATKPEVPRPQAAKPAATKPATTKPMVKMSREVQVFEITENSAKLHWERAEPPGPYFYDLTVTSAHDQSLVLKQNLTVTDRVIGGLLAGQTYHVAVVCYLRSQVRATYHGSFSTKKSQPPPPQPARSASSSTINLMVSTEPLALTETDICKLPKDEGTCRDFILKWYYDPNTKSCARFWYGGCGGNENKFGSQKECEKVCAPVLAKPGVISVMGT

SEQ ID NO: 3335 - protein, 2570 aa, Homo Sapiens
MRKHRHLPLVAVFCLFLSGFPTTHAQQQQAVIEVNKRDIVFLVDGSSALGLANFNAIRDFIAKVIQRLEIGQDLIQVAVAQYADTVRPEFYFNTHPTKREVITAVRKMKPLDGSALYTGSALDFVRNNLFTSSAGYRAAEGIPKLLVLITGGKSLDEISQPAQELKRSSIMAFAIGNKGADQAELEEIAFDSSLVFIPAEFRAAPLQGMLPGLLAPLRTLSGTPEESKRDILFLFDGSANLVGQFPVVRDFLYKIIDELNVKPEGTRIAVAQYSDDVKVESRFDEHQSKPEILNLVKRMKIKTGKALNLGYALDYAQRYIFVKSAGSRIEDGVLQFLVLLVAGRSSDRVDGPASNLKQSGVVPFIFQAKNADPAELEQIVLSPAFILAAESLPKIGDLHPQIVNLLKSVHNGAPAPVSGEKDVVFLLDGSEGVRSGFPLLKEFVQRVVESLDVGQDRVRVAVVQYSDRTRPEFYLNSYMNKQDVVNAVRQLTLLGGPTPNTGAALEFVLRNILVSSAGSRITEGVPQLLIVLTADRSGDDVRNPSVVVKRGGAVPIGIGIGNADITEMQTISFIPDFAVAIPTFRQLGTVQQVISERVTQLTREELSRLQPVLQPLPSPGVGGKRDVVFLIDGSQSAGPEFQYVRTLIERLVDYLDVGFDTTRVAVIQFSDDPKVEFLLNAHSSKDEVQNAVQRLRPKGGRQINVGNALEYVSRNIFKRPLGSRIEEGVPQFLVLISSGKSDDEVDDPAVELKQFGVAPFTIARNADQEELVKISLSPEYVFSVSTFRELPSLEQKLLTPITTLTSEQIQKLLASTRYPPPAVESDAADIVFLIDSSEGVRPDGFAHIRDFVSRIVRRLNIGPSKVRVGVVQFSNDVFPEFYLKTYRSQAPVLDAIRRLRLRGGSPLNTGKALEFVARNLFVKSAGSRIEDGVPQHLVLVLGGKSQDDVSRFAQVIRSSGIVSLGVGDRNIDRTELQTITNDPRLVFTVREFRELPNIEERIMNSFGPSAATPAPPGVDTPPPSRPEKKKADIVFLLDGSINFRRDSFQEVLRFVSEIVDTVYEDGDSIQVGLVQYNSDPTDEFFLKDFSTKRQIIDAINKVVYKGGRHANTKVGLEHLRVNHFVPEAGSRLDQRVPQIAFVITGGKSVEDAQDVSLALTQRGVKVFAVGVRNIDSEEVGKIASNSATAFRVGNVQELSELSEQVLETLHDAMHETLCPGVTDAAKACNLDVILGFDGSRDQNVFVAQKGFESKVDAILNRISQMHRVSCSGGRSPTVRVSVVANTPSGPVEAFDFDEYQPEMLEKFRNMRSQHPYVLTEDTLKVYLNKFRQSSPDSVKVVIHFTDGADGDLADLHRASENLRQEGVRALILVGLERVVNLERLMHLEFGRGFMYDRPLRLNLLDLDYELAEQLDNIAEKACCGVPCKCSGQRGDRGPIGSIGPKGIPGEDGYRGYPGDEGGPGERGPPGVNGTQGFQGCPGQRGVKGSRGFPGEKGEVGEIGLDGLDGEDGDKGLPGSSGEKGNPGRRGDKGPRGEKGERGDVGIRGDPGNPGQDSQERGPKGETGDLGPMGVPGRDGVPGGPGETGKNGGFGRRGPPGAKGNKGGPGQPGFEGEQGTRGAQGPAGPAGPPGLIGEQGISGPRGSGGAAGAPGERGRTGPLGRKGEPGEPGPKGGIGNRGPRGETGDDGRDGVGSEGRRGKKGERGFPGYPGPKGNPGEPGLNGTTGPKGIRGRRGNSGPPGIVGQKGDPGYPGPAGPKGNRGDSIDQCALIQSIKDKCPCCYGPLECPVFPTELAFALDTSEGVNQDTFGRMRDVVLSIVNDLTIAESNCPRGARVAVVTYNNEVTTEIRFADSKRKSVLLDKIKNLQVALTSKQQSLETAMSFVARNTFKRVRNGFLMRKVAVFFSNTPTRASPQLREAVLKLSDAGITPLFLTRQEDRQLINALQINNTAVGHALVLPAGRDLTDFLENVLTCHVCLDICNIDPSCGFGSWRPSFRDRRAAGSDVDIDMAFILDSAETTTLFQFNEMKKYIAYLVRQLDMSPDPKASQHFARVAVVQHAPSESVDNASMPPVKVEFSLTDYGSKEKLVDFLSRGMTQLQGTRALGSAIEYTIENVFESAPNPRDLKIVVLMLTGEVPEQQLEEAQRVILQAKCKGYFFVVLGIGRKVNIKEVYTFASEPNDVFFKLVDKSTELNEEPLMRFGRLLPSFVSSENAFYLSPDIRKQCDWFQGDQPTKNLVKFGHKQVNVPNNVTSSPTSNPVTTTKPVTTTKPVTTTTKPVTTTTKPVTIINQPSVKPAAAKPAPAKPVAAKPVATKMATVRPPVAVKPATAAKPVAAKPAAVRPPAAAAAKPVATKPEVPRPQAAKPAATKPATTKPMVKMSREVQVFEITENSAKLHWERAEPPGPYFYDLTVTSAHDQSLVLKQNLTVTDRVIGGLLAGQTYHVAVVCYLRSQVRATYHGSFSTKKSQPPPPQPARSASSSTINLMVSTEPLALTETDICKLPKDEGTCRDFILKWYYDPNTKSCARFWYGGCGGNENKFGSQKECEKVCAPVLAKPGVISVMGT

SEQ ID NO: 3336 - protein, 1036 aa, Homo Sapiens
MRKHRHLPLVAVFCLFLSGFPTTHAQQQQAVIEVNKRDIVFLVDGSSALGLANFNAIRDFIAKVIQRLEIGQDLIQVAVAQYADTVRPEFYFNTHPTKREVITAVRKMKPLDGSALYTGSALDFVRNNLFTSSAGYRAAEGIPKLLVLITGGKSLDEISQPAQELKRSSIMAFAIGNKGADQAELEEIAFDSSLVFIPAEFRAAPLQGMLPGLLAPLRTLSGTPEVHSNKRDIIFLLDGSANVGKTNFPYVRDFVMNLVNSLDIGNDNIRVGLVQFSDTPVTEFSLNTYQTKSDILGHLRQLQLQGGSGLNTGSALSYVYANHFTEAGGSRIREHVPQLLLLLTAGQSEDSYLQAANALTRAGILTFCVGASQANKAELEQIAFNPSLVYLMDDFSSLPALPQQLIQPLTTYVSGGVEEVPLAQPESKRDILFLFDGSANLVGQFPVVRDFLYKIIDELNVKPEGTRIAVAQYSDDVKVESRFDEHQSKPEILNLVKRMKIKTGKALNLGYALDYAQRYIFVKSAGSRIEDGVLQFLVLLVAGRSSDRVDGPASNLKQSGVVPFIFQAKNADPAELEQIVLSPAFILAAESLPKIGDLHPQIVNLLKSVHNGAPAPVSGEKDVVFLLDGSEGVRSGFPLLKEFVQRVVESLDVGQDRVRVAVVQYSDRTRPEFYLNSYMNKQDVVNAVRQLTLLGGPTPNTGAALEFVLRNILVSSAGSRITEGVPQLLIVLTADRSGDDVRNPSVVVKRGGAVPIGIGIGNADITEMQTISFIPDFAVAIPTFRQLGTVQQVISERVTQLTREELSRLQPVLQPLPSPGVGGKRDVVFLIDGSQSAGPEFQYVRTLIERLVDYLDVGFDTTRVAVIQFSDDPKVEFLLNAHSSKDEVQNAVQRLRPKGGRQINVGNALEYVSRNIFKRPLGSRIEEGVPQFLVLISSGKSDDEVDDPAVELKQFGVAPFTIARNADQEELVKISLSPEYVFSVSTFRELPSLEQKLLTPITTLTSEQIQKLLASTRYPPPGEMGASEVLLGAFSI

SEQ ID NO: 3337 - protein, 173 aa, Homo Sapiens
PIGTQQIRVGVVQFSDEPRTMFSLDTYSTKAQVLGAVKALGFAGGELANIGLALDFVVENHFTRAGGSRVEEGVPQVLVLISAGPSSDEIRYGVVALKQASVFSFGLGAQAASRAELQHIATDDNLVFTVPEFRSFGDLQEKLLPYIVGVAQRHIVLKPPTIVTQEYGLNENW

SEQ ID NO: 3338 - protein, 557 aa, Homo Sapiens
IGRALLWTTENLFPETPYLRKHKVIFVVSAGENYERKEFVKMMALRAKCQGYVIFVISLGSTRKDDMEELASYPLDQHLIQLGRIHKPDLNYIAKFLKPFLYSVRRGFNQYPPPMLEDACRLINLGGENIQNDGFQFVTELQEDFLGGNGFIGQELNSGRESPFVKTEDNGSDYLVYLPSQMFEPQKLMINYEKDQKSAEIASLTSGHENYGRKEEPDHTYEPGDVSLQEYYMDVAFLIDASQRVGSDEFKEVKAFITSVLDYFHIAPTPLTSTLGDRVAVLSYSPPGYMPNTEECPVYLEFDLVTYNSIHQMKHHLQDSQQLNGDVFIGHALQWTIDNVFVGTPNLRKNKVIFVISAGETNSLDKDVLRNVSLRAKCQGYSIFVFSFGPKHNDKELEELASHPLDHHLVQLGRTHKPDWNYIIKFVKPFVHLIRRAINKYPTEDMKATCVNMTSPNPENGGTENTVLLLPGIYEIKTENGDLFDEFDSQAQHLLVLGNNHSSGSETATDLMQKLYLLFSTEKLAMKDKEKAHLEEISALVVDKQQEKEDGEDTRSS

SEQ ID NO: 3339 - protein, 2611 aa, Homo Sapiens
MKILLIIFVLIIWTETLADQSPGPGPVYADVVFLVDSSDHLGPKSFPFVKTFINKMINSLPIEANKYRVALAQYSDEFHSEFHLSTFKGRSPMLNHLKKNFQFIGGSLQIGKALQEAHRTYFSAPINGRDRKQFPPILVVLASAESEDEVEEASKALQKDGVKIISVGVQKASEENLKAMATSHFHFNLRTIRDLSTFSQNMTQIIKDVTKYKEGAVDADMQVHFPISCQKDSLADLVFLVDESLGTGGNLRHLQTFLENITSSMDVKENCMRLGLMSYSNSAKTISFLKSSTTQSEFQQQIKNLSIQVGKSNTGAAIDQMRRDGFSESYGSRRAQGVPQIAVLVTHRPSDDEVHDAALNLRLEDVNVFALSIQGANNTQLEEIVSYPPEQTISTLKSYADLETYSTKFLKKLQNEIWSQISTYAEQRNLDKTGCVDTKEADIHFLIDGSSSIQEKQFEQIKRFMLEVTEMFSIGPDKVRVGVVQYSDDTEVEFYITDYSNDIDLRKAIFNIKQLTGGTYTGKALDYILQIIKNGMKDRMSKVPCYLIVLTDGMSTDRVVEPAKRLRAEQITVHAVGIGAANKIELQEIAGKEERVSFGQNFDALKSIKNEVVREICAEKGCEDMKADIMFLVDSSWSIGNENFRKMKIFMKNLLTKIQIGADKTQIGVVQFSDKTKEEFQLNRYFTQQEISDAIDRMSLINEGTLTGKALNFVGQYFTHSKGARLGAKKFLILITDGVAQDDVRDPARILRGKDVTIFSVGVYNANRSQLEEISGDSSLVFHVENFDHLKALERKLIFRVCALHDCKRITLLDVVFVLDHSGSIKKQYQDHMINLTIHLVKKADVGRDRVQFGALKYSDQPNILFYLNTYSNRSAIIENLRKRRDTGGNTYTAKALKHANALFTEEHGSRIKQNVKQMLIVITDGESHDHDQLNDTALELRNKGITIFAVGVGKANQKELEGMAGNKNNTIYVDNFDKLKDVFTLVQERMCTEAPEVCHLQEADVIFLCDGSDRVSNSDFVTMTTFLSDLIDNFDIQSQRMKIGMAQFGSNYQSIIELKNSLTKTQWKTQIQNVSKSGGFPRIDFALKKVSNMFNLHAGGRRNAGVPQTLVVITSGDPRYDVADAVKTLKDLGICVLVLGIGDVYKEHLLPITGNSEKIITFQDFDKLKNVDVKKRIIREICQSCGKTNCFMDIVVGFDISTHVQGQPLFQGHPQLESYLPGILEDISSIKGVSCGAGTEAQVSLAFKVNSDQGFPAKFQIYQKAVFDSLLQVNVSGPTHLNAQFLRSLWDTFKDKSASRGQVLLIFSDGLQSESNIMLENQSDRLREAGLDALLVVSLNTTAHHEFSSFEFGKRFDYRTHLTIGMRELGKKLSQYLGNIAERTCCCTFCKCPGIPGPHGTRGLQAMKGSQGLKGSRGHRGEDGNPGVRGDTGPQGDKGIAGCPGAWGQKGLKGFSGPKGGHGDDGIDGLDGEEGCHGFPGIKGEKGDPGSQGSPGSRGAPGQYGEKGFPGDPGNPGQNNNIKGQKGSKGEQGRQGRSGQKGVQGSPSSRGSRGREGQRGLRGVSGEPGNPGPTGTLGAEGLQGPQGSQGNPGRKGEKGSQGQKGPQGSPGLMGAKGSTGRPGLLGKKGEPGLPGDLGPVGQTGQRGRQGDSGIPGYGQMGRKGVKGPRGFPGDAGQKGDIGNPGIPGGPGPKGFRGLALTVGLKGEEGSRGLPGPPGQRGIKGMAGQPVYSQCDLIRFLREHSLFKNAYPTELVFALDNSYDVTEESFNKTRDIITSIVNDLNIRENNCPVGARVAMVSYNSGTSYLIRWSDYNRKKQLLQQLSQIKYQDTTEPRDVGNAMRFVTRNVFKRTYAGANVRRVAVFFSNGQTASRSSIITATMEFSALDISPTVFAFDERVFLEAFGFDNTGTFQVIPVPPNGENQTLERLRRCALCYDKCFPNACIREAFLPEDSYMDVVFLIDNSRNIAKDEFKAVKALVSSVIDNFNIASDPLISDSGDRIALLSYSPWESSRRKMGTVKTEFDFITYDNQLLMKNHIQTSFQQLNGEATIGRALLWTTENLFPETPYLRKHKVIFVVSAGENYERKEFVKMMALRAKCQGYVIFVISLGSTRKDDMEELASYPLDQHLIQLGRIHKPDLNYIAKFLKPFLYSVRRGFNQYPPPMLEDACRLINLGGENIQNDGFQFVTELQEDFLGGNGFIGQELNSGRESPFVKTEDNGSDYLVYLPSQMFEPQKLMINYEKDQKSAEIASLTSGHENYGRKEEPDHTYEPGDVSLQEYYMDVAFLIDASQRVGSDEFKEVKAFITSVLDYFHIAPTPLTSTLGDRVAVLSYSPPGYMPNTEECPVYLEFDLVTYNSIHQMKHHLQDSQQLNGDVFIGHALQWTIDNVFVGTPNLRKNKVIFVISAGETNSLDKDVLRNVSLRAKCQGYSIFVFSFGPKHNDKELEELASHPLDHHLVQLGRTHKPDWNYIIKFVKPFVHLIRRAINKYPTEDMKATCVNMTSPNPENGGTENTVLLLPGIYEIKTENGDLFDEFDSQAQHLLVLGNNHSSGSETATDLMQKLYLLFSTEKLAMKDKEKAHLEEISALVVDKQQEKEDKEMEATDI

SEQ ID NO: 3340 - protein, 2615 aa, Homo Sapiens
MKILLIIFVLIIWTETLADQSPGPGPVYADVVFLVDSSDHLGPKSFPFVKTFINKMINSLPIEANKYRVALAQYSDEFHSEFHLSTFKGRSPMLNHLKKNFQFIGGSLQIGKALQEAHRTYFSAPINGRDRKQFPPILVVLASAESEDEVEEASKALQKDGVKIISVGVQKASEENLKAMATSHFHFNLRTIRDLSTFSQNMTQIIKDVTKYKEGAVDADMQVHFPISCQKDSLADLVFLVDESLGTGGNLRHLQTFLENITSSMDVKENCMRLGLMSYSNSAKTISFLKSSTTQSEFQQQIKNLSIQVGKSNTGAAIDQMRRDGFSESYGSRRAQGVPQIAVLVTHRPSDDEVHDAALNLRLEDVNVFALSIQGANNTQLEEIVSYPPEQTISTLKSYADLETYSTKFLKKLQNEIWSQISTYAEQRNLDKTGCVDTKEADIHFLIDGSSSIQEKQFEQIKRFMLEVTEMFSIGPDKVRVGVVQYSDDTEVEFYITDYSNDIDLRKAIFNIKQLTGGTYTGKALDYILQIIKNGMKDRMSKVPCYLIVLTDGMSTDRVVEPAKRLRAEQITVHAVGIGAANKIELQEIAGKEERVSFGQNFDALKSIKNEVVREICAEKGCEDMKADIMFLVDSSWSIGNENFRKMKIFMKNLLTKIQIGADKTQIGVVQFSDKTKEEFQLNRYFTQQEISDAIDRMSLINEGTLTGKALNFVGQYFTHSKGARLGAKKFLILITDGVAQDDVRDPARILRGKDVTIFSVGVYNANRSQLEEISGDSSLVFHVENFDHLKALERKLIFRVCALHDCKRITLLDVVFVLDHSGSIKKQYQDHMINLTIHLVKKADVGRDRVQFGALKYSDQPNILFYLNTYSNRSAIIENLRKRRDTGGNTYTAKALKHANALFTEEHGSRIKQNVKQMLIVITDGESHDHDQLNDTALELRNKGITIFAVGVGKANQKELEGMAGNKNNTIYVDNFDKLKDVFTLVQERMCTEAPEVCHLQEADVIFLCDGSDRVSNSDFVTMTTFLSDLIDNFDIQSQRMKIGMAQFGSNYQSIIELKNSLTKTQWKTQIQNVSKSGGFPRIDFALKKVSNMFNLHAGGRRNAGVPQTLVVITSGDPRYDVADAVKTLKDLGICVLVLGIGDVYKEHLLPITGNSEKIITFQDFDKLKNVDVKKRIIREICQSCGKTNCFMDIVVGFDISTHVQGQPLFQGHPQLESYLPGILEDISSIKGVSCGAGTEAQVSLAFKVNSDQGFPAKFQIYQKAVFDSLLQVNVSGPTHLNAQFLRSLWDTFKDKSASRGQVLLIFSDGLQSESNIMLENQSDRLREAGLDALLVVSLNTTAHHEFSSFEFGKRFDYRTHLTIGMRELGKKLSQYLGNIAERTCCCTFCKCPGIPGPHGTRGLQAMKGSQGLKGSRGHRGEDGNPGVRGDTGPQGDKGIAGCPGAWGQKGLKGFSGPKGGHGDDGIDGLDGEEGCHGFPGIKGEKGDPGSQGSPGSRGAPGQYGEKGFPGDPGNPGQNNNIKGQKGSKGEQGRQGRSGQKGVQGSPSSRGSRGREGQRGLRGVSGEPGNPGPTGTLGAEGLQGPQGSQGNPGRKGEKGSQGQKGPQGSPGLMGAKGSTGRPGLLGKKGEPGLPGDLGPVGQTGQRGRQGDSGIPGYGQMGRKGVKGPRGFPGDAGQKGDIGNPGIPGGPGPKGFRGLALTVGLKGEEGSRGLPGPPGQRGIKGMAGQPVYSQCDLIRFLREHSPCWKEKCPAYPTELVFALDNSYDVTEESFNKTRDIITSIVNDLNIRENNCPVGARVAMVSYNSGTSYLIRWSDYNRKKQLLQQLSQIKYQDTTEPRDVGNAMRFVTRNVFKRTYAGANVRRVAVFFSNGQTASRSSIITATMEFSALDISPTVFAFDERVFLEAFGFDNTGTFQVIPVPPNGENQTLERLRRCALCYDKCFPNACIREAFLPEDSYMDVVFLIDNSRNIAKDEFKAVKALVSSVIDNFNIASDPLISDSGDRIALLSYSPWESSRRKMGTVKTEFDFITYDNQLLMKNHIQTSFQQLNGEATIGRALLWTTENLFPETPYLRKHKVIFVVSAGENYERKEFVKMMALRAKCQGYVIFVISLGSTRKDDMEELASYPLDQHLIQLGRIHKPDLNYIAKFLKPFLYSVRRGFNQYPPPMLEDACRLINLGGENIQNDGFQFVTELQEDFLGGNGFIGQELNSGRESPFVKTEDNGSDYLVYLPSQMFEPQKLMINYEKDQKSAEIASLTSGHENYGRKEEPDHTYEPGDVSLQEYYMDVAFLIDASQRVGSDEFKEVKAFITSVLDYFHIAPTPLTSTLGDRVAVLSYSPPGYMPNTEECPVYLEFDLVTYNSIHQMKHHLQDSQQLNGDVFIGHALQWTIDNVFVGTPNLRKNKVIFVISAGETNSLDKDVLRNVSLRAKCQGYSIFVFSFGPKHNDKELEELASHPLDHHLVQLGRTHKPDWNYIIKFVKPFVHLIRRAINKYPTEDMKATCVNMTSPNPENGGTENTVLLLPGIYEIKTENGDLFDEFDSQAQHLLVLGNNHSSGSETATDLMQKLYLLFSTEKLAMKDKEKAHLEEISALVVDKQQEKEDKEMEATDI

SEQ ID NO: 3341 - protein, 443 aa, Homo Sapiens
NQYPPPMLEDACRLINLGGENIQNDGFQFVTELQEDFLGGNGFIGQELNSGRESPFVKTEDNGSDYLVYLPSQMFEPQKLMINYEKDQKSAEIASLTSGHENYGRKEEPDHTYEPGDVSLQEYYMDVAFLIDASQRVGSDEFKEVKAFITSVLDYFHIAPTPLTSTLGDRVAVLSYSPPGYMPNTEECPVYLEFDLVTYNSIHQMKHHLQDSQQLNGDVFIGHALQWTIDNVFVGTPNLRKNKVIFVISAGETNSLDKDVLRNVSLRAKCQGYSIFVFSFGPKHNDKELEELASHPLDHHLVQLGRTHKPDWNYIIKFVKPFVHLIRRAINKYPTEDMKATCVNMTSPNPENGGTENTVLLLPGIYEIKTENGDLFDEFDSQAQHLLVLGNNHSSGSETATDLMQKLYLLFSTEKLAMKDKEKAHLEEISALVVDKQQEKEDL

SEQ ID NO: 3342 - protein, 778 aa, Homo Sapiens
  misc_feature (1)..(1): Xaa can be any naturally occurring amino acid
XEKCPAYPTELVFALDNSYDVTEESFNKTRDIITSIVNDLNIRENNCPVGARVAMVSYNSGTSYLIRWSDYNRKKQLLQQLSQIKYQDTTEPRDVGNAMRFVTRNVFKRTYAGANVRRVAVFFSNGQTASRSSIITATMEFSALDISPTVFAFDERVFLEAFGFDNTGTFQVIPVPPNGENQTLERLRRCALCYDKCFPNACIREAFLPEDSYMDVVFLIDNSRNIAKDEFKAVKALVSSVIDNFNIASDPLISDSGDRIALLSYSPWESSRRKMGTVKTEFDFITYDNQLLMKNHIQTSFQQLNGEATIGRALLWTTENLFPETPYLRKHKVIFVVSAGENYERKEFVKMMALRAKCQGYVIFVISLGSTRKDDMEELASYPLDQHLIQLGRIHKPDLNYIAKFLKPFLYSVRRGFNQYPPPMLEDACRLINLGGENIQNDGFQFVTELQEDFLGGNGFIGQELNSGRESPFVKTEDNGSDYLVYLPSQMFEPQKLMINYEKDQKSAEIASLTSGHENYGRKEEPDHTYEPGDVSLQEYYMDVAFLIDASQRVGSDEFKEVKAFITSVLDYFHIAPTPLTSTLGDRVAVLSYSPPGYMPNTEECPVYLEFDLVTYNSIHQMKHHLQDSQQLNGDVFIGHALQWTIDNVFVGTPNLRKNKVIFVISAGETNSLDKDVLRNVSLRAKCQGYSIFVFSFGPKHNDKELEELASHPLDHHLVQLGRTHKPDWNYIIKFVKPFVHLIRRAINKYPTEDMKATCVNMTSPNPENGGTENTVLW

SEQ ID NO: 3343 - protein, 2263 aa, Homo Sapiens
MMLLILFLVIICSHISVNQDSGPEYADVVFLVDSSDRLGSKSFPFVKMFITKMISSLPIEADKYRVALAQYSDKLHSEFHLSTFKGRSPMLNHLRKNFGFIGGSLQIGKALQEAHRTYFSAPANGRDKKQFPPILVVLASSESEDNVEEASKALRKDGVKIISVGVQKASEENLKAMATSQFHFNLRTVRDLSMFSQNMTHIIKDVIKYKEGAVDDIFVEACQGPSMADVVFLLDMSINGSEENFDYLKGFLEESVSALDIKENCMRVGLVAYSNETKVINSLSMGINKSEVLQHIQNLSPRTGKAYTGAAIKKLRKEVFSARNGSRKNQGVPQIAVLVTHRDSEDNVTKAAVNLRREGVTIFTLGIEGASDTQLEKIASHPAEQYVSKLKTFADLAAHNQTFLKKLRNQITHTVSVFSERTETLKSGCVDTEEADIYLLIDGSGSTQATDFHEMKTFLSEVVGMFNIAPHKVRVGAVQYADSWDLEFEINKYSNKQDLGKAIENIRQMGGNTNTGAALNFTLSLLQKAKKQRGNKVPCHLVVLTNGMSKDSILEPANRLREEHIRVYAIGIKEANQTQLREIAGEEKRVYYVHDFDALKDIRNQVVQEICTEEACKEMKADIMFLVDSSGSIGPENFSKMKTFMKNLVSKSQIGPDRVQIGVVQFSDINKEEFQLNRFMSQSDISNAIDQMAHIGQTTLTGSALSFVSQYFSPTKGARPNIRKFLILITDGEAQDIVKEPAVVLRQEGVIIYSVGVFGSNVTQLEEISGRPEMVFYVENFDILQRIEDDLVFGICSPREECKRIEVLDVVFVIDSSGSIDYDEYNIMKDFMIGLVKKADVGKNQVRFGALKYADDPEVLFYLDDFGTKLEVISVLQNDQAMGGSTYTAEALGFSDHMFTEARGSRLNKGVPQVLIVITDGESHDADKLNATAKALRDKGILVLAVGIDGANPVELLAMAGSSDKYFFVETFGGLKGIFSDVTASVCNSSKVDCEIDKVDLVFLMDGSTSIQPNDFKKMKEFLASVVQDFDVSLNRVRIGAAQFSDTYHPEFPLGTFIGEKEISFQIENIKQIFGNTHIGAALREVEHYFRPDMGSRINTGTPQVLLVLTDGQSQDEVAQAAEALRHRGIDIYSVGIGDVDDQQLIQITGTAEKKLTVHNFDELKKVNKRIVRNICTTAGESNCFVDVVVGFDVSTQEKGQTLLEGQPWMETYLQDILRAISSLNGVSCEVGTETQVSVAFQVTNAMEKYSPKFEIYSENILNSLKDITVKGPSLLNANLLDSLWDTFQNKSAARGKVVLLFSDGLDDDVEKLEQKSDELRKEGLNALITVALDGPADSSDLADLPYIEFGKGFEYRTQLSIGMRELGSRLSKQLVNVAERTCCCLFCKCIGGDGTMGDPGPPGKRGPPGFKGSEGYLGEEGIAGERGAPGPVGEQGTKGCYGTKGPKGNRGLNGQEGEVGENGIDGLNGEQGDNGLPGRKGEKGDEGSQGSPGKRGTPGDRGAKGLRGDPGAPGVDSSIEGPTGLKGERGRQGRRGWPGPPGTPGSRRKTAAHGRRGHTGPQGTAGIPGPDGLEGSLGLKGPQGPRGEAGVKGEKGGVGSKGPQGPPGPGGEAGNQGRLGSQGNKGEPGDLGEKGAVGFPGPRGLQGNDGSPGYGSVGRKGAKGQEGFPGESGPKGEIGDPGGPGETGLKGARGKMISAGLPGEMGSPGEPGPPGRKGVKGAKGLASFSTCELIQYVRDRSPGRHGKPECPVHPTELVFALDHSRDVTEQEFERMKEMMAFLVRDIKVRENSCPVGAHIAILSYNSHARHLVRFSDAYKKSQLLREIETIPYERSSASREIGRAMRFISRNVFKRTLPGAHTRKIATFFSSGQSADAHSITTAAMEFGALEIIPVVITFSNVPSVRRAFAIDDTGTFQVIVVPSGADYIPALERLQRCTFCYDVCKPDASCDQARPPPVQSYMDAAFLLDASRNMGSAEFEDIRAFLGALLDHFEITPEPETSVTGDRVALLSHAPPDFLPNTQKSPVRAEFNLTTYRSKRLMKRHVHESVKQLNGDAFIGHALQWTLDNVFLSTPNLRRNKVIFVISAGETSHLDGEILKKESLRAKCQGYALFVFSLGPIWDDKELEDLASHPLDHHLVQLGRIHKPDHSYGVKFVKSFINSIRRAINKYPPINLKIKCNRLNSIDPKQPPRPFRSFVPGPLKATLKEDVLQKAKFFQDKKYLSRVARSGRDDAIQNFMRSTSHTFKNGRMIESAPKQHD

SEQ ID NO: 3344 - protein, 298 aa, Homo Sapiens
  misc_feature (1)..(1): Xaa can be any naturally occurring amino acid
XLNGVSCEVGTETQVSVAFQVTNAMEKYSPKFEIYSENILNSLKDITVKGPSLLNANLLDSLWDTFQNKSAARGKVVLLFSDGLDDDVEKLEQKSDELRKEGLNALITVALDGPADSSDLADLPYIEFGKGFEYRTQLSIGMRELGSRLSKQLVNVAERTCCCLFCKCIGGDGTMGDPGPPGKRGPPGFKGSEGYLGEEGIAGERGAPGPVGEQGTKGCYGTKGPKGNRGLNGQEGEVGENGIDGLNGEQGDNGLPGRKGEKGDEGSQGSPGKRGTPGDRGAKGLRGDPVSARAANWS

SEQ ID NO: 3345 - protein, 259 aa, Homo Sapiens
  misc_feature (1)..(1): Xaa can be any naturally occurring amino acid
XTNAMEKYSPKFEIYSENILNSLKDITVKGPSLLNANLLDSLWDTFQNKSAARGKVVLLFSDGLDDDVEKLEQKSDELRKEGLNALITVALDGPADSSDLADLPYIEFGKGFEYRTQLSIGMRELGSRLSKQLVNVAERTCCCLFCKCIGGDGTMGDPGPPGKRLHVKRVVDFFKKQGSERMERKGPPGFKGSEGYLGEEGIAGERGAPGPVGEQGTKGCYGTKGPKGNRGLNGQEGEVGENGIDGLNGEQGDNGLPGR

SEQ ID NO: 3346 - protein, 173 aa, Homo Sapiens
MSALACGLPVPVPCLNSHLSMGQKGAPGPKGFKGDPGVGVPGSPGPPGPPGVKGDLGLPGLPGAPGVVGFPGQTGPRGEMGQPGPSGERGLAGPPGREGIPGPLGPPGPPGSVGPPGASGLKGDKGDPGVGLPGPRGERGEPGIRGEDGRPGQEGPRGLTGPPGSRGERGEKG

SEQ ID NO: 3347 - protein, 2944 aa, Homo Sapiens
MTLRLLVAALCAGILAEAPRVRAQHRERVTCTRLYAADIVFLLDGSSSIGRSNFREVRSFLEGLVLPFSGAASAQGVRFATVQYSDDPRTEFGLDALGSGGDVIRAIRELSYKGGNTRTGAAILHVADHVFLPQLARPGVPKVCILITDGKSQDLVDTAAQRLKGQGVKLFAVGIKNADPEELKRVASQPTSDFFFFVNDFSILRTLLPLVSRRVCTTAGGVPVTRPPDDSTSAPRDLVLSEPSSQSLRVQWTAASGPVTGYKVQYTPLTGLGQPLPSERQEVNVPAGETSVRLRGLRPLTEYQVTVIALYANSIGEAVSGTARTTALEGPELTIQNTTAHSLLVAWRSVPGATGYRVTWRVLSGGPTQQQELGPGQGSVLLRDLEPGTDYEVTVSTLFGRSVGPATSLMARTDASVEQTLRPVILGPTSILLSWNLVPEARGYRLEWRRETGLEPPQKVVLPSDVTRYQLDGLQPGTEYRLTLYTLLEGHEVATPATVVPTGPELPVSPVTDLQATELPGQRVRVSWSPVPGATQYRIIVRSTQGVERTLVLPGSQTAFDLDDVQAGLSYTVRVSARVGPREGSASVLTVRREPETPLAVPGLRVVVSDATRVRVAWGPVPGASGFRISWSTGSGPESSQTLPPDSTATDITGLQPGTTYQVAVSVLRGREEGPAAVIVARTDPLGPVRTVHVTQASSSSVTITWTRVPGATGYRVSWHSAHGPEKSQLVSGEATVAELDGLEPDTEYTVHVRAHVAGVDGPPASVVVRTAPEPVGRVSRLQILNASSDVLRITWVGVTGATAYRLAWGRSEGGPMRHQILPGNTDSAEIRGLEGGVSYSVRVTALVGDREGTPVSIVVTTPPEAPPALGTLHVVQRGEHSLRLRWEPVPRAQGFLLHWQPEGGQEQSRVLGPELSSYHLDGLEPATQYRVRLSVLGPAGEGPSAEVTARTESPRVPSIELRVVDTSIDSVTLAWTPVSRASSYILSWRPLRGPGQEVPGSPQTLPGISSSQRVTGLEPGVSYIFSLTPVLDGVRGPEASVTQTPVCPRGLADVVFLPHATQDNAHRAEATRRVLERLVLALGPLGPQAVQVGLLSYSHRPSPLFPLNGSHDLGIILQRIRDMPYMDPSGNNLGTAVVTAHRYMLAPDAPGRRQHVPGVMVLLVDEPLRGDIFSPIREAQASGLNVVMLGMAGADPEQLRRLAPGMDSVQTFFAVDDGPSLDQAVSGLATALCQASFTTQPRPEPCPVYCPKGQKGEPGEMGLRGQVGPPGDPGLPGRTGAPGPQGPPGSATAKGERGFPGADGRPGSPGRAGNPGTPGAPGLKGSPGLPGPRGDPGERGPRGPKGEPGAPGQVIGGEGPGLPGRKGDPGPSGPPGPRGPLGDPGPRGPPGLPGTAMKGDKGDRGERGPPGPGEGGIAPGEPGLPGLPGSPGPQGPVGPPGKKGEKGDSEDGAPGLPGQPGSPGEQGPRGPPGAIGPKGDRGFPGPLGEAGEKGERGPPGPAGSRGLPGVAGRPGAKGPEGPPGPTGRQGEKGEPGRPGDPAVVGPAVAGPKGEKGDVGPAGPRGATGVQGERGPPGLVLPGDPGPKGDPGDRGPIGLTGRAGPPGDSGPPGEKGDPGRPGPPGPVGPRGRDGEVGEKGDEGPPGDPGLPGKAGERGLRGAPGVRGPVGEKGDQGDPGEDGRNGSPGSSGPKGDRGEPGPPGPPGRLVDTGPGAREKGEPGDRGQEGPRGPKGDPGLPGAPGERGIEGFRGPPGPQGDPGVRGPAGEKGDRGPPGLDGRSGLDGKPGAAGPSGPNGAAGKAGDPGRDGLPGLRGEQGLPGPSGPPGLPGKPGEDGKPGLNGKNGEPGDPGEDGRKGEKGDSGASGREGRDGPKGERGAPGILGPQGPPGLPGPVGPPGQGFPGVPGGTGPKGDRGETGSKGEQGLPGERGLRGEPGSVPNVDRLLETAGIKASALREIVETWDESSGSFLPVPERRRGPKGDSGEQGPPGKEGPIGFPGERGLKGDRGDPGPQGPPGLALGERGPPGPSGLAGEPGKPGIPGLPGRAGGVGEAGRPGERGERGEKGERGEQGRDGPPGLPGTPGPPGPPGPKVSVDEPGPGLSGEQGPPGLKGAKGEPGSNGDQGPKGDRGVPGIKGDRGEPGPRGQDGNPGLPGERGMAGPEGKPGLQGPRGPPGPVGGHGDPGPPGAPGLAGPAGPQGPSGLKGEPGETGPPGRGLTGPTGAVGLPGPPGPSGLVGPQGSPGLPGQVGETGKPGAPGRDGASGKDGDRGSPGVPGSPGLPGPVGPKGEPGPTGAPGQAVVGLPGAKGEKGAPGGLAGDLVGEPGAKGDRGLPGPRGEKGEAGRAGEPGDPGEDGQKGAPGPKGFKGDPGVGVPGSPGPPGPPGVKGDLGLPGLPGAPGVVGFPGQTGPRGEMGQPGPSGERGLAGPPGREGIPGPLGPPGPPGSVGPPGASGLKGDKGDPGVGLPGPRGERGEPGIRGEDGRPGQEGPRGLTGPPGSRGERGEKGDVGSAGLKGDKGDSAVILGPPGPRGAKGDMGERGPRGLDGDKGPRGDNGDPGDKGSKGEPGDKGSAGLPGLRGLLGPQGQPGAAGIPGDPGSPGKDGVPGIRGEKGDVGFMGPRGLKGERGVKGACGLDGEKGDKGEAGPPGRPGLAGHKGEMGEPGVPGQSGAPGKEGLIGPKGDRGFDGQPGPKGDQGEKGERGTPGIGGFPGPSGNDGSAGPPGPPGSVGPRGPEGLQGQKGERGPPGERVVGAPGVPGAPGERGEQGRPGPAGPRGEKGEAALTEDDIRGFVRQEMSQHCACQGQFIASGSRPLPSYAADTAGSQLHAVPVLRVSHAEEEERVPPEDDEYSEYSEYSVEEYQDPEAPWDSDDPCSLPLDEGSCTAYTLRWYHRAVTGSTEACHPFVYGGCGGNANRFGTREACERRCPPRVVQSQGTGTAQD

SEQ ID NO: 3348 - protein, 114 aa, Homo Sapiens
MAVLPGPLQLLGVLLTISLSSIRLIQAGAYYGIKPLPPQIPPQMPPQIPQYQPLGQQVPHMPLAKDGLAMGKEMPHLQYGKEYPHLPQYMKEIQPAPRMGKEAVPKKGKEIPLA

SEQ ID NO: 3349 - protein, 202 aa, Homo Sapiens
MAVLPGPLQLLGVLLTISLSSIRLIQAGAYYGIKPLPPQIPPQMPPQIPQYQPLGQQVPHMPLAKDGLAMGKEMPHLQYGKEYPHLPQYMKEIQPAPRMGKEAVPKKGKEIPLASLRGEQGPRGEPGPRGPPGPPGLPGHGIPGIKGKPGPQGYPGVGKPGMPGMPGKPGAMGMPGAKGEIGQKGEIGPMGIPGPQGPPGPH

SEQ ID NO: 3350 - protein, 744 aa, Homo Sapiens
MAVLPGPLQLLGVLLTISLSSIRLIQAGAYYGIKPLPPQIPPQMPPQIPQYQPLGQQVPHMPLAKDGLAMGKEMPHLQYGKEYPHLPQYMKEIQPAPRMGKEAVPKKGKEIPLASLRGEQGPRGEPGPRGPPGPPGLPGHGIPGIKGKPGPQGYPGVGKPGMPGMPGKPGAMGMPGAKGEIGQKGEIGPMGIPGPQGPPGPHGLPGIGKPGGPGLPGQPGPKGDRGPKGLPGPQGLRGPKGDKGFGMPGAPGVKGPPGMHGPPGPVGLPGVGKPGVTGFPGPQGPLGKPGAPGEPGPQGPIGVPGVQGPPGIPGIGKPGQDGIPGQPGFPGGKGEQGLPGLPGPPGLPGIGKPGFPGPKGDRGMGGVPGALGPRGEKGPIGAPGIGGPPGEPGLPGIPGPMGPPGAIGFPGPKGEGGIVGPQGPPGPKGEPGLQGFPGKPGFLGEVGPPGMRGLPGPIGPKGEAGQKGVPGLPGVPGLLGPKGEPGIPGDQGLQGPPGIPGIGGPSGPIGPPGIPGPKGEPGLPGPPGFPGIGKPGVAGLHGPPGKPGALGPQGQPGLPGPPGPPGPPGPPAVMPPTPPPQGEYLPDMGLGIDGVKPPHAYGAKKGKNGGPAYEMPAFTAELTAPFPPVGAPVKFNKLLYNGRQNYNPQTGIFTCEVPGVYYFAYHVHCKGGNVWVALFKNNEPVMYTYDEYKKGFLDQASGSAVLLLRPGDRVFLQMPSEQAAGLYAGQYVHSSFSGYLLYPM

SEQ ID NO: 3351 - protein, 744 aa, Homo Sapiens; identical to SEQ ID NO: 3350

SEQ ID NO: 3352 - protein, 703 aa, Homo Sapiens
MLGTLTPLSSLLLLLLVLVLGCGPRASSGGGAGGAAGYAPVKYIQPMQKGPVGPPFREGKGQYLEMPLPLLPMDLKGEPGPPGKPGPRGPPGPPGFPGKPGMGKPGLHGQPGPAGPPGFSRMGKAGPPGLPGKVGPPGQPGLRGEPGIRGDQGLRGPPGPPGLPGPSGITIPGKPGAQGVPGPPGFQGEPGPQGEPGPPGDRGLKGDNGVGQPGLPGAPGQGGAPGPPGLPGPAGLGKPGLDGLPGAPGDKGESGPPGVPGPRGEPGAVGPKGPPGVDGVGVPGAAGLPGPQGPSGAKGEPGTRGPPGLIGPTGYGMPGLPGPKGDRGPAGVPGLLGDRGEPGEDGEPGEQGPQGLGGPPGLPGSAGLPGRRGPPGPKGEAGPGGPPGVPGIRGDQGPSGLAGKPGVPGERGLPGAHGPPGPTGPKGEPGFTGRPGGPGVAGALGQKGDLGLPGQPGLRGPSGIPGLQGPAGPIGPQGLPGLKGEPGLPGPPGEGRAGEPGTAGPTGPPGVPGSPGITGPPGPPGPPGPPGAPGAFDETGIAGLHLPNGGVEGAVLGKGGKPQFGLGELSAHATPAFTAVLTSPFPASGMPVKFDRTLYNGHSGYNPATGIFTCPVGGVYYFAYHVHVKGTNVWVALYKNNVPATYTYDEYKKGYLDQASGGAVLQLRPNDQVWVQMPSDQANGLYSTEYIHSSFSGFLLCPT

SEQ ID NO: 3353 - protein, 703 aa, Homo Sapiens; identical to SEQ ID NO: 3352

SEQ ID NO: 3354 - protein, 638 aa, Homo Sapiens
MPLPLLPMDLKGEPGPPGKPGPRGPPGPPGFPGKPGMGKPGLHGQPGPAGPPGFSRMGKAGPPGLPGKVGPPGQPGLRGEPGIRGDQGLRGPPGPPGLPGPSGITIPGKPGAQGVPGPPGFQGEPGPQGEPGPPGDRGLKGDNGVGQPGLPGAPGQGGAPGPPGLPGPAGLGKPGLDGLPGAPGDKGESGPPGVPGPRGEPGAVGPKGPPGVDGVGVPGAAGLPGPQGPSGAKGEPGTRGPPGLIGPTGYGMPGLPGPKGDRGPAGVPGLLGDRGEPGEDGEPGEQGPQGLGGPPGLPGSAGLPGRRGPPGPKGEAGPGGPPGVPGIRGDQGPSGLAGKPGVPGERGLPGAHGPPGPTGPKGEPGFTGRPGGPGVAGALGQKGDLGLPGQPGLRGPSGIPGLQGPAGPIGPQGLPGLKGEPGLPGPPGEGRAGEPGTAGPTGPPGVPGSPGITGPPGPPGPPGPPGAPGAFDETGIAGLHLPNGGVEGAVLGKGGKPQFGLGELSAHATPAFTAVLTSPFPASGMPVKFDRTLYNGHSGYNPATGIFTCPVGGVYYFAYHVHVKGTNVWVALYKNNVPATYTYDEYKKGYLDQASGGAVLQLRPNDQVWVQMPSDQANGLYSTEYIHSSFSGFLLCPT

SEQ ID NO: 3355 - protein, 112 aa, Homo Sapiens
MAWTARDRGALGLLLLGLCLCAAQRGPPGEQGPPGPPGPPGVPGIDGIDGDRGPKGPPGPPGPAGEPGKPGAPGKPGTPGADAGVQWHDLGSLQPLPPGFKRFSCLSLQLPE

SEQ ID NO: 3356 - protein, 678 aa, Homo Sapiens
MAWTARDRGALGLLLLGLCLCAAQRGPPGEQGPPGPPGPPGVPGIDGIDGDRGPKGPPGPPGPAGEPGKPGAPGKPGTPGADGLTGPDGSPGSIGSKGQKGEPGVPGSRGFPGRGIPGPPGPPGTAGLPGELGRVGPVGDPGRRGPPGPPGPPGPRGTIGFHDGDPLCPNACPPGRSGYPGLPGMRGHKGAKGEIGEPGRQGHKGEEGDQGELGEVGAQGPPGAQGLRGITGIVGDKGEKGARGLDGEPGPQGLPGAPGDQGQRGPPGEAGPKGDRGAEGARGIPGLPGPKGDTGLPGVDGRDGIPGMPGTKGEPGKPGPPGDAGLQGLPGVPGIPGAKGVAGEKGSTGAPGKPGQMGNSGKPGQQGPPGEVGPRGPQGLPGSRGELGPVGSPGLPGKLGSLGSPGLPGLPGPPGLPGMKGDRGVVGEPGPKGEQGASGEEGEAGERGELGDIGLPGPKGSAGNPGEPGLRGPEGSRGLPGVEGPRGPPGPRGVQGEQGATGLPGVQGPPGRAPTDQHIKQVCMRVIQEHFAEMAASLKRPDSGATGLPGRPGPPGPPGPPGENGFPGQMGIRGLPGIKGPPGALGLRGPKGDLGEKGERGPPGRGPNGLPGAIGLPGDPGPASYGRNGRDGERGPPGVAGIPGVPGPPGPPGLPGFCEPASCTMQAGQRAFNKGPDP

SEQ ID NO: 3357 - protein, 921 aa, Homo Sapiens
MKTCWKIPVFFFVCSFLEPWASAAVKRRPRFPVNSNSNGGNELCPKIRIGQDDLPGFDLISQFQVDKAASRRAIQRVVGSATLQVAYKLGNNVDFRIPTRNLYPSGLPEEYSFLTTFRMTGSTLKKNWNIWQIQDSSGKEQVGIKINGQTQSVVFSYKGLDGSLQTAAFSNLSSLFDSQWHKIMIGVERSSATLFVDCNRIESLPIKPRGPIDIDGFAVLGKLADNPQVSVPFELQWMLIHCDPLRPRRETCHELPARITPSQTTDERGPPGEQGPPGPPGPPGVPGIDGIDGDRGPKGPPGPPGPAGEPGKPGAPGKPGTPGADGLTGPDGSPGSIGSKGQKGEPGVPGSRGFPGRGIPGPPGPPGTAGLPGELGRVGPVGDPGRRGPPGPPGPPGPRGTIGFHDGDPLCPNACPPGRSGYPGLPGMRGHKGAKGEIGEPGRQGHKGEEGDQGELGEVGAQGPPGAQGLRGITGIVGDKGEKGARGLDGEPGPQGLPGAPGDQGQRGPPGEAGPKGDRGAEGARGIPGLPGPKGDTGLPGVDGRDGIPGMPGTKGEPGKPGPPGDAGLQGLPGVPGIPGAKGVAGEKGSTGAPGKPGQMGNSGKPGQQGPPGEVGPRGPQGLPGSRGELGPVGSPGLPGKLGSLGSPGLPGLPGPPGLPGMKGDRGVVGEPGPKGEQGASGEEGEAGERGELGDIGLPGPKGSAGNPGEPGLRGPEGSRGLPGVEGPRGPPGPRGVQGEQGATGLPGVQGPPGRAPTDQHIKQVCMRVIQEHFAEMAASLKRPDSGATGLPGRPGPPGPPGPPGENGFPGQMGIRGLPGIKGPPGALGLRGPKGDLGEKGERGPPGRGPNGLPGAIGLPGDPGPASYGRNGRDGERGPPGVAGIPGVPGPPGPPGLPGFCEPASCTMQAGQRAFNKGPDP

SEQ ID NO: 3358 - protein, 328 aa, Homo Sapiens
MKTCWKIPVFFFVCSFLEPWASAAVKRRPRFPVNSNSNGGNELCPKIRIGQDDLPGFDLISQFQVDKAASRRAIQRVVGSATLQVAYKLGNNVDFRIPTRNLYPSGLPEEYSFLTTFRMTGSTLKKNWNIWQIQDSSGKEQVGIKINGQTQSVVFSYKGLDGSLQTAAFSNLSSLFDSQWHKIMIGVERSSATLFVDCNRIESLPIKPRGPIDIDGFAVLGKLADNPQVSVPFELQWMLIHCDPLRPRRETCHELPARITPSQTTDERGPPGEQGPPGPPGPPGVPGIDGIDGDRGPKGPPGPPGPAGEPGKPGAPGKPGTPGADTSP

SEQ ID NO: 3359 - protein, 689 aa, Homo Sapiens
MAAATASPRSLLVLLQVVVLALAQIRGPPGERGPPGPPGPPGVPGSDGIDGDNGPPGKAGPPGPKGEPGKAGPDGPDGKPGIDGLTGAKGEPGPMGIPGVKGQPGLPGPPGLPGPGFAGPPGPPGPVGLPGEIGIRGPKGDPGPDGPSGPPGPPGKPGRPGTIQGLEGSADFLCPTNCPPGMKGPPGLQGVKGHAGKRGILGDPGHQGKPGPKGDVGASGEQGIPGPPGPQGIRGYPGMAGPKGETGPHGYKGMVGAIGATGPPGEEGPRGPPGRAGEKGDEGSPGIRGPQGITGPKGATGPPGINGKDGTPGTPGMKGSAGQAGQPGSPGHQGLAGVPGQPGTKGGPGDQGEPGPQGLPGFSGPPGKEGEPGPRGEIGPQGIMGQKGDQGERGPVGQPGPQGRQGPKGEQGPPGIPGPQGLPGVKGDKGSPGKTGPRGKVGDPGVAGLPGEKGEKGESGEPGPKGQQGVRGEPGYPGPSGDAGAPGVQGYPGPPGPRGLAGNRGVPGQPGRQGVEGRDATDQHIVDVALKMLQEQLAEVAVSAKREALGAVGMMGPPGPPGPPGYPGKQGPHGHPGPRGVPGIVGAVGQIGNTGPKGKRGEKGDPGEVGRGHPGMPGPPGIPGLPGRPGQAINGKDGDRGSPGAPGEAGRPGLPGPVGLPGFCEPAACLGASAYASARLTEPGSIKGP

SEQ ID NO: 3360 - protein, 83 aa, Homo Sapiens
MAAATASPRSLLVLLQVVVLALAQIRGPPGERGPPGPPGPPGVPGSDGIDGPPGPVGLPGEIGIRGPKGDPGPDGPSGPPGPP

SEQ ID NO: 3361 - protein, 11 aa, Homo Sapiens
MGIPGVKGQPG

SEQ ID NO: 3362 - protein, 143 aa, Homo Sapiens
MGIPGVKGQPGLPGPPGLPGPGFAGPPGPPGPVGLPGEIGIRGPKGDPGPDGPSGPPGPPGKPGRPGTIQGLEGSADFLCPTNCPPGMKGPPGLQGVKGHAGKRGILGDPGHQGKPGPKGDVGASGEQGIPGPPGPQGIRGYP

SEQ ID NO: 3363 - protein, 684 aa, Homo Sapiens
MAGPRACAPLLLLLLLGELLAAAGAQRVGLPGPPGPPGPPGKPGQDGIDGEAGPPGLPGPPGPKGAPGKPGKPGEAGLPGLPGVDGLTGRDGPPGPKGAPGERGSLGPPGPPGLGGKGLPGPPGEAGVSGPPGGIGLRGPPGPSGLPGLPGPPGPPGPPGHPGVLPEGATDLQCPSICPPGPPGPPGMPGFKGPTGYKGEQGEVGKDGEKGDPGPPGPAGLPGSVGLQGPRGLRGLPGPLGPPGDRGPIGFRGPPGIPGAPGKAGDRGERGPEGFRGPKGDLGRPGPKGTPGVAGPSGEPGMPGKDGQNGVPGLDGQKGEAGRNGAPGEKGPNGLPGLPGRAGSKGEKGERGRAGELGEAGPSGEPGVPGDAGMPGERGEAGHRGSAGALGPQGPPGAPGVRGFQGQKGSMGDPGLPGPQGLRGDVGDRGPGGAAGPKGDQGIAGSDGLPGDKGELGPSGLVGPKGESGSRGELGPKGTQGPNGTSGVQGVPGPPGPLGLQGVPGVPGITGKPGVPGKEASEQRIRELCGGMISEQIAQLAAHLRKPLAPGSIGRPGPAGPPGPPGPPGSIGHPGARGPPGYRGPTGELGDPGPRGNQGDRGDKGAAGAGLDGPEGDQGPQGPQGVPGTSKDGQDGAPGEPGPPGDPGLPGAIGAQGTPGICDTSACQGAVLGGVGEKSGSRSS

SEQ ID NO: 3364 - protein, 191 aa, Homo Sapiens
MWWSSTQNAGTEGEAGPPGLPGPPGPKGAPGKPGKPGEAGLPGLPGVDGLTGRDGPPGPKGAPGERGSLGPPGPPGLGGKGLPGPPGEAGVSGPPGGIGLRGPPGPSGLPGLPGPPGPPGPPGHPGVLPEGATDLQCPSICPPGPPGPPGMPGFKGPTGYKGEQGEVGKDGEKGDPGPPGPAGLPGSVGLQ

SEQ ID NO: 3365 - protein, 277 aa, Homo Sapiens
MNGFASLLRRNQFILLVLFLLQIQSLGLDIDSRPTAEVCATHTISPGPKGDDGEKGDPGEEGKHGKVGRMGPKGIKGELGDMGDQGNIGKTGPIGKKGDKGEKGLLGIPGEKGKAGTVCDCGRYRKFVGQLDISIARLKTSMKFVKNVIAGIRETEEKFYYIVQEEKNYRESLTHCRIRGGMLAMPKDEAANTLIADYVAKSGFFRVFIGVNDLEREGQYMFTDNTPLQNYSNWNEGEPSDPYGHEDCVEMLSSGRWNDTECHLTMYFVCEFIKKKK

SEQ ID NO: 3366 - protein, 123 aa, Homo Sapiens
MKKQRGVGVLPALRMRGNLALVGVLISLAFLSLLPSGHPQPAGDDACSVQILVPGLKGDAGEKGDKGAPGRPGRVGPTGEKGDMGDKGQKGSVGRHGKIGPIGSKGEKGDSGDIGPPGPNGEP

SEQ ID NO: 3367 - protein, 285 aa, Homo Sapiens
MKKQRGVGVLPALRMRGNLALVGVLISLAFLSLLPSGHPQPAGDDACSVQILVPGLKGDAGEKGDKGAPGRPGRVGPTGEKGDMGDKGQKGSVGRHGKIGPIGSKGEKGDSGDIGPPGPNGEPGLPCECSQLRKAIGEMDNQVSQLTSELKFIKNAVAGVRETESKIYLLVKEEKRYADAQLSCQGRGGTLSMPKDEAANGLMAAYLAQAGLARVFIGINDLEKEGAFVYSDHSPMRTFNKWRSGEPNNAYDEEDCVEMVASGGWNDVACHTTMYFMCEFDKENM

SEQ ID NO: 3368 - protein, 116 aa, Homo Sapiens
MRGNLALVGVLISLAFLSLLPSGHPQPAGDDACSVQILVPGLKGDAGEKGDKGAPGRPGRVGPTGEKGDMGDKGQKGSVGRHGKIGPIGSKGEKGDSGDIGPPGPNGEPAPSAPQR

SEQ ID NO: 3369 - protein, 271 aa, Homo Sapiens
MRGNLALVGVLISLAFLSLLPSGHPQPAGDDACSVQILVPGLKGDAGEKGDKGAPGRPGRVGPTGEKGDMGDKGQKGSVGRHGKIGPIGSKGEKGDSGDIGPPGPNGEPGLPCECSQLRKAIGEMDNQVSQLTSELKFIKNAVAGVRETESKIYLLVKEEKRYADAQLSCQGRGGTLSMPKDEAANGLMAAYLAQAGLARVFIGINDLEKEGAFVYSDHSPMRTFNKWRSGEPNNAYDEEDCVEMVASGGWNDVACHTTMYFMCEFDKENM

SEQ ID NO: 3370 - protein, 247 aa, Homo Sapiens
MRGNLALVGVLISLAFLSLLPSGHPQPAGDDACSVQILVPGLKGDAGEKGDKGAPGRPGRVGPTGEKGEKGDSGDIGPPGPNGEPGLPCECSQLRKAIGEMDNQVSQLTSELKFIKNAVAGVRETESKIYLLVKEEKRYADAQLSCQGRGGTLSMPKDEAANGLMAAYLAQAGLARVFIGINDLEKEGAFVYSDHSPMRTFNKWRSGEPNNAYDEEDCVEMVASGGWNDVACHTTMYFMCEFDKENM

SEQ ID NO: 3371 - protein, 268 aa, Homo Sapiens
MTPALCRSSSLASKGMRERRETKAPPDGLEESAPREKKQSQPVVTASDISKRKCTSSFVEMGSQGDMGDKGQKGSVGRHGKIGPIGSKGEKGDSGDIGPPGPNGEPGLPCECSQLRKAIGEMDNQVSQLTSELKFIKNAVAGVRETESKIYLLVKEEKRYADAQLSCQGRGGTLSMPKDEAANGLMAAYLAQAGLARVFIGINDLEKEGAFVYSDHSPMRTFNKWRSGEPNNAYDEEDCVEMVASGGWNDVACHTTMYFMCEFDKENM

SEQ ID NO: 3372 - protein, 245 aa, Homo Sapiens
MWWVPPSPYGCLPCALPGDAGEKGDKGAPGRPGRVGPTGEKGDMGDKGQKGSVGRHGKIGPIGSKGEKGDSGDIGPPGPNGEPGLPCECSQLRKAIGEMDNQVSQLTSELKFIKNAVAGVRETESKIYLLVKEEKRYADAQLSCQGRGGTLSMPKDEAANGLMAAYLAQAGLARVFIGINDLEKEGAFVYSDHSPMRTFNKWRSGEPNNAYDEEDCVEMVASGGWNDVACHTTMYFMCEFDKENM

SEQ ID NO: 3373 - protein, 221 aa, Homo Sapiens
MWWVPPSPYGCLPCALPGDAGEKGDKGAPGRPGRVGPTGEKGEKGDSGDIGPPGPNGEPGLPCECSQLRKAIGEMDNQVSQLTSELKFIKNAVAGVRETESKIYLLVKEEKRYADAQLSCQGRGGTLSMPKDEAANGLMAAYLAQAGLARVFIGINDLEKEGAFVYSDHSPMRTFNKWRSGEPNNAYDEEDCVEMVASGGWNDVACHTTMYFMCEFDKENM

SEQ ID NO: 3374 - protein, 221 aa, Homo Sapiens
MWWVPPSPYGCLPCALPGDMGDKGQKGSVGRHGKIGPIGSKGEKGDSGDIGPPGPNGEPGLPCECSQLRKAIGEMDNQVSQLTSELKFIKNAVAGVRETESKIYLLVKEEKRYADAQLSCQGRGGTLSMPKDEAANGLMAAYLAQAGLARVFIGINDLEKEGAFVYSDHSPMRTFNKWRSGEPNNAYDEEDCVEMVASGGWNDVACHTTMYFMCEFDKENM

SEQ ID NO: 3375 - protein, 197 aa, Homo Sapiens
MWWVPPSPYGCLPCALPGEKGDSGDIGPPGPNGEPGLPCECSQLRKAIGEMDNQVSQLTSELKFIKNAVAGVRETESKIYLLVKEEKRYADAQLSCQGRGGTLSMPKDEAANGLMAAYLAQAGLARVFIGINDLEKEGAFVYSDHSPMRTFNKWRSGEPNNAYDEEDCVEMVASGGWNDVACHTTMYFMCEFDKENM

SEQ ID NO: 3376 - protein, 622 aa, Homo Sapiens
MAAAPRAGRRRGQPLLALLLLLLAPLPPGAPPGADAYFPEERWSPESPLQAPRVLIALLARNAAHALPTTLGALERLRHPRERTALWVATDHNMDNTSTVLREWLVAVKSLYHSVEWRPAEEPRSYPDEEGPKHWSDSRYEHVMKLRQAALKSARDMWADYILFVDADNLILNPDTLSLLIAENKTVVAPMLDSRAAYSNFWCGMTSQGYYKRTPAYIPIRKRDRRGCFAVPMVHSTFLIDLRKAASRNLAFYPPHPDYTWSFDDIIVFAFSCKQAEVQMYVCNKEEYGFLPVPLRAHSTLQDEAESFMHVQLEVMVKHPPAEPSRFISAPTKTPDKMGFDEVFMINLRRRQDRRERMLRALQAQEIECRLVEAVDGKAMNTSQVEALGIQMLPGYRDPYHGRPLTKGELGCFLSHYNIWKEVVDRGLQKSLVFEDDLRFEIFFKRRLMNLMRDVEREGLDWDLIYVGRKRMQVEHPEKAVPRVRNLVEADYSYWTLAYVISLQGARKLLAAEPLSKMLPVDEFLPVMFDKHPVSEYKAHFSLRNLHAFSVEPLLIYPTHYTGDDGYVSDTETSVVWNNEHVKTDWDRAKSQKMREQQALSREAKNSDVLQSPLDSAARDEL

SEQ ID NO: 3377 - protein, 138 aa, Homo Sapiens
MDNTSTVLREWLVAVKSLYHSVEWRPAEEPRSYPDEEGPKHWSDSRYEHVMKLRQAALKSARDMWADYILFVDADNLILNPDTLSLLIAENKTVVAPMLDSRAAYSNFWCGMTSQGYYKRTPAYIPIRKRDRRGCFAV

SEQ ID NO: 3378 - protein, 218 aa, Homo Sapiens
  misc_feature (1)..(1): Xaa can be any naturally occurring amino acid
XKAASRNLAFYPPHPDYTWSFDDIIVFAFSCKQAVKHPPAEPSRFISAPTKTPDKMGFDEVFMINLRRRQDRRERMLRALQAQEIECRLVEAVDGKAMNTSQVEALGIQMLPGYRDPYHGRPLTKGELGCFLSHYNIWKEVVDRGLQKSLVFEDDLRFEIFFKRRLMNLMRDVEREGLDWDLIYVGRKRMQVEHPEKAVPRVRNLVEADYSYWTLAYV

SEQ ID NO: 3379 - protein, 626 aa, Homo Sapiens
MAARPAATLAWSLLLLSSALLREGCRARFVAERDSEDDGEEPVVFPESPLQSPTVLVAVLARNAAHTLPHFLGCLERLDYPKSRMAIWAATDHNVDNTTEIFREWLKNVQRLYHYVEWRPMDEPESYPDEIGPKHWPTSRFAHVMKLRQAALRTAREKWSDYILFIDVDNFLTNPQTLNLLIAENKTIVAPMLESRGLYSNFWCGITPKGFYKRTPDYVQIREWKRTGCFPVPMVHSTFLIDLRKEASDKLTFYPPHQDYTWTFDDIIVFAFSSRQAGIQMYLCNREHYGYLPIPLKPHQTLQEDIENLIHVQIEAMIDRPPMEPSQYVSVVPKYPDKMGFDEIFMINLKRRKDRRDRMLRTLYEQEIEVKIVEAVDGKALNTSQLKALNIEMLPGYRDPYSSRPLTRGEIGCFLSHYSVWKEVIDRELEKTLVIEDDVRFEHQFKKKLMKLMDNIDQAQLDWELIYIGRKRMQVKEPEKAVPNVANLVEADYSYWTLGYVISLEGAQKLVGANPFGKMLPVDEFLPVMYNKHPVAEYKEYYESRDLKAFSAEPLLIYPTHYTGQPGYLSDTETSTIWDNETVATDWDRTHAWKSRKQSRIYSNAKNTEALPPPTSLDTVPSRDEL

SEQ ID NO: 3380 - protein, 363 aa, Homo Sapiens
MFSDCWLCPSLGSSGIQMYLCNREHYGYLPIPLKPHQTLQEDIENLIHVQIEAMIDRPPMEPSQYVSVVPKYPDKMGFDEIFMINLKRRKDRRDRMLRTLYEQEIEVKIVEAVDGKALNTSQLKALNIEMLPGYRDPYSSRPLTRGEIGCFLSHYSVWKEVIDRELEKTLVIEDDVRFEHQFKKKLMKLMDNIDQAQLDWELIYIGRKRMQVKEPEKAVPNVANLVEADYSYWTLGYVISLEGAQKLVGANPFGKMLPVDEFLPVMYNKHPVAEYKEYYESRDLKAFSAEPLLIYPTHYTGQPGYLSDTETSTIWDNETVATDWDRTHAWKSRKQSRIYSNAKNTEALPPPTSLDTVPSRDEL

SEQ ID NO: 3381 - protein, 234 aa, Homo Sapiens
MLPGYRDPYSSRPLTRGEIGCFLSHYSVWKEVIDRELEKTLVIEDDVRFEHQFKKKLMKLMDNIDQAQLDWELIYIGRKRMQVKEPEKAVPNVANLVEADYSYWTLGYVISLEGAQKLVGANPFGKMLPVDEFLPVMYNKHPVAEYKEYYESRDLKAFSAEPLLIYPTHYTGQPGYLSDTETSTIWDNETVATDWDRTHAWKSRKQSRIYSNAKNTEALPPPTSLDTVPSRDEL

SEQ ID NO: 3382 - protein, 194 aa, Homo Sapiens
ISGLLCYSAGCLALPSLDQKKRGGHKACCLLTPPPPPLFPPPFFRGGRSPGPPGLPGKTGPKGEKGELGRPGRKGRPGPPGVPGMPGPIGWPGPEGPRGEKGDLGMMGLPGSRGPMGSKGYPGSRGEKGSRGEKGDLGPKGEKGFPGFPGMLGQKGEMGPKGEPGIAGHRGPTGRPGKRGKQGQKGDSGVMGPP

SEQ ID NO: 3383 - protein, 445 aa, Homo Sapiens
MTGSSFSLAHLLIISGLLCYSAGCLALPSLDQKKRGGHKACCLLTPPPPPLFPPPFFRGGRSPLLSPDMKNLMLELETSQSPCMQGSLGSPGPPGPQGPPGLPGKTGPKGEKGELGRPGRKGRPGPPGVPGMPGPIGWPGPEGPRGEKGDLGMMGLPGSRGPMGSKGYPGSRGEKGSRGEKGDLGPKGEKGFPGFPGMLGQKGEMGPKGEPGIAGHRGPTGRPGKRGKQGQKGDSGVMGPPGKPGPSGQPGRPGPPGPPPAGQLIMGPKGERGFPGPPGRCLCGPTMNVNNPSYGESVYGPSSPRVPVIFVVNNQEELERLNTQNAIAFRRDQRSLYFKDSLGWLPIQLTPFYPVDYTADQHGTCGDGLLQPGEECDDGNSDVGDDCIRCHRAYCGDGHRHEGVEDCDGSDFGYLTCETYLPGSYGDLQCTQYCYIDSTPCRYFT

SEQ ID NO: 3384 - protein, 421 aa, Homo Sapiens
MVVLNPMTLGIYLQLFFLSIVSQPTFINSVLPISAALPSLDQKKRGGHKACCLLTPPPPPLFPPPFFRGGRSPGPPGLPGKTGPKGEKGELGRPGRKGRPGPPGVPGMPGPIGWPGPEGPRGEKGDLGMMGLPGSRGPMGSKGYPGSRGEKGSRGEKGDLGPKGEKGFPGFPGMLGQKGEMGPKGEPGIAGHRGPTGRPGKRGKQGQKGDSGVMGPPGKPGPSGQPGRPGPPGPPPAGQLIMGPKGERGFPGPPGRCLCGPTMNVNNPSYGESVYGPSSPRVPVIFVVNNQEELERLNTQNAIAFRRDQRSLYFKDSLGWLPIQLTPFYPVDYTADQHGTCGDGLLQPGEECDDGNSDVGDDCIRCHRAYCGDGHRHEGVEDCDGSDFGYLTCETYLPGSYGDLQCTQYCYIDSTPCRYFT

SEQ ID NO: 3385 - protein, 455 aa, Homo Sapiens
MVVLNPMTLGIYLQLFFLSIVSQPTFINSVLPISAALPSLDQKKRGGHKACCLLTPPPPPLFPPPFFRGGRSPLLSPDMKNLMLELETSQSPCMQGSLGSPGPPGPQGPPGLPGKTGPKGEKGELGRPGRKGRPGPPGVPGMPGPIGWPGPEGPRGEKGDLGMMGLPGSRGPMGSKGYPGSRGEKGSRGEKGDLGPKGEKGFPGFPGMLGQKGEMGPKGEPGIAGHRGPTGRPGKRGKQGQKGDSGVMGPPGKPGPSGQPGRPGPPGPPPAGQLIMGPKGERGFPGPPGRCLCGPTMNVNNPSYGESVYGPSSPRVPVIFVVNNQEELERLNTQNAIAFRRDQRSLYFKDSLGWLPIQLTPFYPVDYTADQHGTCGDGLLQPGEECDDGNSDVGDDCIRCHRAYCGDGHRHEGVEDCDGSDFGYLTCETYLPGSYGDLQCTQYCYIDSTPCRYFT

SEQ ID NO: 3386 - protein, 456 aa, Homo Sapiens
MVVLNPMTLGIYLQLFFLSIVSQPTFINSVLPISAALPSLDQKKRGGHKACCLLTPPPPPLFPPPFFRGGRSPLLSPDMKNLMLELETSQSPCMQGSLGSPGPPGPQGPPGLPGKTGPKGEKGELGRPGRKGRPGPPGVPGMPGPIGWPGPEGPRGEKGDLGMMGLPGSRGPMGSKGYPGSRGEKGSRGEKGDLGPKGEKGFPGFPGMLGQKGEMGPKGEPGIAGHRGPTGRPGKRGKQGQKGDSGVMGPPGKPGPSGQPGRPGPPGPPPAGQLIMGPKGERGFPGPPGRCLCGPTMNVNNPSYGESVYGPSSPRVPVIFVVNNQEELERLNTQNAIAFRRDQRSLYFKDSLGWLPIQLTPFYPVDYTADQHGTCGDGLLQPGEECDDGNSDVGDDCIRDCHRAYCGDGHRHEGVEDCDGSDFGYLTCETYLPGSYGDLQCTQYCYIDSTPCRYFT

SEQ ID NO: 3387 - protein, 724 aa, Homo Sapiens
MLRELQETNAALQDVRELLRQQVREITFLKNTVMECDACGMQQSVRTGLPSVRPLLHCAPGFCFPGVACIQTESGARCGPCPAGFTGNGSHCTDVNECNAHPCFPRVRCINTSPGFRCEACPPGYSGPTHQGVGLAFAKANKQVCTDINECETGQHNCVPNSVCINTRGSFQCGPCQPGFVGDQASGCQRRAQRFCPDGSPSECHEHADCVLERDGSRSCVCAVGWAGNGILCGRDTDLDGFPDEKLRCPERQCRKDNCVTVPNSGQEDVDRDGIGDACDPDADGDGVPNEKDNCPLVRNPDQRNTDEDKWGDACDNCRSQKNDDQKDTDQDGRGDACDDDIDGDRIRNQADNCPRVPNSDQKDSDGDGIGDACDNCPQKSNPDQADVDHDFVGDACDSDQDQDGDGHQDSRDNCPTVPNSAQEDSDHDGQGDACDDDDDNDGVPDSRDNCRLVPNPGQEDADRDGVGDVCQDDFDADKVVDKIDVCPENAEVTLTDFRAFQTVVLDPEGDAQIDPNWVVLNQGREIVQTMNSDPGLAVGYTAFNGVDFEGTFHVNTVTDDDYAGFIFGYQDSSSFYVVMWKQMEQTYWQANPFRAVAEPGIQLKAVKSSTGPGEQLRNALWHTGDTESQVRLLWKDPRNVGWKDKKSYRWFLQHRPQVGYIRVRFYEGPELVADSNVVLDTTMRGGRLGVFCFSQENIIWANLRYRCNDTIPEDYETHQLRQA

SEQ ID NO: 3388 - protein, 704 aa, Homo Sapiens
MVPDTACVLLLTLAALGASGQGQSPLGSDLGPQMLRELQETNAALQDVRELLRQQVREITFLKNTVMECDACGMQQSVRTGLPSVRPLLHCAPGFCFPGVACIQTESGARCGPCPAGFTGNGSHCTDVNECETGQHNCVPNSVCINTRGSFQCGPCQPGFVGDQASGCQRRAQRFCPDGSPSECHEHADCVLERDGSRSCVCAVGWAGNGILCGRDTDLDGFPDEKLRCPERQCRKDNCVTVPNSGQEDVDRDGIGDACDPDADGDGVPNEKDNCPLVRNPDQRNTDEDKWGDACDNCRSQKNDDQKDTDQDGRGDACDDDIDGDRIRNQADNCPRVPNSDQKDSDGDGIGDACDNCPQKSNPDQADVDHDFVGDACDSDQDQDGDGHQDSRDNCPTVPNSAQEDSDHDGQGDACDDDDDNDGVPDSRDNCRLVPNPGQEDADRDGVGDVCQDDFDADKVVDKIDVCPENAEVTLTDFRAFQTVVLDPEGDAQIDPNWVVLNQGREIVQTMNSDPGLAVGYTAFNGVDFEGTFHVNTVTDDDYAGFIFGYQDSSSFYVVMWKQMEQTYWQANPFRAVAEPGIQLKAVKSSTGPGEQLRNALWHTGDTESQVRLLWKDPRNVGWKDKKSYRWFLQHRPQVGYIRVRFYEGPELVADSNVVLDTTMRGGRLGVFCFSQENIIWANLRYRCNDTIPEDYETHQLRQA

SEQ ID NO: 3389 - protein, 757 aa, Homo Sapiens
MVPDTACVLLLTLAALGASGQGQSPLGSDLGPQMLRELQETNAALQDVRELLRQQVREITFLKNTVMECDACGMQQSVRTGLPSVRPLLHCAPGFCFPGVACIQTESGARCGPCPAGFTGNGSHCTDVNECNAHPCFPRVRCINTSPGFRCEACPPGYSGPTHQGVGLAFAKANKQVCTDINECETGQHNCVPNSVCINTRGSFQCGPCQPGFVGDQASGCQRRAQRFCPDGSPSECHEHADCVLERDGSRSCVCAVGWAGNGILCGRDTDLDGFPDEKLRCPERQCRKDNCVTVPNSGQEDVDRDGIGDACDPDADGDGVPNEKDNCPLVRNPDQRNTDEDKWGDACDNCRSQKNDDQKDTDQDGRGDACDDDIDGDRIRNQADNCPRVPNSDQKDSDGDGIGDACDNCPQKSNPDQADVDHDFVGDACDSDQDQDGDGHQDSRDNCPTVPNSAQEDSDHDGQGDACDDDDDNDGVPDSRDNCRLVPNPGQEDADRDGVGDVCQDDFDADKVVDKIDVCPENAEVTLTDFRAFQTVVLDPEGDAQIDPNWVVLNQGREIVQTMNSDPGLAVGYTAFNGVDFEGTFHVNTVTDDDYAGFIFGYQDSSSFYVVMWKQMEQTYWQANPFRAVAEPGIQLKAVKSSTGPGEQLRNALWHTGDTESQVRLLWKDPRNVGWKDKKSYRWFLQHRPQVGYIRVRFYEGPELVADSNVVLDTTMRGGRLGVFCFSQENIIWANLRYRCNDTIPEDYETHQLRQA

SEQ ID NO: 3390 - protein, 123 aa, Homo Sapiens
LGWYTTGGPPDPSDIHVHKQVCEIIESPLFLKLNPMTKHTDLPVSVFESVIDIINGEATMLFAELTYTLATEEAERIGVDHVARMTATGSGENSTVAEHLIAQHSAIKMLHSRVKLILERGPL

SEQ ID NO: 3391 - protein, 326 aa, Homo Sapiens
MAAAAAAAAATNGTGGSSGMEVDAAVPSVMACGVTGSVSVALHPLVILNISDHWIRMRSQEGRPVQVIGALIGKQEGRNIEVMNSFELLSHTVEEKIIIDKEYYYTKEEQFKQVFKELEFLGWYTTGGPPDPSDIHVHKQVCEIIESPLFLKLNPMTKHTDLPVSVFESVIDIINGEATMLFAELTYTLATEEAERIGVDHVARMTATGSGENSTVAEHLIAQHSAIKMLHSRVKLILEYVKASEAGEVPFNHEILREAYALCHCLPVLSTDKFKTDFYDQCNDVGLMAYLGTITKTCNTMNQFVNKFNVLYDRQGIGRRMRGLFF

SEQ ID NO: 3392 - protein, 327 aa, Homo Sapiens
MAAAAAAAAATNGTGGSSGMEVDAAVVPSVMACGVTGSVSVALHPLVILNISDHWIRMRSQEGRPVQVIGALIGKQEGRNIEVMNSFELLSHTVEEKIIIDKEYYYTKEEQFKQVFKELEFLGWYTTGGPPDPSDIHVHKQVCEIIESPLFLKLNPMTKHTDLPVSVFESVIDIINGEATMLFAELTYTLATEEAERIGVDHVARMTATGSGENSTVAEHLIAQHSAIKMLHSRVKLILEYVKASEAGEVPFNHEILREAYALCHCLPVLSTDKFKTDFYDQCNDVGLMAYLGTITKTCNTMNQFVNKFNVLYDRQGIGRRMRGLFF

SEQ ID NO: 3393 - protein, 42 aa, Homo Sapiens
MACGVTGSVSVALHPLVILNISDHWIRMRSQEGRPVQVIGAL

SEQ ID NO: 3394 - protein, 468 aa, Homo Sapiens
MAARLVSRCGAVRAAPHSGPLVSWRRWSGASTDTVYDVVVSGGGLVGAAMACALGYDIHFHDKKILLLEAGPKKVLEKLSETYSNRVSSISPGSATLLSSFGAWDHICNMRYRAFRRMQVWDACSEALIMFDKDNLDDMGYIVENDVIMHALTKQLEAVSDRVTVLYRSKAIRYTWPCPFPMADSSPWVHITLGDGSTFQTKLLIGADGHNSGVRQAVGIQNVSWNYDQSAVVATLHLSEATENNVAWQRFLPSGPIALLPLSDTLSSLVWSTSHEHAAELVSMDEEKFVDAVNSAFWSDADHTDFIDTAGAMLQYAVSLLKPTKVSARQLPPSVARVDAKSRVLFPLGLGHAAEYVRPRVALIGDAAHRVHPLAGQGVNMGFGDISSLAHHLSTAAFNGKDLGSVSHLTGYETERQRHNTALLAATDLLKRLYSTSASPLVLLRTWGLQATNAVSPLKEQIMAFASK

SEQ ID NO: 3395 - protein, 200 aa, Homo Sapiens
MAARLVSRCGAVRAAPHSGPLVSWRRWSGASTDTVYDVVVSGGGLVGAAMACALGYDIHFHDKKILLLEAGPKKVLEKLSETYSNRVSSISPGSATLLSSFGAWDHICNMRYRAFRRMQVWDACSEALIMFDKDNLDDMGYIVENDVIMHALTKQLEAVSGTDYGLCKQMSTPLLKKDYVDEKEHPAQDPSYIFSRSYLI

SEQ ID NO: 3396 - protein, 111 aa, Homo Sapiens
MAARLVSRCGAVRAAPHSGPLVSWRRWSGASTDTVYDVVVSGGGLVGAAMACALGYDIHFHDKKILLLEAGPKKVLEKLSETYSNRVSSISPGSATLLSSVGRLLRGPDNV

SEQ ID NO: 3397 - protein, 54 aa, Homo Sapiens
MIFTFMTRKSCCSKQVQRKYWRNCQKLTATGSAPFPLALQRFSVVLVPGTISAT

SEQ ID NO: 3398 - protein, 262 aa, Homo Sapiens
MIFTFMTRKSCCSKQVQRKYWRNCQKLTATGSAPFPLALQRFSVVWDACSEALIMFDKDNLDDMGYIVENDVIMHALTKQLEAVSDRVTVLYRSKAIRYTWPCPFPMADSSPWVHITLGDGSTFQTKLLIGADGHNSGVRQAVGIQNVSWNYDQSAVVATLHLSEATENNVAWQRFLPSGPIALLPLSDTLSSLVWSTSHEHAAELVSMDEEKFVDAVNSAFWSDADHTDFIDTAGAMLQYAVSLLKPTKVSARQLPPSVAR

SEQ ID NO: 3399 - protein, 393 aa, Homo Sapiens
MIFTFMTRKSCCSKQVQRKYWRNCQKLTATGSAPFPLALQRFSVVWDACSEALIMFDKDNLDDMGYIVENDVIMHALTKQLEAVSDRVTVLYRSKAIRYTWPCPFPMADSSPWVHITLGDGSTFQTKLLIGADGHNSGVRQAVGIQNVSWNYDQSAVVATLHLSEATENNVAWQRFLPSGPIALLPLSDTLSSLVWSTSHEHAAELVSMDEEKFVDAVNSAFWSDADHTDFIDTAGAMLQYAVSLLKPTKVSARQLPPSVARVDAKSRVLFPLGLGHAAEYVRPRVALIGDAAHRVHPLAGQGVNMGFGDISSLAHHLSTAAFNGKDLGSVSHLTGYETERQRHNTALLAATDLLKRLYSTSASPLVLLRTWGLQATNAVSPLKEQIMAFASK

SEQ ID NO: 3400 - protein, 443 aa, Homo Sapiens
MRGQGPPLSSFGVWLASRAASDPSRPRRQGYDIHFHDKKILLLEAGPKKVLEKLSETYSNRVSSISPGSATLLSSFGAWDHICNMRYRAFRRMQVWDACSEALIMFDKDNLDDMGYIVENDVIMHALTKQLEAVSDRVTVLYRSKAIRYTWPCPFPMADSSPWVHITLGDGSTFQTKLLIGADGHNSGVRQAVGIQNVSWNYDQSAVVATLHLSEATENNVAWQRFLPSGPIALLPLSDTLSSLVWSTSHEHAAELVSMDEEKFVDAVNSAFWSDADHTDFIDTAGAMLQYAVSLLKPTKVSARQLPPSVARVDAKSRVLFPLGLGHAAEYVRPRVALIGDAAHRVHPLAGQGVNMGFGDISSLAHHLSTAAFNGKDLGSVSHLTGYETERQRHNTALLAATDLLKRLYSTSASPLVLLRTWGLQATNAVSPLKEQIMAFASK

SEQ ID NO: 3401 - protein, 86 aa, Homo Sapiens
MRGQGPPLSSFGVWLASRAASDPSRPRRQGYDIHFHDKKILLLEAGPKKVLEKLSETYSNRVSSISPGSATLLSSVGRLLRGPDNV

SEQ ID NO: 3402 - protein, 105 aa, Homo Sapiens
MPLSPGLLLLLLSGATATAALPLEGGPTGRDSEHMQEAAGIRKSSLLTFLAWWFEWTSQASAGPLIGEEAREVARRQEGAPPQQSARRDRMPCRNFFWKTFSSCK

SEQ ID NO: 3403 - protein, 225 aa, Homo Sapiens
GAGTEDSACIPWAYYSTVDQVKDLYSGLIGPLIVCRRPYLKVFNPRRKLEFALLFLVFDENESWYLDDNIKTYSDHPEKVNKDDEEFIESNKMHAINGRMFGNLQGLTMHVGDEVNWYLMGMGNEIDLHTVHFHGHSFQYKHRGVYSSDVFDIFPGTYQTLEMFPRTPGIWLLHCHVTDHIHAGMETTYTVLQNEASSETHRRIWNVIYPITVSVIILFQISTKE

SEQ ID NO: 3404 - protein, 1065 aa, Homo Sapiens
MKILILGIFLFLCSTPAWAKEKHYYIGIIETTWDYASDHGEKKLISVDTEHSNIYLQNGPDRIGRLYKKALYLQYTDETFRTTIEKPVWLGFLGPIIKAETGDKVYVHLKNLASRPYTFHSHGITYYKEHEGAIYPDNTTDFQRADDKVYPGEQYTYMLLATEEQSPGEGDGNCVTRIYHSHIDAPKDIASGLIGPLIICKKDSLDKEKEKHIDREFVVMFSVVDENFSWYLEDNIKTYCSEPEKVDKDNEDFQESNRMYSVNGYTFGSLPGLSMCAEDRVKWYLFGMGNEVDVHAAFFHGQALTNKNYRIDTINLFPATLFDAYMVAQNPGEWMLSCQNLNHLKAGLQAFFQVQECNKSSSKDNIRGKHVRHYYIAAEEIIWNYAPSGIDIFTKENLTAPGSDSAVFFEQGTTRIGGSYKKLVYREYTDASFTNRKERGPEEEHLGILGPVIWAEVGDTIRVTFHNKGAYPLSIEPIGVRFNKNNEGTYYSPNYNPQSRSVPPSASHVAPTETFTYEWTVPKEVGPTNADPVCLAKMYYSAVEPTKDIFTGLIGPMKICKKGSLHANGRQKDVDKEFYLFPTVFDENESLLLEDNIRMFTTAPDQVDKEDEDFQESNKMHSMNGFMYGNQPGLTMCKGDSVVWYLFSAGNEADVHGIYFSGNTYLWRGERRDTANLFPQTSLTLHMWPDTEGTFNVECLTTDHYTGGMKQKYTVNQCRRQSEDSTFYLGERTYYIAAVEVEWDYSPQREWEKELHHLQEQNVSNAFLDKGEFYIGSKYKKVVYRQYTDSTFRVPVERKAEEEHLGILGPQLHADVGDKVKIIFKNMATRPYSIHAHGVQTESSTVTPTLPGETLTYVWKIPERSGAGTEDSACIPWAYYSTVDQVKDLYSGLIGPLIVCRRPYLKVFNPRRKLEFALLFLVFDENESWYLDDNIKTYSDHPEKVNKDDEEFIESNKMHAINGRMFGNLQGLTMHVGDEVNWYLMGMGNEIDLHTVHFHGHSFQYKHRGVYSSDVFDIFPGTYQTLEMFPRTPGIWLLHCHVTDHIHAGMETTYTVLQNEDTKSG

SEQ ID NO: 3405 - protein, 946 aa, Homo Sapiens
MKILILGIFLFLCSTPAWAKEKHYYIGIIETTWDYASDHGEKKLISVDTEHSNIYLQNGPDRIGRLYKKALYLQYTDETFRTTIEKPVWLGFLGPIIKAETGDKVYVHLKNLASRPYTFHSHGITYYKEHEGAIYPDNTTDFQRADDKVYPGEQYTYMLLATEEQSPGEGDGNCVTRIYHSHIDAPKDIASGLIGPLIICKKDSLDKEKEKHIDREFVVMFSVVDENFSWYLEDNIKTYCSEPEKVDKDNEDFQESNRMYSVNGYTFGSLPGLSMCAEDRVKWYLFGMGNEVDVHAAFFHGQALTNKNYRIDTINLFPATLFDAYMVAQNPGEWMLSCQNLNHLKAGLQAFFQVQECNKSSSKDNIRGKHVRHYYIAAEEIIWNYAPSGIDIFTKENLTAPGSDSAVFFEQGTTRIGGSYKKLVYREYTDASFTNRKERGPEEEHLGILGPVIWAEVGDTIRVTFHNKGAYPLSIEPIGVRFNKNNEGTYYSPNYNPQSRSVPPSASHVAPTETFTYEWTVPKEVGPTNADPVCLAKMYYSAVEPTKDIFTGLIGPMKICKKGSLHANGRQKDVDKEFYLFPTVFDENESLLLEDNIRMFTTAPDQVDKEDEDFQESNKMHWTFNVECLTTDHYTGGMKQKYTVNQCRRQSEDSTFYLGERTYYIAAVEVEWDYSPQREWEKELHHLQEQNVSNAFLDKGEFYIGSKYKKVVYRQYTDSTFRVPVERKAEEEHLGILGPQLHADVGDKVKIIFKNMATRPYSIHAHGVQTESSTVTPTLPGETLTYVWKIPERSGAGTEDSACIPWAYYSTVDQVKDLYSGLIGPLIVCRRPYLKVFNPRRKLEFALLFLVFDENESWYLDDNIKTYSDHPEKVNKDDEEFIESNKMHAINGRMFGNLQGLTMHVGDEVNWYLMGMGNEIDLHTVHFHGHSFQYKHLLRLTGEYGM

SEQ ID NO: 3406 - protein, 179 aa, Homo Sapiens [sequence omitted]

SEQ ID NO: 3407 - protein, 852 aa, Homo Sapiens
VVMFSVVDENFSWYLEDNIKTYCSEPEKVDKDNEDFQESNRMYSVNGYTFGSLPGLSMCAEDRVKWYLFGMGNEVDVHAAFFHGQALTNKNYRIDTINLFPATLFDAYMVAQNPGEWMLSCQNLNHLKAGLQAFFQVQECNKSSSKDNIRGKHVRHYYIAAEEIIWNYAPSGIDIFTKENLTAPGSDSAVFFEQGTTRIGGSYKKLVYREYTDASFTNRKERGPEEEHLGILGPVIWAEVGDTIRVTFHNKGAYPLSIEPIGVRFNKNNEGTYYSPNYNPQSRSVPPSASHVAPTETFTYEWTVPKEVGPTNADPVCLAKMYYSAVEPTKDIFTGLIGPMKICKKGSLHANGRQKDVDKEFYLFPTVFDENESLLLEDNIRMFTTAPDQVDKEDEDFQESNKMHSMNGFMYGNQPGLTMCKGDSVVWYLFSAGNEADVHGIYFSGNTYLWRGERRDTANLFPQTSLTLHMWPDTEGTFNVECLTTDHYTGGMKQKYTVNQCRRQSEDSTFYLGERTYYIAAVEVEWDYSPQREWEKELHHLQEQNVSNAFLDKGEFYIGSKYKKVVYRQYTDSTFRVPVERKAEEEHLGILGPQLHADVGDKVKIIFKNMATRPYSIHAHGVQTESSTVTPTLPGETLTYVWKIPERSGAGTEDSACIPWAYYSTVDQVKDLYSGLIGPLIVCRRPYLKVFNPRRKLEFALLFLVFDENESWYLDDNIKTYSDHPEKVNKDDEEFIESNKMHAINGRMFGNLQGLTMHVGDEVNWYLMGMGNEIDLHTVHFHGHSFQYKHRGVYSSDVFDIFPGTYQTLEMFPRTPGIWLLHCHVTDHIHAGMETTYTVLQNEGEYPDTKSG

SEQ ID NO: 3408 - protein, 103 aa, Homo Sapiens
MIEDVQSLLDEEQEQMFAFRSRARSTDTFNYATYHTLEEIYDFLDLLVAENPHLVSKIQIGNTYEGRPIYVLKFSTGGSKRPAIWIDTGIHSREWVTQASGVW

SEQ ID NO: 3409 - protein, 331 aa, Homo Sapiens
MIEDVQSLLDEEQEQMFAFRSRARSTDTFNYATYHTLEEIYDFLDLLVAENPHLVSKIQIGNTYEGRPIYVLKFSTGGSKRPAIWIDTGIHSREWVTQASGVWFAKKITQDYGQDAAFTAILDTLDIFLEIVTNPDGFAFTHSTNRMWRKTRSHTAGSLCIGVDPNRNWDAGFGLSGASSNPCSETYHGKFANSEVEVKSIVDFVKDHGNIKAFISIHSYSQLLMYPYGYKTEPVPDQDELDQLSKAAVTALASLYGTKFNYGSIIKAIYQASGSTIDWTYSQGIKYSFTFELRDTGRYGFLLPASQIIPTAKETWLALLTIMEHTLNHPY

SEQ ID NO: 3410 - protein, 269 aa, Homo Sapiens
MIEDVQSLLDEEQEQMFAFRSRARSTDTFNYATYHTLEEIYDFLDLLVAENPHLVSKIQIGNTYEGRPIYVLKFSTGGSKRPAIWIDTGIHSREWVTQASGVWFAKKITQDYGQDAAFTAILDTLDIFLEIVTNPDGFAFTHSTNRMWRKTRSHTAGSLCIGVDPNRNWDAGFGLSGASSNPCSETYHGKFANSEVEVKSIVDFVKDHGNIKAFISIHSYSQLLMYPYGYKTEPVPDQDELDQLSKAAVTALASLYGTKFNYGSIIKAI

SEQ ID NO: 3411 - protein, 419 aa, Homo Sapiens
MRGLLVLSVLLGAVFGKEDFVGHQVLRISVADEAQVQKVKELEDLEHLQLDFWRGPAHPGSPIDVRVPFPSIQAVKIFLESHGISYETMIEDVQSLLDEEQEQMFAFRSRARSTDTFNYATYHTLEEIYDFLDLLVAENPHLVSKIQIGNTYEGRPIYVLKFSTGGSKRPAIWIDTGIHSREWVTQASGVWFAKKITQDYGQDAAFTAILDTLDIFLEIVTNPDGFAFTHSTNRMWRKTRSHTAGSLCIGVDPNRNWDAGFGLSGASSNPCSETYHGKFANSEVEVKSIVDFVKDHGNIKAFISIHSYSQLLMYPYGYKTEPVPDQDELDQLSKAAVTALASLYGTKFNYGSIIKAIYQASGSTIDWTYSQGIKYSFTFELRDTGRYGFLLPASQIIPTAKETWLALLTIMEHTLNHPY

SEQ ID NO: 3412 - protein, 191 aa, Homo Sapiens
SLTFPPGSSMRGLLVLSVLLGAVFGKEDFVGHQVLRISVADEAQVQKITQDYGQDAAFTAILDTLDIFLEIVTNPDGFAFTHSTNRMWRKTRSHTAGSLCIGVDPNRNWDAGFGLSGASSNPCSETYHGKFANSEVEVKSIVDFVKDHGNIKAFISIHSYSQLLMYPYGYKTEPVPDQDELDQLSKAAVTA

SEQ ID NO: 3413 - protein, 419 aa, Homo Sapiens
MAMRLILFFGALFGHIYCLETFVGDQVLEIVPSNEEQIKNLLQLEAQEHLQLDFWKSPTTPGETAHVRVPFVNVQAVKVFLESQGIAYSIMIEDVQVLLDKENEEMLFNRRRERSGNFNFGAYHTLEEISQEMDNLVAEHPGLVSKVNIGSSFENRPMNVLKFSTGGDKPAIWLDAGIHAREWVTQATALWTANKIVSDYGKDPSITSILDALDIFLLPVTNPDGYVFSQTKNRMWRKTRSKVSGSLCVGVDPNRNWDAGFGGPGASSNPCSDSYHGPSANSEVEVKSIVDFIKSHGKVKAFITLHSYSQLLMFPYGYKCTKLDDFDELSEVAQKAAQSLRSLHGTKYKVGPICSVIYQASGGSIDWSYDYGIKYSFAFELRDTGRYGFLLPARQILPTAEETWLGLKAIMEHVRDHPY

SEQ ID NO: 3414 - protein, 182 aa, Homo Sapiens
MRLILFFGALFGHIYCLETFVGDQVLEIVPSNEEQIKNLLQLEAQEHLQLDFWKSPTTPGETAHVRVPFVNVQAVKVFLESQGIAYSIMIEDVQVLLDKENEEMLFNRRRERSGNFNFGAYHTLEEISQEMDNLVAEHPGLVSKVNIGSSFENRPMNVLKKSSGRMQKDDGQLNPKPQRQTP

SEQ ID NO: 3415 - protein, 417 aa, Homo Sapiens
MRLILPVGLIATTLAIAPVRFDREKVFRVKPQDEKQADIIKDLAKTNELDFWYPGATHHVAANMMVDFRVSEKESQAIQSALDQNKMHYEILIHDLQEEIEKQFDVKEDIPGRHSYAKYNNWEKIVAWTEKMMDKYPEMVSRIKIGSTVEDNPLYVLKIGEKNERRKAIFTDCGIHAREWVSPAFCQWFVYQATKTYGRNKIMTKLLDRMNFYILPVFNVDGYIWSWTKNRMWRKNRSKNQNSKCIGTDLNRNFNASWNSIPNTNDPCADNYRGSAPESEKETKAVTNFIRSHLNEIKVYITFHSYSQMLLFPYGYTSKLPPNHEDLAKVAKIGTDVLSTRYETRYIYGPIESTIYPISGSSLDWAYDLGIKHTFAFELRDKGKFGFLLPESRIKPTCRETMLAVKFIAKYILKHTS

SEQ ID NO: 3416 - protein, 29 aa, Homo Sapiens
MQHNEGQERSSNNFNYGAYHSLEAIYHEM

SEQ ID NO: 3417 - protein, 317 aa, Homo Sapiens
MQHNEGQERSSNNFNYGAYHSLEAIYHEMDNIAADFPDLARRVKIGHSFENRPMYVLKFSTGKGVRRPAVWLNAGIHSREWISQATAIWTARKIVSDYQRDPAITSILEKMDIFLLPVANPDGYVYTQTQNRLWRKTRSRNPGSSCIGADPNRNWNASFAGKGASDNPCSEVYHGPHANSEVEVKSVVDFIQKHGNFKGFIDLHSYSQLLMYPYGYSVKKAPDAEELDKVARLAAKALASVSGTEYQVGPTCTTVYPASGSSIDWAYDNGIKFAFTFELRDTGTYGFLLPANQIIPTAEETWLGLKTIMEHVRDNLY

SEQ ID NO: 3418 - protein, 421 aa, Homo Sapiens
MRWILFIGALIGSSICGQEKFFGDQVLRINVRNGDEISKLSQLVNSNNLKLNFWKSPSSFNRPVDVLVPSVSLQAFKSFLRSQGLEYAVTIEDLQALLDNEDDEMQHNEGQERSSNNFNYGAYHSLEAIYHEMDNIAADFPDLARRVKIGHSFENRPMYVLKFSTGKGVRRPAVWLNAGIHSREWISQATAIWTARKIVSDYQRDPAITSILEKMDIFLLPVANPDGYVYTQTQNRLWRKTRSRNPGSSCIGADPNRNWNASFAGKGASDNPCSEVYHGPHANSEVEVKSVVDFIQKHGNFKGFIDLHSYSQLLMYPYGYSVKKAPDAEELDKVARLAAKALASVSGTEYQVGPTCTTVYPASGSSIDWAYDNGIKFAFTFELRDTGTYGFLLPANQIIPTAEETWLGLKTIMEHVRDNLY

SEQ ID NO: 3419 - protein, 172 aa, Homo Sapiens [sequence omitted]

SEQ ID NO: 3420 - protein, 177 aa, Homo Sapiens
MRWILFIGALIGSSICGQEKFFGDQVLRINVRNGDEISKLSQLVNSNNLKLNFWKSPSSFNRPVDVLVPSVSLQAFKSFLRSQGLEYAVTIEDLQIYHEMDNIAADFPDLARRVKIGHSFENRPMYVLKFSTGKGVRRPAVWLNAGIHSREWISQATAIWTARKIVSDYQRDPAITS

SEQ ID NO: 3421 - protein, 388 aa, Homo Sapiens
MRWILFIGALIGSSICGQEKFFGDQVLRINVRNGDEISKLSQLVNSNNLKLNFWKSPSSFNRPVDVLVPSVSLQAFKSFLRSQGLEYAVTIEDLQIYHEMDNIAADFPDLARRVKIGHSFENRPMYVLKFSTGKGVRRPAVWLNAGIHSREWISQATAIWTARKIVSDYQRDPAITSILEKMDIFLLPVANPDGYVYTQTQNRLWRKTRSRNPGSSCIGADPNRNWNASFAGKGASDNPCSEVYHGPHANSEVEVKSVVDFIQKHGNFKGFIDLHSYSQLLMYPYGYSVKKAPDAEELDKVARLAAKALASVSGTEYQVGPTCTTVYPASGSSIDWAYDNGIKFAFTFELRDTGTYGFLLPANQIIPTAEETWLGLKTIMEHVRDNLY

SEQ ID NO: 3422 - protein, 92 aa, Homo Sapiens
MKCLGKRRGQAAAFLPLCWLFLKILQPGHSHLYNNRYAGDKVIRFIPKTEEEAYALKKISYQLKGPHRRSSENTGEGKQLAHPEKPKIPLWI

SEQ ID NO: 3423 - protein, 92 aa, Homo Sapiens; identical to SEQ ID NO: 3422

SEQ ID NO: 3424 - protein, 437 aa, Homo Sapiens
MKCLGKRRGQAAAFLPLCWLFLKILQPGHSHLYNNRYAGDKVIRFIPKTEEEAYALKKISYQLKVDLWQPSSISYVSEGTVTDVHIPQNGSRALLAFLQEANIQYKVLIEDLQKTLEKGSSLHTQRNRRSLSGYNYEVYHSLEEIQNWMHHLNKTHSGLIHMFSIGRSYEGRSLFILKLGRRSRLKRAVWIDCGIHAREWIGPAFCQWFVKEALLTYKSDPAMRKMLNHLYFYIMPVFNVDGYHFSWTNDRFWRKTRSRNSRFRCRGVDANRNWKVKWCDEGASMHPCDDTYCGPFPESEPEVKAVANFLRKHRKHIRAYLSFHAYAQMLLYPYSYKYATIPNFRCVESAAYKAVNALQSVYGVRYRYGPASTTLYVSSGSSMDWAYKNGIPYAFAFELRDTGYFGFLLPEMLIKPTCTETMLAVKNITMHLLKKCP

SEQ ID NO: 3425 - protein, 175 aa, Homo Sapiens
LLLDKHMGMKRYEVAGRRVLFYFDEIPSRCLTCVRFRALRECVVGRTSALPVSVYDYYEPAFEATRFYNVSTHSPLARELCAGPACNEVERAPARGPGWFPGESGPAVAPEEGAAIARCGCDHDCGAQGNPVCGSDGVVYASACRLREAACRQAAPLEPAPPSCCALAGREAEWS

SEQ ID NO: 3426 - protein, 550 aa, Homo Sapiens
MAPGALRGGCEQRAPGGGARTAALGPWPWPSPGPAPSPGAAPPRSRKMSGALLWPLLPLLLLLLSARDGVRAAQPQAPGYLIAAPSVFRAGVEEVISVTIFNSPREVTVQAQLVAQGEPVVQSQGAILDKGTIKLKVPTGLRGQALLKVWGRGWQAEEGPLFHNQTSVTVDGRGASVFIQTDKPVYRPQHRVLISIFTVSPNLRPVNEKLEAYILDPRGSRMIEWRHLKPFCCGITNMSFPLSDQPVLGEWFIFVEMQGHAYNKSFEVQKYVLPKFELLIDPPRYIQDLDACETGTVRARYTFGKPVAGALMINMTVNGVGYYSHEVGRPVLRTTKILGSRDFDICVRDMIPADVPEHFRGRVSIWAMVTSVDGSQQVAFDDSTPVQRQLVDIRYSKDTRKQFKPGLAYVGKVELSYPDGSPAEGVTVQIKAELTPKDNIYTSEVVSQRGLVGFEIPSIPTSAQHVWLEVFQELEDYDVSDSFGVSREDGPFWWAGLTAQRRRRSSVFPWPWGITKDSGFAFTVRRGNGTGGDDRPSEPEPPAGRWPLHR

SEQ ID NO: 3427 - protein, 1932 aa, Homo Sapiens
MAPGALRGGCEQRAPGGGARTAALGPWPWPSPGPAPSPGAAPPRSRKMSGALLWPLLPLLLLLLSARDGVRAAQPQAPGYLIAAPSVFRAGVEEVISVTIFNSPREVTVQAQLVAQGEPVVQSQGAILDKGTIKLKVPTGLRGQALLKVWGRGWQAEEGPLFHNQTSVTVDGRGASVFIQTDKPVYRPQHRVLISIFTVSPNLRPVNEKLEAYILDPRGSRMIEWRHLKPFCCGITNMSFPLSDQPVLGEWFIFVEMQGHAYNKSFEVQKYVLPKFELLIDPPRYIQDLDACETGTVRARYTFGKPVAGALMINMTVNGVGYYSHEVGRPVLRTTKILGSRDFDICVRDMIPADVPEHFRGRVSIWAMVTSVDGSQQVAFDDSTPVQRQLVDIRYSKDTRKQFKPGLAYVGKVELSYPDGSPAEGVTVQIKAELTPKDNIYTSEVVSQRGLVGFEIPSIPTSAQHVWLETKVMALNGKPVGAQYLPSYLSLGSWYSPSQCYLQLQPPSHPLQVGEEAYFSVKSTCPCNFTLYYEVAARGNIVLSGQQPAHTTQQRSKRAAPALEKPIRLTHLSETEPPPAPEAEVDVCVTSLHLAVTPSMVPLGRLLVFYVRENGEGVADSLQFAVETFFENQVSVTYSANETQPGEVVDLRIRAARGSCVCVAAVDKSVYLLRSGFRLTPAQVFQELEDYDVSDSFGVSREDGPFWWAGLTAQRRRRSSVFPWPWGITKDSGFAFTETGLVVMTDRVSLNHRQDGGLYTDEAVPAFQPHTGSLVAVAPSRHPPRTEKRKRTFFPETWIWHCLNISDPSGEGTLSVKVPDSITSWVGEAVALSTSQGLGIAEPSLLKTFKPFFVDFMLPALIIRGEQVKIPLSVYNYMGTCAEVYMKLSVPKGIQFVGHPGKRHVTKKMCVAPGEAEPIWVVLSFSDLGLNNITAKALAYGDTNCCRDGRSSKHPEENHADRRVPIGVDHVRRSVMVEAEGVPRAYTYSAFFCPSERVHISTPNKYEFQYVQRPLRLTRFDVAVRAHNDARVALSSGPQDTAGMIEIVLGGHQNTRSWISTSKMGEPVASAHTAKILSWDEFRTFWISWRGGLIQVGHGPEPSNESVIVAWTLPRPPEVQFIGFSTGWGSMGEFRIWRKMEVDESYSEAFTLGVPHGAIPGSERATASIIGDVMGPTLNHLNNLLRLPFGCGEQNMIHFAPNVFVLKYLQKTQQLSPEVERETTDYLVQGYQRQLTYKRQDGSYSAFGERDASGSMWLTAFVLKSFAQARSFIFVDPRELAAAKSWIIQQQQADGSFLAVGRVLNKDIQGGIHGTVPLTAYVVVALLETGTASEEERGSTDKARHFLESAAPLAMDPYSCALTTYALTLLRSPAAPEALRKLRSLAIMRDGVTHWSLSNSWDVDKGTFLSFSDRVSQSVVSAEVEMTAYALLTYTLLGDVAAALPVVKWLSQQRNALGGFSSTQDTCVALQALAEYAILSYAGGINLTVSLASTNLDYQETFELHRTNQKVLQTAAIPSLPTGLFVSAKGDGCCLMQIDVTYNVPDPVAKPAFQLLVSLQEPEAQGRPPPMPASAAEGSRGDWPPADDDDPAADQHHQEYKVMLEVCTRWLHAGSSNMAVLEVPLLSGFRADIESLEQLLLDKHMGMKRYEVAGRRVLFYFDEIPSRCLTCVRFRALRECVVGRTSALPVSVYDYYEPAFEATRFYNVSTHSPLARELCAGPACNEVERAPARGPGWFPGESGPAVAPEEGAAIARCGCDHDCGAQGNPVCGSDGVVYASACRLREAACRQAAPLEPAPPSCCALEQRLPASSSSTYGDDLASVAPGPLQQDVKLNGAGLEVEDSDPEPEGEAEDRVTAGPRPPVSSGNLESSTQSASPFHRWGQTPAPQRHSGRVVGAHRPGLLSPVFVYSPAFQSGGEEGLWMSNTCTLR

SEQ ID NO: 3428 - protein, 503 aa, Homo Sapiens
MSGALLWPLLPLLLLLLSARDGVRAAQPQAPGYLIAAPSVFRAGVEEVISVTIFNSPREVTVQAQLVAQGEPVVQSQGAILDKGTIKLKVPTGLRGQALLKVWGRGWQAEEGPLFHNQTSVTVDGRGASVFIQTDKPVYRPQHRVLISIFTVSPNLRPVNEKLEAYILDPRGSRMIEWRHLKPFCCGITNMSFPLSDQPVLGEWFIFVEMQGHAYNKSFEVQKYVLPKFELLIDPPRYIQDLDACETGTVRARYTFGKPVAGALMINMTVNGVGYYSHEVGRPVLRTTKILGSRDFDICVRDMIPADVPEHFRGRVSIWAMVTSVDGSQQVAFDDSTPVQRQLVDIRYSKDTRKQFKPGLAYVGKVELSYPDGSPAEGVTVQIKAELTPKDNIYTSEVVSQRGLVGFEIPSIPTSAQHVWLEVFQELEDYDVSDSFGVSREDGPFWWAGLTAQRRRRSSVFPWPWGITKDSGFAFTVRRGNGTGGDDRPSEPEPPAGRWPLHR

SEQ ID NO: 3429 - protein, 56 aa, Homo Sapiens
RTQTLSLKGRRRTERLLFLTAALLRAGRHHLAASCPYQPVTLYGGWADLSPGDTCL

SEQ ID NO: 3430 - protein, 338 aa, Homo Sapiens
  misc_feature (1)..(1): Xaa can be any naturally occurring amino acid
XVSAKGDGCCLMQIDVTYNVPDPVAKPAFQLLVSLQEPEAQGRPPPMPASAAEGSRGDWPPADDDDPAADQHHQEYKVMLEVCTRWLHAGSSNMAVLEVPLLSGFRADIESLEQLLLDKHMGMKRYEVAGRRVLFYFDEIPSRCLTCVRFRALRECVVGRTSALPVSVYDYYEPAFEATRFYNVSTHSPLARELCAGPACNEVERAPARGPGWFPGESGPAVAPEEGAAIARCGCDHDCGAQGNPVCGSDGVVYASACRLREAACRQAAPLEPAPPSCCALEQRLPASSSSTYGDDLASVAPGPLQQDVKLNGAGLEVEDSDPEPEGEAEDSQSGFSS

SEQ ID NO: 3431 - protein, 59 aa, Homo Sapiens
MLALLVLVTVALASAHHGGEHFEGEKVFRVNVEDENHINIIRELASTTQIDFWKPDSVT

SEQ ID NO: 3432 - protein, 99 aa, Homo Sapiens
MLALLVLVTVALASAHHGGEHFEGEKVFRVNVEDENHINIIRELASTTQIDFWKPDSVTQIKPHSTVDFRVKAEDTVTVENVLKQNELQYKVLISNLRN

SEQ ID NO: 3433 - protein, 417 aa, Homo Sapiens
MLALLVLVTVALASAHHGGEHFEGEKVFRVNVEDENHINIIRELASTTQIDFWKPDSVTQIKPHSTVDFRVKAEDTVTVENVLKQNELQYKVLISNLRNVVEAQFDSRVRATGHSYEKYNKWETIEAWTQQVATENPALISRSVIGTTFEGRAIYLLKVGKAGQNKPAIFMDCGFHAREWISPAFCQWFVREAVRTYGREIQVTELLDKLDFYVLPVLNIDGYIYTWTKSRFWRKTRSTHTGSSCIGTDPNRNFDAGWCEIGASRNPCDETYCGPAAESEKETKALADFIRNKLSSIKAYLTIHSYSQMMIYPYSYAYKLGENNAELNALAKATVKELASLHGTKYTYGPGATTIYPAAGGSDDWAYDQGIRYSFTFELRDTGRYGFLLPESQIRATCEETFLAIKYVASYVLEHLY

SEQ ID NO: 3434 - protein, 417 aa, Homo Sapiens; identical to SEQ ID NO: 3433

SEQ ID NO: 3435 - protein, 203 aa, Homo Sapiens
MLALLVLVTVALASAHHGGEHFEGEKVFRVNVEDENHINIIRELASTTQIDFWKPDSVTQIKPHSTVDFRVKAEDTVTVENVLKQNELQYKVLISNLRNVVEAQFDSRVRATGHSYEKYNKWETVGKAGQNKPAIFMDCGFHAREWISPAFCQWFVREAVRTYGREIQVTELLDKLDFYVLPVLNIDGYIYTWTKSRFWRKTR

SEQ ID NO: 3436 - protein, 423 aa, Homo Sapiens
MKLCSLAVLVPIVLFCEQHVFAFQSGQVLAALPRTSRQVQVLQNLTTTYEIVLWQPVTADLIVKKKQVHFFVNASDVDNVKAHLNVSGIPCSVLLADVEDLIQQQISNDTVSPRASASYYEQYHSLNEIYSWIEFITERHPDMLTKIHIGSSFEKYPLYVLKVSGKEQAAKNAIWIDCGIHAREWISPAFCLWFIGHITQFYGIIGQYTNLLRLVDFYVMPVVNVDGYDYSWKKNRMWRKNRSFYANNHCIGTDLNRNFASKHWCEEGASSSSCSETYCGLYPESEPEVKAVASFLRRNINQIKAYISMHSYSQHIVFPYSYTRSKSKDHEELSLVASEAVRAIEKISKNTRYTHGHGSETLYLAPGGGDDWIYDLGIKYSFTIELRDTGTYGFLLPERYIKPTCREAFAAVSKIAWHVIRNV

SEQ ID NO: 3437 - protein, 423 aa, Homo Sapiens; identical to SEQ ID NO: 3436

SEQ ID NO: 3438 - protein, 386 aa, Homo Sapiens
MKLCSLAVLVPIVLFCEQHVFAFQSGQVLAALPRTSRQVQVLQNLTTTYEIVLWQPVTADLIVKKKQVHFFVNASDVDNVKAHLNVSGIPCSVLLADVEDLIQQQISNDTVSPRASASYYEQYHSLNEIYSWIEFITERHPDMLTKIHIGSSFEKYPLYVLKVSGKEQAAKNAIWIDCGIHAREWISPAFCLWFIGHNRMWRKNRSFYANNHCIGTDLNRNFASKHWCEEGASSSSCSETYCGLYPESEPEVKAVASFLRRNINQIKAYISMHSYSQHIVFPYSYTRSKSKDHEELSLVASEAVRAIEKISKNTRYTHGHGSETLYLAPGGGDDWIYDLGIKYSFTIELRDTGTYGFLLPERYIKPTCREAFAAVSKIAWHVIRNV

SEQ ID NO: 3439 - protein, 476 aa, Homo Sapiens
MAGRGGSALLALCGALAACGWLLGAEAQEPGAPAAGMRRRRRLQQEDGISFEYHRYPELREALVSVWLQCTAISRIYTVGRSFEGRELLVIELSDNPGVHEPGEPEFKYIGNMHGNEAVGRELLIFLAQYLCNEYQKGNETIVNLIHSTRIHIMPSLNPDGFEKAASQPGELKDWFVGRSNAQGIDLNRNFPDLDRIVYVNEKEGGPNNHLLKNMKKIVDQNTKLAPETKAVIHWIMDIPFVLSANLHGGDLVANYPYDETRSGSAHEYSSSPDDAIFQSLARAYSSFNPAMSDPNRPPCRKNDDDSSFVDGTTNGGAWYSVPGGMQDFNYLSSNCFEITVELSCEKFPPEETLKTYWEDNKNSLISYLEQIHRGVKGFVRDLQGNPIANATISVEGIDHDVTSAKDGDYWRLLIPGNYKLTASAPGYLAITKKVAVPYSPAAGVDFELESFSERKEEEKEELMEWWKMMSETLNF

SEQ ID NO: 3440 - protein, 139 aa, Homo Sapiens
MHGNEAVGRELLIFLAQYLCNEYQKGNETIVNLIHSTRIHIMPSLNPDGFEKAASQPGELKDWFVGRSNAQGIDLNRNFPDLDRIVYVNEKEGGPNNHLLKNMKKIVDQNTKLAPETKAVIHWIMDIPFVLSANLHGGD

SEQ ID NO: 3441 - protein, 147 aa, Homo Sapiens
MHGNEAVGRELLIFLAQYLCNEYQKGNETIVNLIHSTRIHIMPSLNPDGFEKAASQPGELKDWFVGRSNAQGIDLNRNFPDLDRIVYVNEKEGGPNNHLLKNMKKIVDQNTKLAPETKAVIHWIMDIPFVLSANLHGGDLVANYPYD

SEQ ID NO: 3442 - protein, 157 aa, Homo Sapiens
MHGNEAVGRELLIFLAQYLCNEYQKGNETIVNLIHSTRIHIMPSLNPDGFEKAASQPGELKDWFVGRSNAQGIDLNRNFPDLDRIVYVNEKEGGPNNHLLKNMKKIVDQNTKLAPETKAVIHWIMDIPFVLSANLHGGDLVANYPYDETRSGSAHEY

SEQ ID NO: 3443 - protein, 108 aa, Homo Sapiens
  misc_feature (1)..(1): Xaa can be any naturally occurring amino acid
XLGAEAQEPGAPAAGMRRRRRLQQEDGISFEYHRYPELREALVSVWLQCTAISRIYTVGRSFEGRELLVIELSDNPGVHEPDCKLYEVGTLIPAPSSCLAHSGLEYTL

SEQ ID NO: 3444 - protein, 64 aa, Homo Sapiens
MDFPCLWLGLLLPLVAALDFNYHRQEGMEAFLKTVAQNYSSVTHLHSIGKSVKDCWAGAAAPSD

SEQ ID NO: 3445 - protein, 64 aa, Homo Sapiens; identical to SEQ ID NO: 3444

SEQ ID NO: 3446 - protein, 72 aa, Homo Sapiens
MDFPCLWLGLLLPLVAALDFNYHRQEGMEAFLKTVAQNYSSVTHLHSIGKSVKETCGFLLWGGFQRNTELGF

SEQ ID NO: 3447 - protein, 136 aa, Homo Sapiens
MDFPCLWLGLLLPLVAALDFNYHRQEGMEAFLKTVAQNYSSVTHLHSIGKSVKGRNLWVLVVGRFPKEHRIGIPEFKYVANMHGDETVGRELLLHLIDYLVTSDGKDPEITNLINSTRIHIMPSMNPDGFEAVKKP

SEQ ID NO: 3448 - protein, 249 aa, Homo Sapiens
MDFPCLWLGLLLPLVAALDFNYHRQEGMEAFLKTVAQNYSSVTHLHSIGKSVKGRNLWVLVVGRFPKEHRIGIPEFKYVANMHGDETVGRELLLHLIDYLVTSDGKDPEITNLINSTRIHIMPSMNPDGFEAVKKPDCYYSIGRENYNQYDLNRNFPDAFEYNNVSRQPETVAVMKWLKTETFVLSANLHGGALVASYPFDNGVQATGALYSRSLTPDDDVFQYLAHTYASRNPNMKKGDECKNKMNFP

SEQ ID NO: 3449 - protein, 443 aa, Homo Sapiens
MDFPCLWLGLLLPLVAALDFNYHRQEGMEAFLKTVAQNYSSVTHLHSIGKSVKGRNLWVLVVGRFPKEHRIGIPEFKYVANMHGDETVGRELLLHLIDYLVTSDGKDPEITNLINSTRIHIMPSMNPDGFEAVKKPDCYYSIGRENYNQYDLNRNFPDAFEYNNVSRQPETVAVMKWLKTETFVLSANLHGGALVASYPFDNGVQATGALYSRSLTPDDDVFQYLAHTYASRNPNMKKGDECKNKMNFPNGVTNGYSWYPLQGGMQDYNYIWAQCFEITLELSCCKYPREEKLPSFWNNNKASLIEYIKQVHLGVKGQVFDQNGNPLPNVIVEVQDRKHICPYRTNKYGEYYLLLLPGSYIINVTVPGHDPHITKVIIPEKSQNFSALKKDILLPFQGQLDSIPVSNPSCPMIPLYRNLPDHSAATKPSLFLFLVSLLHIFFK

SEQ ID NO: 3450 - protein, 443 aa, Homo Sapiens; identical to SEQ ID NO: 3449

SEQ ID NO: 3451 - protein, 443 aa, Homo Sapiens; identical to SEQ ID NO: 3449

SEQ ID NO: 3452 - protein, 35 aa, Homo Sapiens
SCPMIPLYRNLPDHSAATKPSLFLFLVSLLHIFFK

SEQ ID NO: 3453 - protein, 198 aa, Homo Sapiens
  misc_feature (1)..(1): Xaa can be any naturally occurring amino acid
XPFDNGVQATGALYSRSLTPDDDVFQYLAHTYASRNPNMKKGDECKNKMNFPNGVTNGYSWYPLQGGMQDYNYIWAQCFEITLELSCCKYPREEKLPSFWNNNKASLIEYIKQVHLGVKGQVFDQNGNPLPNVIVEVQDRKHICPYRTNKYGEYYLLLLPGSYIINVTVPGHDPHITKLRSFACNRGQDEFCLTSLMS

SEQ ID NO: 3454 - protein, 204 aa, Homo Sapiens
MHSFNFVLSANLHGGAVVANYPYDKSFEHRVRGVRRTASTPTPDDKLFQKLAKVYSYAHGWMFQGWNCGDYFPDGITNGASWYSLSKGMQDFNYLHTNCFEITLELSCDKFPPEEELQREWLGNREALIQFLEQVHQGIKGMVLDENYNNLANAVISVSGINHDVTSGDHGDYFRLLLPGIYTVSATAPGYDPETVTVTVGPAE

SEQ ID NO: 3455 - protein, 458 aa, Homo Sapiens
MSDLLSVFLHLLLLFKLVAPVTFRHHRYDDLVRTLYKVQNECPGITRVYSIGRSVEGRHLYVLEFSDHPGIHEPLEPEVKYVGNMHGNEALGRELMLQLSEFLCEEFRNRNQRIVQLIQDTRIHILPSMNPDGYEVAAAQGPNKPGYLVGRNNANGVDLNRNFPDLNTYIYYNEKYGGPNHHLPLPDNWKSQVEPETRAVIRWMHSFNFVLSANLHGGAVVANYPYDKSFEHRVRGVRRTASTPTPDDKLFQKLAKVYSYAHGWMFQGWNCGDYFPDGITNGASWYSLSKGMQDFNYLHTNCFEITLELSCDKFPPEEELQREWLGNREALIQFLEQVHQGIKGMVLDENYNNLANAVISVSGINHDVTSGDHGDYFRLLLPGIYTVSATAPGYDPETVTVTVGPAEPTLVNFHLKRSIPQVSPVRRAPSRRHGVRAKVQPQARKKEMEMRQLQRGPA

SEQ ID NO: 3456 - protein, 545 aa, Homo Sapiens
MLPGAWLLWTSLLLLARPAQPCPMGCDCFVQEVFCSDEELATVPLDIPPYTKNIIFVETSFTTLETRAFGSNPNLTKVVFLNTQLCQFRPDAFGGLPRLEDLEVTGSSFLNLSTNIFSNLTSLGKLTLNFNMLEALPEGLFQHLAALESLHLQGNQLQALPRRLFQPLTHLKTLNLAQNLLAQLPEELFHPLTSLQTLKLSNNALSGLPQGVFGKLGSLQELFLDSNNISELPPQVFSQLFCLERLWLQRNAITHLPLSIFASLGNLTFLSLQWNMLRVLPAGLFAHTPCLVGLSLTHNQLETVAEGTFAHLSNLRSLMLSYNAITHLPAGIFRDLEELVKLYLGSNNLTALHPALFQNLSKLELLSLSKNQLTTLPEGIFDTNYNLFNLALHGNPWQCDCHLAYLFNWLQQYTDRLLNIQTYCAGPAYLKGQVVPALNEKQLVCPVTRDHLGFQVTWPDESKAGGSWDLAVQERAARSQCTYSNPEGTVVLACDQAQCRWLNVQLSPQQGSLGLQYNASQEWDLRSSCGSLRLTVSIEARAAGP

SEQ ID NO: 3457 - protein, 545 aa, Homo Sapiens; identical to SEQ ID NO: 3456

SEQ ID NO: 3458 - protein, 374 aa, Homo Sapiens
MKPLLETLYLLGMLVPGGLGYDRSLAQHRQEIVDKSVSPWSLETYSYNIYHPMGEIYEWMREISEKYKEVVTQHFLGVTYETHPMYYLKISQPSGNPKKIIWMDCGIHAREWIAPAFCQWFVKEILQNHKDNSSIRKLLRNLDFYVLPVLNIDGYIYTWTTDRLWRKSRSPHNNGTCFGTDLNRNFNASWCSIGASRNCQDQTFCGTGPVSEPETKAVASFIESKKDDILCFLTMHSYGQLILTPYGYTKNKSSNHPEMIQVGQKAANALKAKYGTNYRVGSSADILYASSGSSRDWARDIGIPFSYTFELRDSGTYGFVLPEAQIQPTCEETMEAVLSVLDDVYAKHWHSDSAGRVTSATMLLGLLVSCMSLL

SEQ ID NO: 3459 - protein, 130 aa, Homo Sapiens
MKFLIFAFFGGVHLLSLCSGKAICKNGISKRTFEEIKEEIASCGDVAKAIINLAVYGKAQNRSYERLALLVDTVGPRLSGSKNLEKAIQIMYQNLQQDGLEKVHLEPVRIPHWERGEESAVMLEPRIHKI

SEQ ID NO: 3460 - protein, 131 aa, Homo Sapiens
MKFLIFAFFGGVHLLSLCSGKAICKNGISKRTFEEIKEEIASCGDVAKAIINLAVYGKAQNRSYERLALLVDTVGPRLSGSKNLEKAIQIMYQNLQQDGLEKVHLEPVRIPHWERGEESAVMLEPRIHKIA

SEQ ID NO: 3461 - protein, 137 aa, Homo Sapiens
MKFLIFAFFGGVHLLSLCSGKAICKNGISKRTFEEIKEEIASCGDVAKAIINLAVYGKAQNRSYERLALLVDTVGPRLSGSKNLEKAIQIMYQNLQQDGLEKVHLEPVRIPHWERGEESAVMLEPRIHKIAILGLGS

SEQ ID NO: 3462 - protein, 186 aa, Homo Sapiens
MKFLIFAFFGGVHLLSLCSGKAICKNGISKRTFEEIKEEIASCGDVAKAIINLAVYGKAQNRSYERLALLVDTVGPRLSGSKNLEKAIQIMYQNLQQDGLEKVHLEPVRIPHWERGEESAVMLEPRIHKIAILGLGSSIGTPPEGITAEVLVVTSFDELQRRASEARGKIVVYNQPYINYSRTVQY

SEQ ID NO: 3463 - protein, 472 aa, Homo Sapiens
MKFLIFAFFGGVHLLSLCSGKAICKNGISKRTFEEIKEEIASCGDVAKAIINLAVYGKAQNRSYERLALLVDTVGPRLSGSKNLEKAIQIMYQNLQQDGLEKVHLEPVRIPHWERGEESAVMLEPRIHKIAILGLGSSIGTPPEGITAEVLVVTSFDELQRRASEARGKIVVYNQPYINYSRTVQYRTQGAVEAAKVGALASLIRSVASFSIYSPHTGIQEYQDGVPKIPTACITVEDAEMMSRMASHGIKIVIQLKMGAKTYPDTDSFNTVAEITGSKYPEQVVLVSGHLDSWDVGQGAMDDGGGAFISWEALSLIKDLGLRPKRTLRLVLWTAEEQGGVGAFQYYQLHKVNISNYSLVMESDAGTFLPTGLQFTGSEKARAIMEEVMSLLQPLNITQVLSHGEGTDINFWIQAGVPGASLLDDLYKYFFFHHSHGDTMTVMDPKQMNVAAAVWAVVSYVVADMEEMLPRS

SEQ ID NO: 3464 - protein, 130 aa, Homo Sapiens
  misc_feature (1)..(1): Xaa can be any naturally occurring amino acid
XFQYYQLHKVNISNYSLVMESDAGTFLPTGLQFTGSEKARAIMEEVMSLLQPLNITQVLSHGEGTDINFWIQAGVPGASLLDDLYKYFFFHHSHGDTMTVMDPKQMNVAAAVWAVVSYVVADMEEMLPRS

SEQ ID NO: 3465 - protein, 141 aa, Homo Sapiens
IIGGYAEFLYQIGLLDEKQKKYFQKQCHECIEHIRKQNWFEAFEVLIYNGQLDIIVAAALTERSLMGMDWKGSQEYKKAEKKVWKIFKSDSEVAGYIRQAGDFHQVIIRGGGHILPYDQPLRAFDMINRFIYGKGWDPYVG

SEQ ID NO: 3466 - protein, 100 aa, Homo Sapiens
MFGLFVEHGPYVVTSNMTLRDRDFPWTTTLSMLYIDNPVGTGFSFTDDTHGYAVNEDDVARDLYSALIQFFQIFPEYKNNDFYVTGESYAGKYVPAIAHL

SEQ ID NO: 3467 - protein, 142 aa, Homo Sapiens
MKSYAGFLTVNKTYNSNLFFWFFPAQIQPEDAPVVLWLQGGPGGSSMFGLFVEHGPYVVTSNMTLRDRDFPWTTTLSMLYIDNPVGTGFSFTDDTHGYAVNEDDVARDLYSALIQFFQIFPEYKNNDFYVTGESYAGKYVPA

SEQ ID NO: 3468 - protein, 244 aa, Homo Sapiens
MKSYAGFLTVNKTYNSNLFFWFFPAQIQPEDAPVVLWLQGGPGGSSMFGLFVEHGPYVVTSNMTLRDRDFPWTTTLSMLYIDNPVGTGFSFTDDTHGYAVNEDDVARDLYSALIQFFQIFPEYKNNDFYVTGESYAGKYVPAIAHLIHSLNPVREVKINLNGIAIGDGYSDPESIIGGYAEFLYQIGLLDEKQKKYFQKQCHECIEHIRKQNWFEAFEILDKLLDGDLTSDPSYFQNVTGCSNY

SEQ ID NO: 3469 - protein, 6 aa, Homo Sapiens
MVGAMW

SEQ ID NO: 3470 - protein, 43 aa, Homo Sapiens
MVGAMWKVIVSLVLLMPGPCDGLFRSLYRSVSMPPKGDSGQPL

SEQ ID NO: 3471 - protein, 52 aa, Homo Sapiens
MVGAMWKVIVSLVLLMPGPCDGLFRSLYRSVSMPPKGDSGQPLFLTPYIEAG

SEQ ID NO: 3472 - protein, 476 aa, Homo Sapiens
MVGAMWKVIVSLVLLMPGPCDGLFRSLYRSVSMPPKGDSGQPLFLTPYIEAGKIQKGRELSLVGPFPGLNMKSYAGFLTVNKTYNSNLFFWFFPAQIQPEDAPVVLWLQGGPGGSSMFGLFVEHGPYVVTSNMTLRDRDFPWTTTLSMLYIDNPVGTGFSFTDDTHGYAVNEDDVARDLYSALIQFFQIFPEYKNNDFYVTGESYAGKYVPAIAHLIHSLNPVREVKINLNGIAIGDGYSDPESIIGGYAEFLYQIGLLDEKQKKYFQKQCHECIEHIRKQNWFEAFEILDKLLDGDLTSDPSYFQNVTGCSNYYNFLRCTEPEDQLYYVKFLSLPEVRQAIHVGNQTFNDGTIVEKYLREDTVQSVKPWLTEIMNNYKVLIYNGQLDIIVAAALTERSLMGMDWKGSQEYKKAEKKVWKIFKSDSEVAGYIRQAGDFHQVIIRGGGHILPYDQPLRAFDMINRFIYGKGWDPYVG

SEQ ID NO: 3473 - protein, 476 aa, Homo Sapiens; identical to SEQ ID NO: 3472

SEQ ID NO: 3474 - protein, 476 aa, Homo Sapiens; identical to SEQ ID NO: 3472

SEQ ID NO: 3475 - protein, 180 aa, Homo Sapiens
  misc_feature (1)..(1): Xaa can be any naturally occurring amino acid
XKYFQKQCHECIEHIRKQNWFEAFEEPEDQLYYVKFLSLPEVRQAIHVGNQTFNDGTIVEKYLREDTVQSVKPWLTEIMNNYKVLIYNGQLDIIVAAALTERSLMGMDWKGSQEYKKAEKKVWKIFKSDSEVAGYIRQAGDFHQVIIRGGGHILPYDQPLRAFDMINRFIYGKGWDPYVG

SEQ ID NO: 3476 - protein, 734 aa, Homo Sapiens
MWGLLLALAAFAPAVGPALGAPRNSVLGLAQPGTTKVPGSTPALHSSPAQPPAETANGTSEQHVRIRVIKKKKVIMKKRKKLTLTRPTPLVTAGPLVTPTPAGTLDPAEKQETGCPPLGLESLRVSDSRLEASSSQSFGLGPHRGRLNIQSGLEDGDLYDGAWCAEEQDADPWFQVDAGHPTRFSGVITQGRNSVWRYDWVTSYKVQFSNDSRTWWGSRNHSSGMDAVFPANSDPETPVLNLLPEPQVARFIRLLPQTWLQGGAPCLRAEILACPVSDPNDLFLEAPASGSSDPLDFQHHNYKAMRKLMKQVQEQCPNITRIYSIGKSYQGLKLYVMEMSDKPGEHELGEPEVRYVAGMHGNEALGRELLLLLMQFLCHEFLRGNPRVTRLLSEMRIHLLPSMNPDGYEIAYHRGSELVGWAEGRWNNQSIDLNHNFADLNTPLWEAQDDGKVPHIVPNHHLPLPTYYTLPNATVAPETRAVIKWMKRIPFVLSANLHGGELVVSYPFDMTRTPWAARELTPTPDDAVFRWLSTVYAGSNLAMQDTSRRPCHSQDFSVHGNIINGADWHTVPGSMNDFSYLHTNCFEVTVELSCDKFPHENELPQEWENNKDALLTYLEQVRMGIAGVVRDKDTELGIADAVIAVDGINHDVTTAWGGDYWRLLTPGDYMVTASAEGYHSVTRNCRVTFEEGPFPCNFVLTKTPKQRLRELLAAGAKVPPDLRRRLERLRGQKD

SEQ ID NO: 3477 - protein, 224 aa, Homo Sapiens
MEKIPFVLGGNLQGGELVVAYPYDLVRSPWKTQEHTPTPDDHVFRWLAYSYASTHRLMTDARRRVCHTEDFQKEEGTVNGASWHTVAGSLNDFSYLHTNCFELSIYVGCDKYPHESQLPEEWENNRESLIVFMEQVHRGIKGLVRDSHGKGIPNAIISVEGINHDIRTGRVSLQKLSLACRRVRCAFALSSSSTMIVRPPQPYGTVPHSSPDPVTTKISPLRNF

SEQ ID NO: 3478 - protein, 756 aa, Homo Sapiens
MSRPGTATPALALVLLAVTLAGVGAQGAALEDPDYYGQEIWSREPYYARPEPELETFSPPLPAGPGEEWERRPQEPRPPKRATKPKKAPKREKSAPEPPPPGKHSNKKVMRTKSSEKAANDDHSVRVAREDVRESCPPLGLETLKITDFQLHASTVKRYGLGAHRGRLNIQAGINENDFYDGAWCAGRNDLQQWIEVDARRLTRFTGVITQGRNSLWLSDWVTSYKVMVSNDSHTWVTVKNGSGDMIFEGNSEKEIPVLNELPVPMVARYIRINPQSWFDNGSICMRMEILGCPLPDPNNYYHRRNEMTTTDDLDFKHHNYKEMRQLMKVVNEMCPNITRIYNIGKSHQGLKLYAVEISDHPGEHEVGEPEFHYIAGAHGNEVLGRELLLLLVQFVCQEYLARNARIVHLVEETRIHVLPSLNPDGYEKAYEGGSELGGWSLGRWTHDGIDINNNFPDLNTLLWEAEDRQNVPRKVPNHYIAIPEWFLSENATVAAETRAVIAWMEKIPFVLGGNLQGGELVVAYPYDLVRSPWKTQEHTPTPDDHVFRWLAYSYASTHRLMTDARRRVCHTEDFQKEEGTVNGASWHTVAGSLNDFSYLHTNCFELSIYVGCDKYPHESQLPEEWENNRESLIVFMEQVHRGIKGLVRDSHGKGIPNAIISVEGINHDIRTANDGDYWRLLNPGEYVVTAKAEGFTASTKNCMVGYDMGATRCDFTLSKTNMARIREIMEKFGKQPVSLPARRLKLRGQKRRQRG

SEQ ID NO: 3479 - protein, 515 aa, Homo Sapiens
MAWPYFLDCHRYFTREDEGCYDPLEKLRGGLEADEALPSGLPPTFIRFSHHSYAQMVRVLRRTASRCAHVARTYSIGRSFDGRELLVIEFSSRPGQHELMEPEVKLIGNIHGNEVAGREMLIYLAQYLCSEYLLGNPRIQRLLNTTRIHLLPSMNPDGYEVAAAEGAGYNGWTSGRQNAQNLDLNRNFPDLTSEYYRLAETRGARSDHIPIPQHYWWGKVAPETKAIMKWMQTIPFVLSASLHGGDLVVSYPFDFSKHPQEEKMFSPTPDEKMFKLLSRAYADVHPMMMDRSENRCGGNFLKRGSIINGADWYSFTGGMSDFNYLHTNCFEITVELGCVKFPPEEALYILWQHNKESLLNFVETVHRGIKGVVTDKFGKPVKNARISVKGIRHDITTAPDGDYWRLLPPGIHIVIAQAPGYAKVIKKVIIPARMKRAGRVDFILQPLGMGPKNFIHGLRRTGPHDPLGGASSLGEATEPDPLRARRQPSADGSKPWWWSYFTSLSTHRPRWLLKY

SEQ ID NO: 3480 - protein, 641 aa, Homo Sapiens
MPPPLPLLLLTVLVVAAARPGCEFERNPAATCVDLQLRTCSDAAYNHTTFPNLLQHRSWEVVEASSEYILLSVLHQLLEGQCNPDLRLLGCAVLAPRCEGGWVRRPCRHICEGLREVCQPAFDAIDMAWPYFLDCHRYFTREDEGCYDPLEKLRGGLEADEALPSGLPPTFIRFSHHSYAQMVRVLRRTASRCAHVARTYSIGRSFDGRELLVIEFSSRPGQHELMEPEVKLIGNIHGNEVAGREMLIYLAQYLCSEYLLGNPRIQRLLNTTRIHLLPSMNPDGYEVAAAEGAGYNGWTSGRQNAQNLDLNRNFPDLTSEYYRLAETRGARSDHIPIPQHYWWGKVAPETKAIMKWMQTIPFVLSASLHGGDLVVSYPFDFSKHPQEEKMFSPTPDEKMFKLLSRAYADVHPMMMDRSENRCGGNFLKRGSIINGADWYSFTGGMSDFNYLHTNCFEITVELGCVKFPPEEALYILWQHNKESLLNFVETVHRGIKGVVTDKFGKPVKNARISVKGIRHDITTAPDGDYWRLLPPGIHIVIAQAPGYAKVIKKVIIPARMKRAGRVDFILQPLGMGPKNFIHGLRRTGPHDPLGGASSLGEATEPDPLRARRQPSADGSKPWWWSYFTSLSTHRPRWLLKY

SEQ ID NO: 3481 - protein, 652 aa, Homo Sapiens
MPPPLPLLLLTVLVVAAARPGCEFERNPAGECHRPPAADSATCVDLQLRTCSDAAYNHTTFPNLLQHRSWEVVEASSEYILLSVLHQLLEGQCNPDLRLLGCAVLAPRCEGGWVRRPCRHICEGLREVCQPAFDAIDMAWPYFLDCHRYFTREDEGCYDPLEKLRGGLEADEALPSGLPPTFIRFSHHSYAQMVRVLRRTASRCAHVARTYSIGRSFDGRELLVIEFSSRPGQHELMEPEVKLIGNIHGNEVAGREMLIYLAQYLCSEYLLGNPRIQRLLNTTRIHLLPSMNPDGYEVAAAEGAGYNGWTSGRQNAQNLDLNRNFPDLTSEYYRLAETRGARSDHIPIPQHYWWGKVAPETKAIMKWMQTIPFVLSASLHGGDLVVSYPFDFSKHPQEEKMFSPTPDEKMFKLLSRAYADVHPMMMDRSENRCGGNFLKRGSIINGADWYSFTGGMSDFNYLHTNCFEITVELGCVKFPPEEALYILWQHNKESLLNFVETVHRGIKGVVTDKFGKPVKNARISVKGIRHDITTAPDGDYWRLLPPGIHIVIAQAPGYAKVIKKVIIPARMKRAGRVDFILQPLGMGPKNFIHGLRRTGPHDPLGGASSLGEATEPDPLRARRQPSADGSKPWWWSYFTSLSTHRPRWLLKY

SEQ ID NO: 3482 - protein, 69 aa, Homo Sapiens
MPPPLPLLLLTVLVVAAARPGCEFERNPAGECHRPPAADSGTVPGPPWLLFCRRAAAPTLSEHFRQLNP

SEQ ID NO: 3483 - protein, 388 aa, Homo Sapiens
IGTYLNYECRPGYSGRPFSIICLKNSVWTSAKDKCKRKSCRNPPDPVNGMAHVIKDIQFRSQIKYSCPKGYRLIGSSSATCIISGNTVIWDNKTPVCDRIICGLPPTIANGDFTSISREYFHYGSVVTYHCNLGSRGKKVFELVGEPSIYCTSKDDQVGIWSGPAPQCIIPNKCTPPNVENGILVSDNRSLFSLNEVVEFRCQPGFGMKGPSHVKCQALNKWEPELPSCSRVCQPPPDVLHAERTQRDKDNFSPGQEVFYSCEPGYDLRGSTYLHCTPQGDWSPAAPRCEVKSCDDFLGQLPNGHVLFPLNLQLGAKVDFVCDEGFQLKGSSASYCVLAGMESLWNSSVPVCERKSCETPPVPVNGMVHVITDIHVGSRINYSCTTGF

SEQ ID NO: 3484 - protein, 569 aa, Homo Sapiens
MAPPVRLERPFPSRRFPGLLLAALVLLLSSFSDQCNVPEWLPFARPTNLTDDFEFPIGTYLNYECRPGYSGRPFSIICLKNSVWTSAKDKCKRKSCRNPPDPVNGMAHVIKDIQFRSQIKYSCPKGYRLIGSSSATCIISGNTVIWDNKTPVCDRIICGLPPTIANGDFTSISREYFHYGSVVTYHCNLGSRGKKVFELVGEPSIYCTSKDDQVGIWSGPAPQCIIPNKCTPPNVENGILVSDNRSLFSLNEVVEFRCQPGFGMKGPSHVKCQALNKWEPELPSCSRVCQPPPDVLHAERTQRDKDNFSPGQEVFYSCEPGYDLRGSTYLHCTPQGDWSPAAPRCEVKSCDDFLGQLPNGHVLFPLNLQLGAKVDFVCDEGFQLKGSSASYCVLAGMESLWNSSVPVCERKSCETPPVPVNGMVHVITDIHVGSRINYSCTTGHRLIGHSSAECILSGNTAHWSMKPPICQQIFCPNPPAILNGRHTGTPLGDIPYGKEVSYTCDPHPDRGMTFNLIGESTIRRTSEPHGNGVWSSPAPRCELPVGAGSHDALIVGKFYEVFAEEFCHL

SEQ ID NO: 3485 - protein, 1176 aa, Homo Sapiens
MALARPGTPDPQALASVLLLLLWAPALSLLAGTVPSEPPSACASDPCAPGTECQATESGGYTCGPMEPRGCATQPCHHGALCVPQGPDPTGFRCYCVPGFQGPRCELDIDECASRPCHHGATCRNLADRYECHCPLGYAGVTCEMEVDECASAPCLHGGSCLDGVGSFRCVCAPGYGGTRCQLDLDECQSQPCAHGGTCHDLVNGFRCDCAGTGYEGTHCEREVLECASAPCEHNASCLEGLGSFRCLCWPGYSGELCEVDEDECASSPCQHGGRCLQRSDPALYGGVQAAFPGAFSFRHAAGFLCHCPPGFEGADCGVEVDECASRPCLNGGHCQDLPNGFQCHCPDGYAGPTCEEDVDECLSDPCLHGGTCSDTVAGYICRCPETWGGRDCSVQLTGCQGHTCPLAATCIPIFESGVHSYVCHCPPGTHGPFCGQNTTFSVMAGSPIQASVPAGGPLGLALRFRTTLPAGTLATRNDTKESLELALVAATLQATLWSYSTTVLVLRLPDLALNDGHWHQVEVVLHLATLELRLWHEGCPARLCVASGPVALASTASATPLPAGISSAQLGDATFAGCLQDVRVDGHLLLPEDLGENVLLGCERREQCRPLPCVHGGSCVDLWTHFRCDCARPHRGPTCADEIPAATFGLGGAPSSASFLLQELPGPNLTVSFLLRTRESAGLLLQFANDSAAGLTVFLSEGRIRAEVPGSPAVVLPGRWDDGLRHLVMLSFGPDQLQDLGQHVHVGGRLLAADSQPWGGPFRGCLQDLRLDGCHLPFFPLPLDNSSQPSELGGRQSWNLTAGCVSEDMCSPDPCFNGGTCLVTWNDFHCTCPANFTGPTCAQQLWCPGQPCLPPATCEEVPDGFVCVAEATFREGPPAAFSGHNASSGRLLGGLSLAFRTRDSEAWLLRAAAGALEGVWLAVRNGSLAGGVRGGHGLPGAVLPIPGPRVADGAWHRVRLAMERPAATTSRWLLWLDGAATPVALRGLASDLGFLQGPGAVRILLAENFTGCLGRVALGGLPLPLARPRPGAAPGAREHFASWPGTPAPILGCRGAPVCAPSPCLHDGACRDLFDAFACACGPGWEGPRCEAHVDPCHSAPCARGRCHTHPDGRFECRCPPGFGGPRCRWDGWAGGWAANAPWGYGGAEKSARSVDESLPFPGPHVLICDMRRTV

SEQ ID NO: 3486 - protein, 1285 aa, Homo Sapiens
MALARPGTPDPQALASVLLLLLWAPALSLLAGTVPSEPPSACASDPCAPGTECQATESGGYTCGPMEPRGCATQPCHHGALCVPQGPDPTGFRCYCVPGFQGPRCELDIDECASRPCHHGATCRNLADRYECHCPLGYAGVTCEMEVDECASAPCLHGGSCLDGVGSFRCVCAPGYGGTRCQLDLDECQSQPCAHGGTCHDLVNGFRCDCAGTGYEGTHCEREVLECASAPCEHNASCLEGLGSFRCLCWPGYSGELCEVDEDECASSPCQHGGRCLQRSDPALYGGVQAAFPGAFSFRHAAGFLCHCPPGFEGADCGVEVDECASRPCLNGGHCQDLPNGFQCHCPDGYAGPTCEEDVDECLSDPCLHGGTCSDTVAGYICRCPETWGGRDCSVQLTGCQGHTCPLAATCIPIFESGVHSYVCHCPPGTHGPFCGQNTTFSVMAGSPIQASVPAGGPLGLALRFRTTLPAGTLATRNDTKESLELALVAATLQATLWSYSTTVLVLRLPDLALNDGHWHQVEVVLHLATLELRLWHEGCPARLCVASGPVALASTASATPLPAGISSAQLGDATFAGCLQDVRVDGHLLLPEDLGENVLLGCERREQCRPLPCVHGGSCVDLWTHFRCDCARPHRGPTCADEIPAATFGLGGAPSSASFLLQELPGPNLTVSFLLRTRESAGLLLQFANDSAAGLTVFLSEGRIRAEVPGSPAVVLPGRWDDGLRHLVMLSFGPDQLQDLGQHVHVGGRLLAADSQPWGGPFRGCLQDLRLDGCHLPFFPLPLDNSSQPSELGGRQSWNLTAGCVSEDMCSPDPCFNGGTCLVTWNDFHCTCPANFTGPTCAQQLWCPGQPCLPPATCEEVPDGFVCVAEATFREGPPAAFSGHNASSGRLLGGLSLAFRTRDSEAWLLRAAAGALEGVWLAVRNGSLAGGVRGGHGLPGAVLPIPGPRVADGAWHRVRLAMERPAATTSRWLLWLDGAATPVALRGLASDLGFLQGPGAVRILLAENFTGCLGRVALGGLPLPLARPRPGAAPGAREHFASWPGTPAPILGCRGAPVCAPSPCLHDGACRDLFDAFACACGPGWEGPRCEAHVDPCHSAPCARGRCHTHPDGRFECRCPPGFGGPRCRLPVPSKECSLNVTCLDGSPCEGGSPAANCSCLEGLAGQRCQVPTLPCEANPCLNGGTCRAAGGVSECICNARFSGQFCEVAKGLPLPLPFPLLEVAVPAACACLLLLLLGLLSGILAARKRRQSEGTYSPSQQEVAGARLEMDSVLKVPPEERLI

SEQ ID NO: 3487 - protein, 953 aa, Homo Sapiens
MAMEPGALWTFLGHLWLLAGPTCEEDVDECLSDPCLHGGTCSDTVAGYICRCPETWGGRDCSVQLTGCQGHTCPLAATCIPIFESGVHSYVCHCPPGTHGPFCGQNTTFSVMAGSPIQASVPAGGPLGLALRFRTTLPAGTLATRNDTKESLELALVAATLQATLWSYSTTVLVLRLPDLALNDGHWHQVEVVLHLATLELRLWHEGCPARLCVASGPVALASTASATPLPAGISSAQLGDATFAGCLQDVRVDGHLLLPEDLGENVLLGCERREQCRPLPCVHGGSCVDLWTHFRCDCARPHRGPTCADEIPAATFGLGGAPSSASFLLQELPGPNLTVSFLLRTRESAGLLLQFANDSAAGLTVFLSEGRIRAEVPGSPAVVLPGRWDDGLRHLVMLSFGPDQLQDLGQHVHVGGRLLAADSQPWGGPFRGCLQDLRLDGCHLPFFPLPLDNSSQPSELGGRQSWNLTAGCVSEDMCSPDPCFNGGTCLVTWNDFHCTCPANFTGPTCAQQLWCPGQPCLPPATCEEVPDGFVCVAEATFREGPPAAFSGHNASSGRLLGGLSLAFRTRDSEAWLLRAAAGALEGVWLAVRNGSLAGGVRGGHGLPGAVLPIPGPRVADGAWHRVRLAMERPAATTSRWLLWLDGAATPVALRGLASDLGFLQGPGAVRILLAENFTGCLGRVALGGLPLPLARPRPGAAPGAREHFASWPGTPAPILGCRGAPVCAPSPCLHDGACRDLFDAFACACGPGWEGPRCEAHVDPCHSAPCARGRCHTHPDGRFECRCPPGFGGPRCRLPVPSKECSLNVTCLDGSPCEGGSPAANCSCLEGLAGQRCQVPTLPCEANPCLNGGTCRAAGGVSECICNARFSGQFCEVAKGLPLPLPFPLLEVAVPAACACLLLLLLGLLSGILAARKRRQSEGTYSPSQQEVAGARLEMDSVLKVPPEERLI

SEQ ID NO: 3488 - protein, 220 aa, Homo Sapiens
MAGLSRGSARALLAALLASTLLALLVSPARGRGGRDHGDWDEASRLPPLPPREDAARVARFVTHVSDWGALATISTLEAVRGRPFADVLSLSDGPPGAGSGVPYFYLSPLQLSVSNLQENPYATLTMTLAQTNFCKKHGFDPQSPLCVHIMLSGTVTKVNETEMDIAKHSLFIRHPEMKTWPSSHNWFFAKLNITNIWVLDYFGGPKIVTPEEYYNVTVQ

SEQ ID NO: 3489 - protein, 290 aa, Homo Sapiens
MSVRRGRRPARPGTRLSWLLCCSALLSPAAGYVIVSSVSWAVTNEVDEELDSASTEEAMPALLEDSGSIWQQSFPASAHKEDAHLRPRAGAARARPPPAPPGMFSYRREGGQTASAPPGPRLRAATARSLAHASVWGCLATVSTHKKIQGLPFGNCLPVSDGPFNNSTGIPFFYMTAKDPVVADLMKNPMASLMLPESEGEFCRKNIVDPEDPRCVQLTLTGQMIAVSPEEVEFAKQAMFSRHPGMRKWPRQYEWFFMKMRIEHIWLQKWYGGASSISREEYFKAVPRKA

SEQ ID NO: 3490 - protein, 422 aa, Homo Sapiens
MAPWPPKGLVPAMLWGLSLFLNLPGPIWLQPSPPPQSSPPPQPHPCHTCRGLVDSFNKGLERTIRDNFGGGNTAWEEENLSKYKDSETRLVEVLEGVCSKSDFECHRLLELSEELVESWWFHKQQEAPDLFQWLCSDSLKLCCPAGTFGPSCLPCPGGTERPCGGYGQCEGEGTRGGSGHCDCQAGYGGEACGQCGLGYFEAERNASHLVCSACFGPCARCSGPEESNCLQCKKGWALHHLKCVDIDECGTEGANCGADQFCVNTEGSYECRDCAKACLGCMGAGPGRCKKCSPGYQQVGSKCLDVDECETEVCPGENKQCENTEGGYRCICAEGYKQMEGICVKEQIPGAFPILTDLTPETTRRWKLGSHPHSTYVKMKMQRDEATFPGLYGKQVAKLGSQSRQSDRGTRLIHSQQASSQR

SEQ ID NO: 3491 - protein, 420 aa, Homo Sapiens
MAPWPPKGLVPAMLWGLSLFLNLPGPIWLQPSPPPQSSPPPQPHPCHTCRGLVDSFNKGLERTIRDNFGGGNTAWEEENLSKYKDSETRLVEVLEGVCSKSDFECHRLLELSEELVESWWFHKQQEAPDLFQWLCSDSLKLCCPAGTFGPSCLPCPGGTERPCGGYGQCEGEGTRGGSGHCDCQAGYGGEACGQCGLGYFEAERNASHLVCSACFGPCARCSGPEESNCLQCKKGWALHHLKCVDIDECGTEGANCGADQFCVNTEGSYECRDCAKACLGCMGAGPGRCKKCSPGYQQVGSKCLDVDECETEVCPGENKQCENTEGGYRCICAEGYKQMEGICVKEQIPESAGFFSEMTEDELVVLQQMFFGIIICALATLAAKGDLVFTAIFIGAVAAMTGYWLSERSDRVLEGFIKGR

SEQ ID NO: 3492 - protein, 420 aa, Homo Sapiens; identical to SEQ ID NO: 3491

SEQ ID NO: 3493 - protein, 420 aa, Homo Sapiens; identical to SEQ ID NO: 3491

SEQ ID NO: 3494 - protein, 101 aa, Homo Sapiens
MAPWPPKGLVPAMLWGLSLFLNLPGPIWLQPSPPPQSSPPPQPHPCHTCRGLVDSFNKGLERTIRDNFGGGNTAWEEENLSKYKDSLSWGNREALRWLRAV

SEQ ID NO: 3495 - protein, 100 aa, Homo Sapiens
  misc_feature (1)..(1): Xaa can be any naturally occurring amino acid
XPAHLSADIDECGTEGANCGADQFCVNTEGSYECRDCAKACLGCMGAGPGRCKKCSPGYQQMWMSVRQRCVRERTSSVKTPRAVIAASVPRATSRWKASV

SEQ ID NO: 3496 - protein, 229 aa, Homo Sapiens
MRLPRRAALGLLPLLLLLPPAPEAAKKPTPCHRCRGLVDKFNQGMVDTAKKNFGGGNTAWEEKTLSKYESSEIRLLEILEGLCESSDFECNQMLEAQEEHLEAWWLQLKSEYPDLFEWFCVKTLKVCCSPGTYGPDCLACQGGSQRPCSGNGHCSGDGSRQGDGSCRCHMGYQGPLCTDCMDGYFSSLRNETHSICTACDESCKTCSGLTNRDCGECEVGWVLDEGACV

SEQ ID NO: 3497 - protein, 353 aa, Homo Sapiens
MRLPRRAALGLLPLLLLLPPAPEAAKKPTPCHRCRGLVDKFNQGMVDTAKKNFGGGNTAWEEKTLSKYESSEIRLLEILEGLCESSDFECNQMLEAQEEHLEAWWLQLKSEYPDLFEWFCVKTLKVCCSPGTYGPDCLACQGGSQRPCSGNGHCSGDGSRQGDGSCRCHMGYQGPLCTDCMDGYFSSLRNETHSICTACDESCKTCSGLTNRDCGECEVGWVLDEGACVDVDECAAEPPPCSAAQFCKNANGSYTCEECDSSCVGCTGEGPGNCKECISGYAREHGQCADVDECSLAEKTCVRKNENCYNTPGSYVCVCPDGFEETEDACVPPAEAEATEGESPTQLPSREDL

SEQ ID NO: 3498 - protein, 321 aa, Homo Sapiens
MRLPRRAALGLLPLLLLLPPAPEAAKKPTPCHRCRGLVDKFNQGMVDTAKKNFGGGNTAWEEKTLSKYESSEIRLLEILEGLCESSDFECNQMLEAQEEHLEAWWLQLKSEYPDLFEWFCVKTLKVCCSPGTYGPDCLACQGGSQRPCSGNGHCSGDGSRQGDGSCRCHMGYQGPLCTDCMDGYFSSLRNETHSICTACDESCKTCSGLTNRDCGECEVGWVLDEGACVDVDECAAEPPPCSAAQFCKNANGSYTCEDVDECSLAEKTCVRKNENCYNTPGSYVCVCPDGFEETEDACVPPAEAEATEGESPTQLPSREDL

SEQ ID NO: 3499 - protein, 325 aa, Homo Sapiens
MRLPRRAALGLLPLLLLLPPAPEAAKKPTPCHRCRGLVDKFNQGMVDTAKKNFGGGNTAWEEKTLSKYESSEIRLLEILEGLCESSDFECNQMLEAQEEHLEAWWLQLKSEYPDLFEWFCVKTLKVCCSPGTYGPDCLACQGGSQRPCSGNGHCSGDGSRQGDGSCRCHMGYQGPLCTDCMDGYFSSLRNETHSICTACDESCKTCSGLTNRDCGECEVGWVLDEGACVECDSSCVGCTGEGPGNCKECISGYAREHGQCADVDECSLAEKTCVRKNENCYNTPGSYVCVCPDGFEETEDACVPPAEAEATEGESPTQLPSREDL

SEQ ID NO: 3500 - protein, 402 aa, Homo Sapiens
MRLPRRAALGLLPLLLLLPPAPEAAKKPTPCHRCRGLVDKFNQGMVDTAKKNFGGGNTAWEEKTLSKYESSEIRLLEILEGLCESSDFECNQMLEAQEEHLEAWWLQLKSEYPDLFEWFCVKTLKVCCSPGTYGPDCLACQGGSQRPCSGNGHCSGDGSRQGDGSCRCHMGYQGPLCTDCMDGYFSSLRNETHSICTVRTGLSDSYPPCCLSLGCWRGVGHAWIRGRNTHTQPGYSSRVWIAAFSPACDESCKTCSGLTNRDCGECEVGWVLDEGACVDVDECAAEPPPCSAAQFCKNANGSYTCEECDSSCVGCTGEGPGNCKECISGYAREHGQCADVDECSLAEKTCVRKNENCYNTPGSYVCVCPDGFEETEDACVPPAEAEATEGESPTQLPSREDL

SEQ ID NO: 3501 - protein, 196 aa, Homo Sapiens
MRLPLLVSAGVLLVALLPCPPCRALLSRGPVPGARQAPQHPQPLDFFQPPPQSEQPQQPQARPVLLRMGEEYFLRLGNLNKSPAAPLSPASSLLAGGSGSRPSPEQATANFFRVLLQQLLLPRRSLDSPAALAERGARNALGGHQEAPERERRSEEPPISLDLTFHLLREVLEMARAEQLAQQAHSNRKLMEIIGK

SEQ ID NO: 3502 - protein, 322 aa, Homo Sapiens
MSPNFKLQCHFILIFLTALRGESRYLELREAADYDPFLLFSANLKRELAGEQPYRRALRCLDMLSLQGQFTFTADRPQLHCAAFFISEPEEFITIHYDQVSIDCQGGDFLKVFDGWILKGEKFPSSQDHPLPSAERYIDFCESGLSRRSIRSSQNVAMIFFRVHEPGNGFTLTIKTDPNLFPCNVISQTPNGKFTLVVPHQHRNCSFSIIYPVVIKISDLTLGHVNGLQLKKSSAGCEGIGDFVELLGGTGLDPSKMTPLADLCYPFHGPAQMKVGCDNTVVRMVSSGKHVNRVTFEYRQLEPYELENPNGNSIGEFCLSGL

SEQ ID NO: 3503 - protein, 238 aa, Homo Sapiens
MSPNFKLQCHFILIFLTALRGESRYLELREAADYDPFLLFSANLKRELAGEQPYRRALRCLDMLSLQGQFTFTADRPQLHCAAFFISEPEEFITIHYDQVSIDCQGGDFLKVFDGWILKGEKFPSSQDHPLPSAERYIDFCESGLSRRSIRSSQNVAMIFFRVHEPGNGFTLTIKTDPNLFPCNVISQTPNGKFTLVVPHQHRNCSFSIIYPVVIKISDLTLGHVNGLQLKVSCLLVS

SEQ ID NO: 3504 - protein, 375 aa, Homo Sapiens
MGGHPQLRLVKALLLLGLNPVSASLQDQHCESLSLASNISDNGYRECLANGSWAARVNYSECQEILNEEKKSKVHYHVAVIINYLGHCISLVALLVAFVLFLRLRSIRCLRNIIHWNLISAFILRNATWFVVQLTMSPEVHQSNVGWCRLVTAAYNYFHVTNFFWMFGEGCYLHTAIVLTYSTDRLRKWMFICIGWGVPFPIIVAWAIGKLYYDNEKCWFGKRPGVYTDYIYQGPMILVLLINFIFLFNIVRILMTKLRASTTSETIQYRKAVKATLVLLPLLGITYMLFFVNPGEDEVSRVVFIYFNSFLESFQGFFVSVFYCFLNSEVRSAIRKRWHRWQDKHSIRARVARAMSIPTSPTRVSFHSIKQSTAV

SEQ ID NO: 3505 - protein, 154 aa, Homo Sapiens
MGGHPQLRLVKALLLLGLNPVSASLQDQHCESLSLASNISEKKQGALPCRSHHQLPGPLYLPGGPPGGLCPLSAAQEHPVPAKHHPLEPHLRLHPAQRHLVRGPANHEPRGPPEQRGLVQVGDSRLQLLPCDQLLLDVRRGLLPAHSHRAHLLH

SEQ ID NO: 3506 - protein, 430 aa, Homo Sapiens
MGGHPQLRLVKALLLLGLNPVSASLQDQHCESLSLASNISGLQCNASVDLIGTCWPRSPAGQLVVRPCPAFFYGVRYNTTNNGYRECLANGSWAARVNYSECQEILNEEKKSKVHYHVAVIINYLGHCISLVALLVAFVLFLRLRPGCTHWGDQADGALEVGAPWSGAPFQVRRSIRCLRNIIHWNLISAFILRNATWFVVQLTMSPEVHQSNVGWCRLVTAAYNYFHVTNFFWMFGEGCYLHTAIVLTYSTDRLRKWMFICIGWGVPFPIIVAWAIGKLYYDNEKCWFGKRPGVYTDYIYQGPMILVLLINFIFLFNIVRILMTKLRASTTSETIQYRKAVKATLVLLPLLGITYMLFFVNPGEDEVSRVVFIYFNSFLESFQVRSAIRKRWHRWQDKHSIRARVARAMSIPTSPTRVSFHSIKQSTAV

SEQ ID NO: 3507 - protein, 444 aa, Homo Sapiens
MGGHPQLRLVKALLLLGLNPVSASLQDQHCESLSLASNISGLQCNASVDLIGTCWPRSPAGQLVVRPCPAFFYGVRYNTTNNGYRECLANGSWAARVNYSECQEILNEEKKSKVHYHVAVIINYLGHCISLVALLVAFVLFLRLRPGCTHWGDQADGALEVGAPWSGAPFQVRRSIRCLRNIIHWNLISAFILRNATWFVVQLTMSPEVHQSNVGWCRLVTAAYNYFHVTNFFWMFGEGCYLHTAIVLTYSTDRLRKWMFICIGWGVPFPIIVAWAIGKLYYDNEKCWFGKRPGVYTDYIYQGPMILVLLINFIFLFNIVRILMTKLRASTTSETIQYRKAVKATLVLLPLLGITYMLFFVNPGEDEVSRVVFIYFNSFLESFQGFFVSVFYCFLNSEVRSAIRKRWHRWQDKHSIRARVARAMSIPTSPTRVSFHSIKQSTAV

SEQ ID NO: 3508 - protein, 415 aa, Homo Sapiens
MGGHPQLRLVKALLLLGLNPVSASLQDQHCESLSLASNISGLQCNASVDLIGTCWPRSPAGQLVVRPCPAFFYGVRYNTTNNGYRECLANGSWAARVNYSECQEILNEEKKSKVHYHVAVIINYLGHCISLVALLVAFVLFLRLRSIRCLRNIIHWNLISAFILRNATWFVVQLTMSPEVHQSNVGWCRLVTAAYNYFHVTNFFWMFGEGCYLHTAIVLTYSTDRLRKWMFICIGWGVPFPIIVAWAIGKLYYDNEKCWFGKRPGVYTDYIYQGPMILVLLINFIFLFNIVRILMTKLRASTTSETIQYRKAVKATLVLLPLLGITYMLFFVNPGEDEVSRVVFIYFNSFLESFQGFFVSVFYCFLNSEVRSAIRKRWHRWQDKHSIRARVARAMSIPTSPTRVSFHSIKQSTAV

SEQ ID NO: 3509 - protein, 401 aa, Homo Sapiens
MGGHPQLRLVKALLLLGLNPVSASLQDQHCESLSLASNISGLQCNASVDLIGTCWPRSPAGQLVVRPCPAFFYGVRYNTTNNGYRECLANGSWAARVNYSECQEILNEEKKSKVHYHVAVIINYLGHCISLVALLVAFVLFLRLRSIRCLRNIIHWNLISAFILRNATWFVVQLTMSPEVHQSNVGWCRLVTAAYNYFHVTNFFWMFGEGCYLHTAIVLTYSTDRLRKWMFICIGWGVPFPIIVAWAIGKLYYDNEKCWFGKRPGVYTDYIYQGPMILVLLINFIFLFNIVRILMTKLRASTTSETIQYRKAVKATLVLLPLLGITYMLFFVNPGEDEVSRVVFIYFNSFLESFQVRSAIRKRWHRWQDKHSIRARVARAMSIPTSPTRVSFHSIKQSTAV

SEQ ID NO: 3510 - protein, 145 aa, Homo Sapiens
MGGHPQLRLVKALLLLGLNPVSASLQDQHCESLSLASNISGLQCNASVDLIGTCWPRSPAGQLVVRPCPAFFYGVRYNTTNNGYRECLANGSWAARVNYSECQEILNEEKKSKVHYHVAVIINYLGHCISLVALLVAFVLFLRLS

SEQ ID NO: 3511 - protein, 314 aa, Homo Sapiens
MVSATIPQKKSKVHYHVAVIINYLGHCISLVALLVAFVLFLRLRSIRCLRNIIHWNLISAFILRNATWFVVQLTMSPEVHQSNVGWCRLVTAAYNYFHVTNFFWMFGEGCYLHTAIVLTYSTDRLRKWMFICIGWGVPFPIIVAWAIGKLYYDNEKCWFGKRPGVYTDYIYQGPMILVLLINFIFLFNIVRILMTKLRASTTSETIQYRKAVKATLVLLPLLGITYMLFFVNPGEDEVSRVVFIYFNSFLESFQGFFVSVFYCFLNSEVRSAIRKRWHRWQDKHSIRARVARAMSIPTSPTRVSFHSIKQSTAV

SEQ ID NO: 3512 - protein, 52 aa, Homo Sapiens
  misc_feature (1)..(1): Xaa can be any naturally occurring amino acid
XCWFGKRPGVYTDYIYQGPMILVLLEGCESHSGAAAPPGHHLHAVLRQSRGG

SEQ ID NO: 3513 - protein, 75 aa, Homo Sapiens
  misc_feature (1)..(1): Xaa can be any naturally occurring amino acid
XCWFGKRPGVYTDYIYQGPMILVLLINFIFLFNIVRILMTKLRASTTSETIQYRASLCLCSTVSSIVRSVLPSGR

SEQ ID NO: 3514 - protein, 93 aa, Homo Sapiens
  misc_feature (1)..(1): Xaa can be any naturally occurring amino acid
XSLASNISGLQCNASVDLIGTCWPRSPAGQLVVRPCPAFFYGVRYNTTNNGYRECLANGSWAARVNYSECQEILNEEEPGPQAQPGRAHRGGT

SEQ ID NO: 3515 - protein, 152 aa, Homo Sapiens
YGVRYNTTNNGYRECLANGSWAARVNYSECQEILNEEKKSKVHYHVAVIINYLGHCISLVALLVAFVLFLRLRSIRCLRNIIHWNLISAFILRNATWFVVQLTMSPEVHQSNVVCPSPSLWPGPLGSCTTTMRSAGLAKGLGCTPTTSTRAP

SEQ ID NO: 3516 - protein, 411 aa, Homo Sapiens
MDAALLHSLLEANCSLALAEELLLDGWGPPLDPEGPYSYCNTTLDQIGTCWPRSAAGALVERPCPEYFNGVKYNTTRNAYRECLENGTWASKINYSQCEPILDDKQRKYDLHYRIALVVNYLGHCVSVAALVAAFLLFLALRSIRCLRNVIHWNLITTFILRNVMWFLLQLVDHEVHESNEVWCRCITTIFNYFVVTNFFWMFVEGCYLHTAIVMTYSTERLRKCLFLFIGWCIPFPIIVAWAIGKLYYENEQCWFGKEPGDLVDYIYQGPIILVLLINFVFLFNIVRILMTKLRASTTSETIQYRKAVKATLVLLPLLGITYMLFFVNPGEDDLSQIMFIYFNSFLQSFQGFFVSVFYCFFNGEVRSAVRKRWHRWQDHHSLRVPMARAMSIPTSPTRISFHSIKQTAAV

SEQ ID NO: 3517 - protein, 387 aa, Homo Sapiens
MDAALLHSLLEANCSLALAEELLLDGWGPPLDPEGPYSYCNTTLDQIGTCWPRSAAGALVERPCPEYFNGVKYNTTRNAYRECLENGTWASKINYSQCEPILDDKQRKYDLHYRIALVVNYLGHCVSVAALVAAFLLFLALRSIRCLRNVIHWNLITTFILRNVMWFLLQLVDHEVHESNEVWCRCITTIFNYFVVTNFFWMFVEGCYLHTAIVMTYSTERLRKCLFLFIGWCIPFPIIVAWAIGKLYYENEQCWFGKEPGDLVDYIYQGPIILVLLINFVFLFNIVRILMTKLRASTTSETIQYRKAVKATLVLLPLLGITYMLFFVNPGEDDLSQIMFIYFNSFLQSFQGFFVSVFYCFFNGESWVSKEAQAAGPHGREKPEQRW

SEQ ID NO: 3518 - protein, 397 aa, Homo Sapiens
MGREPWPEDRDLGFPQLFCQGPYSYCNTTLDQIGTCWPRSAAGALVERPCPEYFNGVKYNTTRNAYRECLENGTWASKINYSQCEPILDDKQRKYDLHYRIALVVNYLGHCVSVAALVAAFLLFLALRSIRCLRNVIHWNLITTFILRNVMWFLLQLVDHEVHESNEVWCRCITTIFNYFVVTNFFWMFVEGCYLHTAIVMTYSTERLRKCLFLFIGWCIPFPIIVAWAIGKLYYENEQCWFGKEPGDLVDYIYQGPIILVLLINFVFLFNIVRILMTKLRASTTSETIQYRKAVKATLVLLPLLGITYMLFFVNPGEDDLSQIMFIYFNSFLQSFQGFFVSVFYCFFNGEVRSAVRKRWHRWQDHHSLRVPMARAMSIPTSPTRISFHSIKQTAAV

SEQ ID NO: 3519 - protein, 438 aa, Homo Sapiens
MRGPSGPPGLLYVPHLLLCLLCLLPPPLQYAAGQSQMPKDQPLWALLEQYCHTIMTLTNLSGPYSYCNTTLDQIGTCWPRSAAGALVERPCPEYFNGVKYNTTRNAYRECLENGTWASKINYSQCEPILDDKQRKYDLHYRIALVVNYLGHCVSVAALVAAFLLFLALRSIRCLRNVIHWNLITTFILRNVMWFLLQLVDHEVHESNEVWCRCITTIFNYFVVTNFFWMFVEGCYLHTAIVMTYSTERLRKCLFLFIGWCIPFPIIVAWAIGKLYYENEQCWFGKEPGDLVDYIYQGPIILVLLINFVFLFNIVRILMTKLRASTTSETIQYRKAVKATLVLLPLLGITYMLFFVNPGEDDLSQIMFIYFNSFLQSFQGFFVSVFYCFFNGEVRSAVRKRWHRWQDHHSLRVPMARAMSIPTSPTRISFHSIKQTAAV

SEQ ID NO: 3520 - protein, 64 aa, Homo Sapiens
MRGPSGPPGLLYVPHLLLCLLCLLPPPLQYAAGQSQMPKDQPLWALLEQYCHTIMTLTNLSGWS

SEQ ID NO: 3521 - protein, 64 aa, Homo Sapiens; identical to SEQ ID NO: 3520

SEQ ID NO: 3522 - protein, 99 aa, Homo Sapiens
MRGPSGPPGLLYVPHLLLCLLCLLPPPLQYAAGQSQMPKDQPLWALLEQYCHTIMTLTNLSVTPGAHSHSLSARGCGTRWTRHCSTACWRPTAAWRWLK

SEQ ID NO: 3523 - protein, 178 aa, Homo Sapiens
MEIKHLLFLVAAACLLPMLSMKKKSARDQFNKLVTDLPNVQEEIVNIHNALRRRVVPPASNMLKMSWSEEAAQNARIFSKYCDMTESNPLERRLPNTFCGENMHMTSYPVSWSSVIGVWYSESTSFKHGEWTTTDDDITTDHYTQIVWATSYLIGCAIASCRQQGSPRYLYVCHYCHD

SEQ ID NO: 3524 - protein, 178 aa, Homo Sapiens; identical to SEQ ID NO: 3523

SEQ ID NO: 3525 - protein, 249 aa, Homo Sapiens
MEIKHLLFLVAAACLLPMLSMKKKSARDQFNKLVTDLPNVQEEIVNIHNALRRRVVPPASNMLKMSWSEEAAQNARIFSKYCDMTESNPLERRLPNTFCGENMHMTSYPVSWSSVIGVWYSESTSFKHGEWTTTDDDITTDHYTQIVWATSYLIGCAIASCRQQGSPRYLYVCHYCHEGNDPETKNEPYKTGVPCEACPSNCEDKLCTNPCIYYDEYFDCDIQVHYLGCNHSTTILFCKATCLCDTEIK

SEQ ID NO: 3526 - protein, 249 aa, Homo Sapiens; identical to SEQ ID NO: 3525

SEQ ID NO: 3527 - protein, 243 aa, Homo Sapiens
MALLPVLFLVTVLLPSLPAEGKDPAFTALLTTQLQVQREIVNKHNELRKAVSPPASNMLKMEWSREVTTNAQRWANKCTLQHSDPEDRKTSTRCGENLYMSSDPTSWSSAIQSWYDEILDFVYGVGPKSPNAVVGHYTQLVWYSTYQVGCGIAYCPNQDSLKYYYVCQYCPAGNNMNRKNTPYQQGTPCAGCPDDCDKGLCTNSCQYQDLLSNCDSLKNTAGCEHELLKEKCKATCLCENKIY

SEQ ID NO: 3528 - protein, 243 aa, Homo Sapiens; identical to SEQ ID NO: 3527

SEQ ID NO: 3529 - protein, 278 aa, Homo Sapiens
MALLPVLFLVTVLLPSLPAEGKDPAFTALLTTQLQVQREIVNKHNELRKAVSPPASNMLKMEWSREVTTNAQRWANKCTLQHSDPEDRKTSTRCGENLYMSSDPTSWSSAIQSWYDEILDFVYGVGPKSPNAVVGHYTQLVWYSTYQVGCGIAYCPNQDSLKYYYVCQYCPAMKTYLNKREGINVWKCFLRLRHFQLLRGEQLLTFSGNNMNRKNTPYQQGTPCAGCPDDCDKGLCTNSCQYQDLLSNCDSLKNTAGCEHELLKEKCKATCLCENKIY

SEQ ID NO: 3530 - protein, 276 aa, Homo Sapiens
MKQILHPALETTACTNHFNADPCSTGFVFPAMTLFPVLLFLVAGLLPSFPANEDKDPAFTALLTTQTQVQREIVNKHNELRRAVSPPARNMLKMEWNKEAAANAQKWANQCNYRHSNPKDRMTSLKCGENLYMSSASSSWSQAIQSWFDEYNDFDFGVGPKTPNAVVGHYTQVVWYSSYLVGCGNAYCPNQKVLKYYYVCQYCPAGNWANRLYVPYEQGAPCASCPDNCDDGLCTNGCKYEDLYSNCKSLKLTLTCKHQLVRDSCKASCNCSNSIY

SEQ ID NO: 3531 - protein, 258 aa, Homo Sapiens
MKQILHPALETTAMTLFPVLLFLVAGLLPSFPANEDKDPAFTALLTTQTQVQREIVNKHNELRRAVSPPARNMLKMEWNKEAAANAQKWANQCNYRHSNPKDRMTSLKCGENLYMSSASSSWSQAIQSWFDEYNDFDFGVGPKTPNAVVGHYTQVVWYSSYLVGCGNAYCPNQKVLKYYYVCQYCPAGNWANRLYVPYEQGAPCASCPDNCDDGLCTNGCKYEDLYSNCKSLKLTLTCKHQLVRDSCKASCNCSNSIY

SEQ ID NO: 3532 - protein, 191 aa, Homo Sapiens
MKQILHPALETTDPCSTGFVFPAMTLFPVLLFLVAGLLPSFPANEDKDPAFTALLTTQTQVQREIVNKHNELRRAVSPPARNMLKMEWNKEAAANAQKWANQCNYRHSNPKDRMTSLKCGENLYMSSASSSWSQAIQSWFDEYNDFDFGVGPKTPNAVVGHYTQVVWYSSYLVGCGNAYCPNQKVLKYYYV

SEQ ID NO: 3533 - protein, 268 aa, Homo Sapiens
MKQILHPALETTDPCSTGFVFPAMTLFPVLLFLVAGLLPSFPANEDKDPAFTALLTTQTQVQREIVNKHNELRRAVSPPARNMLKMEWNKEAAANAQKWANQCNYRHSNPKDRMTSLKCGENLYMSSASSSWSQAIQSWFDEYNDFDFGVGPKTPNAVVGHYTQVVWYSSYLVGCGNAYCPNQKVLKYYYVCQYCPAGNWANRLYVPYEQGAPCASCPDNCDDGLCTNGCKYEDLYSNCKSLKLTLTCKHQLVRDSCKASCNCSNSIY

SEQ ID NO: 3534 - protein, 112 aa, Homo Sapiens
MCTHYTQIVWATTNKIGCAVNTCRKMTVWGEVWENAVYFVCNYSPKGNWIGEAPYKNGRPCSECPPSYGGSCRNNLCYREETYTPKPETDEMNEVETAPIPEENHVWLQPRV

SEQ ID NO: 3535 - protein, 210 aa, Homo Sapiens
MCTHYTQIVWATTNKIGCAVNTCRKMTVWGEVWENAVYFVCNYSPKGNWIGEAPYKNGRPCSECPPSYGGSCRNNLCYREETYTPKPETDEMNEVETAPIPEENHVWLQPRVMRPTKPKKTSAVNYMTQVVRCDTKMKDRCKGSTCNRYQCPAGCLNHKAKIFGTLFYESSSSICRAAIHYGILDDKGGLVDITRNGKVPFFVKSERHGV

SEQ ID NO: 3536 - protein, 19 aa, Homo Sapiens
MSCVLGGVIPLGLLFLVCG

SEQ ID NO: 3537 - protein, 120 aa, Homo Sapiens
MSCVLGGVIPLGLLFLVCGSQGYLLPNVTLLEELLSKYQHNESHSRVRRAIPREDKEEILMLHNKLRGQVQPQASNMEYMTWDDELEKSAAAWASQCIWEHGPTSLLVSIGQNLGAHWGR

SEQ ID NO: 3538 - protein, 497 aa, Homo Sapiens
MSCVLGGVIPLGLLFLVCGSQGYLLPNVTLLEELLSKYQHNESHSRVRRAIPREDKEEILMLHNKLRGQVQPQASNMEYMTWDDELEKSAAAWASQCIWEHGPTSLLVSIGQNLGAHWGRYRSPGFHVQSWYDEVKDYTYPYPSECNPWCPERCSGPMCTHYTQIVWATTNKIGCAVNTCRKMTVWGEVWENAVYFVCNYSPKGNWIGEAPYKNGRPCSECPPSYGGSCRNNLCYREETYTPKPETDEMNEVETAPIPEENHVWLQPRVMRPTKPKKTSAVNYMTQVVRCDTKMKDRCKGSTCNRYQCPAGCLNHKAKIFGTLFYESSSSICRAAIHYGILDDKGGLVDITRNGKVPFFVKSERHGVQSLSKYKPSSSFMVSKVKVQDLDCYTTVAQLCPFEKPATHCPRIHCPAHCKDEPSYWAPVFGTNIYADTSSICKTAVHAGVISNESGGDVDVMPVDKKKTYVGSLRNGVQSESLGTPRDGKAFRIFAVRQ

SEQ ID NO: 3539 - protein, 449 aa, Homo Sapiens
MSCVLGGVIPLGLLFLVCGSQGYLLPNVTLLEELLSKYQHNESHSRVRRAIPREDKEEILMLHNKLRGQVQPQASNMEYMTWDDELEKSAAAWASQCIWEHGPTSLLVSIGQNLGAHWGRYRSPGFHVQSWYDEVKDYTYPYPSECNPWCPERCSGPMCTHYTQIVWATTNKIGCAVNTCRKMTVWGEVWENAVYFVCNYSPKGNWIGEAPYKNGRPCSECPPSYGGSCRNNLCYREETYTPKPETDEMNEVETAPIPEENHVWLQPRVMRPTKPKKTSAVNYMTQVVRCDTKMKDRCKGSTCNRYQCPAGCLNHKAKIFGTLFYESSSSICRAAIHYGILDDKGGLVDITRNGKVPFFVKSERHGVQSLSKYKPSSSFMVSKVKVQDLDCYTTVAQLCPFEKPATHCPRIHCPAHCKDEPSYWAPVFGTNIYADVSRMHFQQLSRKAC

SEQ ID NO: 3540 - protein, 496 aa, Homo Sapiens
MSCVLGGVIPLGLLFLVCGSQGYLLPNVTLLEELLSKYQHNESHSRVRRAIPREDKEEILMLHNKLRGQVQPQASNMEYMTWDDELEKSAAAWASQCIWEHGPTSLLVSIGQNLGAHWGRYRSPGFHVQSWYDEVKDYTYPYPSECNPWCPERCSGPMCTHYTQIVWATTNKIGCAVNTCRKMTVWGEVWENAVYFVCNYSPKGNWIGEAPYKNGRPCSECPPSYGGSCRNNLCYRETYTPKPETDEMNEVETAPIPEENHVWLQPRVMRPTKPKKTSAVNYMTQVVRCDTKMKDRCKGSTCNRYQCPAGCLNHKAKIFGTLFYESSSSICRAAIHYGILDDKGGLVDITRNGKVPFFVKSERHGVQSLSKYKPSSSFMVSKVKVQDLDCYTTVAQLCPFEKPATHCPRIHCPAHCKDEPSYWAPVFGTNIYADTSSICKTAVHAGVISNESGGDVDVMPVDKKKTYVGSLRNGVQSESLGTPRDGKAFRIFAVRQ

SEQ ID NO: 3541 - protein, 43 aa, Homo Sapiens
  misc_feature (1)..(1): Xaa can be any naturally occurring amino acid
XKTAVHAGVISNESGGDVDVMPVDKKKTYVGSLRNGVQSERNM

SEQ ID NO: 3542 - protein, 422 aa, Homo Sapiens
MPAGRRGPAAQSARRPPPLLPLLLLLCVLGAPRAGSGAHTAVISPQDPTLLIGSSLLATCSVHGDPPGATAEGLYWTLNGRRLPPELSRVLNASTLALALANLNGSRQRSGDNLVCHARDGSILAGSCLYVGLPPEKPVNISCWSKNMKDLTCRWTPGAHGETFLHTNYSLKYKLRWYGQDNTCEEYHTVGPHSCHIPKDLALFTPYEIWVEATNRLGSARSDVLTLDILDVVTTDPPPDVHVSRVGGLEDQLSVRWVSPPALKDFLFQAKYQIRYRVEDSVDWKVVDDVSNQTSCRLAGLKPGTVYFVQVRCNPFGIYGSKKAGIWSEWSHPTAASTPRSERPGPGGGACEPRGGEPSSGPVRRELKQFLGWLKKHAYCSNLSFRLYDQWRAWMQKSHKTRNQDEGILPSGRRGTARGPAR

SEQ ID NO: 3543 - protein, 173 aa, Homo Sapiens
  misc_feature (1)..(1): Xaa can be any naturally occurring amino acid
XQDNTCEEYHTVGPHSCHIPKDLALFTPYEIWVEATNRLGSARSDVLTLDILDVVTTDPPPDVHVSRVGGLEDQLSVRWVSPPALKDFLFQAKYQIRYRVEDSVDWKVVDDVSNQTSCRLAGLKPGTVYFVQVRCNPFGIYGSKKAGIWKRPGPGGGACEPRGGEPSSGPVRR

SEQ ID NO: 3544 - protein, 102 aa, Homo Sapiens
MEKLLCFLVLTSLSHAFGQTDMSRKAFVFPKESDTSYVSLKAPLTKPLKAFTVCLHFYTELSSTHEINTIYLGGPFSPNVLNWRALKYEVQGEVFTKPQLWP

SEQ ID NO: 3545 - protein, 102 aa, Homo Sapiens; identical to SEQ ID NO: 3544

SEQ ID NO: 3546 - protein, 91 aa, Homo Sapiens
MEKLLCFLVLTSLSHAFGQTDMSRKAFVFPKESDTSYVSLKAPLTKPLKAFTVCLHFYTELSSTRGPNVLNWRALKYEVQGEVFTKPQLWP

SEQ ID NO: 3547 - protein, 224 aa, Homo Sapiens
MEKLLCFLVLTSLSHAFGQTDMSRKAFVFPKESDTSYVSLKAPLTKPLKAFTVCLHFYTELSSTRGYSIFSYATKRQDNEILIFWSKDIGYSFTVGGSEILFEVPEVTVAPVHICTSWESASGIVEFWVDGKPRVRKSLKKGYTVGAEASIILGQEQDSFGGNFEGSQSLVGDIGNVNMWDFVLSPDEINTIYLGGPFSPNVLNWRALKYEVQGEVFTKPQLWP

SEQ ID NO: 3548 - protein, 46 aa, Homo Sapiens
MWDFVLSPDEINTIYLGGPFSPNVLNWRALKYEVQGEVFTKPQLWP

SEQ ID NO: 3549 - protein, 645 aa, Homo Sapiens
MAPSADPGMSRMLPFLLLLWFLPITEGSQRAEPMFTAVTNSVLPPDYDSNPTQLNYGVAVTDVDHDGDFEIVVAGYNGPNLVLKYDRAQKRLVNIAVDERSSPYYALRDRQGNAIGVTACDIDGDGREEIYFLNTNNAFSGVATYTDKLFKFRNNRWEDILSDEVNVARGVASLFAGRSVACVDRKGSGRYSIYIANYAYGNVGPDALIEMDPEASDLSRGILALRDVAAEAGVSKYTGGRGVSVGPILSSSASDIFCDNENGPNFLFHNRGDGTFVDAAASAGVDDPHQHGRGVALADFNRDGKVDIVYGNWNGPHRLYLQMSTHGKVRFRDIASPKFSMPSPVRTVITADFDNDQELEIFFNNIAYRSSSANRLFRVIRREHGDPLIEELNPGDALEPEGRGTGGVVTDFDGDGMLDLILSHGESMAQPLSVFRGNQGFNNNWLRVVPRTRFGAFARGAKVVLYTKKSGAHLRIIDGGSGYLCEMEPVAHFGLGKDEASSVEVTWPDGKMVSRNVASGEMNSVLEILYPRDEDTLQDPAPLECGQGFSQQENGHCMDTNECIQFPFVCPRDKPVCVNTYGSYRCRTNKKCSRGYEPNEDGTACVAQVAFLGGYSSAASRISEPLSRASYLSLGLGLCLQLYAL

SEQ ID NO: 3550 - protein, 661 aa, Homo Sapiens
MAPSADPGMSRMLPFLLLLWFLPITEGSQRAEPMFTAVTNSVLPPDYDSNPTQLNYGVAVTDVDHDGDFEIVVAGYNGPNLVLKYDRAQKRLVNIAVDERSSPYYALRDRQGNAIGVTACDIDGDGREEIYFLNTNNAFSGVATYTDKLFKFRNNRWEDILSDEVNVARGVASLFAGRSVACVDRKGSGRYSIYIANYAYGNVGPDALIEMDPEASDLSRGILALRDVAAEAGVSKYTGGRGVSVGPILSSSASDIFCDNENGPNFLFHNRGDGTFVDAAASAGVDDPHQHGRGVALADFNRDGKVDIVYGNWNGPHRLYLQMSTHGKVRFRDIASPKFSMPSPVRTVITADFDNDQELEIFFNNIAYRSSSANRLFRVIRREHGDPLIEELNPGDALEPEGRGTGGVVTDFDGDGMLDLILSHGESMAQPLSVFRGNQGFNNNWLRVVPRTRFGAFARGAKVVLYTKKSGAHLRIIDGGSGYLCEMEPVAHFGLGKDEASSVEVTWPDGKMVSRNVASGEMNSVLEILYPRDEDTLQDPAPLECGQGFSQQENGHCMDTNECIQFPFVCPRDKPVCVNTYGSYRCRTNKKCSRGYEPNEDGTACVGTLGQSPGPRPTTPTAAAATAAAAAAAGAATAAPVLVDGDLNLGSVVKESCEPSC

SEQ ID NO: 3551 - protein, 637 aa, Homo Sapiens
MSRMLPFLLLLWFLPITEGSQRAEPMFTAVTNSVLPPDYDSNPTQLNYGVAVTDVDHDGDFEIVVAGYNGPNLVLKYDRAQKRLVNIAVDERSSPYYALRDRQGNAIGVTACDIDGDGREEIYFLNTNNAFSGVATYTDKLFKFRNNRWEDILSDEVNVARGVASLFAGRSVACVDRKGSGRYSIYIANYAYGNVGPDALIEMDPEASDLSRGILALRDVAAEAGVSKYTGGRGVSVGPILSSSASDIFCDNENGPNFLFHNRGDGTFVDAAASAGVDDPHQHGRGVALADFNRDGKVDIVYGNWNGPHRLYLQMSTHGKVRFRDIASPKFSMPSPVRTVITADFDNDQELEIFFNNIAYRSSSANRLFRVIRREHGDPLIEELNPGDALEPEGRGTGGVVTDFDGDGMLDLILSHGESMAQPLSVFRGNQGFNNNWLRVVPRTRFGAFARGAKVVLYTKKSGAHLRIIDGGSGYLCEMEPVAHFGLGKDEASSVEVTWPDGKMVSRNVASGEMNSVLEILYPRDEDTLQDPAPLECGQGFSQQENGHCMDTNECIQFPFVCPRDKPVCVNTYGSYRCRTNKKCSRGYEPNEDGTACVAQVAFLGGYSSAASRISEPLSRASYLSLGLGLCLQLYAL

SEQ ID NO: 3552 - protein, 79 aa, Homo Sapiens
  misc_feature (1)..(1): Xaa can be any naturally occurring amino acid
XDEDTLQDPAPLETPMNASSSHSCALETSPYVSTPMEATGAGPTRSAVGATSPTRMAQPAWKEPCYLVSAISLENRMLL

SEQ ID NO: 3553 - protein, 524 aa, Homo Sapiens
YALRDRQGNAIGVTACDIDGDGREEIYFLNTNNAFSGVATYTDKLFKFRNNRWEDILSDEVNVARGVASLFAGRSVACVDRKGSGRYSIYIANYAYGNVGPDALIEMDPEASDLSRGILALRDVAAEAGVSKYTGGRGVSVGPILSSSASDIFCDNENGPNFLFHNRGDGTFVDAAASAGVDDPHQHGRGVALADFNRDGKVDIVYGNWNGPHRLYLQMSTHGKVRFRDIASPKFSMPSPVRTVITADFDNDQELEIFFNNIAYRSSSANRLFRVIRREHGDPLIEELNPGDALEPEGRGTGGVVTDFDGDGMLDLILSHGESMAQPLSVFRGNQGFNNNWLRVVPRTRFGAFARGAKVVLYTKKSGAHLRIIDGGSGYLCEMEPVAHFGLGKDEASSVEVTWPDGKMVSRNVASGEMNSVLEILYPRDEDTLQDPAPLETPMNASSSHSCALETSPYVSTPMEATGAGPTRSAVGATSPTRMAQPAWGLSASHRAPAPPPPPLLLPLPLLLPLLELPLLHRSS

SEQ ID NO: 3554 - protein, 401 aa, Homo Sapiens
MEPGRRGAAALLALLCVACALRAGRAQYERYSFRSFPRDELMPLESAYRHALDKYSGEHWAESVGYLEISLRLHRLLRDSEAFCHRNCSAAPQPEPAAGLASYPELRLFGGLLRRAHCLKRCKQGLPAFRQSQPSREVLADFQRREPYKFLQFAYFKANNLPKAIAAAHTFLLKHPDDEMMKRNMAYYKSLPGAEDYIKDLETKSYESLFIRAVRAYNGENWRTSITDMELALPDFFKAFYECLAACEGSREIKDFKDFYLSIADHYVEVLECKIQCEENLTPVIGGYPVEKFVATMYHYLQFAYYKLNDLKNAAPCAVSYLLFDQNDKVMQQNLVYYQYHRDTWGLSDEHFQPRPEAVQFFNVTTLQKELYDFAKENIMDDDEGEVVEYVDDLLELEETS

SEQ ID NO: 3555 - protein, 358 aa, Homo Sapiens
MEPGRRGAAALLALLCVACALRAGRAQYERYSFRSFPRDELMPLESAYRHALDKYSGEHWAESVGYLEISLRLHRLLRDSEAFCHRNCSAAPQPEPAAGLASYPELRLFGGLLRRAHCLKRCKQGLPAFRQSQPSREVLADFQRREPYKFLQFAYFKANNLPKAIAAAHTFLLKHPDDEMMKRNMAYYKSLPGAEDYIKDLETKSYESLFIRAVRAYNGENWRTSITDMELALPDFFKAFYECLAACEGSREIKDFKDFYLSIAVNDLKNAAPCAVSYLLFDQNDKVMQQNLVYYQYHRDTWGLSDEHFQPRPEAVQFFNVTTLQKELYDFAKENIMDDDEGEVVEYVDDLLELEETS

SEQ ID NO: 3556 - protein, 593 aa, Homo Sapiens
MAATVATAAAVAPAPAPGTDSASSVHWFRKGLRLHDNPALLAAVRGARCVRCVYILDPWFAASSSVGINRWRFLLQSLEDLDTSLRKLNSRLFVVRGQPADVFPRLFKEWGVTRLTFEYDSEPFGKERDAAIMKMAKEAGVEVVTENSHTLYDLDRIIELNGQKPPLTYKRFQAIISRMELPKKPVGLVTSQQMESCRAEIQENHDETYGVPSLEELGFPTEGLGPAVWQGGETEALARLDKHLERKAWVANYERPRMNANSLLASPTGLSPYLRFGCLSCRLFYYRLWDLYKKVKRNSTPPLSLFGQLLWREFFYTAATNNPRFDRMEGNPICIQIPWDRNPEALAKWAEGKTGFPWIDAIMTQLRQEGWIHHLARHAVACFLTRGDLWVSWESGVRVFDELLLDADFSVNAGSWMWLSCSAFFQQFFHCYCPVGFGRRTDPSGDYIRRYLPKLKAFPSRYIYEPWNAPESIQKAAKCIIGVDYPRPIVNHAETSRLNIERMKQIYQQLSRYRGLCLLASVPSCVEDLSHPVAEPSSSQAGSMSSAGPRPLPSGPASPKRKLEAAEEPPGEELSKRARVAELPTPELPSKDA

SEQ ID NO: 3557 - protein, 614 aa, Homo Sapiens
MGGVHVAYRGGAGVAGAVWTVMAATVATAAAVAPAPAPGTDSASSVHWFRKGLRLHDNPALLAAVRGARCVRCVYILDPWFAASSSVGINRWRFLLQSLEDLDTSLRKLNSRLFVVRGQPADVFPRLFKEWGVTRLTFEYDSEPFGKERDAAIMKMAKEAGVEVVTENSHTLYDLDRIIELNGQKPPLTYKRFQAIISRMELPKKPVGLVTSQQMESCRAEIQENHDETYGVPSLEELGFPTEGLGPAVWQGGETEALARLDKHLERKAWVANYERPRMNANSLLASPTGLSPYLRFGCLSCRLFYYRLWDLYKKVKRNSTPPLSLFGQLLWREFFYTAATNNPRFDRMEGNPICIQIPWDRNPEALAKWAEGKTGFPWIDAIMTQLRQEGWIHHLARHAVACFLTRGDLWVSWESGVRVFDELLLDADFSVNAGSWMWLSCSAFFQQFFHCYCPVGFGRRTDPSGDYIRRYLPKLKAFPSRYIYEPWNAPESIQKAAKCIIGVDYPRPIVNHAETSRLNIERMKQIYQQLSRYRGLCLLASVPSCVEDLSHPVAEPSSSQAGSMSSAGPRPLPSGPASPKRKLEAAEEPPGEELSKRARVAELPTPELPSKDA

SEQ ID NO: 3558 - protein, 614 aa, Homo Sapiens; identical to SEQ ID NO: 3557

SEQ ID NO: 3559 - protein, 532 aa, Homo Sapiens
MPAPPGRTHTWFLLQSLEDLDTSLRKLNSRLFVVRGQPADVFPRLFKEWGVTRLTFEYDSEPFGKERDAAIMKMAKEAGVEVVTENSHTLYDLDRIIELNGQKPPLTYKRFQAIISRMELPKKPVGLVTSQQMESCRAEIQENHDETYGVPSLEELGFPTEGLGPAVWQGGETEALARLDKHLERKAWVANYERPRMNANSLLASPTGLSPYLRFGCLSCRLFYYRLWDLYKKVKRNSTPPLSLFGQLLWREFFYTAATNNPRFDRMEGNPICIQIPWDRNPEALAKWAEGKTGFPWIDAIMTQLRQEGWIHHLARHAVACFLTRGDLWVSWESGVRVFDELLLDADFSVNAGSWMWLSCSAFFQQFFHCYCPVGFGRRTDPSGDYIRRYLPKLKAFPSRYIYEPWNAPESIQKAAKCIIGVDYPRPIVNHAETSRLNIERMKQIYQQLSRYRGLCLLASVPSCVEDLSHPVAEPSSSQAGSMSSAGPRPLPSGPASPKRKLEAAEEPPGEELSKRARVAELPTPELPSKDA

SEQ ID NO: 3560 - protein, 142 aa, Homo Sapiens
IQKGTSVSQKVCEWKEPEELKQLLDLELRSQGESQKQILERCRAVIRYSVKTGHPRFFNQLFSGLDPHALAGRIITESLNTSQYTYEIAPVFVLMEEEVLRKLRALVGWSSGDGIFCPVSLLHPEGSCVSGTWHRQCPSGQG

SEQ ID NO: 3561 - protein, 135 aa, Homo Sapiens
MADSEALPSLAGDPVAVEALLRAVFGVVVDEAIQKGTSVSQKCHYSIQKGAAFLGLGTDSVRVVKADERGKMVPEDLERQIGMAEAEGAVPFLVSATSGTTVLGAFDPLEAIADVCQRHGLWLHVDAAWGGSVLL

SEQ ID NO: 3562 - protein, 346 aa, Homo Sapiens
MADSEALPSLAGDPVAVEALLRAVFGVVVDEAIQKGTSVSQKCHYSIQKGAAFLGLGTDSVRVVKADERGKMVPEDLERQIGMAEAEGAVPFLVSATSGTTVLGAFDPLEAIADVCQRHGLWLHVDAAWGGSVLLSQTHRHLLDGIQRADSVAWNPHKLLAAGLQCSALLLQDTSNLLKRCHGSQASYLFQQDKFYDVALDTGDKVVQCGRRVDCLKLWLMWKAQGDQGLERRIDQAFVLARYLVEEMKKREGFELVMEPEFVNVCFWFVPPSLRGKQESPDYHERLSKVAPVLKERMVKEGSMMIGYQPHGTRGNFFRVVVANSALTCADMDFLLNELERLGQDL

SEQ ID NO: 3563 - protein, 129 aa, Homo Sapiens
MADSEALPSLAGDPVAVEALLRAVFGVVVDEAIQKGTSVSQKVCEWKEPEELKQLLDLELRSQGESQKQILERCRAVIRYSVKTGHPRFFNQLFSGLDPHALAGRIITESLNTSQYTYEIAPVFVLMEE

SEQ ID NO: 3564 - protein, 146 aa, Homo Sapiens
MADSEALPSLAGDPVAVEALLRAVFGVVVDEAIQKGTSVSQKVCEWKEPEELKQLLDLELRSQGESQKQILERCRAVIRYSVKTGHPRFFNQLFSGLDPHALAGRIITESLNTSQYTYEIAPVFVLMEEEVLRKLRALVGWSSGDG

SEQ ID NO: 3565 - protein, 163 aa, Homo Sapiens
MADSEALPSLAGDPVAVEALLRAVFGVVVDEAIQKGTSVSQKVCEWKEPEELKQLLDLELRSQGESQKQILERCRAVIRYSVKTGHPRFFNQLFSGLDPHALAGRIITESLNTSQYTYEIAPVFVLMEEEVLRKLRALVGWSSGDGIFCPGGSISNMYAVNLA

SEQ ID NO: 3566 - protein, 493 aa, Homo Sapiens
MADSEALPSLAGDPVAVEALLRAVFGVVVDEAIQKGTSVSQKVCEWKEPEELKQLLDLELRSQGESQKQILERCRAVIRYSVKTGHPRFFNQLFSGLDPHALAGRIITESLNTSQYTYEIAPVFVLMEEEVLRKLRALVGWSSGDGIFCPGGSISNMYAVNLARYQRYPDCKQRGLRTLPPLALFTSKECHYSIQKGAAFLGLGTDSVRVVKADERGKMVPEDLERQIGMAEAEGAVPFLVSATSGTTVLGAFDPLEAIADVCQRHGLWLHVDAAWGGSVLLSQTHRHLLDGIQRADSVAWNPHKLLAAGLQCSALLLQDTSNLLKRCHGSQASYLFQQDKFYDVALDTGDKVVQCGRRVDCLKLWLMWKAQGDQGLERRIDQAFVLARYLVEEMKKREGFELVMEPEFVNVCFWFVPPSLRGKQESPDYHERLSKVAPVLKERMVKEGSMMIGYQPHGTRGNFFRVVVANSALTCADMDFLLNELERLGQDL

SEQ ID NO: 3567 - protein, 493 aa, Homo Sapiens; identical to SEQ ID NO: 3566

SEQ ID NO: 3568 - protein, 267 aa, Homo Sapiens
MADSEALPSLAGDPVAVEALLRAVFGVVVDEAIQKGTSVSQKVCEWKEPEELKQLLDLELRSQGESQKQILERCRAVIRYSVKTGHPRFFNQLFSGLDPHALAGRIITESLNTSQYTYEIAPVFVLMEEEVLRKLRALVGWSSGDGIFCPGGSISNMYAVNLARYQRYPDCKQRGLRTLPPLALFTSKEVGKRHRPNPGLLILISSHVTTPSRRELRFWDLAPTVSEWSRLMREGKWSPRIWRGRLVWPRLRVLCRSWSVPPLAPLC

SEQ ID NO: 3569 - protein, 267 aa, Homo Sapiens; identical to SEQ ID NO: 3568

SEQ ID NO: 3570 - protein, 45 aa, Homo Sapiens
MADSEALPSLAGDPVAVEALLRAVFGVVVDEAIQKGTSVSQKVHI

SEQ ID NO: 3571 - protein, 520 aa, Homo Sapiens
MSIPLKSSFLLSYLCTLPPALLSREILMADSEALPSLAGDPVAVEALLRAVFGVVVDEAIQKGTSVSQKVCEWKEPEELKQLLDLELRSQGESQKQILERCRAVIRYSVKTGHPRFFNQLFSGLDPHALAGRIITESLNTSQYTYEIAPVFVLMEEEVLRKLRALVGWSSGDGIFCPGGSISNMYAVNLARYQRYPDCKQRGLRTLPPLALFTSKECHYSIQKGAAFLGLGTDSVRVVKADERGKMVPEDLERQIGMAEAEGAVPFLVSATSGTTVLGAFDPLEAIADVCQRHGLWLHVDAAWGGSVLLSQTHRHLLDGIQRADSVAWNPHKLLAAGLQCSALLLQDTSNLLKRCHGSQASYLFQQDKFYDVALDTGDKVVQCGRRVDCLKLWLMWKAQGDQGLERRIDQAFVLARYLVEEMKKREGFELVMEPEFVNVCFWFVPPSLRGKQESPDYHERLSKVAPVLKERMVKEGSMMIGYQPHGTRGNFFRVVVANSALTCADMDFLLNELERLGQDL

SEQ ID NO: 3572 - protein, 519 aa, Homo Sapiens
  misc_feature (1)..(1): Xaa can be any naturally occurring amino acid
XLGDARRGAAGYLCTLPPALLSREILMADSEALPSLAGDPVAVEALLRAVFGVVVDEAIQKGTSVSQKVCEWKEPEELKQLLDLELRSQGESQKQILERCRAVIRYSVKTGHPRFFNQLFSGLDPHALAGRIITESLNTSQYTYEIAPVFVLMEEEVLRKLRALVGWSSGDGIFCPGGSISNMYAVNLARYQRYPDCKQRGLRTLPPLALFTSKECHYSIQKGAAFLGLGTDSVRVVKADERGKMVPEDLERQIGMAEAEGAVPFLVSATSGTTVLGAFDPLEAIADVCQRHGLWLHVDAAWGGSVLLSQTHRHLLDGIQRADSVAWNPHKLLAAGLQCSALLLQDTSNLLKRCHGSQASYLFQQDKFYDVALDTGDKVVQCGRRVDCLKLWLMWKAQGDQGLERRIDQAFVLARYLVEEMKKREGFELVMEPEFVNVCFWFVPPSLRGKQESPDYHERLSKVAPVLKERMVKEGSMMIGYQPHGTRGNFFRVVVANSALTCADMDFLLNELERLGQDL

SEQ ID NO: 3573 - protein, 150 aa, Homo Sapiens
MGWGRLQRISLPSQCLSLLSTWLGSLLLLVCLLASRSITEEVSEYCSHMIGSGHLQSLQRLIDSQMETSCQITFEFVDQEQLKDPVCYLKKAFLLVQDIMEDTMRFRDNTPNAIAIVQLQELSLRLKSCFTKDYEEHDKACVRTFYETPL

SEQ ID NO: 3574 - protein, 113 aa, Homo Sapiens
MIGSGHLQSLQRLIDSQMETSCQITFEFVDQEQLKDPVCYLKKAFLLVQDIMEDTMRFRDNTPNAIAIVQLQELSLRLKSCFTKDYEEHDKACVRTFYETPLQLLEKVKNVFN

SEQ ID NO: 3575 - protein, 285 aa, Homo Sapiens
MTAPGAAGRCPPTIDSQMETSCQITFEFVDQEQLKDPVCYLKKAFLLVQDIMEDTMRFRDNTPNAIAIVQLQELSLRLKSCFTKDYEEHDKACVRTFYETPLQLLEKVKNVFNETKNLLDKDWNIFSKNCNNSFAECSSQDVVTKPDCNCLYPKAIPSSDPASVSPHQPLAPSMAPVAGLTWEDSEGTEGSSLLPGEQPLHTVDPGSAKQRPPRSTCQSFEPPETPVVKDSTIGGSPQPRPSVGAFNPGMEDILDSAMGTNWVPEEASGEASEIPVPQGTELSPS

SEQ ID NO: 3576 - protein, 119 aa, Homo Sapiens
MTAPGAAGRCPPTTWLGSLLLLVCLLASRSITEEVSEYCSHMIGSGHLQSLQRLIDSQMETSCQITFEFVDQEQLKDPVCYLKKAFLLVQDIMEDTMRFRDNTPNAIAIVQLQELSLRL

SEQ ID NO: 3577 - protein, 554 aa, Homo Sapiens
MTAPGAAGRCPPTTWLGSLLLLVCLLASRSITEEVSEYCSHMIGSGHLQSLQRLIDSQMETSCQITFEFVDQEQLKDPVCYLKKAFLLVQDIMEDTMRFRDNTPNAIAIVQLQELSLRLKSCFTKDYEEHDKACVRTFYETPLQLLEKVKNVFNETKNLLDKDWNIFSKNCNNSFAECSSQDVVTKPDCNCLYPKAIPSSDPASVSPHQPLAPSMAPVAGLTWEDSEGTEGSSLLPGEQPLHTVDPGSAKQRPPRSTCQSFEPPETPVVKDSTIGGSPQPRPSVGAFNPGMEDILDSAMGTNWVPEEASGEASEIPVPQGTELSPSRPGGGSMQTEPARPSNFLSASSPLPASAKGQQPADVTGTALPRVGPVRPTGQDWNHTPQKTDHPSALLRDPPEPGSPRISSLRPQGLSNPSTLSAQPQLSRSHSSGSVLPLGELEGRRSTRDRRSPAEPEGGPASEGAARPLPRFNSVPLTDTGHERQSEGSFSPQLQESVFHLLVPSVILVLLAVGGLLFYRWRRRSHQEPQRADSPLEQPEGSPLTQDDRQVELPV

SEQ ID NO: 3578 - protein, 554 aa, Homo Sapiens; identical to SEQ ID NO: 3577

SEQ ID NO: 3579 - protein, 438 aa, Homo Sapiens
MTAPGAAGRCPPTTWLGSLLLLVCLLASRSITEEVSEYCSHMIGSGHLQSLQRLIDSQMETSCQITFEFVDQEQLKDPVCYLKKAFLLVQDIMEDTMRFRDNTPNAIAIVQLQELSLRLKSCFTKDYEEHDKACVRTFYETPLQLLEKVKNVFNETKNLLDKDWNIFSKNCNNSFAECSSQDVVTKPDCNCLYPKAIPSSDPASVSPHQPLAPSMAPVAGLTWEDSEGTEGSSLLPGEQPLHTVDPGSAKQRPPRSTCQSFEPPETPVVKDSTIGGSPQPRPSVGAFNPGMEDILDSAMGTNWVPEEASGEASEIPVPQGTELSPSRPGGGSMQTEPARPSNFLSASSPLPASAKGQQPADVTGHERQSEGSFSPQLQESVFHLLVPSVILVLLAVGGLLFYRWRRRSHQEPQRADSPLEQPEGSPLTQDDRQVELPV

SEQ ID NO: 3580 - protein, 256 aa, Homo Sapiens
MTAPGAAGRCPPTTWLGSLLLLVCLLASRSITEEVSEYCSHMIGSGHLQSLQRLIDSQMETSCQITFEFVDQEQLKDPVCYLKKAFLLVQDIMEDTMRFRDNTPNAIAIVQLQELSLRLKSCFTKDYEEHDKACVRTFYETPLQLLEKVKNVFNETKNLLDKDWNIFSKNCNNSFAECSSQGHERQSEGSFSPQLQESVFHLLVPSVILVLLAVGGLLFYRWRRRSHQEPQRADSPLEQPEGSPLTQDDRQVELPV

SEQ ID NO: 3581 - protein, 64 aa, Homo Sapiens
AGSPWALGQRPFGAQGLKGPVCVAATAHADEKEALMSELKIMSHLGQHENIVNLLGACTHGGIS

SEQ ID NO: 3582 - protein, 972 aa, Homo Sapiens
MGPGVLLLLLVATAWHGQGIPVIEPSVPELVVKPGATVTLRCVGNGSVEWDGPPSPHWTLYSDGSSSILSTNNATFQNTGTYRCTEPGDPLGGSAAIHLYVKDPARPWNVLAQEVVVFEDQDALLPCLLTDPVLEAGVSLVRVRGRPLMRHTNYSFSPWHGFTIHRAKFIQSQDYQCSALMGGRKVMSISIRLKVQKVIPGPPALTLVPAELVRIRGEAAQIVCSASSVDVNFDVFLQHNNTKLAIPQQSDFHNNRYQKVLTLNLDQVDFQHAGNYSCVASNVQGKHSTSMFFRVVESAYLNLSSEQNLIQEVTVGEGLNLKVMVEAYPGLQGFNWTYLGPFSDHQPEPKLANATTKDTYRHTFTLSLPRLKPSEAGRYSFLARNPGGWRALTFELTLRYPPEVSVIWTFINGSGTLLCAASGYPQPNVTWLQCSGHTDRCDEAQVLQVWDDPYPEVLSQEPFHKVTVQSLLTVETLEHNQTYECRAHNSVGSGSWAFIPISAGAHTHPPDEFLFTPVVVACMSIMALLLLLLLLLLYKYKQKPKYQVRWKIIESYEGNSYTFIDPTQLPYNEKWEFPRNNLQFGKTLGAGAFGKVVEATAFGLGKEDAVLKVAVKMLKSTAHADEKEALMSELKIMSHLGQHENIVNLLGACTHGGPVLVITEYCCYGDLLNFLRRKAEAMLGPSLSPGQDPEGGVDYKNIHLEKKYVRRDSGFSSQGVDTYVEMRPVSTSSNDSFSEQDLDKEDGRPLELRDLLHFSSQVAQGMAFLASKNCIHRDVAARNVLLTNGHVAKIGDFGLARDIMNDSNYIVKGNARLPVKWMAPESIFDCVYTVQSDVWSYGILLWEIFSLGLNPYPGILVNSKFYKLVKDGYQMAQPAFAPKNIYSIMQACWALEPTHRPTFQQICSFLQEQAQEDRRERDYTNLPSSSRSGGSGSSSSELEEESSSEHLTCCEQGDIAQPLLQPNNYQFC

SEQ ID NO: 3583 - protein, 671 aa, Homo Sapiens
MGPGVLLLLLVATAWHGQGIPVIEPSVPELVVKPGATVTLRCVGNGSVEWDGPPSPHWTLYSDGSSSILSTNNATFQNTGTYRCTEPGDPLGGSAAIHLYVKDPARPWNVLAQEVVVFEDQDALLPCLLTDPVLEAGVSLVRVRGRPLMRHTNYSFSPWHGFTIHRAKFIQSQDYQCSALMGGRKVMSISIRLKVQKVIPGPPALTLVPAELVRIRGEAAQIVCSASSVDVNFDVFLQHNNTKLAIPQQSDFHNNRYQKVLTLNLDQVDFQHAGNYSCVASNVQGKHSTSMFFRVVESAYLNLSSEQNLIQEVTVGEGLNLKVMVEAYPGLQGFNWTYLGPFSDHQPEPKLANATTKDTYRHTFTLSLPRLKPSEAGRYSFLARNPGGWRALTFELTLRYPPEVSVIWTFINGSGTLLCAASGYPQPNVTWLQCSGHTDRCDEAQVLQVWDDPYPEVLSQEPFHKVTVQSLLTVETLEHNQTYECRAHNSVGSGSWAFIPISAGAHTHPPDEFLFTPVVVACMSIMALLLLLLLLLLYKYKQKPKYQVRWKIIESYEGNSYTFIDPTQLPYNEKWEFPRNNLQFGKTLGAGAFGKVVEATAFGLGKEDAVLKVAVKMLKSTAHADEKEALMSELKIMSHLGQHENIVNLLGACTHGGTVASPARVWTPMWR

SEQ ID NO: 3584 - protein, 306 aa, Homo Sapiens
MGPGVLLLLLVATAWHGQGIPVIEPSVPELVVKPGATVTLRCVGNGSVEWDGPPSPHWTLYSDGSSSILSTNNATFQNTGTYRCTEPGDPLGGSAAIHLYVKDPARPWNVLAQEVVVFEDQDALLPCLLTDPVLEAGVSLVRVRGRPLMRHTNYSFSPWHGFTIHRAKFIQSQDYQCSALMGGRKVMSISIRLKVQKVIPGPPALTLVPAELVRIRGEAAQIVCSASSVDVNFDVFLQHNNTKLAIPQQSDFHNNRYQKVLTLNLDQVDFQHAGNYSCVASNVQGKHSTSMFFRVVGTPSPSLCPA

SEQ ID NO: 3585 - protein, 49 aa, Homo Sapiens
MRHTNYSFSPWHGFTIHRAKFIQSQDYQCSALMGGRKVMSISIRLKVQK

SEQ ID NO: 3586 - protein, 144 aa, Homo Sapiens
MWLQSLLLLGTVACSISAPARSPSPSTQPWEHVNAIQEARRLLNLSRDTAAEMNETVEVISEMFDLQEPTCLQTRLELYKQGLRGSLTKLKGPLTMMASHYKQHCPPTPETSCATQIITFESFKENLKDFLLVIPFDCWEPVQE

SEQ ID NO: 3587 - protein, 238 aa, Homo Sapiens
MLLLVTSLLLCELPHPAFLLIPEKSDLRTVAPASSLNVRFDSRTMNLSWDCQENTTFSKCFLTDKKNRVVEPRLSNNECSCTFREICLHEGVTFEVHVNTSQRGFQQKLLYPNSGREGTAAQNFSCFIYNADLMNCTWARGPTAPRDVQYFLYIRNSKRRREIRCPYYIQDSGTHVGCHLDNLSGLTSRNYFLVNGTSREIGIQFFDSLLDTKKIERFNPPSNVTVRCNTTHCLVRWK

SEQ ID NO: 3588 - protein, 377 aa, Homo Sapiens
MLLLVTSLLLCELPHPAFLLIPEKSDLRTVAPASSLNVRFDSRTMNLSWDCQENTTFSKCFLTDKKNRVVEPRLSNNECSCTFREICLHEGVTFEVHVNTSQRGFQQKLLYPNSGREGTAAQNFSCFIYNADLMNCTWARGPTAPRDVQYFLYIRNSKRRREIRCPYYIQDSGTHVGCHLDNLSGLTSRNYFLVNGTSREIGIQFFDSLLDTKKIERFNPPSNVTVRCNTTHCLVRWKQPRTYQKLSYLDFQYQLDVHRKNTQPGTENLLINVSGDLENRYNFPSSEPRAKHSVKIRAADVRILNWSSWSEAIEFDHLGGIHPRGRERLPRRGLDREGNYLRPRGCRNGMDISASATRGNCFLDDAVNLYIIFYVFI

SEQ ID NO: 3589 - protein, 410 aa, Homo Sapiens
MLLLVTSLLLCELPHPAFLLIPEKSDLRTVAPASSLNVRFDSRTMNLSWDCQENTTFSKCFLTDKKNRVVEPRLSNNECSCTFREICLHEGVTFEVHVNTSQRGFQQKLLYPNSGREGTAAQNFSCFIYNADLMNCTWARGPTAPRDVQYFLYIRNSKRRREIRCPYYIQDSGTHVGCHLDNLSGLTSRNYFLVNGTSREIGIQFFDSLLDTKKIERFNPPSNVTVRCNTTHCLVRWKQPRTYQKLSYLDFQYQLDVHRKNTQPGTENLLINVSGDLENRYNFPSSEPRAKHSVKIRAADVRILNWSSWSEAIEFGSDDGNLGSVYIYVLLIVGTLVCGIVLGFLFKRFLRIQRLFPPVPQIKDKLNDNHEVEDEMGPQRHHRCGWNLYPTPGPSPGSGSSPRLGSESSL

SEQ ID NO: 3590 - protein, 333 aa, Homo Sapiens
MLLLVTSLLLCELPHPAFLLIPEKSDLRTVAPASSLNVRFDSRTMNLSWDCQENTTFSKCFLTDKKNRVVEPRLSNNECSCTFREICLHEGVTFEVHVNTSQRGFQQKLLYPNSGREGTAAQNFSCFIYNADLMNCTWARGPTAPRDVQYFLYIRNSKRRREIRCPYYIQDSGTHVGCHLDNLSGLTSRNYFLVNGTSREIGIQFFDSLLDTKKIERFNPPSNVTVRCNTTHCLVRWKQPRTYQKLSYLDFQYQLDVHRKNTQPGTENLLINVSGDLENRYNFPSSEPRAKHSVKIRAADVRILNWSSWSEAIEFGSLGYSGCSRQFHRSKTN

SEQ ID NO: 3591 - protein, 400 aa, Homo Sapiens
MLLLVTSLLLCELPHPAFLLIPEKSDLRTVAPASSLNVRFDSRTMNLSWDCQENTTFSKCFLTDKKNRVVEPRLSNNECSCTFREICLHEGVTFEVHVNTSQRGFQQKLLYPNSGREGTAAQNFSCFIYNADLMNCTWARGPTAPRDVQYFLYIRNSKRRREIRCPYYIQDSGTHVGCHLDNLSGLTSRNYFLVNGTSREIGIQFFDSLLDTKKIERFNPPSNVTVRCNTTHCLVRWKQPRTYQKLSYLDFQYQLDVHRKNTQPGTENLLINVSGDLENRYNFPSSEPRAKHSVKIRAADVRILNWSSWSEAIEFGSDDGNLGSVYIYVLLIVGTLVCGIVLGFLFKRFLRIQRLFPPVPQIKDKLNDNHEVEDEIIWEEFTPEEGKGYREEVLTVKEIT

SEQ ID NO: 3592 - protein, 400 aa, Homo Sapiens; identical to SEQ ID NO: 3591

SEQ ID NO: 3593 - protein, 434 aa, Homo Sapiens
MLLLVTSLLLCELPHPAFLLIPEKSDLRTVAPASSLNVRFDSRTMNLSWDCQENTTFSKCFLTDKKNRVVEPRLSNNECSCTFREICLHEGVTFEVHVNTSQRGFQQKLLYPNSGREGTAAQNFSCFIYNADLMNCTWARGPTAPRDVQYFLYIRNSKRRREIRCPYYIQDSGTHVGCHLDNLSGLTSRNYFLVNGTSREIGIQFFDSLLDTKKIERFNPPSNVTVRCNTTHCLVRWKQPRTYQKLSYLDFQYQLDVHRKNTQPGTENLLINVSGDLENRYNFPSSEPRAKHSVKIRAADVRILNWSSWSEAIEFGSHSVTQAGVQWHNLGSLQPPSPRLKRFSCLRLPGSDDGNLGSVYIYVLLIVGTLVCGIVLGFLFKRFLRIQRLFPPVPQIKDKLNDNHEVEDEIIWEEFTPEEGKGYREEVLTVKEIT

SEQ ID NO: 3594 - protein, 285 aa, Homo Sapiens
MLLLVTSLLLCELPHPAFLLIPEKSDLRTVAPASSLNVRFDSRTMNLSWDCQENTTFSKCFLTDKKNRVVEPRLSNNECSCTFREICLHEGVTFEVHVNTSQRGFQQKLLYPNSGREGTAAQNFSCFIYNADLMNCTWARGPTAPRDVQYFLYIRNSKRRREIRCPYYIQDSGTHVGCHLDNLSGLTSRNYFLVNGTSREIGIQFFDSLLDTKKIERFNPPSNVTVRCNTTHCLVRWKQPRTYQKLSYLDFQYQLDVHRKNTQPGTENLLVLTTGTSALCTFMCS

SEQ ID NO: 3595 - protein, 400 aa, Homo Sapiens; identical to SEQ ID NO: 3591

SEQ ID NO: 3596 - protein, 233 aa, Homo Sapiens
MLLLVTSLLLCELPHPAFLLIPEKSDLRTVAPASSLNVRFDSRTMNLSWDCQENTTFSKCFLTDKKNRVVEPRLSNNECSCTFREICLHEGVTFEVHVNTSQRGFQQKLLYPNSGREGTAAQNFSCFIYNADLMNCTWARGPTAPRDVQYFLYIRNSKRRREIRCPYYIQDSGTHVGCHLDNLSGLTSRNYFLVNGTSREIGIQFFDSLLDTKKIGSLGYSGCSRQFHRSKTN

SEQ ID NO: 3597 - protein, 90 aa, Homo Sapiens
MLLLVTSLLLCELPHPAFLLIPEKSDLRTVAPASSLNVRFDSRTMNLSWDCQENTTFSKCFLTDKKNRVVEPRMEFPSCCPDRTIAHQPA

SEQ ID NO: 3598 - protein, 267 aa, Homo Sapiens
MNCTWARGPTAPRDVQYFLYIRNSKRRREIRCPYYIQDSGTHVGCHLDNLSGLTSRNYFLVNGTSREIGIQFFDSLLDTKKIERFNPPSNVTVRCNTTHCLVRWKQPRTYQKLSYLDFQYQLDVHRKNTQPGTENLLINVSGDLENRYNFPSSEPRAKHSVKIRAADVRILNWSSWSEAIEFGSDDGNLGSVYIYVLLIVGTLVCGIVLGFLFKRFLRIQRLFPPVPQIKDKLNDNHEVEDEIIWEEFTPEEGKGYREEVLTVKEIT

SEQ ID NO: 3599 - protein, 155 aa, Homo Sapiens
MAGPATQSPMKLMALQLLLWHSALWTVQEATPLGPASSLPQSFLLKCLEQVRKIQGDGAALQEKLAGCLSQLHSGLFLYQGLLQALEGISPELGPTLDTLQLDVADFATTIWQQMEELGMAPALQPTQGAMPAFASAFQRRAGGVLVASHLQSFL

SEQ ID NO: 3600 - protein, 204 aa, Homo Sapiens
MAGPATQSPMKLMALQLLLWHSALWTVQEATPLGPASSLPQSFLLKCLEQVRKIQGDGAALQEKLCATYKLCHPEELVLLGHSLGIPWAPLSSCPSQALQLAGCLSQLHSGLFLYQGLLQALEGISPELGPTLDTLQLDVADFATTIWQQMEELGMAPALQPTQGAMPAFASAFQRRAGGVLVASHLQSFLEVSYRVLRHLAQP

SEQ ID NO: 3601 - protein, 171 aa, Homo Sapiens
MAGPATQSPMKLMALQLLLWHSALWTVQEATPLGPASSLPQSFLLKCLEQVRKIQGDGAALQEKLVSEAGCLSQLHSGLFLYQGLLQALEGISPELGPTLDTLQLDVADFATTIWQQMEELGMAPALQPTQGAMPAFASAFQRRAGGVLVASHLQSFLEVSYRVLRHLAQP

SEQ ID NO: 3602 - protein, 207 aa, Homo Sapiens
MAGPATQSPMKLMALQLLLWHSALWTVQEATPLGPASSLPQSFLLKCLEQVRKIQGDGAALQEKLVSECATYKLCHPEELVLLGHSLGIPWAPLSSCPSQALQLAGCLSQLHSGLFLYQGLLQALEGISPELGPTLDTLQLDVADFATTIWQQMEELGMAPALQPTQGAMPAFASAFQRRAGGVLVASHLQSFLEVSYRVLRHLAQP

SEQ ID NO: 3603 - protein, 57 aa, Homo Sapiens
MAGPATQSPMKLMVCHLQAVPPRGAGAARTLSGHPLGSPEQLPQPGPAAGRLLEPTP

SEQ ID NO: 3604 - protein, 164 aa, Homo Sapiens
MSPEPALSPALQLLLWHSALWTVQEATPLGPASSLPQSFLLKCLEQVRKIQGDGAALQEKLAGCLSQLHSGLFLYQGLLQALEGISPELGPTLDTLQLDVADFATTIWQQMEELGMAPALQPTQGAMPAFASAFQRRAGGVLVASHLQSFLEVSYRVLRHLAQP

SEQ ID NO: 3605 - protein, 200 aa, Homo Sapiens
MSPEPALSPALQLLLWHSALWTVQEATPLGPASSLPQSFLLKCLEQVRKIQGDGAALQEKLCATYKLCHPEELVLLGHSLGIPWAPLSSCPSQALQLAGCLSQLHSGLFLYQGLLQALEGISPELGPTLDTLQLDVADFATTIWQQMEELGMAPALQPTQGAMPAFASAFQRRAGGVLVASHLQSFLEVSYRVLRHLAQP

SEQ ID NO: 3606 - protein, 14 aa, Homo Sapiens
MMMVRRGLLAWISR

SEQ ID NO: 3607 - protein, 53 aa, Homo Sapiens
MMMVRRGLLAWISRVVVLLVLLCCAISVLYMLACTPKGDEEQLALPRANSPTG

SEQ ID NO: 3608 - protein, 96 aa, Homo Sapiens
MMMVRRGLLAWISRVVVLLVLLCCAISVLYMLACTPKGDEEQLALPRANSPTGKEGYQAVLQEWEEQHRNYVSSLKRQIAQLKEELQERSEQLRNG

SEQ ID NO: 3609 - protein, 104 aa, Homo Sapiens
MMMVRRGLLAWISRVVVLLVLLCCAISVLYMLACTPKGDEEQLALPRANSPTGKEGYQAVLQEWEEQHRNYVSSLKRQIAQLKEELQERSEQLRNGQYQASDAA

SEQ ID NO: 3610 - protein, 532 aa, Homo Sapiens
MMMVRRGLLAWISRVVVLLVLLCCAISVLYMLACTPKGDEEQLALPRANSPTGKEGYQAVLQEWEEQHRNYVSSLKRQIAQLKEELQERSEQLRNGQYQASDAAGLGLDRSPPEKTQADLLAFLHSQVDKAEVNAGVKLATEYAAVPFDSFTLQKVYQLETGLTRHPEEKPVRKDKRDELVEAIESALETLNSPAENSPNHRPYTASDFIEGIYRTERDKGTLYELTFKGDHKHEFKRLILFRPFGPIMKVKNEKLNMANTLINVIVPLAKRVDKFRQFMQNFREMCIEQDGRVHLTVVYFGKEEINEVKGILENTSKAANFRNFTFIQLNGEFSRGKGLDVGARFWKGSNVLLFFCDVDIYFTSEFLNTCRLNTQPGKKVFYPVLFSQYNPGIIYGHHDAVPPLEQQLVIKKETGFWRDFGFGMTCQYRSDFINIGGFDLDIKGWGGEDVHLYRKYLHSNLIVVRTPVRGLFHLWHEKRCMDELTPEQYKMCMQSKAMNEASHGQLGMLVFRHEIEAHLRKQKQKTSSKKT

SEQ ID NO: 3611 - protein, 297 aa, Homo Sapiens
MMMVRRGLLAWISRVVVLLVLLCCAISVLYMLACTPKGDEEQLALPRANSPTGKEGYQAVLQEWEEQHRNYVSSLKRQIAQLKEELQERSEQLRNGQYQASDAAGLGLDRSPPEKTQADLLAFLHSQVDKAEVNAGVKLATEYAAVPFDSFTLQKVYQLETGLTRHPEEKPVRKDKRDELVEAIESALETLNSPAENSPNHRPYTASDFIEGIYRTERDKGTLYELTFKGDHKHEFKRLILFRPFGPIMKVKNEKLNMANTLINVIVPLAKRVDKFRQFMQNFRPADEVFRCVPLSP

SEQ ID NO: 3612 - protein, 297 aa, Homo Sapiens; identical to SEQ ID NO: 3611

SEQ ID NO: 3613 - protein, 532 aa, Homo Sapiens; identical to SEQ ID NO: 3610

SEQ ID NO: 3614 - protein, 532 aa, Homo Sapiens; identical to SEQ ID NO: 3610

SEQ ID NO: 3615 - protein, 217 aa, Homo Sapiens
MAPGSRTSLLLAFALLCLPWLQEAGAVQTVPLSRLFDHAMLQAHRAHQLAIDTYQEFEETYIPKDQKYSFLHDSQTSFCFSDSIPTPSNMEETQQKSNLELLRISLLLIESWLEPVRFLRSMFANNLVYDTSDSDDYHLLKDLEEGIQTLMGRLEDGSRRTGQILKQTYSKFDTNSHNHDALLKNYGLLYCFRKDMDKVETFLRMVQCRSVEGSCGF

SEQ ID NO: 3616 - protein, 256 aa, Homo Sapiens
MAPGSRTSLLLAFALLCLPWLQEAGAVQTVPLSRLFDHAMLQAHRAHQLAIDTYQEFEETYIPKDQKYSFLHDSQTSFCFSDSIPTPSNMEETQQKSNLELLRISLLLIESWLEPVRFLRSMFANNLVYDTSDSDDYHLLKDLEEGIQTLMGVRVAPGVTNPGTPLASRAGGEKYCCPLFSSKALTQENSPYSSFRLVNPPGLSLHPEGEGGKWINERGREQCPSAWPLLLFLHFAEAGRRQPPDWADPQADLQQV

SEQ ID NO: 3617 - protein, 122 aa, Homo Sapiens
MAPGSRTSLLLAFALLCLPWLQEAGAVQTVPLSRLFDHAMLQAHRAHQLAIDTYQEFRLEDGSRRTGQILKQTYSKFDTNSHNHDALLKNYGLLYCFRKDMDKVETFLRMVQCRSVEGSCGF

SEQ ID NO: 3618 - protein, 128 aa, Homo Sapiens
MEETQQKSNLELLRISLLLIESWLEPVRFLRSMFANNLVYDTSDSDDYHLLKDLEEGIQTLMGRLEDGSRRTGQILKQTYSKFDTNSHNHDALLKNYGLLYCFRKDMDKVETFLRMVQCRSVEGSCGF

SEQ ID NO: 3619 - protein, 160 aa, Homo Sapiens
MAAGSRTSLLLAFALLCLPWLQEADSIPTPSNMEETQQKSNLELLRISLLLIESWLEPVRFLRSMFANNLVYDTSDSDDYHLLKDLEEGIQTLMGRLEDGSRRTGQILKQTYSKFDTNSHNHDALLKNYGLLYCFRKDMDKVETFLRMVQCRSVEGSCGF

SEQ ID NO: 3620 - protein, 217 aa, Homo Sapiens
MAAGSRTSLLLAFALLCLPWLQEAGAVQTVPLSRLFDHAMLQAHRAHQLAIDTYQEFEETYIPKDQKYSFLHDSQTSFCFSDSIPTPSNMEETQQKSNLELLRISLLLIESWLEPVRFLRSMFANNLVYDTSDSDDYHLLKDLEEGIQTLMGRLEDGSRRTGQILKQTYSKFDTNSHNHDALLKNYGLLYCFRKDMDKVETFLRMVQCRSVEGSCGF

SEQ ID NO: 3621 - protein, 167 aa, Homo Sapiens
MAAGSRTSLLLAFALLCLPWLQEAGAVQTVPLSRLFDHAMLQAHRAHQLAIDTYQEFEETYIPKDQKYSFLHDSQTSFCFSDSIPTPSNMEETQQKSNLELLRISLLLIESWLEPVRFLRSMFANNLVYDTSDSDDYHLLKDLEEGIQTLMGVRVAPGVANPGTPLA

SEQ ID NO: 3622 - protein, 122 aa, Homo Sapiens
MAAGSRTSLLLAFALLCLPWLQEAGAVQTVPLSRLFDHAMLQAHRAHQLAIDTYQEFRLEDGSRRTGQILKQTYSKFDTNSHNHDALLKNYGLLYCFRKDMDKVETFLRMVQCRSVEGSCGF

SEQ ID NO: 3623 - protein, 128 aa, Homo Sapiens; identical to SEQ ID NO: 3618

SEQ ID NO: 3624 - protein, 139 aa, Homo Sapiens
MAADSIPTSSNMEETQQKSNLELLHISLLLIESRLEPVRFLRSTFTNNLVYDTSDSDDYHLLKDLEEGIQMLMGRLEDGSHLTGQTLKQTYSKFDTNSHNHDALLKNYGLLHCFRKDMDKVETFLRMVQCRSVEGSCGF

SEQ ID NO: 3625 - protein, 178 aa, Homo Sapiens
MAADSIPTSSNMEETQQKSNLELLHISLLLIESRLEPVRFLRSTFTNNLVYDTSDSDDYHLLKDLEEGIQMLMGVRVAPGVPNPGSPLASRAGGEKHCCPLFSSQALTQENSPYSSFPLVNPPGLSLHPEGEGGKWINERGREQCPSAWSLLLLLHFAEAGRRQPPDWADPQADLQQV

SEQ ID NO: 3626 - protein, 160 aa, Homo Sapiens
MAAGSRTSLLLAFALLCLPWLQEADSIPTSSNMEETQQKSNLELLHISLLLIESRLEPVRFLRSTFTNNLVYDTSDSDDYHLLKDLEEGIQMLMGRLEDGSHLTGQTLKQTYSKFDTNSHNHDALLKNYGLLHCFRKDMDKVETFLRMVQCRSVEGSCGF

SEQ ID NO: 3627 - protein, 222 aa, Homo Sapiens
MAAGSRTSLLLAFALLCLPWLQEAGAVQTVPLSRLFKEAMLQAHRAHQLAIDTYQEFISSWGMEAYITKEQKYSFLHDSQTSFCFSDSIPTSSNMEETQQKSNLELLHISLLLIESRLEPVRFLRSTFTNNLVYDTSDSDDYHLLKDLEEGIQMLMGRLEDGSHLTGQTLKQTYSKFDTNSHNHDALLKNYGLLHCFRKDMDKVETFLRMVQCRSVEGSCGF

SEQ ID NO: 3628 - protein, 217 aa, Homo Sapiens [sequence omitted]

SEQ ID NO: 3629 - protein, 128 aa, Homo Sapiens
MEETQQKSNLELLHISLLLIESRLEPVRFLRSTFTNNLVYDTSDSDDYHLLKDLEEGIQMLMGRLEDGSHLTGQTLKQTYSKFDTNSHNHDALLKNYGLLHCFRKDMDKVETFLRMVQCRSVEGSCGF

SEQ ID NO: 3630 - protein, 167 aa, Homo Sapiens
MEETQQKSNLELLHISLLLIESRLEPVRFLRSTFTNNLVYDTSDSDDYHLLKDLEEGIQMLMGVRVAPGVPNPGSPLASRAGGEKHCCPLFSSQALTQENSPYSSFPLVNPPGLSLHPEGEGGKWINERGREQCPSAWSLLLLLHFAEAGRRQPPDWADPQADLQQV

SEQ ID NO: 3631 - protein, 76 aa, Homo Sapiens
KMESSISSSSEEQIRRMNENSHVQVPFQQLNQLAAYPYAVWYYPQIMQYVPFPPFSDISNPTAHENYEKNNVMLQW

SEQ ID NO: 3632 - protein, 185 aa, Homo Sapiens
MRLLILTCLVAVALARPKLPLRYPERLQNPSESSEPIPLESREEYMNGMNRQRNILREKQTDEIKDTRNESTQNCVVAEPEKMESSISSSSEEMSLSKCAEQFCRLNEYNQLQLQAAHAQEQIRRMNENSHVQVPFQQLNQLAAYPYAVWYYPQIMQYVPFPPFSDISNPTAHENYEKNNVMLQW

SEQ ID NO: 3633 - protein, 177 aa, Homo Sapiens
MRLLILTCLVAVALARPKLPLRYPERLQNPSESSEPIPLESREEYMNGMNRQRNILREKQTDEIKDTRNESTQNCVVAEPEKMESSISSSSEEQFCRLNEYNQLQLQAAHAQEQIRRMNENSHVQVPFQQLNQLAAYPYAVWYYPQIMQYVPFPPFSDISNPTAHENYEKNNVMLQW

SEQ ID NO: 3634 - protein, 169 aa, Homo Sapiens
MRLLILTCLVAVALARPKLPLRYPERLQNPSESSEPIPLESREEYMNGMNRQRNILREKQTDEIKNCVVAEPEKMESSISSSSEEQFCRLNEYNQLQLQAAHAQEQIRRMNENSHVQVPFQQLNQLAAYPYAVWYYPQIMQYVPFPPFSDISNPTAHENYEKNNVMLQW

SEQ ID NO: 3635 - protein, 176 aa, Homo Sapiens
MRLLILTCLVAVALARPKLPLRYPERLQNPSESSEPIPLESREEYMNGMNRRNILREKQTDEIKDTRNESTQNCVVAEPEKMESSISSSSEEQFCRLNEYNQLQLQAAHAQEQIRRMNENSHVQVPFQQLNQLAAYPYAVWYYPQIMQYVPFPPFSDISNPTAHENYEKNNVMLQW

SEQ ID NO: 3636 - protein, 55 aa, Homo Sapiens
QRNILREKQTDEIKNCVVAEPEKMESSISSSSEEMSLSKCAEQFCRLNEYNQLQL

SEQ ID NO: 3637 - protein, 226 aa, Homo Sapiens
MKVLILACLVALALARETIESLSSSEESITEYKQKVEKVKHEDQQQGEDEHQDKIYPSFQPQPLIYPFVEPIPYGFLPQNILPLAQPAVVLPVPQPEIMEVPKAKDTVYTKGRVMPVLKSPTIPFFDPQIPKLTDLENLHLPLPLLQPLMQQVPQPIPQTLALPPQPLWSVPQPKVLPIPQQVVPYPQRAVPVQALLLNQELLLNPTHQIYPVTQPLAPVHNPISV

SEQ ID NO: 3638 - protein, 182 aa, Homo Sapiens
MKSFLLVVNALALTLPFLAVEVQNQKQPACHENDERPFYQKTAPYVPMYYVPNSYPYYGTNLYQRRPAIAINNPYVPRTYYANPAVVRPHAQIPQRQYLPNSHPPTVVRRPNLHPSFIAIPPKKIQDKIIIPTINTIATVEPTPAPATEPTVDSVVTPEAFSESIITSTPETTTVAVTPPTA

SEQ ID NO: 3639 - protein, 141 aa, Homo Sapiens
MAQYLSTLLLLLATLAVALAWSPKEEDRIIPGGIYNADLNDEWVQRALHFAISEYNKATKDDYYRRPLRVLRARQQTVGGVNYFFDVEVGRTICTKSQPNLDTCAFHEQPELQKKQLCSFEIYEVPWENRRSLVKSRCQES

SEQ ID NO: 3640 - protein, 141 aa, Homo Sapiens; identical to SEQ ID NO: 3639

SEQ ID NO: 3641 - protein, 103 aa, Homo Sapiens
MMAEPWQALQLLLAILLTLMALPYQARKKTFLSVHEVMAVENYAKDSLQWITDQYNKESDDKYHFRIFRVLKVQRQQVNCFFSVFAVPWFEQYKILNKSCSSD

SEQ ID NO: 3642 - protein, 138 aa, Homo Sapiens
MMAEPWQALQLLLAILLTLMALPYQARKKTFLSVHEVMAVENYAKDSLQWITDQYNKESDDKYHFRIFRVLKVQRQVTDHLEYHLNVEMQWTTCQKPETTNCVPQERELHKQVNCFFSVFAVPWFEQYKILNKSCSSD

SEQ ID NO: 3643 - protein, 141 aa, Homo Sapiens
MAWPLCTLLLLLATQAVALAWSPQEEDRIIEGGIYDADLNDERVQRALHFVISEYNKATEDEYYRRLLRVLRAREQIVGGVNYFFDIEVGRTICTKSQPNLDTCAFHEQPELQKKQLCSFQIYEVPWEDRMSLVNSRCQEA

SEQ ID NO: 3644 - protein, 146 aa, Homo Sapiens
MAGPLRAPLLLLAILAVALAVSPAAGSSPGKPPRLVGGPMDASVEEEGVRRALDFAVGEYNKASNDMYHSRALQVVRARKQIVAGVNYFLDVELGRTTCTKTQPNLDNCPFHDQPHLKRKAFCSFQIYAVPWQGTMTLSKSTCQDA

SEQ ID NO: 3645 - protein, 146 aa, Homo Sapiens; identical to SEQ ID NO: 3644

SEQ ID NO: 3646 - protein, 146 aa, Homo Sapiens; identical to SEQ ID NO: 3644

SEQ ID NO: 3647 - protein, 141 aa, Homo Sapiens
MARPLCTLLLLMATLAGALASSSKEENRIIPGGIYDADLNDEWVQRALHFAISEYNKATEDEYYRRPLQVLRAREQTFGGVNYFFDVEVGRTICTKSQPNLDTCAFHEQPELQKKQLCSFEIYEVPWEDRMSLVNSRCQEA

SEQ ID NO: 3648 - protein, 142 aa, Homo Sapiens
MMWPMHTPLLLLTALMVAVAGSASAQSRTLAGGIHATDLNDKSVQCALDFAISEYNKVINKDEYYSRPLQVMAAYQQIVGGVNYYFNVKFGRTTCTKSQPNLDNCPFNDQPKLKEEEFCSFQINEVPWEDKISILNYKCRKV

SEQ ID NO: 3649 - protein, 149 aa, Homo Sapiens
MARSNLPLALGLALVAFCLLALPRDARARPQERMVGELRDLSPDDPQVQKAAQAAVASYNMGSNSIYYFRDTHIIKAQSQLVAGIKYFLTMEMGSTDCRKTRVTGDHVDLTTCPLAAGAQQEKLRCDFEVLVVPWQNSSQLLKHNCVQM

SEQ ID NO: 3650 - protein, 145 aa, Homo Sapiens
MRAAGTLLAFCCLVLSTTGGPSPDTCSQDLNSRVKPGFPKTIKTNDPGVLQAARYSVEKFNNCTNDMFLFKESRITRALVQIVKGLKYMLEVEIGRTTCKKNQHLRLDDCDFQTNHTLKQTLSCYSEVWVVPWLQHFEVPVLRCH

SEQ ID NO: 3651 - protein, 134 aa, Homo Sapiens
MPRCRWLSLILLTIPLALVARKDPKKNETGVLRKLKPVNASNANVKQCLWFAMQEYNKESEDKYVFLVVKTLQAQLQVTNLLEYLIDVEIARSDCRKPLSTNEICAIQENSKLKRKLSCSFLVGALPWNGEFTV

SEQ ID NO: 3652 - protein, 142 aa, Homo Sapiens
MPRCRWLSLILLTIPLALVARKDPKKNETGVLRKLKPVNASNANVKQCLWFAMQEYNKESEDKYVFLVVKTLQAQLQVTNLLEYLIDVEIARSDCRKPLSTNEICAIQENSKLKRKLSCSFLVGALPWNGEFTVMEKKCEDA

SEQ ID NO: 3653 - protein, 159 aa, Homo Sapiens
MSSPQRRKAMPWALSLLLMGFQLLVTYAWCSEEEMGGNNKIVQDPMFLATVEFALNTFNVQSKEEHAYRLLRVLSSWREDSMDRKWRGKMVFSMNLQLRQTVCRKFEDDIDNCPFQESLELNNVRQGISFPQVHSCGCCMGCGVGTGAADKAIPRDKGK

SEQ ID NO: 3654 - protein, 147 aa, Homo Sapiens
MLGLPWKGGLSWALLLLLLGSQILLIYAWHFHEQRDCDEHNVMARYLPATVEFAVHTFNQQSKDYYAYRLGHILNSWKEQVESKTVFSMELLLGRTRCGKFEDDIDNCHFQESTELNNTFTCFFTISTRPWMTQFSLLNKTCLEGFH

SEQ ID NO: 3655 - protein, 145 aa, Homo Sapiens
MGIGCWRNPLLLLIALVLSAKLGHFQRWEGFQQKLMSKKNMNSTLNFFIQSYNNASNDTYLYRVQRLIRSQMQLTTGVEYIVTVKIGWTKCKRNDTSNSSCPLQSKKLRKSLICESLIYTMPWINYFQLWNNSCLEAEHVGRNLR

SEQ ID NO: 3656 - protein, 145 aa, Homo Sapiens; identical to SEQ ID NO: 3655

SEQ ID NO: 3657 - protein, 37 aa, Homo Sapiens
MNSTLNFFIQSYNNASNDTYLYRVQRLIRSQMQQVHC

SEQ ID NO: 3658 - protein, 242 aa, Homo Sapiens
MLRLLRLALAFYGRTADPAERQGPQQQGLPQGDTQLTTVQGVVTSFCGDYGMIDESIYFSSDVVTGNVPLKVGQKVNVVVEEDKPHYGLRAIKVDVVPRHLYGAGPSDSGTRVLIGCVTSINEDNIYISNSIYFSIAIVSEDFVPYKGDLLEVEYSTEPGISNIKATSVKPIRCIHTEEVCITSVHGRNGVIDYTIFFTLDSVKLPDGYVPQVDDIVNVVMVESIQFCFIWRAISITPVHKS

SEQ ID NO: 3659 - protein, 264 aa, Homo Sapiens
MLRLLRLALAFYGRTADPAERQGPQQQGLPQGDTQLTTVQGVVTSFCGDYGMIDESIYFSSDVVTGNVPLKVGQKVNVVVEEDKPHYGLRAIKVDVVPRHLYGAGPSDSGTRVLIGCVTSINEDNIYISNSIYFSIAIVSEDFVPYKGDLLEVEYSTEPGISNIKATSVKPIRCIHTEEVCITSVHGRNGVIDYTIFFTLDSVKLPDGYVPQVDDIVNVVMVESIQFCFIWRAISITPVHKSSSGFQDDGGLGRPKRERRSQSI

SEQ ID NO: 3660 - protein, 385 aa, Homo Sapiens
MSRPQLRRWRLVSSPPSGVPGLALLALLALLALRLAAGTDCPCPEPELCRPIRHHPDFEVFVFDVGQKTWKSYDWSQITTVATFGKYDSELMCYAHSKGARVVLKGDVSLKDIIDPAFRASWIAQKLNLAKTQYMDGINIDIEQEVNCLSPEYDALTALVKETTDSFHREIEGSQVTFDVAWSPKNIDRRCYNYTGIADACDFLFVMSYDEQSQIWSECIAAANAPYNQTLTGYNDYIKMSINPKKLVMGVPWYGYDYTCLNLSEDHVCTIAKVPFRGAPCSDAAGRQVPYKTIMKQINSSISGNLWDKDQRAPYYNYKDPAGHFHQVWYDNPQSISLKATYIQNYRLRGIGMWNANCLDYSGDAVAKQQTEEMWEVLKPKLLQR

SEQ ID NO: 3661 - protein, 77 aa, Homo Sapiens
MSRPQLRRWRLVSSPPSGVPGLALLALLALLALRLAAGTDCPCPEPELCRPIRHHPDFEVSAFLCSSRSGLQGTKRS

SEQ ID NO: 3662 - protein, 77 aa, Homo Sapiens; identical to SEQ ID NO: 3661

SEQ ID NO: 3663 - protein, 349 aa, Homo Sapiens
MTAASMGPVRVAFVVLLALCSRPAVGQNCSGPCRCPDEPAPRCPAGVSLVLDGCGCCRVCAKQLGELCTERDPCDPHKGLFCHFGSPANRKIGVCTAKDGAPCIFGGTVYRSGESFQSSCKYQCTCLDGAVGCMPLCSMDVRLPSPDCPFPRRVKLPGKCCEEWVCDEPKDQTVVGPALAAYRLEDTFGPDPTMIRANCLVQTTEWSACSKTCGMGISTRVTNDNASCRLEKQSRLCMVRPCEADLEENIKKGKKCIRTPKISKPIKFELSGCTSMKTYRAKFCGVCTDGRCCTPHRTTTLPVEFKCPDGEVMKKNMMFIKTCACHYNCPGDNDIFESLYYRKMYGDMA

SEQ ID NO: 3664 - protein, 243 aa, Homo Sapiens
MRPQGPAASPQRLRGLLLLLLLQLPAPSSASEIPKGKQKAQLRQREVVDLYNGMCLQGPAGVPGRDGSPGANGIPGTPGIPGRDGFKGEKGECLRESFEESWTPNYKQCSWSSLNYGIDLGKIAECTFTKMRSNSALRVLFSGSLRLKCRNACCQRWYFTFNGAECSGPLPIEAIIYLDQGSPEMNSTINIHRTSSVEGLCEGIGAGLVDVAIWVGTCSDYPKGDASTGWNSVSRIIIEELPK

SEQ ID NO: 3665 - protein, 147 aa, Homo Sapiens
MRPQGPAASPQRLRGLLLLLLLQLPAPSSASEIPKGKQKAQLRQREVVDLYNGMCLQGPAGVPGRDGSPGANGIPGTPGIPGRDGFKGEKGECLRESFEESWTPNYKQCSWSSLNYGIDLGKIAVSLNYFKIEARFKGFHILVLIFR

SEQ ID NO: 3666 - protein, 113 aa, Homo Sapiens
MRSNSALRVLFSGSLRLKCRNACCQRWYFTFNGAECSGPLPIEAIIYLDQGSPEMNSTINIHRTSSVEGLCEGIGAGLVDVAIWVGTCSDYPKGDASTGWNSVSRIIIEELPK

SEQ ID NO: 3667 - protein, 229 aa, Homo Sapiens
MWPPGRSITVKLREKTVSRKLEMNGPSAFQGLICGKYNGMCLQGPAGVPGRDGSPGANGIPGTPGIPGRDGFKGEKGECLRESFEESWTPNYKQCSWSSLNYGIDLGKIAECTFTKMRSNSALRVLFSGSLRLKCRNACCQRWYFTFNGAECSGPLPIEAIIYLDQGSPEMNSTINIHRTSSVEGLCEGIGAGLVDVAIWVGTCSDYPKGDASTGWNSVSRIIIEELPK

SEQ ID NO: 3668 - protein, 174 aa, Homo Sapiens
MACLGFQRHKAQLNLATRTWPCTLLFFLLFIPVFCKAMHVAQPAVVLASSRGIASFVCEYASPGKATEVRVTVLRQADSQVTEVCAATYMMGNELTFLDDSICTGTSSGNQVNLTIQGLRAMDTGLYICKVELMYPPPYYLGIGNGTQIYVIAKEKKPSYNRGLCENAPNRARM

SEQ ID NO: 3669 - protein, 223 aa, Homo Sapiens
MACLGFQRHKAQLNLATRTWPCTLLFFLLFIPVFCKAMHVAQPAVVLASSRGIASFVCEYASPGKATEVRVTVLRQADSQVTEVCAATYMMGNELTFLDDSICTGTSSGNQVNLTIQGLRAMDTGLYICKVELMYPPPYYLGIGNGTQIYVIDPEPCPDSDFLLWILAAVSSGLFFYSFLLTAVSLSKMLKKRSPLTTGVYVKMPPTEPECEKQFQPYFIPIN

SEQ ID NO: 3670 - protein, 79 aa, Homo Sapiens
MACLGFQRHKAQLNLATRTWPCTLLFFLLFIPVFCKAMHVAQPAVVLASSRGIASFVSKEKKPSYNRGLCENAPNRARM

SEQ ID NO: 3671 - protein, 137 aa, Homo Sapiens
MHVAQPAVVLASSRGIASFVCEYASPGKATEVRVTVLRQADSQVTEVCAATYMMGNELTFLDDSICTGTSSGNQVNLTIQGLRAMDTGLYICKVELMYPPPYYLGIGNGTQIYVIAKEKKPSYNRGLCENAPNRARM

SEQ ID NO: 3672 - protein, 53 aa, Homo Sapiens
MIRNWLTIFILFPLKLVEKCESSVSLTVPPVVKLENGSSTNVSLTLRLWCLLE

SEQ ID NO: 3673 - protein, 75 aa, Homo Sapiens
MIRNWLTIFILFPLKLVEKCESSVSLTVPPVVKLENGSSTNVSLTLRPPLNATLVITFEITFRSKNITILELPDE

SEQ ID NO: 3674 - protein, 122 aa, Homo Sapiens
MIRNWLTIFILFPLKLVEKCESSVSLTVPPVVKLENGSSTNVSLTLRPPLNATLVITFEITFRSKNITILELPDELVEAGGEECRDEISSHEAHQDGLQISSEPPRKQTGVKHDQSPACGNL

SEQ ID NO: 3675 - protein, 163 aa, Homo Sapiens
MIRNWLTIFILFPLKLVEKCESSVSLTVPPVVKLENGSSTNVSLTLRPPLNATLVITFEITFRSKNITILELPDEVVVPPGVTNSSFQVTSQNVGQLTVYLHGNHSNQTGPRIRFLVIRSSAISIINQVIGWIYFVAWSISFYPQVIMNWRRKSVIGLSFDFV

SEQ ID NO: 3676 - protein, 367 aa, Homo Sapiens
MIRNWLTIFILFPLKLVEKCESSVSLTVPPVVKLENGSSTNVSLTLRPPLNATLVITFEITFRSKNITILELPDEVVVPPGVTNSSFQVTSQNVGQLTVYLHGNHSNQTGPRIRFLVIRSSAISIINQVIGWIYFVAWSISFYPQVIMNWRRKSVIGLSFDFVALNLTGFVAYSVFNIGLLWVPYIKEQFLLKYPNGVNPVNSNDVFFSLHAVVLTLIIIVQCCLYERGGQRVSWPAIGFLVLAWLFAFVTMIVAAVGVTTWLQFLFCFSYIKLAVTLVKYFPQAYMNFYYKSTEGWSIGNVLLDFTGGSFSLLQMFLQSYNNDQWTLIFGDPTKFGLGVFSIVFDVVFFIQHFCLYRKRPGYDQLN

SEQ ID NO: 3677 - protein, 400 aa, Homo Sapiens
MIRNWLTIFILFPLKLVEKCESSVSLTVPPVVKLENGSSTNVSLTLRPPLNATLVITFEITFRSKNITILELPDEVVVPPGVTNSSFQVTSQNVGQLTVYLHGNHSNQTGPRIRFLVIRSSAISIINQVIGWIYFVAWSISFYPQVIMNWRRKSVIGLSFDFVALNLTGFVAYSVFNIGLLWVPYIKEQFLLKYPNGVNPVNSNDVFFSLHAVVLTLIIIVQCCLYERGGQRVSWPAIGFLVLAWLFAFVTMIVAAVGVTTWLQFLFCFSYIKLAVTLVKYFPQAYMNFYYKSTEGWSIGNVLLDFTGGSFSLLQMFLQSYNNDQWTLIFGDPTKFGLGVFSIVFDVVFFIQHFCLYRKRPGLQAARTGSGSRLRQDWAPSLQPKALPQTTSVSASSLKG

SEQ ID NO: 3678 - protein, 20 aa, Homo Sapiens
MNWRRKSVIGLSFDFVALNL

SEQ ID NO: 3679 - protein, 28 aa, Homo Sapiens
MNWRRKSVIGLSFDFVALNLTGFVAYSV

SEQ ID NO: 3680 - protein, 263 aa, Homo Sapiens
MASLWLLSCFSLVGAAFGCGVPAIHPVLSGLSRIVNGEDAVPGSWPWQVSLQDKTGFHFCGGSLISEDWVVTAAHCGVRTSDVVVAGEFDQGSDEENIQVLKIAKVFKNPKFSILTVNNDITLLKLATPARFSQTVSAVCLPSADDDFPAGTLCATTGWGKTKYNANKTPDKLQQAALPLLSNAECKKSWGRRITDVMICAGASGVSSCMGDSGGPLVCQKDGAWTLVGIVSWGSDTCSTSSPGVYARVTKLIPWVQKILAAN

SEQ ID NO: 3681 - protein, 182 aa, Homo Sapiens
MCQGGPELASVDWGRTGRAARRQVRPRWVWGLSPYSPHSPPGCGVPAIHPVLSGLSRIVNGEDAVPGSWPWQVSLQDKTGFHFCGGSLISEDWVVTAAHCGVRTSDVVVAGEFDQGSDEENIQVLKIAKVFKNPKFSILTVNNDITLLKLATPARFSQTVSAVCLPSADDDFPAGTLCATTG

SEQ ID NO: 3682 - protein, 16 aa, Homo Sapiens
  misc_feature (1)..(1): Xaa can be any naturally occurring amino acid
XVTKLIPWVQKILAAN

SEQ ID NO: 3683 - protein, 114 aa, Homo Sapiens
DKTGFHFCGGSLISEDWVVTAAHCGVRTSDVVVAGEFDQGSDEENIQVLKIAKVFKNPKFSILTVNNDITLLKLATPARFSQTVSAVCLPSADDDFPAGTLCATTGWGKTKYNG

SEQ ID NO: 3684 - protein, 168 aa, Homo Sapiens
EFDQGSDEENIQVLKIAKVFKNPKFSILTVNNDITLLKLATPARFSQTVSAVCLPSADDDFPAGTLCATTGWGKTKYNANKTPDKLQQAALPLLSNAECKKSWGRRITDVMICAGGDSGGPLVCQKDGAWTLVGIVSWGSRTCSTTTPAVYARVAKLIPWVQKILAAN

SEQ ID NO: 3685 - protein, 263 aa, Homo Sapiens
MAFLWLLSCWALLGTTFGCGVPAIHPVLSGLSRIVNGEDAVPGSWPWQVSLQDKTGFHFCGGSLISEDWVVTAAHCGVRTSDVVVAGEFDQGSDEENIQVLKIAKVFKNPKFSILTVNNDITLLKLATPARFSQTVSAVCLPSADDDFPAGTLCATTGWGKTKYNANKTPDKLQQAALPLLSNAECKKSWGRRITDVMICAGASGVSSCMGDSGGPLVCQKDGAWTLVGIVSWGSRTCSTTTPAVYARVAKLIPWVQKILAAN

SEQ ID NO: 3686 - protein, 137 aa, Homo Sapiens
VAGEFDQGSDEENIQVLKIAKVFKNPKFSILTVNNDITLLKLATPARFSQTVSAVCLPSADDDFPAGTLCATTGWGKTKYNANKTPDKLQQAALPLLSNAECKKSWGRRITDVMICAGASGVSSCMVRLALPRPWPG

SEQ ID NO: 3687 - protein, 268 aa, Homo Sapiens [sequence omitted]

SEQ ID NO: 3688 - protein, 69 aa, Homo Sapiens
MLGITVLAALLACATPGPTVWPWERTTWRWKTKKDPCLWVWTPSTSTRDGMPSCCAMILPSSSLQSMWS

SEQ ID NO: 3689 - protein, 190 aa, Homo Sapiens
MLLLSLTLSLVLLGSSWGCGIPAIKPALSFSQRIVNGENAVLGSWPWQVSLQDSSGFHFCGGSLISQSWVVTAAHCNVSPGRHFVVLGEYDRSSNAEPLQVLSVSRAITHPSWNSTTMNNDVTLLKLASPAQYTTRISPVCLASSNEALLSARRETHGCLLVLSPGAPKTAMCAHLLCILELASSAPGST

SEQ ID NO: 3690 - protein, 264 aa, Homo Sapiens
MLLLSLTLSLVLLGSSWGCGIPAIKPALSFSQRIVNGENAVLGSWPWQVSLQDSSGFHFCGGSLISQSWVVTAAHCNVSPGRHFVVLGEYDRSSNAEPLQVLSVSRAITHPSWNSTTMNNDVTLLKLASPAQYTTRISPVCLASSNEALTEGLTCVTTGWGRLSGVGNVTPAHLQQVALPLVTVNQCRQYWGSSITDSMICAGGAGASSCQGDSGGPLVCQKGNTWVLIGIVSWGTKNCNVRAPAVYTRVSKFSTWINQVIAYN

SEQ ID NO: 3691 - protein, 190 aa, Homo Sapiens
MLLLSLTLSLVLLGSSWGQQRLPLLRWFSHQPVLGGHCCPLQCQVLSVSRVSAWAADTEEKWAVQAITHPSWNSTTMNNDVTLLKLASPAQYTTRISPVCLASSNEALTEGLTCVTTGWGRLSGVGNVTPAHLQQVALPLVTVNQCRQYWGSSITDSMICAGGAGASSCQGDSGGPLVCQKGNTWVLIGI

SEQ ID NO: 3692 - protein, 110 aa, Homo Sapiens
MIRAAPPPLFLLLLLLLLLVSWASRGEAAPDQDEIQRLPGLAKQPSFRQYSGYLKGSGSKHLHYWFVESQKDPENSPVVLWLNGGPGCSSLDGLLTEHGPFLVQPDGVTL

SEQ ID NO: 3693 - protein, 480 aa, Homo Sapiens
MIRAAPPPLFLLLLLLLLLVSWASRGEAAPDQDEIQRLPGLAKQPSFRQYSGYLKGSGSKHLHYWFVESQKDPENSPVVLWLNGGPGCSSLDGLLTEHGPFLVQPDGVTLEYNPYSWNLIANVLYLESPAGVGFSYSDDKFYATNDTEVAQSNFEALQDFFRLFPEYKNNKLFLTGESYAGIYIPTLAVLVMQDPSMNLQGLAVGNGLSSYEQNDNSLVYFAYYHGLLGNRLWSSLQTHCCSQNKCNFYDNKDLECVTNLQEVARIVGNSGLNIYNLYAPCAGGVPSHFRYEKDTVVVQDLGNIFTRLPLKRMWHQALLRSGDKVRMDPPCTNTTAASTYLNNPYVRKALNIPEQLPQWDMCNFLVNLQYRRLYRSMNSQYLKLLSSQKYQILLYNGDVDMACNFMGDEWFVDSLNQKMEVQRRPWLVKYGDSGEQIAGFVKEFSHIAFLTIKGAGHMVPTDKPLAAFTMFSRFLNKQPY

SEQ ID NO: 3694 - protein, 480 aa, Homo Sapiens; identical to SEQ ID NO: 3693

SEQ ID NO: 3695 - protein, 480 aa, Homo Sapiens; identical to SEQ ID NO: 3693

SEQ ID NO: 3696 - protein, 82 aa, Homo Sapiens
MTSSPRAPPGEQGRGGAEMIRAAPPPLFLLLLLLLLLVSWASRGEAAPDQDEIQRLPGLAKQPSFRQYSGYLKGSGSKHLHY

SEQ ID NO: 3697 - protein, 481 aa, Homo Sapiens
MTSSPRAPPGEQGRGGAEMIRAAPPPLFLLLLLLLLLVSWASRGEAAPDQDEIQRLPGLAKQPSFRQYSGYLKGSGSKHLHYWFVESQKDPENSPVVLWLNGGPGCSSLDGLLTEHGPFLIANVLYLESPAGVGFSYSDDKFYATNDTEVAQSNFEALQDFFRLFPEYKNNKLFLTGESYAGIYIPTLAVLVMQDPSMNLQGLAVGNGLSSYEQNDNSLVYFAYYHGLLGNRLWSSLQTHCCSQNKCNFYDNKDLECVTNLQEVARIVGNSGLNIYNLYAPCAGGVPSHFRYEKDTVVVQDLGNIFTRLPLKRMWHQALLRSGDKVRMDPPCTNTTAASTYLNNPYVRKALNIPEQLPQWDMCNFLVNLQYRRLYRSMNSQYLKLLSSQKYQILLYNGDVDMACNFMGDEWFVDSLNQKMEVQRRPWLVKYGDSGEQIAGFVKEFSHIAFLTIKGAGHMVPTDKPLAAFTMFSRFLNKQPY

SEQ ID NO: 3698 - protein, 498 aa, Homo Sapiens
MTSSPRAPPGEQGRGGAEMIRAAPPPLFLLLLLLLLLVSWASRGEAAPDQDEIQRLPGLAKQPSFRQYSGYLKGSGSKHLHYWFVESQKDPENSPVVLWLNGGPGCSSLDGLLTEHGPFLVQPDGVTLEYNPYSWNLIANVLYLESPAGVGFSYSDDKFYATNDTEVAQSNFEALQDFFRLFPEYKNNKLFLTGESYAGIYIPTLAVLVMQDPSMNLQGLAVGNGLSSYEQNDNSLVYFAYYHGLLGNRLWSSLQTHCCSQNKCNFYDNKDLECVTNLQEVARIVGNSGLNIYNLYAPCAGGVPSHFRYEKDTVVVQDLGNIFTRLPLKRMWHQALLRSGDKVRMDPPCTNTTAASTYLNNPYVRKALNIPEQLPQWDMCNFLVNLQYRRLYRSMNSQYLKLLSSQKYQILLYNGDVDMACNFMGDEWFVDSLNQKMEVQRRPWLVKYGDSGEQIAGFVKEFSHIAFLTIKGAGHMVPTDKPLAAFTMFSRFLNKQPY

SEQ ID NO: 3699 - protein, 231 aa, Homo Sapiens
MTSSPRAPPGEQGRGGAEMIRAAPPPLFLLLLLLLLLVSWASRGEAAPDQDEIQRLPGLAKQPSFRQYSGYLKGSGSKHLHYWFVESQKDPENSPVVLWLNGGPGCSSLDGLLTEHGPFLVQPDGVTLEYNPYSWNLIANVLYLESPAGVGFSYSDDKFYATNDTEVAQSNFEALQDFFRLFPEYKNNKLFLTGESYAGIYIPTLAVLVMQDPSMNLQVQGAGCGQWTLLL

SEQ ID NO: 3700 - protein, 202 aa, Homo Sapiens
QDFFRLFPEYKNNKLFLTGESYAGIYIPTLAVLVMQDPSMNLQGLAVGNGLSSYEQNDNSLVYFAYYHGLLGNRLWSSLQTHCCSQNKCNFYDNKDLECVTNLQEVARIVGNSGLNIYNLYAPCAGGVPSHFRTLLWSRIWATSSLACHSSGCGIRHCCAQGIKCAWTPPAPTQQLLPPTSTTRTCGRPSTSRSSCHNGTCA

SEQ ID NO: 3701 - protein, 21 aa, Homo Sapiens
MWQLWASLCCLLVLANARSRP

SEQ ID NO: 3702 - protein, 32 aa, Homo Sapiens
MWQLWASLCCLLVLANARSRPSFHPLSDELVN

SEQ ID NO: 3703 - protein, 55 aa, Homo Sapiens
MWQLWASLCCLLVLANARSRPSFHPLSDELVNYVNKRNTTWQAGHNFYNVDMSYL

SEQ ID NO: 3704 - protein, 68 aa, Homo Sapiens
MWQLWASLCCLLVLANARSRPSFHPLSDELVNYVNKRNTTWQAGHNFYNVDMSYLKRLCGTFLGGPKP

SEQ ID NO: 3705 - protein, 70 aa, Homo Sapiens
MWQLWASLCCLLVLANARSRPSFHPLSDELVNYVNKRNTTWQAGHNFYNVDMSYLKRLCGTFLGGPKPPQ

SEQ ID NO: 3706 - protein, 70 aa, Homo Sapiens; identical to SEQ ID NO: 3705

SEQ ID NO: 3707 - protein, 92 aa, Homo Sapiens
MWQLWASLCCLLVLANARSRPSFHPLSDELVNYVNKRNTTWQAGHNFYNVDMSYLKRLCGTFLGGPKPPQRVMFTEDLKLPASFDAREQWPQ

SEQ ID NO: 3708 - protein, 98 aa, Homo Sapiens
MWQLWASLCCLLVLANARSRPSFHPLSDELVNYVNKRNTTWQAGHNFYNVDMSYLKRLCGTFLGGPKPPQRVMFTEDLKLPASFDAREQWPQCPTIKE

SEQ ID NO: 3709 - protein, 101 aa, Homo Sapiens
MWQLWASLCCLLVLANARSRPSFHPLSDELVNYVNKRNTTWQAGHNFYNVDMSYLKRLCGTFLGGPKPPQRVMFTEDLKLPASFDAREQWPQCPTIKEIRD

SEQ ID NO: 3710 - protein, 136 aa, Homo Sapiens
MWQLWASLCCLLVLANARSRPSFHPLSDELVNYVNKRNTTWQAGHNFYNVDMSYLKRLCGTFLGGPKPPQRVMFTEDLKLPASFDAREQWPQCPTIKEIRDQGSCGSCWAFGAVEAISDRICIHTNAHVSVEVSAE

SEQ ID NO: 3711 - protein, 143 aa, Homo Sapiens
MWQLWASLCCLLVLANARSRPSFHPLSDELVNYVNKRNTTWQAGHNFYNVDMSYLKRLCGTFLGGPKPPQRVMFTEDLKLPASFDAREQWPQCPTIKEIRDQGSCGSCWAFGAVEAISDRICIHTNAHVSVEVSAEDLLTCCG

SEQ ID NO: 3712 - protein, 143 aa, Homo Sapiens; identical to SEQ ID NO: 3711

SEQ ID NO: 3713 - protein, 149 aa, Homo Sapiens
MWQLWASLCCLLVLANARSRPSFHPLSDELVNYVNKRNTTWQAGHNFYNVDMSYLKRLCGTFLGGPKPPQRVMFTEDLKLPASFDAREQWPQCPTIKEIRDQGSCGSCWAFGAVEAISDRICIHTNAHVSVEVSAEDLLTCCGSMCGDG

SEQ ID NO: 3714 - protein, 165 aa, Homo Sapiens
MWQLWASLCCLLVLANARSRPSFHPLSDELVNYVNKRNTTWQAGHNFYNVDMSYLKRLCGTFLGGPKPPQRVMFTEDLKLPASFDAREQWPQCPTIKEIRDQGSCGSCWAFGAVEAISDRICIHTNAHVSVEVSAEDLLTCCGSMCGDGCNGGYPAEAWNFWTRK

SEQ ID NO: 3715 - protein, 170 aa, Homo Sapiens
MWQLWASLCCLLVLANARSRPSFHPLSDELVNYVNKRNTTWQAGHNFYNVDMSYLKRLCGTFLGGPKPPQRVMFTEDLKLPASFDAREQWPQCPTIKEIRDQGSCGSCWAFGAVEAISDRICIHTNAHVSVEVSAEDLLTCCGSMCGDGCNGGYPAEAWNFWTRKGLVSG

SEQ ID NO: 3716 - protein, 175 aa, Homo Sapiens
MWQLWASLCCLLVLANARSRPSFHPLSDELVNYVNKRNTTWQAGHNFYNVDMSYLKRLCGTFLGGPKPPQRVMFTEDLKLPASFDAREQWPQCPTIKEIRDQGSCGSCWAFGAVEAISDRICIHTNAHVSVEVSAEDLLTCCGSMCGDGCNGGYPAEAWNFWTRKGLVSGGLYES

SEQ ID NO: 3717 - protein, 339 aa, Homo Sapiens
MWQLWASLCCLLVLANARSRPSFHPLSDELVNYVNKRNTTWQAGHNFYNVDMSYLKRLCGTFLGGPKPPQRVMFTEDLKLPASFDAREQWPQCPTIKEIRDQGSCGSCWAFGAVEAISDRICIHTNAHVSVEVSAEDLLTCCGSMCGDGCNGGYPAEAWNFWTRKGLVSGGLYESHVGCRPYSIPPCEHHVNGSRPPCTGEGDTPKCSKICEPGYSPTYKQDKHYGYNSYSVSNSEKDIMAEIYKNGPVEGAFSVYSDFLLYKSGVYQHVTGEMMGGHAIRILGWGVENGTPYWLVANSWNTDWGDNGFFKILRGQDHCGIESEVVAGIPRTDQYWEKI

SEQ ID NO: 3718 - protein, 339 aa, Homo Sapiens; identical to SEQ ID NO: 3717

SEQ ID NO: 3719 - protein, 339 aa, Homo Sapiens; identical to SEQ ID NO: 3717

SEQ ID NO: 3720 - protein, 339 aa, Homo Sapiens; identical to SEQ ID NO: 3717

SEQ ID NO: 3721 - protein, 339 aa, Homo Sapiens; identical to SEQ ID NO: 3717

SEQ ID NO: 3722 - protein, 339 aa, Homo Sapiens; identical to SEQ ID NO: 3717

SEQ ID NO: 3723 - protein, 339 aa, Homo Sapiens; identical to SEQ ID NO: 3717

SEQ ID NO: 3724 - protein, 110 aa, Homo Sapiens
MWQLWASLCCLLVLANARSRPSFHPLSDELVNYVNKRNTTWQAGHNFYNVDMSYLKRLCGTFLGGPKPPQRVMFTEDLKLPASFDAREQWPQCPTIKEIRDQGSCGSCWL

SEQ ID NO: 3725 - protein, 76 aa, Homo Sapiens
SGVYQHVTGEMMGGHAIRILGWGVENGTPYWLVANSWNTDWGDNGFFKILRGQDHCGIESEVVAGIPRTDQYWEKI

SEQ ID NO: 3726 - protein, 141 aa, Homo Sapiens
MGAGPSLLLAALLLLLSGDGAVRCDTPANCTYLDLLGTWVFQVGSSGSQRDVNCSVMGPQEKKVVVYLQKLDTAYDDLGNSGHFTIIYNQGFEIVLNDYKWFAFFKDVTDFISHLFMQLGTVGIYDLPHLRNKLAMNRRWG

SEQ ID NO: 3727 - protein, 137 aa, Homo Sapiens
MGAGPSLLLAALLLLLSGDGAVRCDTPANCTYLDLLGTWVFQVGSSGSQRDVNCSVMGPQEKKVVVYLQKLDTAYDDLGNSGHFTIIYNQGFEIVLNDYKWFAFFKDVTDFISHLFMQLGTVGIYDLPHLRNKLVIK

SEQ ID NO: 3728 - protein, 463 aa, Homo Sapiens
MGAGPSLLLAALLLLLSGDGAVRCDTPANCTYLDLLGTWVFQVGSSGSQRDVNCSVMGPQEKKVVVYLQKLDTAYDDLGNSGHFTIIYNQGFEIVLNDYKWFAFFKYKEEGSKVTTYCNETMTGWVHDVLGRNWACFTGKKVGTASENVYVNIAHLKNSQEKYSNRLYKYDHNFVKAINAIQKSWTATTYMEYETLTLGDMIRRSGGHSRKIPRPKPAPLTAEIQQKILHLPTSWDWRNVHGINFVSPVRNQASCGSCYSFASMGMLEARIRILTNNSQTPILSPQEVVSCSQYAQGCEGGFPYLIAGKYAQDFGLVEEACFPYTGTDSPCKMKEDCFRYYSSEYHYVGGFYGGCNEALMKLELVHHGPMAVAFEVYDDFLHYKKGIYHHTGLRDPFNPFELTNHAVLLVGYGTDSASGMDYWIVKNSWGTGWGENGYFRIRRGTDECAIESIAVAATPIPKL

SEQ ID NO: 3729 - protein, 36 aa, Homo Sapiens
  misc_feature (1)..(1): Xaa can be any naturally occurring amino acid
XDVTDFISHLFMQLGTVGIYDLPHLRNKLAMNRRWG

SEQ ID NO: 3730 - protein, 245 aa, Homo Sapiens
  misc_feature (1)..(1): Xaa can be any naturally occurring amino acid
XVVDSPLARSARLPGPQEKKVVVYLQKLDTAYDDLGNSGHFTIIYNQGFEIVLNDYKWFAFFKYKEEGSKVTTYCNETMTGWVHDVLGRNWACFTGKKVGTASENVYVNIAHLKNSQEKYSNRLYKYDHNFVKAINAIQKSWTATTYMEYETLTLGDMIRRSGGHSRKIPRPKPAPLTAEIQQKILHLPTSWDWRNVHGINFVSPVRNQASCGSCYSFASMGMLEARIRILTNNSQTPILSPQEV

SEQ ID NO: 3731 - protein, 299 aa, Homo Sapiens
MPRPVVDRIPLHKFTSIRRTMSEVGGSVEDLIAKGPVSKYSQAVPAVTEGPIPEVLKNYMDAQYYGEIGIGTPPQCFTVVFDTGSSNLWVPSIHCKLLDIACWIHHKYNSDKSSTYVKNGTSFDIHYGSGSLSGYLSQDTVSVPCQSASSASALGGVKVERQVFGEATKQPGITFIAAKFDGILGMAYPRISVNNVLPVFDNLMQQKLVDQNIFSFYLSRDPDAQPGGELMLGGTDSKYYKGSLSYLNVTRKAYWQVHLDQVEVASGLTLCKEGCEAIVDTGTSLMVGPVDEVRELQKA

SEQ ID NO: 3732 - protein, 405 aa, Homo Sapiens
MQPSSLLPLALCLLAAPASALVRIPLHKFTSIRRTMSEVGGSVEDLIAKGPVSKYSQAVPAVTEGPIPEAQYYGEIGIGTPPQCFTVVFDTGSSNLWVPSIHCKLLDIACWIHHKYNSDKSSTYVKNGTSFDIHYGSGSLSGYLSQDTVSVPCQSASSASALGGVKVERQVFGEATKQPGITFIAAKFDGILGMAYPRISVNNVLPVFDNLMQQKLVDQNIFSFYLSRDPDAQPGGELMLGGTDSKYYKGSLSYLNVTRKAYWQVHLDQVEVASGLTLCKEGCEAIVDTGTSLMVGPVDEVRELQKAIGAVPLIQGEYMIPCEKVSTLPAITLKLGGKGYKLSPEDYTLKVSQAGKTLCLSGFMGMDIPPPSGPLWILGDVFIGRYYTVFDRDNNRVGFAEAARL

SEQ ID NO: 3733 - protein, 412 aa, Homo Sapiens
MQPSSLLPLALCLLAAPASALVRIPLHKFTSIRRTMSEVGGSVEDLIAKGPVSKYSQAVPAVTEGPIPEVLKNYMDAQYYGEIGIGTPPQCFTVVFDTGSSNLWVPSIHCKLLDIACWIHHKYNSDKSSTYVKNGTSFDIHYGSGSLSGYLSQDTVSVPCQSASSASALGGVKVERQVFGEATKQPGITFIAAKFDGILGMAYPRISVNNVLPVFDNLMQQKLVDQNIFSFYLSRDPDAQPGGELMLGGTDSKYYKGSLSYLNVTRKAYWQVHLDQVEVASGLTLCKEGCEAIVDTGTSLMVGPVDEVRELQKAIGAVPLIQGEYMIPCEKVSTLPAITLKLGGKGYKLSPEDYTLKVSQAGKTLCLSGFMGMDIPPPSGPLWILGDVFIGRYYTVFDRDNNRVGFAEAARL

SEQ ID NO: 3734 - protein, 276 aa, Homo Sapiens
MQPSSLLPLALCLLAAPASALVRIPLHKFTSIRRTMSEVGGSVEDLIAKGPVSKYSQAVPAVTEGPIPEVLKNYMDAQYYGEIGIGTPPQCFTVVFDTGSSNLWVPSIHCKLLDIACWIHHKYNSDKSSTYVKNGTSFDIHYGSGSLSGYLSQDTVSVPCQSASSASALGGVKVERQVFGEATKQPGITFIAAKFDGILGMAYPRISVNNVLPVFDNLMQQKLVDQNIFSFYLSRDPDAQPGGELMLGGTDSKYYKGSLSYLNVTRKAYWQVHLDQ

SEQ ID NO: 3735 - protein, 406 aa, Homo Sapiens
MQPSSLLPLALCLLAAPASALVRIPLHKFTSIRRTMSEVGGSVEDLIAKGPVSKYSQAVPAVTEGPIPEVLKNYMDAQYYGEIGIGTPPQCFTVVFDTGSSNLWVPSIHCKLLDIACWIHHKYNSDKSSTYVKNGTSFDIHYGSGSLSGYLSQDTVSVPCQSASSASALGGVKVERQVFGEATKQPGITFIAAKFDGILGMAYPRISVNNVLPVFDNLMQQKLVDQNIFSFYLSRDPDAQPGGELMLGGTDSKYYKGSLSYLNVTRKAYWVEVASGLTLCKEGCEAIVDTGTSLMVGPVDEVRELQKAIGAVPLIQGEYMIPCEKVSTLPAITLKLGGKGYKLSPEDYTLKVSQAGKTLCLSGFMGMDIPPPSGPLWILGDVFIGRYYTVFDRDNNRVGFAEAARL

SEQ ID NO: 3736 - protein, 405 aa, Homo Sapiens
MQPSSLLPLALCLLAAPASALVRIPLHKFTSIRRTMSEVGGSVEDLIAKGPVSKYSQAVPAVTEGPIPEVLKNYMDAQYYGEIGIGTPPQCFTVVFDTGSSNLWVPSIHCKLLDIACWIHHKYNSDKSSTYVKNGTSFDIHYGSGSLSGYLSQDTVSVPCQSASSASALGGVKVERQVFGEATKQPGITFIAAKFDGILGMAYPRISVNNVLPVFDNLMQQKLVDQNIFSFYLSRDPDAQPGGELMLGGTDSKYYKGSLSYLNVTRKAYWQVHLDQVEVASGLTLCKEGCEAIVDTGTSLMVGPVDEVRELQKAIGAVPLIQGEVSTLPAITLKLGGKGYKLSPEDYTLKVSQAGKTLCLSGFMGMDIPPPSGPLWILGDVFIGRYYTVFDRDNNRVGFAEAARL

SEQ ID NO: 3737 - protein, 409 aa, Homo Sapiens
MQPSSLLPLALCLLAAPASALVRIPLHKFTSIRRTMSEVGGSVEDLIAKGPVSKYSQAVPAVTEGPIPEVLKNYMDAQYYGEIGIGTPPQCFTVVFDTGSSNLWVPSIHCKLLDIACWIHHKYNSDKSSTYVKNGTSFDIHYGSGSLSGYLSQDTVSVPCQSASSASALGGVKVERQVFGEATKQPGITFIAAKFDGILGMAYPRISVNNVLPVFDNLMQQKLVDQNIFSFYLSRDPDAQPGGELMLGGTDSKYYKGSLSYLNVTRKAYWQVHLDQVEVASGLTLCKEGCEAIVDTGTSLMVGPVDEVRELQKAIGAVPLIQGEYMIPCEKVSTLPAITLKLGGKGYKLSPEDYTLKAGKTLCLSGFMGMDIPPPSGPLWILGDVFIGRYYTVFDRDNNRVGFAEAARL

SEQ ID NO: 3738 - protein, 410 aa, Homo Sapiens
MQPSSLLPLALCLLAAPASALVRIPLHKFTSIRRTMSEVGGSVEDLIAKGPVSKYSQAVPAVTEGPIPEVLKNYMDYYGEIGIGTPPQCFTVVFDTGSSNLWVPSIHCKLLDIACWIHHKYNSDKSSTYVKNGTSFDIHYGSGSLSGYLSQDTVSVPCQSASSASALGGVKVERQVFGEATKQPGITFIAAKFDGILGMAYPRISVNNVLPVFDNLMQQKLVDQNIFSFYLSRDPDAQPGGELMLGGTDSKYYKGSLSYLNVTRKAYWQVHLDQVEVASGLTLCKEGCEAIVDTGTSLMVGPVDEVRELQKAIGAVPLIQGEYMIPCEKVSTLPAITLKLGGKGYKLSPEDYTLKVSQAGKTLCLSGFMGMDIPPPSGPLWILGDVFIGRYYTVFDRDNNRVGFAEAARL

SEQ ID NO: 3739 - protein, 94 aa, Homo Sapiens
MSEVGGSVEDLIAKGPVSKYSQAVPAVTEGPIPEVLKNYMDAQYYGEIGIGTPPQCFTVVFDTGSSNLWVPSIHCKLLDIACWIHHKYNSDKSS

SEQ ID NO: 3740 - protein, 199 aa, Homo Sapiens
MSEVGGSVEDLIAKGPVSKYSQAVPAVTEGPIPEVLKNYMDAQYYGEIGIGTPPQCFTVVFDTGSSNLWVPSIHCKLLDIACWIHHKYNSDKSSTYVKNGTSFDIHYGSGSLSGYLSQDTVSVPCQSASSASALGGVKVERQVFGEATKQPGITFIAAKFDGILGMAYPRISVNNVLPVFDNLMQQKLVDQNIFSFYLS

SEQ ID NO: 3741 - protein, 189 aa, Homo Sapiens
NVTRKAYWQVHLDQSPEGRRVQPSQGRGSQGGALGPQGTLQSRQGLHALTPRRVEVASGLTLCKEGCEAIVDTGTSLMVGPVDEVRELQKAIGAVPLIQGEYMIPCEKVSTLPAITLKLGGKGYKLSPEDYTLKVSQAGKTLCLSGFMGMDIPPPSGPLWILGDVFIGRYYTVFDRDNNRVGFAEAARL

SEQ ID NO: 3742 - protein, 396 aa, Homo Sapiens
MKTLLLLLLVLLELGEAQGSLHRVPLRRHPSLKKKLRARSQLSEFWKSHNLDMIQFTESCSMDQSAKEPLINYLDMEYFGTISIGSPPQNFTVIFDTGSSNLWVPSVYCTSPACKTHSRFQPSQSSTYSQPGQSFSIQYGTGSLSGIIGADQVSVEGLTVVGQQFGESVTEPGQTFVDAEFDGILGLGYPSLAVGGVTPVFDNMMAQNLVDLPMFSVYMSSNPEGGAGSELIFGGYDHSHFSGSLNWVPVTKQAYWQIALDNIQVGGTVMFCSEGCQAIVDTGTSLITGPSDKIKQLQNAIGAAPVDGEYAVECANLNVMPDVTFTINGVPYTLSPTAYTLLDFVDGMQFCSSGFQGLDIHPPAGPLWILGDVFIRQFYSVFDRGNNRVGLAPAVP

SEQ ID NO: 3743 - protein, 363 aa, Homo Sapiens
MKTLLLLLLVLLELGEAQGSLHRVPLRRHPSLKKKLRARSQLSEFWKSHNLDMIQFTESCSMDQSAKEPLINYLDMEYFGTISIGSPPQNFTVIFDTGSSNLWVPSVYCTSPACKTHSRFQPSQSSTYSQPGQSFSIQYGTGSLSGIIGADQVSVEGLTVVGQQFGESVTEPGQTFVDAEFDGILGLGYPSLAVGGVTPVFDNMMAQNLVDLPMFSVYMSSNPEGGAGSELIFGGYDHSHFSGSLNWVPVTKQAYWQIALDNMLWSVPTLTSCRMSPSPLTESPIPSAQLPTPYWTSWMECSSAAVAFKDLTSTLQLGPSGSWGMSSFDSFTQSLTVGITVWDWPQQSPKEGPCVCACLSDRP

SEQ ID NO: 3744 - protein, 484 aa, Homo Sapiens [sequence omitted]

SEQ ID NO: 3745 - protein, 120 aa, Homo Sapiens
MVCRLPVSKKTLLCSFQVLDELGRHVLLRKDCGPVDTKVPGAGEPKSAFTQGSAMISSLSQNHPDNRNETFSSVISLLNEDPLSQDLPVKMASIFKNFVITYNRTYESKEEARWRLSVFV

SEQ ID NO: 3746 - protein, 283 aa, Homo Sapiens
  misc_feature (1)..(1): Xaa can be any naturally occurring amino acid
XQNHPDNRNETFSSVISLLNEDPLSQDLPVKMASIFKNFVITYNRTYESKEARWRLSVFVNNMVRAQKIQALDRGTAQYGVTKFSDLTEEEFRTIYLNTLLRKEPGNKMKQAKSVGDLAPPEWDWRSKGAVTKVKDQGMCGSCWAFSVTGNVEGQWFLNQGTLLSLSEQELLDCDKMDKACMGGLPSNAYSAIKNLGGLETEDDYSYQGHMQSCNFSAEKAKVYINDSVELSQNEQKLAAWLAKRGPISVAINAFGMQFYRHGISRPLRPLCSPWLIDHAVLL

SEQ ID NO: 3747 - protein, 82 aa, Homo Sapiens
  misc_feature (1)..(1): Xaa can be any naturally occurring amino acid
XRTIYLNTLLRKEPGNKMKQAKSVGDLAPPEWDWRSKGAVTKVKDQGMCGSCWAFSVTGNVEGQWFLNQGTLLSLSEQALGL

SEQ ID NO: 3748 - protein, 255 aa, Homo Sapiens
MQPLLLLLAFLLPTGAEAGEIIGGRESRPHSRPYMAYLQIQSPAGQSRCGGFLVREDFVLTAAHCWGSNINVTLGAHNIQRRENTQQHITARRAIRHPQYNQRTIQNDIMLLQLSRRVRRNRNVNPVALPRAQEGLRPGTLCTVAGWGRVSMRRGTDTLREVQLRVQRDRQCLRIFGSYDPRRQICVGDRRERKAAFKGDSGGPLLCNNVAHGIVSYGKSSGVPPEVFTRVSSFLPWIRTTMRSFKLLDQMETPL

SEQ ID NO: 3749 - protein, 134 aa, Homo Sapiens
MALNQFSDMSFAEIKHKYLWSEPQNCSATKSNYLRGTGPYPPSVDWRKKGNFVSPVKNQGACGSCWTFSTTGALESAIAIATGKMLSLAEQQLVDCAQDFNNHGCQGGLPSQAFEYILYNKGIMGEDTYPYQGK

SEQ ID NO: 3750 - protein, 323 aa, Homo Sapiens
MWATLPLLCAAELCVNSLEKFHFKSWMSKHRKTYSTEEYHHRLQTFASNWRKINAHNNGNHTFKMALNQFSDMSFAEIKHKYLWSEPQNCSATKSNYLRGTGPYPPSVDWRKKGNFVSPVKNQGACGSCWTFSTTGALESAIAIATGKMLSLAEQQLVDCAQDFNNHGCQGGLPSQAFEYILYNKGIMGEDTYPYQGKDGYCKFQPGKAIGFVKDVANITIYDEEAMVEAVALYNPVSFAFEVTQDFMMYRTGIYSSTSCHKTPDKVNHAVLAVGYGEKNGIPYWIVKNSWGPQWGMNGYFLIERGKNMCGLAACASYPIPLV

SEQ ID NO: 3751 - protein, 335 aa, Homo Sapiens
MWATLPLLCAGAWLLGVPVCGAAELCVNSLEKFHFKSWMSKHRKTYSTEEYHHRLQTFASNWRKINAHNNGNHTFKMALNQFSDMSFAEIKHKYLWSEPQNCSATKSNYLRGTGPYPPSVDWRKKGNFVSPVKNQGACGSCWTFSTTGALESAIAIATGKMLSLAEQQLVDCAQDFNNHGCQGGLPSQAFEYILYNKGIMGEDTYPYQGKDGYCKFQPGKAIGFVKDVANITIYDEEAMVEAVALYNPVSFAFEVTQDFMMYRTGIYSSTSCHKTPDKVNHAVLAVGYGEKNGIPYWIVKNSWGPQWGMNGYFLIERGKNMCGLAACASYPIPLV

SEQ ID NO: 3752 - protein, 62 aa, Homo Sapiens
MWATLPLLCAGAWLLGVPVCGAAELCVNSLEKFHFKSWMSKKTKAHCVLVAESVGEHQCMCF

SEQ ID NO: 3753 - protein, 41 aa, Homo Sapiens
MWATLPLLCAGAWLLGVPVCGAAELCVNSLGTQRARRPRGC

SEQ ID NO: 3754 - protein, 118 aa, Homo Sapiens
MWATLPLLCAGAWLLGVPVCGAAELCVNSLVAGLSPPLGPWSLRSPSQPERCCPWRNSSWWTAPRTSIITAAKGVSPARLSSISCTTRGSWVKTPTPTRARMVIASSNLERPSALSRM

SEQ ID NO: 3755 - protein, 258 aa, Homo Sapiens
MHKENEEIYNVSENRKHCPIFPCPLLTRSGKVPEFRHEREERLEEMIRRQNLDGNLSFVMWGLKVLLLPVVSFALYPEEILDTHWELWKKTHRKQYNNKVDEISRRLIWEKNLKYISIHNLEASLGVHTYELAMNHLGDMTSEEVVQKMTGLKVPLSHSRSNDTLYIPEWEGRAPDSVDYRKKGYVTPVKNQGQCGSCWAFSSVGALEGQLKKKTGKLLNLSPQNLVDCVSENDGCGGGYMTNAFQYVQKNRGIDSED

SEQ ID NO: 3756 - protein, 329 aa, Homo Sapiens
MWGLKVLLLPVVSFALYPEEILDTHWELWKKTHRKQYNNKVDEISRRLIWEKNLKYISIHNLEASLGVHTYELAMNHLGDMTSEEVVQKMTGLKVPLSHSRSNDTLYIPEWEGRAPDSVDYRKKGYVTPVKNQGQCGSCWAFSSVGALEGQLKKKTGKLLNLSPQNLVDCVSENDGCGGGYMTNAFQYVQKNRGIDSEDAYPYVGQEESCMYNPTGKAAKCRGYREIPEGNEKALKRAVARVGPVSVAIDASLTSFQFYSKGVYYDESCNSDNLNHAVLAVGYGIQKGNKHWIIKNSWGENWGNKGYILMARNKNNACGIANLASFPKM

SEQ ID NO: 3757 - protein, 333 aa, Homo Sapiens [sequence omitted]

SEQ ID NO: 3758 - protein, 333 aa, Homo Sapiens [sequence omitted]

SEQ ID NO: 3759 - protein, 225 aa, Homo Sapiens
MNPTLILAAFCLGIASATLTFDHSLEAQWTKWKAMHNRLYGMNEEGWRRAVWEKNMKMIELHNQEYREGKHSFTMAMNAFGDMTSEEFRQVMNGFQNRKPRKGKVFQEPLFYEAPRSVDWREKGYVTPVKNQGQCGSCWAFSATGALEGQMFRKTGRLISLSEQNLVDCSGPQGNEGCNGGLMDYAFQYVQDNGGLDSEESYPYEATVSGAPCHHSSSAFGRWTL

SEQ ID NO: 3760 - protein, 321 aa, Homo Sapiens
MDVRALPWLPWLLWLLCRGGGDADSRAPFTPTWPRSREREAAAFRESLNRHRYLNSLFPSENSTAFYGINQFSYLFPEEFKAIYLRSKPSKFPRYSAEVHMSIPNVSLPLRFDWRDKQVVTQVRNQQMCGGCWAFSVVGAVESAYAIKGKPLEDLSVQQVIDCSYNNYGCNGGSTLNALNWLNKMQVKLVKDSEYPFKAQNGLCHYFSGSHSGFSIKGYSAYDFSDQEDEMAKALLTFGPLVVIVDAVSWQDYLGGIIQHHCSSGEANHAVLITGFDKTGSTPYWIVRNSWGSSWGVDGYAHVKMGSNVCGIADSVSSIFV

SEQ ID NO: 3761 - protein, 117 aa, Homo Sapiens
IIDNKGIDSDASYPYKAMDQKCQYDSKYRAATCSKYTELPYGREDVLKEAVANKGPVSVGVDARHPSFFLYRSDGVLLCCQAGVRWHDLSSLQPLPPGFKQFSCLSLLSSWDYRCLL

SEQ ID NO: 3762 - protein, 281 aa, Homo Sapiens
MKRLVCVLLVCSSAVAQLHKDPTLDHHWHLWKKTYGKQYKEKNEEAVRRLIWEKNLKFVMLHNLEHSMGMHSYDLGMNHLGDMGSCGACWAFSAVGALEAQLKLKTGKLVSLSAQNLVDCSTEKYGNKGCNGGFMTTAFQYIIDNKGIDSDASYPYKAMDQKCQYDSKYRAATCSKYTELPYGREDVLKEAVANKGPVSVGVDARHPSFFLYRSGVYYEPSCTQNVNHGVLVVGYGDLNGKEYWLVKNSWGHNFGEEGYIRMARNKGNHCGIASFPSYPEI

SEQ ID NO: 3763 - protein, 331 aa, Homo Sapiens
MKRLVCVLLVCSSAVAQLHKDPTLDHHWHLWKKTYGKQYKEKNEEAVRRLIWEKNLKFVMLHNLEHSMGMHSYDLGMNHLGDMTSEEVMSLMSSLRVPSQWQRNITYKSNPNRILPDSVDWREKGCVTEVKYQGSCGACWAFSAVGALEAQLKLKTGKLVSLSAQNLVDCSTEKYGNKGCNGGFMTTAFQYIIDNKGIDSDASYPYKAMDQKCQYDSKYRAATCSKYTELPYGREDVLKEAVANKGPVSVGVDARHPSFFLYRSGVYYEPSCTQNVNHGVLVVGYGDLNGKEYWLVKNSWGHNFGEEGYIRMARNKGNHCGIASFPSYPEI

SEQ ID NO: 3764 - protein, 96 aa, Homo Sapiens
  misc_feature (1)..(1): Xaa can be any naturally occurring amino acid
XVLKEAVANKGPVSVGVDARHPSFFLYRSGVYYEPSCTQNVNHGVLVVGYGDLNGKEYWLVKNSWGHNFGEEGYIRMARNKGNHCGIASFPSYPEI

SEQ ID NO: 3765 - protein, 5 aa, Homo Sapiens
  misc_feature (1)..(1): Xaa can be any naturally occurring amino acid
XYPEI

SEQ ID NO: 3766 - protein, 334 aa, Homo Sapiens
MNLSLVLAAFCLGIASAVPKFDQNLDTKWYQWKATHRRLYGANEEGWRRAVWEKNMKMIELHNGEYSQGKHGFTMAMNAFGDMTNEEFRQMMGCFRNQKFRKGKVFREPLFLDLPKSVDWRKKGYVTPVKNQKQCGSCWAFSATGALEGQMFRKTGKLVSLSEQNLVDCSRPQGNQGCNGGFMARAFQYVKENGGLDSEESYPYVAVDEICKYRPENSVANDTGFTVVAPGKEKALMKAVATVGPISVAMDAGHSSFQFYKSGIYFEPDCSSKNLDHGVLVVGYGFEGANSNNSKYWLVKNSWGPEWGSNGYVKIAKDKNNHCGIATAASYPNV

SEQ ID NO: 3767 - protein, 334 aa, Homo Sapiens; identical to SEQ ID NO: 3766

SEQ ID NO: 3768 - protein, 211 aa, Homo Sapiens
ALTAHPSCLLALLVAGLAQGIRGPLRAQDLGPQPLELKEAFKLFQIQFNRSYLSPEEHAHRLDIFAHNLAQAQRLQEEDLGTAEFGVTPFSDLTEEEFGQLYGYRRAAGGVPSMGREIRSEEPEESVPFSCDWRKVASAISPIKDQKNCNCCWAMAAAGNIETLWRISFWDFVDVSVQGGLASEKDYPFQGKVRAHRCHPKKYQKVAWIQD

SEQ ID NO: 3769 - protein, 376 aa, Homo Sapiens
MALTAHPSCLLALLVAGLAQGIRGPLRAQDLGPQPLELKEAFKLFQIQFNRSYLSPEEHAHRLDIFAHNLAQAQRLQEEDLGTAEFGVTPFSDLTEEEFGQLYGYRRAAGGVPSMGREIRSEEPEESVPFSCDWRKVASAISPIKDQKNCNCCWAMAAAGNIETLWRISFWDFVDVSVQELLDCGRCGDGCHGGFVWDAFITVLNNSGLASEKDYPFQGKVRAHRCHPKKYQKVAWIQDFIMLQNNEHRIAQYLATYGPITVTINMKPLQLYRKGVIKATPTTCDPQLVDHSVLLVGFGSVKSEEGIWAETVSSQSQPQPPHPTPYWILKNSWGAQWGEKGYFRLHRGSNTCGITKFPLTARVQKPDMKPRVSCPP

SEQ ID NO: 3770 - protein, 364 aa, Homo Sapiens
MALTAHPSCLLALLVAGLAQGIRGPLRAQDLGPQPLELKEAFKLFQIQFNRSYLSPEEHAHRLDIFAHNLAQAQRLQEEDLGTAEFGVTPFSDLTEEEFGQLYGYRRAAGGVPSMGREIRSEEPEESVPFSCDWRKVASAISPIKDQKNCNCCWAMAAAGNIETLWRISFWDFVDVSVQELLDCGRCGDGCHGGFVWDAFITVLNNSGLASEKDYPFQGKVRAHRCHPKKYQKVAWIQDFIMLQNNEHRIAQYLATYGPITVTINMKPLQLYRKGVIKATPTTCDPQLVDHSVLLVGFGSVKSEEGIWAETVSSQSQPQPPHPTPYWILKNSWGAQWGEKVSVIYWGRGQGRTGLFPPSRPYVP

SEQ ID NO: 3771 - protein, 303 aa, Homo Sapiens
MARRGPGWRPLLLLVLLAGAAQGGLYFRRGQTCYRPLRGDGLAPLGRSTYPRPHEYLSPADLPKSWDWRNVDGVNYASITRNQHIPQYCGSCWAHASTSAMADRINIKRKGAWPSTLLSVQNVIDCGNAGSCEGGNDLSVWDYAHQHGIPDETCNNYQAKDQECDKFNQCGTCNEFKECHAIRNYTLWRVGDYGSLSGREKMMAEIYANGPISCGIMATERLANYTGGIYAEYQDTTYINHVVSVAGWGISDGTEYWIVRNSWGEPWGERGWLRIVTSTYKDGKGARYNLAIEEHCTFGDPIV

SEQ ID NO: 3772 - protein, 3623 aa, Homo Sapiens
MMNMSLPFLWSLLTLLIFAEVNGEAGELELQRQKRSINLQQPRMATERGNLVFLTGSAQNIEFRTGSLGKIKLNDEDLSECLHQIQKNKEDIIELKGSAIGLPQNISSQIYQLNSKLVDLERKFQGLQQTVDKKVCSSNPCQNGGTCLNLHDSFFCICPPQWKGPLCSADVNECEIYSGTPLSCQNGGTCVNTMGSYSCHCPPETYGPQCASKYDDCEGGSVARCVHGICEDLMREQAGEPKYSCVCDAGWMFSPNSPACTLDRDECSFQPGPCSTLVQCFNTQGSFYCGACPTGWQGNGYICEDINECEINNGGCSVAPPVECVNTPGSSHCQACPPGYQGDGRVCTLTDICSVSNGGCHPDASCSSTLGSLPLCTCLPGYTGNGYGPNGCVQLSNICLSHPCLNGQCIDTVSGYFCKCDSGWTGVNCTENINECLSNPCLNGGTCVDGVDSFSCECTRLWTGALCQVPQQVCGESLSGINGSFSYRSPDVGYVHDVNCFWVIKTEMGKVLRITFTFFRLESMDNCPHEFLQVYDGDSSSAFQLGRFCGSSLPHELLSSDNALYFHLYSEHLRNGRGFTVRWETQQPECGGILTGPYGSIKSPGYPGNYPPGRDCVWIVVTSPDLLVTFTFGTLSLEHHDDCNKDYLEIRDGPLYQDPLLGKFCTTFSVPPLQTTGPFARIHFHSDSQISDQGFHITYLTSPSDLRCGGNYTDPEGELFLPELSGPFTHTRQCVYMMKQPQGEQIQINFTHVELQCQSDSSQNYIEVRDGETLLGKVCGNGTISHIKSITNSVWIRFKIDASVEKASFRAVYQVACGDELTGEGVIRSPFFPNVYPGERTCRWTIHQPQSQVILLNFTVFEIGSSAHCETDYVEIGSSSILGSPENKKYCGTDIPSFITSVYNFLYVTFVKSSSTENHGFMAKFSAEDLACGEILTESTGTIQSPGHPNVYPHGINCTWHILVQPNHLIHLMFETFHLEFHYNCTNDYLEVYDTDSETSLGRYCGKSIPPSLTSSGNSLMLVFVTDSDLAYEGFLINYEAISAATACLQDYTDDLGTFTSPNFPNNYPNNWECIYRITVRTGQLIAVHFTNFSLEEAIGNYYTDFLEIRDGGYEKSPLLGIFYGSNLPPTIISHSNKLWLKFKSDQIDTRSGFSAYWDGSSTGCGGNLTTSSGTFISPNYPMPYYHSSECYWWLKSSHGSAFELEFKDFHLEHHPNCTLDYLAVYDGPSSNSHLLTQLCGDEKPPLIRSSGDSMFIKLRTDEGQQGRGFKAEYRQTCENVVIVNQTYGILESIGYPNPYSENQHCNWTIRATTGNTVNYTFLAFDLEHHINCSTDYLELYDGPRQMGRYCGVDLPPPGSTTSSKLQVLLLTDGVGRREKGFQMQWFVYGCGGELSGATGSFSSPGFPNRYPPNKECIWYIRTDPGSSIQLTIHDFDVEYHSRCNFDVLEIYGGPDFHSPRIAQLCTQRSPENPMQVSSTGNELAIRFKTDLSINGRGFNASWQAVTGGCGGIFQAPSGEIHSPNYPSPYRSNTDCSWVIRVDRNHRVLLNFTDFDLEPQDSCIMAYDGLSSTMSRLARTCGREQLANPIVSSGNSLFLRFQSGPSRQNRGFRAQFRQACGGHILTSSFDTVSSPRFPANYPNNQNCSWIIQAQPPLNHITLSFTHFELERSTTCARDFVEILDGGHEDAPLRGRYCGTDMPHPITSFSSALTLRFVSDSSISAGGFHTTVTASVSACGGTFYMAEGIFNSPGYPDIYPPNVECVWNIVSSPGNRLQLSFISFQLEDSQDCSRDFVEIREGNATGHLVGRYCGNSFPLNYSSIVGHTLWVRFISDGSGSGTGFQATFMKIFGNDNIVGTHGKVASPFWPENYPHNSNYQWTVNVNASHVVHGRILEMDIEEIQNCYYDKLRIYDGPSIHARLIGAYCGTQTESFSSTGNSLTFHFYSDSSISGKGFLLEWFAVDAPDGVLPTIAPGACGGFLRTGDAPVFLFSPGWPDSYSNRVDCTWLIQAPDSTVELNILSLDIESHRTCAYDSLVIRDGDNNLAQQLAVLCGREIPGPIRSTGEYMFIRFTSDSSVTRAGFNASFHKSCGGYLHADRGIITSPKYPETYPSNLNCSWHVLVQSGLTIAVHFEQPFQIPNGDSSCNQGDYLVLRNGPDICSPPLGPPGGNGHFCGSHASSTLFTSDNQMFVQFISDHSNEGQGFKIKYEAKSLACGGNVYIHDADSAGYVTSPNHPHNYPPHADCIWILAAPPETRIQLQFEDRFDIEVTPNCTSNYLELRDGVDSDAPILSKFCGTSLPSSQWSSGEVMYLRFRSDNSPTHVGFKAKYSIAQCGGRVPGQSGVVESIGHPTLPYRDNLFCEWHLQGLSGHYLTISFEDFNLQNSSGCEKDFVEIWDNHTSGNILGRYCGNTIPDSIDTSSNTAVVRFVTDGSVTASGFRLRFESSMEECGGDLQGSIGTFTSPNYPNPNPHGRICEWRITAPEGRRITLMFNNLRLATHPSCNNEHVIVFNGIRSNSPQLEKLCSSVNVSNEIKSSGNTMKVIFFTDGSRPYGGFTASYTSSEDAVCGGSLPNTPEGNFTSPGYDGVRNYSRNLNCEWTLSNPNQGNSSISIHFEDFYLESHQDCQFDVLEFRVGDADGPLMWRLCGPSKPTLPLVIPYSQVWIHFVTNERVEHIGFHAKYSFTDCGGIQIGDSGVITSPNYPNAYDSLTHCSSLLEAPQGHTITLTFSDFDIEPHTTCAWDSVTVRNGGSPESPIIGQYCGNSNPRTIQSGSNQLVVTFNSDHSLQGGGFYATWNTQTLGCGGIFHSDNGTIRSPHWPQNFPENSRCSWTAITHKSKHLEISFDNNFLIPSGDGQCQNSFVKVWAGTEEVDKALLATGCGNVAPGPVITPSNTFTAVFQSQEAPAQGFSASFVSRCGSNFTGPSGYIISPNYPKQYDNNMNCTYVIEANPLSVVLLTFVSFHLEARSAVTGSCVNDGVHIIRGYSVMSTPFATVCGDEMPAPLTIAGPVLLNFYSNEQITDFGFKFSYRIISCGGVFNFSSGIITSPAYSYADYPNDMHCLYTITVSDDKVIELKFSDFDVVPSTSCSHDYLAIYDGANTSDPLLGKFCGSKRPPNVKSSNNSMLLVFKTDSFQTAKGWKMSFRQTLGPQQGCGGYLTGSNNTFASPDSDSNGMYDKNLNCVWIIIAPVNKVIHLTFNTFALEAASTRQRCLYDYVKLYDGDSENANLAGTFCGSTVPAPFISSGNFLTVQFISDLTLEREGFNATYTIMDMPCGGTYNATWTPQNISSPNSSDPDVPFSICTWVIDSPPHQQVKITVWALQLTSQDCTQNYLQLQDSPQGHGNSRFQFCGRNASAVPVFYSSMSTAMVIFKSGVVNRNSRMSFTYQIADCNRDYHKAFGNLRSPGWPDNYDNDKDCTVTLTAPQNHTISLFFHSLGIENSVECRNDFLEVRNGSNSNSPLLGKYCGTLLPNPVFSQNNELYLRFKSDSVTSDRGYEIIWTSSPSGCGGTLYGDRGSFTSPGYPGTYPNNTYCEWVLVAPAGRLVTINFYFISIDDPGDCVQNYLTLYDGPNASSPSSGPYCGGDTSIAPFVASSNQVFIKFHADYARRPSAFRLTWDS

SEQ ID NO: 3773 - protein, 170 aa, Homo Sapiens
MMNMSLPFLWSLLTLLIFAEVNGEAGELELQRQKRSINLQQPRMATERGNLVFLTGSAQNIEFRTGSLGKIKLNDEDLSECLHQIQKNKEDIIELKGSAIGLPQNISSQIYQLNSKLVDLERKFQGLQQTVDKKVCSSNPCQNGGTCLNLHDSFFCICPPQWKVSHLLFG

SEQ ID NO: 3774 - protein, 105 aa, Homo Sapiens
NSKLVDLERKFQGLQQTVDKKVCSSNPCQNGGTCLNLHDSFFCICPPQWKGPLCSADVNECEIYSGTPLSCQNGGTCVNTMGSYRNPCSNIPKEPEEGSRDWHRE

SEQ ID NO: 3775 - protein, 88 aa, Homo Sapiens
STGNELAIRFKTDLSINGRGFNASWQAVTGGCGGIFQAPSGEIHSPNYPSPYRSNTDCSWVIRVDRNHRVLLNFTDFDLEPQDSCIMV

SEQ ID NO: 3776 - protein, 198 aa, Homo Sapiens
MIGSGLAGSGGAGGPSSTVTWCALFSNHVAATQASLLLSFVWMPALLPVASRLLLLPRVLLTMASGSPPTQPSPASDSGSGYVPGSVSAAFVTCPNEKVAKEIARAVVEKRLAACVNLIPQITSIYEWKGKIEEDSEVLMMIKTQSSLVPALTDFVRSVHPYEVAEVIALPVEQGNFPYLQWVRQVTESVSDSITVLP

SEQ ID NO: 3777 - protein, 135 aa, Homo Sapiens
MPALLPVASRLLLLPRVLLTMASGSPPTQPSPASDSGSGYVPGSVSAAFVTCPNEKVAKEIARAVVEKRLAACVNLIPQITSIYEWKGKIEEDSEVLMMIKTQSSLVPALTDFVRSVHPYEVAESCHDEPCSCSS

SEQ ID NO: 3778 - protein, 156 aa, Homo Sapiens
MPALLPVASRLLLLPRVLLTMASGSPPTQPSPASDSGSGYVPGSVSAAFVTCPNEKVAKEIARAVVEKRLAACVNLIPQITSIYEWKGKIEEDSEVLMMIKTQSSLVPALTDFVRSVHPYEVAEVIALPVEQGNFPYLQWVRQVTESVSDSITVLP

SEQ ID NO: 3779 - protein, 156 aa, Homo Sapiens; identical to SEQ ID NO: 3778

SEQ ID NO: 3780 - protein, 156 aa, Homo Sapiens; identical to SEQ ID NO: 3778

SEQ ID NO: 3781 - protein, 156 aa, Homo Sapiens; identical to SEQ ID NO: 3778

SEQ ID NO: 3782 - protein, 155 aa, Homo Sapiens
MSGGRAPAVLLGGVASLLLSFVWMPALLPVASRLLLLPRVLLTMASGSPPTQPSPASDSGSGYVPGSVSAAFVTCPNEKVAKEIARAVVEKRLAACVNLIPQITSIYEWKGKIEEDSEVLMFCAPLRSGRGNCIACGTGELSVPAVGAPGHRVSF

SEQ ID NO: 3783 - protein, 179 aa, Homo Sapiens
MSGGRAPAVLLGGVASLLLSFVWMPALLPVASRLLLLPRVLLTMASGSPPTQPSPASDSGSGYVPGSVSAAFVTCPNEKVAKEIARAVVEKRLAACVNLIPQITSIYEWKGKIEEDSEVLMMIKTQSSLVPALTDFVRSVHPYEVAEVIALPVEQGNFPYLQWVRQVTESVSDSITVLP

SEQ ID NO: 3784 - protein, 42 aa, Homo Sapiens
MSGGRAPAVLLGGVVSDRPRPAPSGPRSLDRYPHPKSQRLAP

SEQ ID NO: 3785 - protein, 111 aa, Homo Sapiens
  misc_feature (1)..(1): Xaa can be any naturally occurring amino acid
XSSTVTWCALFSNHVAATQASLLLSFVWMPALLPVASRLLLLPRVLLTMASGSPPTQPSPASDSGSGYVPGSVSAAFVTCPNEKVAKEIARAVVEKRLAACVNLIPQITSM

SEQ ID NO: 3786 - protein, 55 aa, Homo Sapiens
MAPISLSWLLRLATFCHLTVLLAAWRRDSTGCSVPTRRSNGSRTRCSIWTARLLP

SEQ ID NO: 3787 - protein, 397 aa, Homo Sapiens
MAPISLSWLLRLATFCHLTVLLAGQHHGVTKCNITCSKMTSKIPVALLIHYQQNQASCGKRAIILETRQHRLFCADPKEQWVKDAMQHLDRQAAALTRNGGTFEKQIGEVKPRTTPAAGGMDESVVLEPEATGESSSLEPTPSSQEAQRALGTSPELPTGVTGSSGTRLPPTPKAQDGGPVGTELFRVPPVSTAATWQSSAPHQPGPSLWAEAKTSEAPSTQDPSTQASTASSPAPEENAPSEGQRVWGQGQSPRPENSLEREEMGPVPAHTDAFQDWGPGSMAHVSVVPVSSEGTPSREPVASGSWTPKAEEPIHATMDPQRLGVLITPVPDAQAATRRQAVGLLAFLGLLFCLGVAMFTYQSLQGCPRKMAGEMAEGLRYIPRSCGSNSYVLVPV

SEQ ID NO: 3788 - protein, 403 aa, Homo Sapiens
MAPISLSWLLRLATFCHLTVLLAGTSLNSGQHHGVTKCNITCSKMTSKIPVALLIHYQQNQASCGKRAIILETRQHRLFCADPKEQWVKDAMQHLDRQAAALTRNGGTFEKQIGEVKPRTTPAAGGMDESVVLEPEATGESSSLEPTPSSQEAQRALGTSPELPTGVTGSSGTRLPPTPKAQDGGPVGTELFRVPPVSTAATWQSSAPHQPGPSLWAEAKTSEAPSTQDPSTQASTASSPAPEENAPSEGQRVWGQGQSPRPENSLEREEMGPVPAHTDAFQDWGPGSMAHVSVVPVSSEGTPSREPVASGSWTPKAEEPIHATMDPQRLGVLITPVPDAQAATRRQAVGLLAFLGLLFCLGVAMFTYQSLQGCPRKMAGEMAEGLRYIPRSCGSNSYVLVPV

SEQ ID NO: 3789 - protein, 359 aa, Homo Sapiens
MTSKIPVALLIHYQQNQASCGKRAIILETRQHRLFCADPKEQWVKDAMQHLDRQAAALTRNGGTFEKQIGEVKPRTTPAAGGMDESVVLEPEATGESSSLEPTPSSQEAQRALGTSPELPTGVTGSSGTRLPPTPKAQDGGPVGTELFRVPPVSTAATWQSSAPHQPGPSLWAEAKTSEAPSTQDPSTQASTASSPAPEENAPSEGQRVWGQGQSPRPENSLEREEMGPVPAHTDAFQDWGPGSMAHVSVVPVSSEGTPSREPVASGSWTPKAEEPIHATMDPQRLGVLITPVPDAQAATRRQAVGLLAFLGLLFCLGVAMFTYQSLQGCPRKMAGEMAEGLRYIPRSCGSNSYVLVPV

SEQ ID NO: 3790 - protein, 89 aa, Homo Sapiens
MALLLCFVLLCGVVDFARSLSITTPEEMIEKAKGETAYLPCKFTLSPEDQGPLDIEWLISPADNQKVDQVGRCATSKEPYVHCQKLHRQ

SEQ ID NO: 3791 - protein, 200 aa, Homo Sapiens
MALLLCFVLLCGVVDFARSLSITTPEEMIEKAKGETAYLPCKFTLSPEDQGPLDIEWLISPADNQKVDQVIILYSGDKIYDDYYPDLKGRVHFTSNDLKSGDASINVTNLQLSDIGTYQCKVKKAPGVANKKIHLVVLGKMCHLQRAVRPLPEATSAVIIHPWGPCLLPTWKDIPRLSITKYQVKTLNALLRVRLSHLLR

SEQ ID NO: 3792 - protein, 365 aa, Homo Sapiens
MALLLCFVLLCGVVDFARSLSITTPEEMIEKAKGETAYLPCKFTLSPEDQGPLDIEWLISPADNQKVDQVIILYSGDKIYDDYYPDLKGRVHFTSNDLKSGDASINVTNLQLSDIGTYQCKVKKAPGVANKKIHLVVLVKPSGARCYVDGSEEIGSDFKIKCEPKEGSLPLQYEWQKLSDSQKMPTSWLAEMTSSVISVKNASSEYSGTYSCTVRNRVGSDQCLLRLNVVPPSNKAGLIAGAIIGTLLALALIGLIIFCCRKKRREEKYEKEVHHDIREDVPPPKSRTSTARSYIGSNHSSLGSMSPSNMEGYSKTQYNQVPSEDFERTPQSPTLPPAKVAAPNLSRMGAIPVMIPAQSKDGSIV

SEQ ID NO: 3793 - protein, 352 aa, Homo Sapiens
MALLLCFVLLCGVVDFARSLSITTPEEMIEKAKGETAYLPCKFTLSPEDQGPLDIEWLISPADNQKVDQVIILYSGDKIYDDYYPDLKGRVHFTSNDLKSGDASINVTNLQLSDIGTYQCKVKKAPGVANKKIHLVVLVKPSGARCYVDGSEEIGSDFKIKCEPKEGSLPLQYEWQKLSDSQKMPTSWLAEMTSSVISVKNASSEYSGTYSCTVRNRVGSDQCLLRLNVVPPSNKAGLIAGAIIGTLLALALIGLIIFCCRKKRREEKYEKEVHHDIREDVPPPKSRTSTARSYIGSNHSSLGSMSPSNMEGYSKTQYNQVPSEDFERTPQSPTLPPAKFKYPYKTDGITVV

SEQ ID NO: 3794 - protein, 252 aa, Homo Sapiens
MALLLCFVLLCGVVDFARSLSITTPEEMIEKAKGETAYLPCKFTLSPEDQGPLDIEWLISPADNQKVDQVIILYSGDKIYDDYYPDLKGRVHFTSNDLKSGDASINVTNLQLSDIGTYQCKVKKAPGVANKKIHLVVLVKPSGARCYVDGSEEIGSDFKIKCEPKEGSLPLQYEWQKLSDSQKMPTSWLAGKMCHLQRAVRPLPEATSAVIIHPWGPCLLPTWKDIPRLSITKYQVKTLNALLRVRLSHLLR

SEQ ID NO: 3795 - protein, 107 aa, Homo Sapiens
MARAALSAAPSNPRLLRVALLLLLLVAAGRRAAGASVATELRCQCLQTLQGIHPKNIQSVNVKSPGPHCAQTEVIATLKNGRKACLNPASPIVKKIIEKMLNSDKSN

SEQ ID NO: 3796 - protein, 98 aa, Homo Sapiens
MNQTAILICCLIFLTLSGIQGVPLSRTVRCTCISISNQPVNPRSLEKLEIIPASQFCPRVEIIATMKKKGEKRCLNPESKAIKNLLKAVSKERSKRSP

SEQ ID NO: 3797 - protein, 94 aa, Homo Sapiens
MSVKGMAIALAVILCATVVQGFPMFKRGRCLCIGPGVKAVKVADIEKASIMYPSNNCDKIEVIITLKENKGQRCLNPKSKQARLIIKKVERKNF

SEQ ID NO: 3798 - protein, 94 aa, Homo Sapiens; identical to SEQ ID NO: 3797

SEQ ID NO: 3799 - protein, 89 aa, Homo Sapiens
MNAKVVVVLVLVLTALCLSDGKPVSLSYRCPCRFFESHVARANVKHLKILNTPNCALQIVARLKNNNRQVCIDPKLKWIQEYLEKALNK

SEQ ID NO: 3800 - protein, 119 aa, Homo Sapiens
MNAKVVVVLVLVLTALCLSDGKPVSLSYRCPCRFFESHVARANVKHLKILNTPNCALQIVARLKNNNRQVCIDPKLKWIQEYLEKALNKGRREEKVGKKEKIGKKKRQKKRKAAQKRKN

SEQ ID NO: 3801 - protein, 93 aa, Homo Sapiens
MNAKVVVVLVLVLTALCLSDGKPVSLSYRCPCRFFESHVARANVKHLKILNTPNCALQIVARLKNNNRQVCIDPKLKWIQEYLEKALNKRFKM

SEQ ID NO: 3802 - protein, 140 aa, Homo Sapiens
MNAKVVVVLVLVLTALCLSDGKPVSLSYRCPCRFFESHVARANVKHLKILNTPNCALQIVARLKNNNRQVCIDPKLKWIQEYLEKALNNLISAAPAGKRVIAGARALHPSPPRACPTARALCEIRLWPPPEWSWPSPGDV

SEQ ID NO: 3803 - protein, 103 aa, Homo Sapiens
MNAKVVVVLVLVLTALCLSDGKPVSLSYRCPCRFFESHYCTCLIRVSFHGATPLTQGSWVLYSLSCAGGETGLREPGPMVSPRVESHQEGRLGVPGPVNLGKA

SEQ ID NO: 3804 - protein, 103 aa, Homo Sapiens; identical to SEQ ID NO: 3803

SEQ ID NO: 3805 - protein, 109 aa, Homo Sapiens
MKFISTSLLLMLLVSSLSPVQGVLEVYYTSLRCRCVQESSVFIPRRFIDRIQILPRGNGCPRKEIIVWKKNKSIVCVDPQAEWIQRMMEVLRKRSSSTLPVPVFKRKIP

SEQ ID NO: 3806 - protein, 99 aa, Homo Sapiens
MRLLAAALLLLLLALYTARVDGSKCKCSRKGPKIRYSDVKKLEMKPKYPHCEEKMVIITTKSVSRYRGQEHCLHPKLQSTKRFIKWYNAWNEKRRVYEE

SEQ ID NO: 3807 - protein, 111 aa, Homo Sapiens
MSLLPRRAPPVSMRLLAAALLLLLLALYTARVDGSKCKCSRKGPKIRYSDVKKLEMKPKYPHCEEKMVIITTKSVSRYRGQEHCLHPKLQSTKRFIKWYNAWNEKRRVYEE

SEQ ID NO: 3808 - protein, 62 aa, Homo Sapiens
MKVLISSLLLLLPLMLMSMVSSSLNPGVARGHRDRGQASRRWLQEGGQECECKAMLLFQIGS

SEQ ID NO: 3809 - protein, 119 aa, Homo Sapiens
MKVLISSLLLLLPLMLMSMVSSSLNPGVARGHRDRGQASRRWLQEGGQECECKDWFLRAPRRKFMTVSGLPKKQCPCDHFKGNVKKTRHQRHHRKPNKHSRACQQFLKQCQLRSFALPL

SEQ ID NO: 3810 - protein, 107 aa, Homo Sapiens
MARATLSAAPSNPRLLRVALLLLLLVAASRRAAGAPLATELRCQCLQTLQGIHLKNIQSVKVKSPGPHCAQTEVIATLKNGQKACLNPASPMVKKIIEKMLKNGKSN

SEQ ID NO: 3811 - protein, 107 aa, Homo Sapiens
MAHATLSAAPSNPRLLRVALLLLLLVAASRRAAGASVVTELRCQCLQTLQGIHLKNIQSVNVRSPGPHCAQTEVIATLKNGKKACLNPASPMVQKIIEKILNKGSTN

SEQ ID NO: 3812 - protein, 114 aa, Homo Sapiens
MSLLSSRAARVPGPSSSLCALLVLLLLLTQPGPIASAGPAAAVLRELRCVCLQTTQGVHPKMISNLQVFAIGPQCSKVEVVASLKNGKEICLDPEAPFLKKVIQKILDGGNKEN

SEQ ID NO: 3813 - protein, 113 aa, Homo Sapiens
MSLPSSRAARVPGPSGSLCALLALLLLLTPPGPLASAGPVSAVLTELRCTCLRVTLRVNPKTIGKLQVFPAGPQCSKVEVVASLKNGKQVCLDPEAPFLKKVIQKILDRYLSL

SEQ ID NO: 3814 - protein, 114 aa, Homo Sapiens
MSLPSSRAARVPGPSGSLCALLALLLLLTPPGPLASAGPVSAVLTELRCTCLRVTLRVNPKTIGKLQVFPAGPQCSKVEVVASLKNGKQVCLDPEAPFLKKVIQKILDSGNKKN

SEQ ID NO: 3815 - protein, 95 aa, Homo Sapiens
MTSKLAVALLAAFLISAALCEGAVLPRSAKELRCQCIKTYSKPFHPKFIKELRVIESGPHCANTEIIVKLSDGRELCLDPKENWVQRVVEKFLKR

SEQ ID NO: 3816 - protein, 99 aa, Homo Sapiens
MTSKLAVALLAAFLISAALCEGAVLPRSAKELRCQCIKTYSKPFHPKFIKELRVIESGPHCANTEIIVKLSDGRELCLDPKENWVQRVVEKFLKRAENS

SEQ ID NO: 3817 - protein, 125 aa, Homo Sapiens
MKKSGVLFLLGIILLVLIGVQGTPVVRKGRCSCISTNQGTIHLQSLKDLKQFAPSPSCEKIEIIATLKNGVQTCLNPDSADVKELIKKWEKQVSQKKKQKNGKKHQKKKVLKVRKSQRSRQKKTT

SEQ ID NO: 3818 - protein, 182 aa, Homo Sapiens
MEPQLGPEAAALRPGWLALLLWVSALSCSFSLPASSLSSLVPQVRTSYNFGRTFLGLDKCNACIGTSICKKFFKEEIRSDNWLASHLGLPPDSLLSYPANYSDDSKIWRPVEIFRLVSKYQNEISDRRICASASAPKTCSIERVLRKTERFQKWLQAKRLTPDLVQDCHQGQRELKFLCMLR

SEQ ID NO: 3819 - protein, 433 aa, Homo Sapiens
MEPQLGPEAAALRPGWLALLLWVSALSCSFSLPASSLSSLVPQVRTSYNFGRTFLGLDKCNACIGTSICKKFFKEEIRSDNWLASHLGLPPDSLLSYPANYSDDSKIWRPVEIFRLVSKYQNEISDRRICASASAPKTCSIERVLRKTERFQKWLQAKRLTPDLVQGLASPLLRCPSQRLLDRVVRRYAEVADAGSIFMDHFTDRDKLRLLYTLAVNSHPILLQIFPGAEGWPLPKYLGSCGRFLVSTSTRPLQEFYDAPPDQAADLAYQLLGVLESLRSNDLNYFFYFTHIDAGMFGVFNNGHLFIRDASAVGVIDKQEGSQEANRAGENKDIFSCLVSGCQAQLPSCESISEKQSLVLVCQKLLPRLLQGRFPSPVQDDIDSILVQCGDSIRPDPEVLGAASQLKDILRPLRTCDSRFAYRYPDCKYNDKF

SEQ ID NO: 3820 - protein, 264 aa, Homo Sapiens
MLRCGGRGLLLGLAVAAAAVMAARLMGWWGPRAGFRLFIPEELSRYRGGPGDPGLYLALLGRVYDVSSGRRHYEPGSHYSGFAGRDASRAFVTGDCSEAGLVDDVSDLSAAEMLTLHNWLSFYEKNYVCVGRVTGRFYGEDGLPTPALTQVEAAITRGLEANKLQLQEKQTFPPCNAEWSSARGSRLWCSQKSGGVSRDWIGVPRKLYKPGAKEPRCVCVRTTGPPSGQMPDNPPHRNRGDLDHPNLAEYTGCPPLAITCSFPL

SEQ ID NO: 3821 - protein, 106 aa, Homo Sapiens
MLTLHNWLSFYEKNYVCVGRVTGRFYGEDGLPTPALTQVEAAITRGLEANKLQLQEKQTFPPCNAEWSSARGSRLWCSQKRGFNSSLALASGSLKHACHRLILQFL

SEQ ID NO: 3822 - protein, 152 aa, Homo Sapiens
MLTLHNWLSFYEKNYVCVGRVTGRFYGEDGLPTPALTQVEAAITRGLEANKLQLQEKQTFPPCNAEWSSARGSRLWCSQKSGGVSRDWIGVPRKLYKPGAKEPRCVCVRTTGPPSGQMPDNPPHRNRGDLDHPNLAEYTGCPPLAITCSFPL

SEQ ID NO: 3823 - protein, 152 aa, Homo Sapiens; identical to SEQ ID NO: 3822

SEQ ID NO: 3824 - protein, 42 aa, Homo Sapiens
MAPKPGAEWSTALSHLVLGVVSLHAAVSTAEASRGAAAGFLL

SEQ ID NO: 3825 - protein, 362 aa, Homo Sapiens
MAPKPGAEWSTALSHLVLGVVSLHAAVSTAEASRGAAAGFLLQVLAATTTLAPGLSTHEDCLAGAWVATVIGLPLLAFDFHWCTNGHLMCAGCFIHLLADARLKEEQATCPNCRCEISKSLCCRNLAVEKAVSELPSECGFCLRQFPRSLLERHQKEECQDRVTQCKYKRIGCPWHGPFHELTVHEAACAHPTKTGSELMEILDGMDQSHRKEMQLYNSIFSLLSFEKIGYTEVQFRPYRTDDFITRLYYETPRFTVLNQTWVLKARVNDSERNPNLSCKRTLSFQLLLKSKVTAPLECSFLLLKGPYDDVRISPVIYHFVFTNESNETDYVPLPIIDSVECNKLLAAKNINLRLFLFQIQK

SEQ ID NO: 3826 - protein, 144 aa, Homo Sapiens
MAPKPGAEWSTALSHLVLGVVSLHAAVSTAEASRGAAAGFLLQVLAATTTLAPGLSTHEDCLAGAWVATVIGLPLLAFDFHWVNGDRSSANLLLGGGMVLAVAGGHLGPEGRSVAGQAMLLVVAVTILIVAVFTANTYGMWGGA

SEQ ID NO: 3827 - protein, 192 aa, Homo Sapiens
MAPKPGAEWSTALSHLVLGVVSLHAAVSTAEASRGAAAGFLLQVLAATTTLAPGLSTHEDCLAGAWVATVIGLPLLAFDFHWVNGDRSSANLLLGGGMVLAVAGGHLGPEGRSVAGQAMLLVVAVTILIVAVFTANTYGMWGGAMLGVAGLLSRLEEDRLLLLPKEDVCRWALAVGSWAYCRALHTQRLQWE

SEQ ID NO: 3828 - protein, 192 aa, Homo Sapiens; identical to SEQ ID NO: 3827

SEQ ID NO: 3829 - protein, 192 aa, Homo Sapiens; identical to SEQ ID NO: 3827

SEQ ID NO: 3830 - protein, 246 aa, Homo Sapiens
MAPKPGAEWSTALSHLVLGVVSLHAAVSTAECTNGHLMCAGCFIHLLADARLKEEQATCPNCRCEISKSLCCRNLAVEKAVSELPSECGFCLRQFPRSLLERHQKEECQDRVTQCKYKRIGCPWHGPFHELTVHEAACAHPTKTGSELMEILDGMDQSHRKEMQLYNSIFSLLSFEKIGYTEVQFRPYRTDDFITRLYYETPRFTVLNQTWVLKARVNDSERNPNLSCKRTLSFQLLLKSKVTAPL

SEQ ID NO: 3831 - protein, 404 aa, Homo Sapiens
MSGAEEAGGGGPAAGPAGSVPAGVGVGVGAGPGAAAGQAAAAALGEAAGPGLPDEAGLAGARQLQLQEAAGDPDAPPKKRLRAAEAAEAAAAAAAAGSGKLEERLYSVLCCTVCLDLPKASVYQCTNGHLMCAGCFIHLLADARLKEEQATCPNCRCEISKSLCCRNLAVEKAVSELPSECGFCLRQFPRSLLERHQKEECQDRVTQCKYKRIGCPWHGPFHELTVHEAACAHPTKTGSELMEILDGMDQSHRKEMQLYNSIFSLLSFEKIGYTEVQFRPYRTDDFITRLYYETPRFTVLNQTWVLKARVNDSERNPNLSCKRTLSFQLLLKSKVTAPLECSFLLLKGPYDDVRISPVIYHFVFTNESNETDYVPLPIIDSVECNKLLAAKNINLRLFLFQIQK

SEQ ID NO: 3832 - protein, 479 aa, Homo Sapiens
MWELVALLLLTLAYLFWPKRRCPGAKYPKSLLSLPLVGSLPFLPRHGHMHNNFFKLQKKYGPIYSVRMGTKTTVIVGHHQLAKEVLIKKGKDFSGRPQMATLDIASNNRKGIAFADSGAHWQLHRRLAMATFALFKDGDQKLEKIICQEISTLCDMLATHNGQSIDISFPVFVAVTNVISLICFNTSYKNGDPELNVIQNYNEGIIDNLSKDSLVDLVPWLKEKFRSDSITNMLDTLMQAKMNSDNGNAGPDQDSELLSDNHILTTIGDIFGAGVETTTSVVKWTLAFLLHNPQVKKKLYEEIDQNVGFSRTPTISDRNRLLLLEATIREVLRLRPVAPMLIPHKANVDSSIGEFAVDKGTEVIINLWALHHNEKEWHQPDQFMPERFLNPAGTQLISPSVSYLPFGAGPRSCIGEILARQELFLIMAWLLQRFDLEVPDDGQLPSLEGIPKVVFLIDSFKVKIKVRQAWREAQAEGST

SEQ ID NO: 3833 - protein, 508 aa, Homo Sapiens
MWELVALLLLTLAYLFWPKRRCPGAKYPKSLLSLPLVGSLPFLPRHGHMHNNFFKLQKKYGPIYSVRMGTKTTVIVGHHQLAKEVLIKKGKDFSGRPQMATLDIASNNRKGIAFADSGAHWQLHRRLAMATFALFKDGDQKLEKIICQEISTLCDMLATHNGQSIDISFPVFVAVTNVISLICFNTSYKNGDPELNVIQNYNEGIIDNLSKDSLVDLVPWLKIFPNKTLEKLKSHVKIRNDLLNKILENYKEKFRSDSITNMLDTLMQAKMNSDNGNAGPDQDSELLSDNHILTTIGDIFGAGVETTTSVVKWTLAFLLHNPQVKKKLYEEIDQNVGFSRTPTISDRNRLLLLEATIREVLRLRPVAPMLIPHKANVDSSIGEFAVDKGTEVIINLWALHHNEKEWHQPDQFMPERFLNPAGTQLISPSVSYLPFGAGPRSCIGEILARQELFLIMAWLLQRFDLEVPDDGQLPSLEGIPKVVFLIDSFKVKIKVRQAWREAQAEGST

SEQ ID NO: 3834 - protein, 509 aa, Homo Sapiens
MWELVALLLLTLAYLFWPKRRCPGAKYPKSLLSLPLVGSLPFLPRHGHMHNNFFKLQKKYGPIYSVRMGTKTTVIVGHHQLAKEVLIKKGKDFSGRPQMATLDIASNNRKGIAFADSGAHWQLHRRLAMATFALFKDGDQKLEKIICQEISTLCDMLATHNGQSIDISFPVFVAVTNVISLICFNTSYKNGDPELNVIQNYNEGIIDNLSKDSLVDLVPWLKIFPNKTLEKLKSHVKIRNDLLNKILENYKEKFRSDSITNMLDTLMQAKMNSDNGNAGPDQDSELLSDNHILTTIGDIFGAGVETTTSVVKWTLAFLLHNPQVKKKLYEEIDQNVGFSRTPTISDRNRLLLLEATIREVLRLRPVAPMLIPHKANVDSSSIGEFAVDKGTEVIINLWALHHNEKEWHQPDQFMPERFLNPAGTQLISPSVSYLPFGAGPRSCIGEILARQELFLIMAWLLQRFDLEVPDDGQLPSLEGIPKVVFLIDSFKVKIKVRQAWREAQAEGST

SEQ ID NO: 3835 - protein, 407 aa, Homo Sapiens
MWELVALLLLTLAYLFWPKRRCPGAKYPKSLLSLPLVGSLPFLPRHGHMHNNFFKLQKKYGPIYSVRMGTKTTVIVGHHQLAKEVLIKKGKDFSGRPQMATLDIASNNRKGIAFADSGAHWQLHRRLAMATFALFKDGDQKLEKIICQEISTLCDMLATHNGQSIDISFPVFVAVTNVISLICFNTSYKNGDPELNVIQNYNEGIIDNLSKDSLVDLVPWLKVKKKLYEEIDQNVGFSRTPTISDRNRLLLLEATIREVLRLRPVAPMLIPHKANVDSSIGEFAVDKGTEVIINLWALHHNEKEWHQPDQFMPERFLNPAGTQLISPSVSYLPFGAGPRSCIGEILARQELFLIMAWLLQRFDLEVPDDGQLPSLEGIPKVVFLIDSFKVKIKVRQAWREAQAEGST

SEQ ID NO: 3836 - protein, 356 aa, Homo Sapiens
MWELVALLLLTLAYLFWPKRRCPGAKYPKSLLSLPLVGSLPFLPRHGHMHNNFFKLQKKYGPIYSVRMGTKTTVIVGHHQLAKEVLIKKGKDFSGRPQMEKFRSDSITNMLDTLMQAKMNSDNGNAGPDQDSELLSDNHILTTIGDIFGAGVETTTSVVKWTLAFLLHNPQVKKKLYEEIDQNVGFSRTPTISDRNRLLLLEATIREVLRLRPVAPMLIPHKANVDSSIGEFAVDKGTEVIINLWALHHNEKEWHQPDQFMPERFLNPAGTQLISPSVSYLPFGAGPRSCIGEILARQELFLIMAWLLQRFDLEVPDDGQLPSLEGIPKVVFLIDSFKVKIKVRQAWREAQAEGST

SEQ ID NO: 3837 - protein, 192 aa, Homo Sapiens
MIFSLASCIITAKLCTWAICFLTTSEEVQKKLYEEINQVFGNGPVTPEKIEQLRYCQHVLCETVRTAKLTPVSAQLQDIEGKIDRFIIPRETLVLYALGVVLQDPNTWPSPHKFDPDRFDDELVMKTFSSLGFSGTQECPELRFAYMVTTVLLSVLVKRLHLLSVEGQVIETKYELVTSSREEAWITVSKRY

SEQ ID NO: 3838 - protein, 258 aa, Homo Sapiens
MLDFAIFAVTFLLALVGAVLYLYPASRQAAGIPGITPTEEKDGNLPDIVNSGSLHEFLVNLHERYGPVVSFWFGRRLVVSLGTVDVLKQHINPNKTSDPFETMLKSLLRYQSGGGSVSENHMRKKLYENGVTDSLKSNFALLLKLSEELLDKWLSYPETQHVPLSQHMLGFAMKSVTQMVMGSTFEDDQEVIRFQKNHGTILEDSMIFSLASCIITAKLCTWAICFLTTSEEVQKKLYEEINQVFGNGPVTPEKIEQL

SEQ ID NO: 3839 - protein, 470 aa, Homo Sapiens
MLDFAIFAVTFLLALVGAVLYLYPASRQAAGIPGITPTEEKDGNLPDIVNSGSLHEFLVNLHERYGPVVSFWFGRRLVVSLGTVDVLKQHINPNKTSDPFETMLKSLLRYQSGGGSVSENHMRKKLYENGVTDSLKSNFALLLKLSEELLDKWLSYPETQHVPLSQHMLGFAMKSVTQMVMGSTFEDDQEVIRFQKNHGTLCIFTYFQVWSEIGKGFLDGSLDKNMTRKKQYEDALMQLESVLRNIIKERKGRNFSQHIFIDSLVQGNLNDQQILEDSMIFSLASCIITAKLCTWAICFLTTSEEVQKKLYEEINQVFGNGPVTPEKIEQLRYCQHVLCETVRTAKLTPVSAQLQDIEGKIDRFIIPRETLVLYALGVVLQDPNTWPSPHKFDPDRFDDELVMKTFSSLGFSGTQECPELRFAYMVTTVLLSVLVKRLHLLSVEGQVIETKYELVTSSREEAWITVSKRY

SEQ ID NO: 3840 - protein, 208 aa, Homo Sapiens
MLDFAIFAVTFLLALVGAVLYLYPASRQAAGIPGITPTEEKDGNLPDIVNSGSLHEFLVNLHERYGPVVSFWFGRRLVVSLGTVDVLKQHINPNKTSDPFETMLKSLLRYQSGGGSVSENHMRKKLYENGVTDSLKSNFALLLKLSEELLDKWLSYPETQHVPLSQHMLGFAMKSVTQMVMGSTFEDDQEVIRFQKNHGTPSCNWSLF

SEQ ID NO: 3841 - protein, 462 aa, Homo Sapiens
MLDFAIFAVTFLLALVGAVLYLYPASRQAAGIPGITPTEEKDGNLPDIVNSGSLHEFLVNLHERYGPVVSFWFGRRLVVSLGTVDVLKQHINPNKTSDPFETMLKSLLRYQSGGGSVSENHMRKKLYENGVTDSLKSNFALLLKLSEELLDKWLSYPETQHVPLSQHMLGFAMKSVTQMVMGSTFEDDQEVIRFQKNHGTVWSEIGKGFLDGSLDKNMTRKKQYEDALMQLESVLRNIIKERKGRNFSQHIFIDSLVQGNLNDQQILEDSMIFSLASCIITAKLCTWAICFLTTSEEVQKKLYEEINQVFGNGPVTPEKIEQLRYCQHVLCETVRTAKLTPVSAQLQDIEGKIDRFIIPRETLVLYALGVVLQDPNTWPSPHKFDPDRFDDELVMKTFSSLGFSGTQECPELRFAYMVTTVLLSVLVKRLHLLSVEGQVIETKYELVTSSREEAWITVSKRY

SEQ ID NO: 3842 - protein, 44 aa, Homo Sapiens
MLDFAIFAVTFLLALVGAVLYLYPASRQAAGIPGITPTEENGPF

SEQ ID NO: 3843 - protein, 44 aa, Homo Sapiens; identical to SEQ ID NO: 3842

SEQ ID NO: 3844 - protein, 78 aa, Homo Sapiens
MLLLGLLLLLPLLAGARLLWNWWKLRSLHLPPLAPGFLHLLQPDLPIYLLGLTQKFGPIYRLHLGLQAPTSSCRQAGV

SEQ ID NO: 3845 - protein, 465 aa, Homo Sapiens
MLLLGLLLLLPLLAGARLLWNWWKLRSLHLPPLAPGFLHLLQPDLPIYLLGLTQKFGPIYRLHLGLQDKLVSRNYPDLSLGDYSLLWKAHKKLTRSALLLGIRDSMEPVVEQLTQEFCERMRAQPGTPVAIEEEFSLLTCSIICYLTFGDKIKDDNLMPAYYKCIQEVLKTWSHWSIQIVDVIPFLRFFPNPGLRRLKQAIEKRDHIVEMQLRQHKESLVAGQWRDMMDYMLQGVAQPSMEEGSGQLLEGHVHMAAVDLLIGGTETTANTLSWAVVFLLHHPEIQQRLQEELDHELGPGASSSRVPYKDRARLPLLNATIAEVLRLRPVVPLALPHRTTRPSSISGYDIPEGTVIIPNLQGAHLDETVWERPHEFWPDRFLEPGKNSRALAFGCGARVCLGEPLARLELFVVLTRLLQAFTLLPSGDALPSLQPLPHCSVILKMQPFQVRLQPRGMGAHSPGQSQ

SEQ ID NO: 3846 - protein, 186 aa, Homo Sapiens
MLLLGLLLLLPLLAGARLLWNWWKLRSLHLPPLAPGFLHLLQPDLPIYLLGLTQKFGPIYRLHLGLQDVVVLNSKRTIEEAMVKKWADFAGRPEPLTFPTLQPPPPPADKLVSRNYPDLSLGDYSLLWKAHKKLTRSALLLGIRDSMEPVVEQLTQEFCERMRAQPGTPVAIEEEFSLLTCSIICY

SEQ ID NO: 3847 - protein, 108 aa, Homo Sapiens
MLLLGLLLLLPLLAGARLLWNWWKLRSLHLPPLAPGFLHLLQPDLPIYLLGLTQKFGPIYRLHLGLQDVVVLNSKRTIEEAMVKKWADFAGRPEPLTSPTSSCRQAGV

SEQ ID NO: 3848 - protein, 495 aa, Homo Sapiens
MLLLGLLLLLPLLAGARLLWNWWKLRSLHLPPLAPGFLHLLQPDLPIYLLGLTQKFGPIYRLHLGLQDVVVLNSKRTIEEAMVKKWADFAGRPEPLTYKLVSRNYPDLSLGDYSLLWKAHKKLTRSALLLGIRDSMEPVVEQLTQEFCERMRAQPGTPVAIEEEFSLLTCSIICYLTFGDKIKDDNLMPAYYKCIQEVLKTWSHWSIQIVDVIPFLRFFPNPGLRRLKQAIEKRDHIVEMQLRQHKESLVAGQWRDMMDYMLQGVAQPSMEEGSGQLLEGHVHMAAVDLLIGGTETTANTLSWAVVFLLHHPEIQQRLQEELDHELGPGASSSRVPYKDRARLPLLNATIAEVLRLRPVVPLALPHRTTRPSSISGYDIPEGTVIIPNLQGAHLDETVWERPHEFWPDRFLEPGKNSRALAFGCGARVCLGEPLARLELFVVLTRLLQAFTLLPSGDALPSLQPLPHCSVILKMQPFQVRLQPRGMGAHSPGQSQ

SEQ ID NO: 3849 - protein, 495 aa, Homo Sapiens; identical to SEQ ID NO: 3848

SEQ ID NO: 3850 - protein, 495 aa, Homo Sapiens; identical to SEQ ID NO: 3848

SEQ ID NO: 3851 - protein, 190 aa, Homo Sapiens
MLLLGLLLLLPLLAGARLLWNWWKLRSLHLPPLAPGFLHLLQPDLPIYLLGLTQKFGPIYRLHLGLQDVVVLNSKRTIEEAMVKKWADFAGRPEPLTYKLVSRNYPDLSLGDYSLLWKAHKKLTRSALLLGIRDSMEPVVEQLTQEFCERMRAQPGTPVAIEEEFSLLTCSIICYLTFGDKIKEVLKTWS

SEQ ID NO: 3852 - protein, 321 aa, Homo Sapiens
MAIRVLLGFSIPEEDLGHLFEVYQQFVDNVFSLPVDLPFSGYRRGIQARQILQKGLEKAIREKLQCTQGKDYLDALDLLIESSKEHGKEMTMQELKDGTLELIFAAYATTASASTSLIMQLLKHPTVLEKLRDELRAHGILHSGGCPCEGTLRLDTLSGLRYLDCVIKEVMRLFTPISGGYRTVLQTFELDGFQIPKGWSVMYSIRDTHDTAPVFKDVNVFDPDRFSQARSEDKDGRFHYLPFGGGVRTCLGKHLAKLFLKVLAVELASTSRFELATRTFPRITLVPVLHPVDGLSVKFFGLDSNQNEILPETEAMLSATV

SEQ ID NO: 3853 - protein, 172 aa, Homo Sapiens
MKNKTCVLVCVSVFGGERGQVTVPRVGVRRPSLAGPLQKCTLRETRVWLPQGSGFQSSRREKYGNVFKTHLLGRPLIRVTGAENVRKILMGEHHLVSTEWPRSTRMLLGPNTVSNSIGDIHRNKRKVFSKIFSHEALESYLPKIQLVIQDTLRAWSSHPEAINVYQEAQKLT

SEQ ID NO: 3854 - protein, 512 aa, Homo Sapiens
MLFEGLDLVSALATLAACLVSVTLLLAVSQQLWQLRWAATRDKSCKLPIPKGSMGFPLIGETGHWLLQGSGFQSSRREKYGNVFKTHLLGRPLIRVTGAENVRKILMGEHHLVSTEWPRSTRMLLGPNTVSNSIGDIHRNKRKVFSKIFSHEALESYLPKIQLVIQDTLRAWSSHPEAINVYQEAQKLTFRMAIRVLLGFSIPEEDLGHLFEVYQQFVDNVFSLPVDLPFSGYRRGIQARQILQKGLEKAIREKLQCTQGKDYLDALDLLIESSKEHGKEMTMQELKDGTLELIFAAYATTASASTSLIMQLLKHPTVLEKLRDELRAHGILHSGGCPCEGTLRLDTLSGLRYLDCVIKEVMRLFTPISGGYRTVLQTFELDGFQIPKGWSVMYSIRDTHDTAPVFKDVNVFDPDRFSQARSEDKDGRFHYLPFGGGVRTCLGKHLAKLFLKVLAVELASTSRFELATRTFPRITLVPVLHPVDGLSVKFFGLDSNQNEILPETEAMLSATV

SEQ ID NO: 3855 - protein, 182 aa, Homo Sapiens
MLFEGLDLVSALATLAACLVSVTLLLAVSQQLWQLRWAATRDKSCKLPIPKGSMGFPLIGETGHWLLQVFSKIFSHEALESYLPKIQLVIQDTLRAWSSHPEAINVYQEAQKLTFRMAIRVLLGFSIPEEDLGHLFEVYQQFVDNVFSLPVDLPFSGYRRGIQARQILQKGLEKAIREKLQC

SEQ ID NO: 3856 - protein, 437 aa, Homo Sapiens
MLFEGLDLVSALATLAACLVSVTLLLAVSQQLWQLRWAATRDKSCKLPIPKGSMGFPLIGETGHWLLQVFSKIFSHEALESYLPKIQLVIQDTLRAWSSHPEAINVYQEAQKLTFRMAIRVLLGFSIPEEDLGHLFEVYQQFVDNVFSLPVDLPFSGYRRGIQARQILQKGLEKAIREKLQCTQGKDYLDALDLLIESSKEHGKEMTMQELKDGTLELIFAAYATTASASTSLIMQLLKHPTVLEKLRDELRAHGILHSGGCPCEGTLRLDTLSGLRYLDCVIKEVMRLFTPISGGYRTVLQTFELDGFQIPKGWSVMYSIRDTHDTAPVFKDVNVFDPDRFSQARSEDKDGRFHYLPFGGGVRTCLGKHLAKLFLKVLAVELASTSRFELATRTFPRITLVPVLHPVDGLSVKFFGLDSNQNEILPETEAMLSATV

SEQ ID NO: 3857 - protein, 494 aa, Homo Sapiens
MLASGMLLVALLVCLTVMVLMSVWQQRKSKGKLPPGPTPLPFIGNYLQLNTEQMYNSLMKISERYGPVFTIHLGPRRVVVLCGHDAVREALVDQAEEFSGRGEQATFDWVFKGYGVVFSNGERAKQLRRFSIATLRDFGVGKRGIEERIQEEAGFLIDALRGTGGANIDPTFFLSRTVSNVISSIVFGDRFDYKDKEFLSLLRMMLGIFQFTSTSTGQLYEMFSSVMKHLPGPQQQAFQLLQGLEDFIAKKVEHNQRTLDPNSPRDFIDSFLIRMQEEEKNPNTEFYLKNLVMTTLNLFIGGTETVSTTLRYGFLLLMKHPEVEAKVHEEIDRVIGKNRQPKFEDRAKMPYMEAVIHEIQRFGDVIPMSLARRVKKDTKFRDFFLPKGTEVYPMLGSVLRDPSFFSNPQDFNPQHFLNEKGQFKKSDAFVPFSIGKRNCFGEGLARMELFLFFTTVMQNFRLKSSQSPKDIDVSPKHVGFATIPRNYTMSFLPR

SEQ ID NO: 3858 - protein, 65 aa, Homo Sapiens
MLASGMLLVALLVCLTVMVLMSVWQQRKSKGKLPPGPTPLPFIGNYLQLNTEQMYNSLMKVSQDQ

SEQ ID NO: 3859 - protein, 80 aa, Homo Sapiens
MLASGLLLVALLACLTVMVLMSVWQQRKSRGKLPPGPTPLPFIGNYLQLNTEHICDSIMKAWRSATGSAPSSSCALPSPP

SEQ ID NO: 3860 - protein, 494 aa, Homo Sapiens
MLASGLLLVALLACLTVMVLMSVWQQRKSRGKLPPGPTPLPFIGNYLQLNTEHICDSIMKFSECYGPVFTIHLGPRRVVVLCGHDAVREALVDQAEEFSGRGEQATFDWVFKGYGVAFSNGERAKQLLRFAIATLRDFGVGKRGIEERIQEESGFLIEAIRSTHGANIDPTFFLSRTVSNVISSIVFGDRFDYEDKEFLSLLSMMLGIFQFTSTSTGQLYEMFSSVMKHLPGPQQQAFKLLQGLEDFIAKKVEHNQRTLDPNSPQDFIDSFLIHMQEEEKNPNTEFYLKNLMMSTLNLFIAGTETVSTTLRYGFLLLMKHPEVEAKVHEEIDRVIGKNRQPKFEDRTKMPYMEAVIHEIQRFGDVIPMSLARRVKKDTKFRDFFLPKGTEVFPMLGSVLRDPSFFSNPQDFNPQHFLDDKGQFKKSDAFVPFSIGKRNCFGEGLARMELFLFFTTVMQNFRLKSSQSPKDIDVSPKHVVFATIPRNYTMSFLPR

SEQ ID NO: 3861 - protein, 443 aa, Homo Sapiens
MLASGLLLVALLACLTVMVLMSVWQQRKSRGKLPPGPTPLPFIGNYLQLNTEHICDSIMKVSQGVAFSNGERAKQLLRFAIATLRDFGVGKRGIEERIQEESGFLIEAIRSTHGANIDPTFFLSRTVSNVISSIVFGDRFDYEDKEFLSLLSMMLGIFQFTSTSTGQLYEMFSSVMKHLPGPQQQAFKLLQGLEDFIAKKVEHNQRTLDPNSPQDFIDSFLIHMQEEEKNPNTEFYLKNLMMSTLNLFIAGTETVSTTLRYGFLLLMKHPEVEAKVHEEIDRVIGKNRQPKFEDRTKMPYMEAVIHEIQRFGDVIPMSLARRVKKDTKFRDFFLPKGTEVFPMLGSVLRDPSFFSNPQDFNPQHFLDDKGQFKKSDAFVPFSIGKRNCFGEGLARMELFLFFTTVMQNFRLKSSQSPKDIDVSPKHVVFATIPRNYTMSFLPR

SEQ ID NO: 3862 - protein, 491 aa, Homo Sapiens
MELSVLLFLALLTGLLLLLVQRHPNTHDRLPPGPRPLPLLGNLLQMDRRGLLKSFLRFREKYGDVFTVHLGPRPVVMLCGVEAIREALVDKAEAFSGRGKIAMVDPFFRGYGVIFANGNRWKVLRRFSVTTMRDFGMGKRSVEERIQEEAQCLIEELRKSKGALMDPTFLFQSITANIICSIVFGKRFHYQDQEFLKMLNLFYQTFSLISSVFGQLFELFSGFLKYFPGAHRQVYKNLQEINAYIGHSVEKHRETLDPSAPKDLIDTYLLHMEKEKSNAHSEFSHQNLNLNTLSLFFAGTETTSTTLRYGFLLMLKYPHVAERVYREIEQVIGPHRPPELHDRAKMPYTEAVIYEIQRFSDLLPMGVPHIVTQHTSFRGYIIPKDTEVFLILSTALHDPHYFEKPDAFNPDHFLDANGALKKTEAFIPFSLGKRICLGEGIARAELFLFFTTILQNFSMASPVAPEDIDLTPQECGVGKIPPTYQIRFLPR

SEQ ID NO: 3863 - protein, 491 aa, Homo Sapiens; identical to SEQ ID NO: 3862

SEQ ID NO: 3864 - protein, 255 aa, Homo Sapiens
MLCGVEAIREALVDKAEAFSGRGKIAMVDPFFRGYGVIFANGNRWKVLRRFSVTTMRDFGMGKRSVEERIQEEAQCLIEELRKSKERVYREIEQVIGPHRPPELHDRAKMPYTEAVIYEIQRFSDLLPMGVPHIVTQHTSFRGYIIPKDTEVFLILSTALHDPHYFEKPDAFNPDHFLDANGALKKTEAFIPFSLGKRICLGEGIARAELFLFFTTILQNFSMASPVAPEDIDLTPQECGVGKIPPTYQIRFLPR

SEQ ID NO: 3865 - protein, 194 aa, Homo Sapiens
  misc_feature (1)..(1): Xaa can be any naturally occurring amino acid
XPRPLPLLGNLLQMDRRGLLKSFLRFREKYGDVFTVHLGPRPVVMLCGVEAIREALVDKAEAFSGRGKIAMVDPFFRGYGVIFANGNRWKVLRRFSVTTMRDFGMGKRSVEERIQEEAQCLIEELRKSKGALMDPTFLFQSITANIICSIVFGKRFHYQDQEFLKMLNLFYQTFSLISSVFGQTESRCFIPAGV

SEQ ID NO: 3866 - protein, 431 aa, Homo Sapiens
MDPAVALVLCLSCLFLLSLWRQSSGRGRLPSGPTPLPIIGNILQLDVKDMSKSLTNFSKVYGPVFTVYFGLKPIVVLHGYEAVKEALIDHGEEFSGRGSFPVAEKVNKGLGILFSNGKRWKEIRRFCLMTLRNFGMGKRSIEDRVQEEARCLVEELRKTNASPCDPTFILGCAPCNVICSVIFHDRFDYKDQRFLNLMEKFNENLRILSSPWIQEKHNQQSEFTVESLIATVTDMFGAGTETTSTTLRYGLLLLLKYPEVTAKVQEEIECVVGRNRSPCMQDRSHMPYTDAVVHEIQRYIDLLPTNLPHAVTCDVKFKNYLIPKGTTIITSLTSVLHNDKEFPNPEMFDPGHFLDKSGNFKKSDYFMPFSAGKRMCMGEGLARMELFLFLTTILQNFNLKSQVDPKDIDITPIANAFGRVPPLYQLCFIPV

SEQ ID NO: 3867 - protein, 490 aa, Homo Sapiens
MDPAVALVLCLSCLFLLSLWRQSSGRGRLPSGPTPLPIIGNILQLDVKDMSKSLTNFSKVYGPVFTVYFGLKPIVVLHGYEAVKEALIDHGEEFSGRGSFPVAEKVNKGLGILFSNGKRWKEIRRFCLMTLRNFGMGKRSIEDRVQEEARCLVEELRKTNASPCDPTFILGCAPCNVICSVIFHDRFDYKDQRFLNLMEKFNENLRILSSPWIQVCNNFPALIDYLPGSHNKIAENFAYIKSYVLERIKEHQESLDMNSARDFIDCFLIKMEQEKHNQQSEFTVESLIATVTDMFGAGTETTSTTLRYGLLLLLKYPEVTAKVQEEIECVVGRNRSPCMQDRSHMPYTDAVVHEIQRYIDLLPTNLPHAVTCDVKFKNYLIPKGTTIITSLTSVLHNDKEFPNPEMFDPGHFLDKSGNFKKSDYFMPFSAGKRMCMGEGLARMELFLFLTTILQNFNLKSQVDPKDIDITPIANAFGRVPPLYQLCFIPV

SEQ ID NO: 3868 - protein, 490 aa, Homo Sapiens
MDPFVVLVLCLSCLLLLSIWRQSSGRGKLPPGPTPLPVIGNILQIDIKDVSKSLTNLSKIYGPVFTLYFGLERMVVLHGYEVVKEALIDLGEEFSGRGHFPLAERANRGFGIVFSNGKRWKEIRRFSLMTLRNFGMGKRSIEDRVQEEARCLVEELRKTKASPCDPTFILGCAPCNVICSIIFQKRFDYKDQQFLNLMEKLNENIRIVSTPWIQICNNFPTIIDYFPGTHNKLLKNLAFMESDILEKVKEHQESMDINNPRDFIDCFLIKMEKEKQNQQSEFTIENLVITAADLLGAGTETTSTTLRYALLLLLKHPEVTAKVQEEIERVIGRNRSPCMQDRGHMPYTDAVVHEVQRYIDLIPTSLPHAVTCDVKFRNYLIPKGTTILTSLTSVLHDNKEFPNPEMFDPRHFLDEGGNFKKSNYFMPFSAGKRICVGEGLARMELFLFLTFILQNFNLKSLIDPKDLDTTPVVNGFASVPPFYQLCFIPV

SEQ ID NO: 3869 - protein, 162 aa, Homo Sapiens
MDPFVVLVLCLSCLLLLSIWRQSSGRGKLPPGPTPLPVIGNILQIDIKDVSKSLTNLSKIYGPVFTLYFGLERMVVLHGYEVVKEALIDLGEEFSGRGHFPLAERANRGFGIVFSNGKRWKEIRRFSLMTLRNFGMGKRSIEDRVQEEARCLVEELRKTKGG

SEQ ID NO: 3870 - protein, 307 aa, Homo Sapiens
MAAKCCSTFFLGCEFSQFLPLFLLGIISSNGKRWKEIRRFSLTTLRNFGMGKRSIEDRVQEEAHCLVEELRKTKASPCDPTFILGCAPCNVICSVVFQKRFDYKDQNFLTLMKRFNENFRILNSPWIQVCNNFPLLIDCFPGTHNKVLKNVALTRSYIREKVKEHQASLDVNNPRDFIDCFLIKMEQEKDNQKSEFNIENLVGTVADLFVAGTETTSTTLRYGLLLLLKHPEVTAKVQEEIDHVIGRHRSPCMQDRSHMPYTDAVVHEIQRYSDLVPTGVPHAVTTDTKFRNYLIPKSFDNKIMLAA

SEQ ID NO: 3871 - protein, 490 aa, Homo Sapiens
MEPFVVLVLCLSFMLLFSLWRQSCRRRKLPPGPTPLPIIGNMLQIDVKDICKSFTNFSKVYGPVFTVYFGMNPIVVFHGYEAVKEALIDNGEEFSGRGNSPISQRITKGLGIISSNGKRWKEIRRFSLTTLRNFGMGKRSIEDRVQEEAHCLVEELRKTKASPCDPTFILGCAPCNVICSVVFQKRFDYKDQNFLTLMKRFNENFRILNSPWIQVCNNFPLLIDCFPGTHNKVLKNVALTRSYIREKVKEHQASLDVNNPRDFIDCFLIKMEQEKDNQKSEFNIENLVGTVADLFVAGTETTSTTLRYGLLLLLKHPEVTAKVQEEIDHVIGRHRSPCMQDRSHMPYTDAVVHEIQRYSDLVPTGVPHAVTTDTKFRNYLIPKGTTIMALLTSVLHDDKEFPNPNIFDPGHFLDKNGNFKKSDYFMPFSAGKRICAGEGLARMELFLFLTTILQNFNLKSVDDLKNLNTTAVTKGIVSLPPSYQICFIPV

SEQ ID NO: 3872 - protein, 393 aa, Homo Sapiens
MEPFVVLVLCLSFMLLFSLWRQSCRRRKLPPGPTPLPIIGNMLQIDVKDICKSFTNFSKVYGPVFTVYFGMNPIVVFHGYEAVKEALIDNGEEFSGRGNSPISQRITKGLGIISSNGKRWKEIRRFSLTTLRNFGMGKRSIEDRVQEEAHCLVEELRKTKASPCDPTFILGCAPCNVICSVVFQKRFDYKDQNFLTLMKRFNENFRILNSPWIQVCNNFPLLIDCFPGTHNKVLKNVALTRSYIREKVKEHQASLDVNNPRDFIDCFLIKMEQEKDNQKSEFNIENLVGTVADLFVAGTETTSTTLRYGLLLLLKHPEVTAKVQEEIDHVIGRHRSPCMQDRSHMPYTDAVVHEIQRYSDLVPTGVPHAVTTDTKFRNYLIPKSFDNKIMLAA

SEQ ID NO: 3873 - protein, 99 aa, Homo Sapiens
MEPFVVLVLCLSFMLLFSLWRQSCRRRKLPPGPTPLPIIGNMLQIDVKDICKSFTNVSLPYVPPANCKGNHFQQWKEMEGDPAFLPHNLAEFWDGEEEH

SEQ ID NO: 3874 - protein, 83 aa, Homo Sapiens
MEPFVVLVLCLSFMLLFSLWRQSCRRRKLPPGPTPLPIIGNMLQIDVKDICKSFTNVSLPYVPPANCKGSQKSMVLCSPCILA

SEQ ID NO: 3875 - protein, 388 aa, Homo Sapiens
MFLQPIAKGIISSNGKRWKEIRRFSLTTLRNFGMGKRSIEDRVQEEAHCLVEELRKTKASPCDPTFILGCAPCNVICSVVFQKRFDYKDQNFLTLMKRFNENFRILNSPWIQVCNNFPLLIDCFPGTHNKVLKNVALTRSYIREKVKEHQASLDVNNPRDFIDCFLIKMEQEKDNQKSEFNIENLVGTVADLFVAGTETTSTTLRYGLLLLLKHPEVTAKVQEEIDHVIGRHRSPCMQDRSHMPYTDAVVHEIQRYSDLVPTGVPHAVTTDTKFRNYLIPKGTTIMALLTSVLHDDKEFPNPNIFDPGHFLDKNGNFKKSDYFMPFSAGKRICAGEGLARMELFLFLTTILQNFNLKSVDDLKNLNTTAVTKGIVSLPPSYQICFIPV

SEQ ID NO: 3876 - protein, 420 aa, Homo Sapiens
MNPIVVFHGYEAVKEALIDNGEEFSGRGNSPISQRITKGLGIISSNGKRWKEIRRFSLTTLRNFGMGKRSIEDRVQEEAHCLVEELRKTKASPCDPTFILGCAPCNVICSVVFQKRFDYKDQNFLTLMKRFNENFRILNSPWIQVCNNFPLLIDCFPGTHNKVLKNVALTRSYIREKVKEHQASLDVNNPRDFIDCFLIKMEQEKDNQKSEFNIENLVGTVADLFVAGTETTSTTLRYGLLLLLKHPEVTAKVQEEIDHVIGRHRSPCMQDRSHMPYTDAVVHEIQRYSDLVPTGVPHAVTTDTKFRNYLIPKGTTIMALLTSVLHDDKEFPNPNIFDPGHFLDKNGNFKKSDYFMPFSAGKRICAGEGLARMELFLFLTTILQNFNLKSVDDLKNLNTTAVTKGIVSLPPSYQICFIPV

SEQ ID NO: 3877 - protein, 420 aa, Homo Sapiens; identical to SEQ ID NO: 3876

SEQ ID NO: 3878 - protein, 490 aa, Homo Sapiens [sequence omitted]

SEQ ID NO: 3879 - protein, 282 aa, Homo Sapiens
MDSLVVLVLCLSCLLLLSLWRQSSGRGKLPPGPTPLPVIGNILQIGIKDISKSLTNLSKVYGPVFTLYFGLKPIVVLHGYEAVKEALIDLGEEFSGRGIFPLAERANRGFGIVFSNGKKWKEIRRFSLMTLRNFGMGKRSIEDRVQEEARCLVEELRKTKASPCDPTFILGCAPCNVICSIIFHKRFDYKDQQFLNLMEKLNENIKILSSPWIQICNNFSPIIDYFPGTHNKLLKNVAFMKSYILEKVKEHQESMDMNNPQDFIDCFLMKMEKLKSRKRLNV

SEQ ID NO: 3880 - protein, 162 aa, Homo Sapiens
MDSLVVLVLCLSCLLLLSLWRQSSGRGKLPPGPTPLPVIGNILQIGIKDISKSLTNLSKVYGPVFTLYFGLKPIVVLHGYEAVKEALIDLGEEFSGRGIFPLAERANRGFGIVFSNGKKWKEIRRFSLMTLRNFGMGKRSIEDRVQEEARCLVEELRKTKGG

SEQ ID NO: 3881 - protein, 86 aa, Homo Sapiens
MSALGVTVALLVWAAFLLLVSMWRQVHSSWNLPPGPFPLPIIGNLFQLELKNIPKSFTRLAQRFGPVFTLYVGSQRMVVMHGYKAV

SEQ ID NO: 3882 - protein, 493 aa, Homo Sapiens
MSALGVTVALLVWAAFLLLVSMWRQVHSSWNLPPGPFPLPIIGNLFQLELKNIPKSFTRLAQRFGPVFTLYVGSQRMVVMHGYKAVKEALLDYKDEFSGRGDLPAFHAHRDRGIIFNNGPTWKDIRRFSLTTLRNYGMGKQGNESRIQREAHFLLEALRKTQGQPFDPTFLIGCAPCNVIADILFRKHFDYNDEKFLRLMYLFNENFHLLSTPWLQLYNNFPSFLHYLPGSHRKVIKNVAEVKEYVSERVKEHHQSLDPNCPRDLTDCLLVEMEKEKHSAERLYTMDGITVTVADLFFAGTETTSTTLRYGLLILMKYPEIEEKLHEEIDRVIGPSRIPAIKDRQEMPYMDAVVHEIQRFITLVPSNLPHEATRDTIFRGYLIPKGTVVVPTLDSVLYDNQEFPDPEKFKPEHFLNENGKFKYSDYFKPFSTGKRVCAGEGLARMELFLLLCAILQHFNLKPLVDPKDIDLSPIHIGFGCIPPRYKLCVIPRS

SEQ ID NO: 3883 - protein, 493 aa, Homo Sapiens; identical to SEQ ID NO: 3882

SEQ ID NO: 3884 - protein, 356 aa, Homo Sapiens
RPFPASHHREPLPVGIEEYSQVLHPGIIFNNGPTWKDIRRFSLTTLRNYGMGKQGNESRIQREAHFLLEALRKTQGQPFDPTFLIGCAPCNVIADILFRKHFDYNDEKFLRLMYLFNENFHLLSTPWLQLYNNFPSFLHYLPGSHRKVIKNVAEVKEYVSERVKEHHQSLDPNCPRDLTDCLLVEMEKEKHSAERLYTMDGITVTVADLFFAGTETTSTTLRYGLLILMKYPEIEEKLHEEIDRVIGPSRIPAIKDRQEMPYMDAVVHEIQRFITLVPSNLPHEATRDTIFRGYLIPKGTVVVPTLDSVLYDNQEFPDPEKFKPEHFLNENGKFKYSDYFKPFSTGKRVCAGEGLA

SEQ ID NO: 3885 - protein, 306 aa, Homo Sapiens
RPFPASHHREPLPVGIEEYSQVLHPGQPFDPTFLIGCAPCNVIADILFRKHFDYNDEKFLRLMYLFNENFHLLSTPWLQLYNNFPSFLHYLPGSHRKVIKNVAEVKEYVSERVKEHHQSLDPNCPRDLTDCLLVEMEKEKHSAERLYTMDGITVTVADLFFAGTETTSTTLRYGLLILMKYPEIEEKLHEEIDRVIGPSRIPAIKDRQEMPYMDAVVHEIQRFITLVPSNLPHEATRDTIFRGYLIPKGTVVVPTLDSVLYDNQEFPDPEKFKPEHFLNENGKFKYSDYFKPFSTGKRVCAGEGLA

SEQ ID NO: 3886 - protein, 43 aa, Homo Sapiens
  misc_feature (1)..(1): Xaa can be any naturally occurring amino acid
XGPFPLPIIGNLFQLELKNIPKSFTRESFLIMDLPGRTSGGFP

SEQ ID NO: 3887 - protein, 172 aa, Homo Sapiens
ARVQEEIDLVVGRARLPALKDRAAMPYTDAVIHEVQRFADIIPMNLPHRVTRDTAFRGFLIPKGTDVITLLNTVHYDPSQFLTPQEFNPEHFLDANQSFKKSPAFMPFSAGEGRNQSLSGPISTYIPHPNSTCQILSLLPSTHSQLWMHRDIHSSSQLCSYRQVVTKILVKQ

SEQ ID NO: 3888 - protein, 491 aa, Homo Sapiens
MDSISTAILLLLLALVCLLLTLSSRDKGKLPPGPRPLSILGNLLLLCSQDMLTSLTKLSKEYGSMYTVHLGPRRVVVLSGYQAVKEALVDQGEEFSGRGDYPAFFNFTKGNGIAFSSGDRWKVLRQFSIQILRNFGMGKRSIEERILEEGSFLLAELRKTEGEPFDPTFVLSRSVSNIICSVLFGSRFDYDDERLLTIIRLINDNFQIMSSPWGELYDIFPSLLDWVPGPHQRIFQNFKCLRDLIAHSVHDHQASLDPRSPRDFIQCFLTKMAEEKEDPLSHFHMDTLLMTTHNLLFGGTKTVSTTLHHAFLALMKYPKVQARVQEEIDLVVGRARLPALKDRAAMPYTDAVIHEVQRFADIIPMNLPHRVTRDTAFRGFLIPKGTDVITLLNTVHYDPSQFLTPQEFNPEHFLDANQSFKKSPAFMPFSAGRRLCLGESLARMELFLYLTAILQSFSLQPLGAPEDIDLTPLSSGLGNLPRPFQLCLRPR

SEQ ID NO: 3889 - protein, 320 aa, Homo Sapiens
MDSISTAILLLLLALVCLLLTLSSRDKGKLPPGPRPLSILGNLLLLCSQDMLTSLTKLSKEYGSMYTVHLGPRRVVVLSGYQAVKEALVDQGEEFSGRGDYPAFFNFTKGNGIAFSSGDRWKVLRQFSIQILRNFGMGKRSIEERILEEGSFLLAELRKTEGEPFDPTFVLSRSVSNIICSVLFGSRFDYDDERLLTIIRLINDNFQIMSSPWGELYDIFPSLLDWVPGPHQRIFQNFKCLRDLIAHSVHDHQASLDPRSPRDFIQCFLTKMAEEKEDPLSHFHMDTLLMTTHNLLFGGTKTPACRRRSTSWWDARGCRR

SEQ ID NO: 3890 - protein, 81 aa, Homo Sapiens
  misc_feature (1)..(1): Xaa can be any naturally occurring amino acid
XPHRVTRDTAFRGFLIPKGTDVITLLNTVHYDPSQFLTPQEFNPEHFLDANQSFKKSPAFMPFSAALDAQRHSFLLSTLLL

SEQ ID NO: 3891 - protein, 502 aa, Homo Sapiens
MLAAMGSLAAALWAVVHPRTLLLGTVAFLLAADFLKRRRPKNYPPGPWRLPFLGNFFLVDFEQSHLEVQLFVKKYGNLFSLELGDISAVLITGLPLIKEALIHMDQNFGNRPVTPMREHIFKKNGLIMSSGQAWKEQRRFTLTALRNFGLGKKSLEERIQEEAQHLTEAIKEENGQPFDPHFKINNAVSNIICSITFGERFEYQDSWFQQLLKLLDEVTYLEASKTCQLYNVFPWIMKFLPGPHQTLFSNWKKLKLFVSHMIDKHRKDWNPAETRDFIDAYLKEMSKHTGNPTSSFHEENLICSTLDLFFAGTETTSTTLRWALLYMALYPEIQEKVQAEIDRVIGQGQQPSTAARESMPYTNAVIHEVQRMGNIIPLNVPREVTVDTTLAGYHLPKGTMILTNLTALHRDPTEWATPDTFNPDHFLENGQFKKREAFMPFSIGKRACLGEQLARTELFIFFTSLMQKFTFRPPNNEKLSLKFRMGITISPVSHRLCAVPQV

SEQ ID NO: 3892 - protein, 268 aa, Homo Sapiens
MPCSSKRNFCRQTMPSFIHEDDKNGRLIEKASVNRKPQLPQHFVDAYLDEMDQGKNDPSSTFSKENLIFSVGELIIAGTETTTNVLRWAILFMALYPNIQGQVQKEIDLIMGPNGKPSWDDKCKMPYTEAVLHEVLRFCNIVPLGIFHATSEDAVVRGYSIPKGTTVITNLYSVHFDEKYWRDPEVFHPERFLDSSGYFAKKEALVPFSLGRRHCLGEHLARMEMFLFFTALLQRFHLHFPHELVPDLKPRLGMTLQPQPYLICAERR

SEQ ID NO: 3893 - protein, 37 aa, Homo Sapiens
MPCSSKRNFCRQTMPSFIHEDDKNGRLTQFQIWPRMG

SEQ ID NO: 3894 - protein, 37 aa, Homo Sapiens; identical to SEQ ID NO: 3893

SEQ ID NO: 3895 - protein, 37 aa, Homo Sapiens; identical to SEQ ID NO: 3893

SEQ ID NO: 3896 - protein, 501 aa, Homo Sapiens
MWKLWRAEEGAAALGGALFLLLFALGVRQLLKQRRPMGFPPGPPGLPFIGNIYSLAASSELPHVYMRKQSQVYGEIFSLDLGGISTVVLNGYDVVKECLVHQSEIFADRPCLPLFMKMTKMGGLLNSRYGRGWVDHRRLAVNSFRYFGYGQKSFESKILEETKFFNDAIETYKGRPFDFKQLITNAVSNITNLIIFGERFTYEDTDFQHMIELFSENVELAASASVFLYNAFPWIGILPFGKHQQLFRNAAVVYDFLSRLIEKASVNRKPQLPQHFVDAYLDEMDQGKNDPSSTFSKENLIFSVGELIIAGTETTTNVLRWAILFMALYPNIQGQVQKEIDLIMGPNGKPSWDDKCKMPYTEAVLHEVLRFCNIVPLGIFHATSEDAVVRGYSIPKGTTVITNLYSVHFDEKYWRDPEVFHPERFLDSSGYFAKKEALVPFSLGRRHCLGEHLARMEMFLFFTALLQRFHLHFPHELVPDLKPRLGMTLQPQPYLICAERR

SEQ ID NO: 3897 - protein, 32 aa, Homo Sapiens
  misc_feature (1)..(1): Xaa can be any naturally occurring amino acid
XQSEIFADRPCLPLFMKMTKMGVLERPRSVPS

SEQ ID NO: 3898 - protein, 73 aa, Homo Sapiens
AVCWDDDGQHHGRLYPPAPDEIPSCPKARRSSPSLAPSCMTPTSSSTQKSSTQTVSWMQMDGSGSMRRSCPSP

SEQ ID NO: 3899 - protein, 175 aa, Homo Sapiens
MEATGTWALLLALALLLLLTLALSGTRARGHLPPGPTPLPLLGNLLQLRPGALYSGLMREEQNPGTEFTNKNMLMTVIYLLFAGTMTVSTTVGYTLLLLMKYPHVQKWVREELNRELGAGQAPSLGDRTRLPYTDAVLHEAQRLLALVPMGIPRTLMRTTRFRGYTLPQGTEVFP

SEQ ID NO: 3900 - protein, 165 aa, Homo Sapiens
MEATGTWALLLALALLLLLTLALSGTRARGHLPPGPTPLPLLGNLLQLRPGALYSGLMRLSKKYGPVFTIYLGPWRPVVVLVGQEAVREALGGQAEEFSGRGTVAMLEGTFDGHGGTKPRHRIHQQEHADDSHLFAVCWDDDGQHHGRLYPPAPDEIPSCPKVGT

SEQ ID NO: 3901 - protein, 187 aa, Homo Sapiens
MEATGTWALLLALALLLLLTLALSGTRARGHLPPGPTPLPLLGNLLQLRPGALYSGLMRLSKKYGPVFTIYLGPWRPVVVLVGQEAVREALGGQAEEFSGRGTVAMLEGTFDGHGVFFSNGERWRQLRKFTMLALRDLGMGKREGEELIQAEARCLVETFQGTEGGTKPRHRIHQQEHADDSHLFAV

SEQ ID NO: 3902 - protein, 504 aa, Homo Sapiens
MEATGTWALLLALALLLLLTLALSGTRARGHLPPGPTPLPLLGNLLQLRPGALYSGLMRLSKKYGPVFTIYLGPWRPVVVLVGQEAVREALGGQAEEFSGRGTVAMLEGTFDGHGVFFSNGERWRQLRKFTMLALRDLGMGKREGEELIQAEARCLVETFQGTEGRPFDPSLLLAQATSNVVCSLLFGLRFSYEDKEFQAVVRAAGGTLLGVSSQGGQTYEMFSWFLRPLPGPHKQLLHHVSTLAAFTVRQVQQHQGNLDASGPARDLVDAFLLKMAQEEQNPGTEFTNKNMLMTVIYLLFAGTMTVSTTVGYTLLLLMKYPHVQKWVREELNRELGAGQAPSLGDRTRLPYTDAVLHEAQRLLALVPMGIPRTLMRTTRFRGYTLPQGTEVFPLLGSILHDPNIFKHPEEFNPDRFLDADGRFRKHEAFLPFSLGKRVCLGEGLAKAELFLFFTTILQAFSLESPCPPDTLSLKPTVSGLFNIPPAFQLQVRPTDLHSTTQTR

SEQ ID NO: 3903 - protein, 60 aa, Homo Sapiens
MLEGTFDGHGGTKPRHRIHQQEHADDSHLFAVCWDDDGQHHGRLYPPAPDEIPSCPKVGT

SEQ ID NO: 3904 - protein, 288 aa, Homo Sapiens
LQLHRPVLRKIEEVRAILRTLLEARRPHVCPGDPVCSYVDALIQQGQGDDPEGLFAEANAVACTLDMVMAGTETTSATLQWAALLMGRHPDVQGRVQEELDRVLGPGRTPRLEDQQALPYTSAVLHEVQRFITLLPHVPRCTAADTQLGGFLLPKGTPVIPLLTSVLLDETQWQTPGQFNPGHFLDANGHFVKREAFLPFSAGSEGGCGGCSCAPLGRSPPLPSRSRPGAAHSVPGHPPQAAASVLGSAWPGPSSSCCLPASCRGTACCPRLASVRPPWTPRPPGLLP

SEQ ID NO: 3905 - protein, 490 aa, Homo Sapiens
MALLLLLFLGLLGLWGLLCACAQDPSPAARWPPGPRPLPLVGNLHLLRLSQQDRSLMELSERYGPVFTVHLGRQKTVVLTGFEAVKEALAGPGQELADRPPIAIFQLIQRGGGIFFSSGARWRAARQFTVRALHSLGVGREPVADKILQELKCLSGQLDGYRGRPFPLALLGWAPSNITFALLFGRRFDYRDPVFVSLLGLIDEVMVLLGSPGLQLFNVYPWLGALLQLHRPVLRKIEEVRAILRTLLEARRPHVCPGDPVCSYVDALIQQGQGDDPEGLFAEANAVACTLDMVMAGTETTSATLQWAALLMGRHPDVQGRVQEELDRVLGPGRTPRLEDQQALPYTSAVLHEVQRFITLLPHVPRCTAADTQLGGFLLPKGTPVIPLLTSVLLDETQWQTPGQFNPGHFLDANGHFVKREAFLPFSAGRRVCVGERLARTELFLLFAGLLQRYRLLPPPGVSPASLDTTPARAFTMRPRAQALCAVPRP

SEQ ID NO: 3906 - protein, 408 aa, Homo Sapiens
MELSERYGPVFTVHLGRQKTVVLTGFEAVKEALAGPGQELADRPPIAIFQLIQRGGGIFFSSGARWRAARQFTVRALHSLGVGREPVADKILQELKCLSGQLDGYRGRPFPLALLGWAPSNITFALLFGRRFDYRDPVFVSLLGLIDEVMVLLGSPGLQLFNVYPWLGALLQLHRPVLRKIEEVRAILRTLLEARRPHVCPGDPVCSYVDALIQQGQGDDPEGLFAEANAVACTLDMVMAGTETTSATLQWAALLMGRHPDVQGRVQEELDRVLGPGRTPRLEDQQALPYTSAVLHEVQRFITLLPHVPRCTAADTQLGGFLLPKGTPVIPLLTSVLLDETQWQTPGQFNPGHFLDANGHFVKREAFLPFSAGQQPSGPGWGGTSRAPGVGRPQLRLPPLHPPPDLRF

SEQ ID NO: 3907 - protein, 96 aa, Homo Sapiens
MSPGLLLLGSAVLLAFGLCCTFVHRARSRYEHIPGPPRPSFLLGHLPCFWKKDEVGGRVLQDVFLDWAKKYGPVVRVNVFHKTSVIVTSPESVKFH

SEQ ID NO: 3908 - protein, 500 aa, Homo Sapiens
MSPGLLLLGSAVLLAFGLCCTFVHRARSRYEHIPGPPRPSFLLGHLPCFWKKDEVGGRVLQDVFLDWAKKYGPVVRVNVFHKTSVIVTSPESVKKFLMSTKYNKDSKMYRALQTVFGERLFGQGLVSECNYERWHKQRRVIDLAFSRSSLVSLMETFNEKAEQLVEILEAKADGQTPVSMQDMLTYTAMDILAKAAFGMETSMLLGAQKPLSQAVKLMLEGITASRNTLAKFLPGKRKQLREVRESIRFLRQVGRDWVQRRREALKRGEEVPADILTQILKAEEGAQDDEGLLDNFVTFFIAGHETSANHLAFTVMELSRQPEIVARLQAEVDEVIGSKRYLDFEDLGRLQYLSQVLKESLRLYPPAWGTFRLLEEETLIDGVRVPGNTPLLFSTYVMGRMDTYFEDPLTFNPDRFGPGAPKPRFTYFPFSLGHRSCIGQQFAQMEVKVVMAKLLQRLEFRLVPGQRFGLQEQATLKPLDPVLCTLRPRGWQPAPPPPPC

SEQ ID NO: 3909 - protein, 403 aa, Homo Sapiens
MSTKYNKDSKMYRALQTVFGERLFGQGLVSECNYERWHKQRRVIDLAFSRSSLVSLMETFNEKAEQLVEILEAKADGQTPVSMQDMLTYTAMDILAKAAFGMETSMLLGAQKPLSQAVKLMLEGITASRNTLAKFLPGKRKQLREVRESIRFLRQVGRDWVQRRREALKRGEEVPADILTQILKAEEGAQDDEGLLDNFVTFFIAGHETSANHLAFTVMELSRQPEIVARLQAEVDEVIGSKRYLDFEDLGRLQYLSQVLKESLRLYPPAWGTFRLLEEETLIDGVRVPGNTPLLFSTYVMGRMDTYFEDPLTFNPDRFGPGAPKPRFTYFPFSLGHRSCIGQQFAQMEVKVVMAKLLQRLEFRLVPGQRFGLQEQATLKPLDPVLCTLRPRGWQPAPPPPPC

SEQ ID NO: 3910 - protein, 164 aa, Homo Sapiens
RFLRQVGRDWVQRRREALKRGEEVPADILTQILKAEEGAQDDEGLLDNFVTFFIAGHETSANHLAFTVMELSRQPEIVARLQAEVDEVIGSKRYLDFEDLGRLQYLSQVLKESLRLYPPAWGTFRLLEEETLIDGVRVPGNTPLLEQCASQLLGHLPRSERAGL

SEQ ID NO: 3911 - protein, 51 aa, Homo Sapiens
  misc_feature (1)..(1): Xaa can be any naturally occurring amino acid
XPAREEEAAPGGPGEHSLPAPGGQGLGPAPPGSPEEGRGGSCRHPHTDSES

SEQ ID NO: 3912 - protein, 199 aa, Homo Sapiens
MFEGHDTTASGLSWVLYHLAKHPEYQEQCRQEVQELLKDREPIEIEWDDLAQLPFLTMCIKESLRLHPPVPVISRCCTQDFVLPDGRVIPKGIVCLINIIGIHYNPTVWPDPEVYDPFRFDQENIKERSPLAFIPFSAGPRNCIGQAFAMAEMKVVLALTLLHFRILPTHTEPRRKPELILRAEGGLWLRVEPLGANSQ

SEQ ID NO: 3913 - protein, 524 aa, Homo Sapiens
MPQLSLSWLGLGPVAASPWLLLLLVGGSWLLARVLAWTYTFYDNCRRLQCFPQPPKQNWFWGHQGLVTPTEEGMKTLTQLVTTYPQGFKLWLGPTFPLLILCHPDIIRPITSASAAVAPKDMIFYGFLKPWLGDGLLLSGGDKWSRHRRMLTPAFHFNILKPYMKIFNKSVNIMHDKWQRLASEGSARLDMFEHISLMTLDSLQKCVFSFESNCQEKPSEYIAAILELSAFVEKRNQQILLHTDFLYYLTPDGQRFRRACHLVHDFTDAVIQERRCTLPTQGIDDFLKNKAKSKTLDFIDVLLLSKDEDGKELSDEDIRAEADTFMFEGHDTTASGLSWVLYHLAKHPEYQEQCRQEVQELLKDREPIEIEWDDLAQLPFLTMCIKESLRLHPPVPVISRCCTQDFVLPDGRVIPKGIVCLINIIGIHYNPTVWPDPEVYDPFRFDQENIKERSPLAFIPFSAGPRNCIGQAFAMAEMKVVLALTLLHFRILPTHTEPRRKPELILRAEGGLWLRVEPLGANSQ

SEQ ID NO: 3914 - protein, 454 aa, Homo Sapiens
MPQLSLSWLGLGPVAASPWLLLLLVGGSWLLARVLAWTYTFYDNCRRLQCFPQPPKQNWFWGHQGLVTPTEEGMKTLTQLVTTYPQGFKLWLGPTFPLLILCHPDIIRPITSASAAVAPKDMIFYGFLKPWLGDGLLLSGGDKWSRHRRMLTPAFHFNILKPYMKIFNKSVNIMHDKWQRLASEGSARLDMFEHISLMTLDSLQKCVFSFESNCQEKPSEYIAAILELSAFVEKRNQQILLHTDFLYYLTPDGQRFRRACHLVHDFTDAVIQERRCTLPTQGIDDFLKNKAKSKTLDFIDVLLLSKDEDGKELSDEDIRAEADTFMFEGHDTTASGLSWVLYHLAKHPEYQEQCRQEVQELLKDREPIEIEWDDLAQLPFLTMCIKESLRLHPPVPVISRCCTQDFVLPDGRVIPKGLRPLPFRPREHQGEVTSGFYSLLGRAQKLHRAGVRHG

SEQ ID NO: 3915 - protein, 524 aa, Homo Sapiens; identical to SEQ ID NO: 3913

SEQ ID NO: 3916 - protein, 454 aa, Homo Sapiens; identical to SEQ ID NO: 3914

SEQ ID NO: 3917 - protein, 520 aa, Homo Sapiens
MSQLSLSWLGLWPVAASPWLLLLLVGASWLLAHVLAWTYAFYDNCRRLRCFPQPPRRNWFWGHQGMIHSSEEGLLYTQSLACTFGDMGCWWVGPWQAVIHIFLPTCIKPVLFAPAAIAPKDKFFYSFLEPWLGDGLLLSAGDKWSRHRRMLTPAFHFNILKPYMKIFNESVNIMHAKWQLLASEGSACLDMFEHISLMTLDSLQKCVFSFDSHCQEKPSEYIAAILELSALVSKRHHEILLHIDFLYYLTPDGQRFRRACRLVHDFTDAVIQERRRTLPSQGVDDFLQAKAKSKTLDFIDVLLLSKDEDGKKLSDEDIRAEADTFMFEGHDTTASGLSWVLYHLAKHPEYQERCRQEVQELLKDREPKEIEWDDLAHLPFLTMCMKESLRLHPPVPVISRHVTQDIVLPDGRVIPKGIICLISVFGTHHNPAVWPDPEVYDPFRFDPENIKERSPLAFIPFSAGPRNCIGQTFAMAEMKVVLALTLLRFRVLPDHTEPRRKPELVLRAEGGLWLRVEPLS

SEQ ID NO: 3918 - protein, 89 aa, Homo Sapiens
MSQLSLSWLGLWPVAASPWLLLLLVGASWLLAHVLAWTYAFYDNCRRLRCFPQPPRRNWFWGHQGMLPLHQRTSSSTASWSPGWGMGSC

SEQ ID NO: 3919 - protein, 154 aa, Homo Sapiens
MSQLSLSWLGLWPVAASPWLLLLLVGASWLLAHVLAWTYAFYDNCRRLRCFPQPPRRNWFWGHQGMVNPTEEGMRVLTQLVATYPQGFKVWMGPISPLLSLCHPDIIRSVINASAAIAPKDKFFYSFLEPWLGDGLLLSAGDKWSRHRRMLTPA

SEQ ID NO: 3920 - protein, 520 aa, Homo Sapiens
MSQLSLSWLGLWPVAASPWLLLLLVGASWLLAHVLAWTYAFYDNCRRLRCFPQPPRRNWFWGHQGMVNPTEEGMRVLTQLVATYPQGFKVWMGPISPLLSLCHPDIIRSVINASAAIAPKDKFFYSFLEPWLGDGLLLSAGDKWSRHRRMLTPAFHFNILKPYMKIFNESVNIMHAKWQLLASEGSACLDMFEHISLMTLDSLQKCVFSFDSHCQEKPSEYIAAILELSALVSKRHHEILLHIDFLYYLTPDGQRFRRACRLVHDFTDAVIQERRRTLPSQGVDDFLQAKAKSKTLDFIDVLLLSKDEDGKKLSDEDIRAEADTFMFEGHDTTASGLSWVLYHLAKHPEYQERCRQEVQELLKDREPKEIEWDDLAHLPFLTMCMKESLRLHPPVPVISRHVTQDIVLPDGRVIPKGIICLISVFGTHHNPAVWPDPEVYDPFRFDPENIKERSPLAFIPFSAGPRNCIGQTFAMAEMKVVLALTLLRFRVLPDHTEPRRKPELVLRAEGGLWLRVEPLS

SEQ ID NO: 3921 - protein, 74 aa, Homo Sapiens
  misc_feature (1)..(1): Xaa can be any naturally occurring amino acid
XWVLYHLAKHPEYQERCRQEVQELLKDREPKEIEWSTTPFALTQRTSRRGHLWLLFPSRQGPGTASGRRSRWRR

SEQ ID NO: 3922 - protein, 381 aa, Homo Sapiens [sequence omitted]

SEQ ID NO: 3923 - protein, 136 aa, Homo Sapiens
MRTPGPLPVLLLLLAGAPAARPTPPTCYSRMRALSQEITRDFNLLQVSEPSEPCVRYLPRLYLDIHNYCVLDKLRDFVASPPCWKVAQVDSLKDKARKLYTIMNSFCRRDLVFLLDDCNALEYPIPVTTVLPDRQR

SEQ ID NO: 3924 - protein, 76 aa, Homo Sapiens
  misc_feature (1)..(1): Xaa can be any naturally occurring amino acid
XPGPLPVLLLLLAGAPAARPTPPTCYSRMRALSQEITRDFNLLQVSEPSDLVFLLDDCNALEYPIPVTTVLPDRQR

SEQ ID NO: 3925 - protein, 92 aa, Homo Sapiens
  misc_feature (1)..(1): Xaa can be any naturally occurring amino acid
XTPGPLPVLLLLLAGAPAARPTPPTCYSRMRALSQEITRDFNLLQVSEPSEPCVRYLPRLYLDIHDLVFLLDDCNALEYPIPVTTVLPDRQR

SEQ ID NO: 3926 - protein, 78 aa, Homo Sapiens
GNTGMVGGSVPVFDEIILSTARMNRVLSFHSVSESPFYVLIETSGSNAGHDAEKLGHFLEHALGSGLVTDGTMATDQR

SEQ ID NO: 3927 - protein, 243 aa, Homo Sapiens
MLPRRPLAWPAWLLRGAPGAAGSWGRPVGPLARRGCCSAPGTPEVPLTRERYPVRRLPFSTVSKQDLAAFERIVPGGVVTDPEALQAPNVDWLRTLRGCSKVLLRPRTSEEVSHILRHCHERNLAVNPQGGNTGMVGGSVPVFDEIILSTARMNRVLSFHSVSGGLRPGGAEPVCGGTGLHHAAGLRSQGQLPHRGKRGNQRWRPAVSSIWLTAWDCPGPGSGAGRRHCPGLPDLPEEGQHGL

SEQ ID NO: 3928 - protein, 521 aa, Homo Sapiens
MLPRRPLAWPAWLLRGAPGAAGSWGRPVGPLARRGCCSAPGTPEVPLTRERYPVRRLPFSTVSKQDLAAFERIVPGGVVTDPEALQAPNVDWLRTLRGCSKVLLRPRTSEEVSHILRHCHERNLAVNPQGGNTGMVGGSVPVFDEIILSTARMNRVLSFHSVSGILVCQAGCVLEELSRYVEERDFIMPLDLGAKGSCHIGGNVATNAGGLRFLRYGSLHGTVLGLEVVLADGTVLDCLTSLRKDNTGYDLKQLFIGSEGTLGIITTVSILCPPKPRAVNVAFLGCPGFAEVLQTFSTCKGMLGEILSAFEFMDAVCMQLVGRHLHLASPVQESPFYVLIETSGSNAGHDAEKLGHFLEHALGSGLVTDGTMATDQRKVKMLWALRERITEALSRDGYVYKYDLSLPVERLYDIVTDLRARLGPHAKHVVGYGHLGDGNLHLNVTAEAFSPSLLAALEPHVYEWTAGQQGSVSAEHGVGFRKRDVLGYSKPPGALQLMQQLKALLDPKGILNPYKTLPSQA

SEQ ID NO: 3929 - protein, 320 aa, Homo Sapiens
MLPRRPLAWPAWLLRGAPGAAGSWGRPVGPLARRGCCSAPGTPEVPLTRERYPVRRLPFSTVSKQDLAAFERIVPGGVVTDPEALQAPNVDWLRTLRGCSKVLLRPRTSEEVSHILRHCHERNLAVNPQGGNTGMVGGSVPVFDEIILSTARMNRVLSFHSVSGILVCQAGCVLEELSRYVEERDFIMPLDLGAKGSCHIGGNVATNAGGLRFLRYGSLHGTVLGLEVVLADGTVLDCLTSLRKDNTGYDLKQLFIGSEGTLGIITTVSILCPPKPRAVNVAFLDAVGPEGKDHRGAEPGWLRVQVRPLPPCGAALRHRD

SEQ ID NO: 3930 - protein, 387 aa, Homo Sapiens
MVGGSVPVFDEIILSTARMNRVLSFHSVSGILVCQAGCVLEELSRYVEERDFIMPLDLGAKGSCHIGGNVATNAGGLRFLRYGSLHGTVLGLEVVLADGTVLDCLTSLRKDNTGYDLKQLFIGSEGTLGIITTVSILCPPKPRAVNVAFLGCPGFAEVLQTFSTCKGMLGEILSAFEFMDAVCMQLVGRHLHLASPVQESPFYVLIETSGSNAGHDAEKLGHFLEHALGSGLVTDGTMATDQRKVKMLWALRERITEALSRDGYVYKYDLSLPVERLYDIVTDLRARLGPHAKHVVGYGHLGDGNLHLNVTAEAFSPSLLAALEPHVYEWTAGQQGSVSAEHGVGFRKRDVLGYSKPPGALQLMQQLKALLDPKGILNPYKTLPSQA

SEQ ID NO: 3931 - protein, 90 aa, Homo Sapiens [sequence omitted]

SEQ ID NO: 3932 - protein, 152 aa, Homo Sapiens
  misc_feature (1)..(1): Xaa can be any naturally occurring amino acid
XHSVSGILVCQAGCVLEELSRYVEERDFIMPLDLGAKGSCHIGGNVATNAGGLRFLRYGSLHGTVLGLEVVLADGTVLDCLTSLRKDNTGYDLKQLFIGSEGTLGIITTVSILCPPKPRAVNVAFLGFLCSALIPLQLQSPVCRPPVVLGAR

SEQ ID NO: 3933 - protein, 318 aa, Homo Sapiens
  misc_feature (1)..(1): Xaa can be any naturally occurring amino acid
XSHANHRPICLSPRIWPGSASATSTVCSSSESFLPRGPPAVSLLLHGPPTVSFPPPWPTHHVLPSPVAHPPCPCLPPDMPLELPGPCCCPHCLCDSAPPSLPCPTLVQGASRPILILRAFPGPCHSVPCHDLKLQVGASPFRHGCPPSVRCPSRLIAGVPGCSVLSWSLGHSLSGIDSRMLWALRERITEALSRDGYVYKYDLSLPVERLYDIVTDLRARLGPHAKHVVGYGHLGDGNLHLNVTAEAFSPSLLAALEPHVYEWTAGQQGSVSAEHGVGFRKRDVLGYSKPPGALQLMQQLKALLDPKGILNPYKTLPS

SEQ ID NO: 3934 - protein, 189 aa, Homo Sapiens
  misc_feature (1)..(1): Xaa can be any naturally occurring amino acid
XSVFCSDPTPTAVTCVPPACGPGSPRPARLPHPALRTPGCPGFAEVLQTFSTCKGMLGEILSAFEFMDAVCMQLVGRHLHLASPVQESPFYVLIETSGSNAGHDAEKLGHFLEHALGSGLVTDGTMATDQRKVKMLWALRERITEALSRDGYVYKYDLSLPVERLYDIVTDLRARLGPHAKHVVGYGHL

SEQ ID NO: 3935 - protein, 9 aa, Homo Sapiens
MRMSVGLSL

SEQ ID NO: 3936 - protein, 15 aa, Homo Sapiens
MRMSVGLSLLLPLSG

SEQ ID NO: 3937 - protein, 41 aa, Homo Sapiens
MRMSVGLSLLLPLSGRTFLLLLSVVMAQSHWPSEPSEAVRD

SEQ ID NO: 3938 - protein, 52 aa, Homo Sapiens
MRMSVGLSLLLPLSGRTFLLLLSVVMAQSHWPSEPSEAVRDWENQLEASMHS

SEQ ID NO: 3939 - protein, 86 aa, Homo Sapiens
MRMSVGLSLLLPLSGRTFLLLLSVVMAQSHWPSEPSEAVRDWENQLEASMHSVLSDLHEAVPTVVGIPDGTAVVGRSFRVTIPTDL

SEQ ID NO: 3940 - protein, 88 aa, Homo Sapiens
MRMSVGLSLLLPLSGRTFLLLLSVVMAQSHWPSEPSEAVRDWENQLEASMHSVLSDLHEAVPTVVGIPDGTAVVGRSFRVTIPTDLIA

SEQ ID NO: 3941 - protein, 96 aa, Homo Sapiens
MRMSVGLSLLLPLSGRTFLLLLSVVMAQSHWPSEPSEAVRDWENQLEASMHSVLSDLHEAVPTVVGIPDGTAVVGRSFRVTIPTDLIASSGDIIKV

SEQ ID NO: 3942 - protein, 106 aa, Homo Sapiens
MRMSVGLSLLLPLSGRTFLLLLSVVMAQSHWPSEPSEAVRDWENQLEASMHSVLSDLHEAVPTVVGIPDGTAVVGRSFRVTIPTDLIASSGDIIKVSAAGKEALPS

SEQ ID NO: 3943 - protein, 117 aa, Homo Sapiens
MRMSVGLSLLLPLSGRTFLLLLSVVMAQSHWPSEPSEAVRDWENQLEASMHSVLSDLHEAVPTVVGIPDGTAVVGRSFRVTIPTDLIASSGDIIKVSAAGKEALPSWLHWDSQSHTL

SEQ ID NO: 3944 - protein, 895 aa, Homo Sapiens
MRMSVGLSLLLPLSGRTFLLLLSVVMAQSHWPSEPSEAVRDWENQLEASMHSVLSDLHEAVPTVVGIPDGTAVVGRSFRVTIPTDLIASSGDIIKVSAAGKEALPSWLHWDSQSHTLEGLPLDTDKGVHYISVSATRLGANGSHIPQTSSVFSIEVYPEDHSELQSVRTASPDPGEVVSSACAADEPVTVLTVILDADLTKMTPKQRIDLLHRMRSFSEVELHNMKLVPVVNNRLFDMSAFMAGPGNAKKVVENGALLSWKLGCSLNQNSVPDIHGVEAPAREGAMSAQLGYPVVGWHIANKKPPLPKRVRRQIHATPTPVTAIGPPTTAIQEPPSRIVPTPTSPAIAPPTETMAPPVRDPVPGKPTVTIRTRGAIIQTPTLGPIQPTRVSEAGTTVPGQIRPTMTIPGYVEPTAVATPPTTTTKKPRVSTPKPATPSTDSTTTTTRRPTKKPRTPRPVPRVTTKVSITRLETASPPTRIRTTTSGVPRGGEPNQRPELKNHIDRVDAWVGTYFEVKIPSDTFYDHEDTTTDKLKLTLKLREQQLVGEKSWVQFNSNSQLMYGLPDSSHVGKHEYFMHATDKGGLSAVDAFEIHVHRRPQGDRAPARFKAKFVGDPALVLNDIHKKIALVKKLAFAFGDRNCSTITLQNITRGSIVVEWTNNTLPLEPCPKEQIAGLSRRIAEDDGKPRPAFSNALEPDFKATSITVTGSGSCRHLQFIPVVPPRRVPSEAPPTEVPDRDPEKSSEDDVYLHTVIPAVVVAAILLIAGIIAMICYRKKRKGKLTLEDQATFIKKGVPIIFADELDDSKPPPSSSMPLILQEEKAPLPPPEYPNQSVPETTPLNQDTMGEYTPLRDEDPNAPPYQPPPPFTAPMEGKGSRPKNMTPYRSPPPYVPP

SEQ ID NO: 3945 - protein, 895 aa, Homo Sapiens; identical to SEQ ID NO: 3944

SEQ ID NO: 3946 - protein, 895 aa, Homo Sapiens; identical to SEQ ID NO: 3944

SEQ ID NO: 3947 - protein, 895 aa, Homo Sapiens; identical to SEQ ID NO: 3944

SEQ ID NO: 3948 - protein, 895 aa, Homo Sapiens; identical to SEQ ID NO: 3944

SEQ ID NO: 3949 - protein, 895 aa, Homo Sapiens; identical to SEQ ID NO: 3944

SEQ ID NO: 3950 - protein, 189 aa, Homo Sapiens
MLLGQLSTLLCLLSGALPTGSGRPEPQSPRPQSWAAANQTWALGPGALPPLVPASALGSWKAFLGLQKARQLGMGRLQRGQDEVAAVTLPLNPQEVIQGMCKAVPFVQVFSRPGCSAIRLRNHLCFGHCSSLYIPGSDPTPLVLCNSCMPARKRWAPVVLWCLTGSSASRRRVKISTMLIEGCHCSPKA

SEQ ID NO: 3951 - protein, 163 aa, Homo Sapiens
MPLTRQQGRLLVTLSPVRTDRQADRRTDKQMLLGQLSTLLCLLSGALPTGSGRPEPQSPRPQSWAAANQTWALGPGALPPLVPASALGSWKAFLGLQKARQLGMGRLQRGQDEVAAVTLPLNPQEVIQGMCKAVPFVQTRESRYVAQASLELLASSNPPTSAS

SEQ ID NO: 3952 - protein, 167 aa, Homo Sapiens
MFPDYGYGWFHTSLILEGKNYLQWLTERLTERGVKFFQRKVESFEEVAREGADVIVNCTGVWAGALQRDPLLQPGRGQIMKVDAPWMKHFILTHDPERGIYNSPYIIPGTQTVTLGGIFQLGNWSELNNIQDHNTIWEGCCRLEPTLKNARIIGERTGFRPVRPQIR

SEQ ID NO: 3953 - protein, 197 aa, Homo Sapiens
MRVVVIGAGVIGLSTALCIHERYHSVLQPLDIKVYADRFTPLTTTDVAAGLWQPYLSDPNNPQEADWSQQTFDYLLSHVHSPNAENLGLFLISGYNLFHEAIPDPSWKDTVLGFRKLTPRELDMFPDYGYGWFHTSLILEGKNYLQWLTERLTERGVKFFQRKVESFEEVAREGADVIVNCTGVWAGALQRDPLLQP

SEQ ID NO: 3954 - protein, 347 aa, Homo Sapiens
MRVVVIGAGVIGLSTALCIHERYHSVLQPLDIKVYADRFTPLTTTDVAAGLWQPYLSDPNNPQEADWSQQTFDYLLSHVHSPNAENLGLFLISGYNLFHEAIPDPSWKDTVLGFRKLTPRELDMFPDYGYGWFHTSLILEGKNYLQWLTERLTERGVKFFQRKVESFEEVAREGADVIVNCTGVWAGALQRDPLLQPGRGQIMKVDAPWMKHFILTHDPERGIYNSPYIIPGTQTVTLGGIFQLGNWSELNNIQDHNTIWEGCCRLEPTLKNARIIGERTGFRPVRPQIRLEREQLRTGPSNTEVIHNYGHGGYGLTIHWGCALEAAKLFGRILEEKKLSRMPPSHL

SEQ ID NO: 3955 - protein, 123 aa, Homo Sapiens
MRVVVIGAGVIGLSTALCIHERYHSVLQPLDIKVYADRFTPLTTTDVAAGLWQPYLSDPNNPQEADWSQQTFDYLLSHVHSPNAENLGLFLISGYNLFHEAIPLWLVPHKPNSGGKELSTVAD

SEQ ID NO: 3956 - protein, 281 aa, Homo Sapiens
MRVVVIGAGVIGLSTALCIHERYHSVLQPLDIKVYADRFTPLTTTDVAAGLWQPYLSDPNNPQEADWSQQTFDYLLSHVHSPNAENLGLFLISGYNLFHEAIPVAREGADVIVNCTGVWAGALQRDPLLQPGRGQIMKVDAPWMKHFILTHDPERGIYNSPYIIPGTQTVTLGGIFQLGNWSELNNIQDHNTIWEGCCRLEPTLKNARIIGERTGFRPVRPQIRLEREQLRTGPSNTEVIHNYGHGGYGLTIHWGCALEAAKLFGRILEEKKLSRMPPSHL

SEQ ID NO: 3957 - protein, 78 aa, Homo Sapiens
MRVVVIGAGVIGLSTALCIHERYHSVLQPLDIKVYADRFTPLTTTDVAAGLWQPYLSDPNNPQEATLPGRTQFWDFGS

SEQ ID NO: 3958 - protein, 73 aa, Homo Sapiens
MNSKGQYPTQPTYPVQPPGNPVYPQTLHLPQAPPYTDAPPAYSEGLPQSPPCQPHFLEPLCIFPWPSLWLLGL

SEQ ID NO: 3959 - protein, 207 aa, Homo Sapiens
MNSKGQYPTQPTYPVQPPGNPVYPQTLHLPQAPPYTDAPPAYSELYRPSFVHPGAATVPTMSAAFPGASLYLPMAQSVAVGPLGSTIPMAYYPVGPIYPPASTSWMPSQCCSACSHAGSQRPRNSAEGELLHGWFRWWLHHLVRNQGHLCAGKDITYLQHFSQCNCFSHINLKLQFRHMLLGCLSGAQTFRHFSNLIRNHVMVAVPP

SEQ ID NO: 3960 - protein, 168 aa, Homo Sapiens
MNSKGQYPTQPTYPVQPPGNPVYPQTLHLPQAPPYTDAPPAYSELYRPSFVHPGAATVPTMSAAFPGASLYLPMAQSVAVGPLGSTIPMAYYPVGPIYPPGSTVLVEGGYDAGARFGAGATAGNIPPPPPGCPPNAAQLAVMQGANVLVTQRKGNFFMGGSDGGYTIW

SEQ ID NO: 3961 - protein, 134 aa, Homo Sapiens
MNSKGQYPTQPTYPVQPPGNPVYPQTLHLPQAPPYTDAPPAYSELYRPSFVHPGAATVPTMSAAFPGASLYLPMAQSVAVGPLGSTIPMAYYPVGPIYPPGSTVLVEGGYDAGARFGAGATAGNIPVCVLKLGR

SEQ ID NO: 3962 - protein, 153 aa, Homo Sapiens
MNSKGQYPTQPTYPVQPPGNPVYPQTLHLPQAPPYTDAPPAYSELYRPSFVHPGAATVPTMSAAFPGASLYLPMAQSVAVGPLGSTIPMAYYPVGPIYPPGSTVLVEGGYDAGARFGAGATAGNIPVKEDQDHDREQGEEDNGDNNLERRGKM

SEQ ID NO: 3963 - protein, 146 aa, Homo Sapiens
MNSKGQYPTQPTYPVQPPGNPVYPQTLHLPQAPPYTDAPPAYSELYRPSFVHPGAATVPTMSAAIPMAYYPVGPIYPPGSTVLVEGGYDAGARFGAGATAGNIPPPPPGCPPNAAQLAVMQGANVLVTQRKGNFFMGGSDGGYTIW

SEQ ID NO: 3964 - protein, 86 aa, Homo Sapiens
MNSKGQYPTQPTYPVQPPGNPVYPQTLHLPQAPPYTDAPPAYSEPPPPGCPPNAAQLAVMQGANVLVTQRKGNFFMGGSDGGYTIW

SEQ ID NO: 3965 - protein, 136 aa, Homo Sapiens
MNSKGQYPTQPTYPVQPPGNPVYPQTLHLPQAPPYTDAPPAYSESVAVGPLGSTIPMAYYPVGPIYPPGSTVLVEGGYDAGARFGAGATAGNIPPPPPGCPPNAAQLAVMQGANVLVTQRKGNFFMGGSDGGYTIW

SEQ ID NO: 3966 - protein, 108 aa, Homo Sapiens
MSAAFPGASLYLPMAQSVAVGPLGSTIPMAYYPVGPIYPPGSTVLVEGGYDAGARFGAGATAGNIPPPPPGCPPNAAQLAVMQGANVLVTQRKGNFFMGGSDGGYTIW

SEQ ID NO: 3967 - protein, 617 aa, Homo Sapiens
MPALSRWASLPGPSMREAAFMYSTAVAIFLVILVAALQGSAPRESPLPYHIPLDPEGSLELSWNVSYTQEAIHFQLLVRRLKAGVLFGMSDRGELENADLVVLWTDGDTAYFADAWSDQKGQIHLDPQQDYQLLQVQRTPEGLTLLFKRPFGTCDPKDYLIEDGTVHLVYGILEEPFRSLEAINGSGLQMGLQRVQLLKPNIPEPELPSDACTMEVQAPNIQIPSQETTYWCYIKELPKGFSRHHIIKYEPIVTKGNEALVHHMEVFQCAPEMDSVPHFSGPCDSKMKPDRLNYCRHVLAAWALGAKAFYYPEEAGLAFGGPGSSRYLRLEVHYHNPLVIEGRNDSSGIRLYYTAKLRRFNAGIMELGLVYTPVMAIPPRETAFILTGYCTDKCTQLALPPSGIHIFASQLHTHLTGRKVVTVLVRDGREWEIVNQDNHYSPHFQEIRMLKKVVSVHPGDVLITSCTYNTEDRELATVGGFGILEEMCVNYVHYYPQTQLELCKSAVDAGFLQKYFHLINRFNNEDVCTCPQASVSQQFTSVPWNSFNRDVLKALYSFAPISMHCNKSSAVRFQGEWNLQPLPKVISTLEEPTPQCPTSQGRSPAGPTVVSIGGGKG

SEQ ID NO: 3968 - protein, 244 aa, Homo Sapiens
MREAAFMYSTAVAIFLVILVAALQGSAPRESPLPYHIPLDPEGSLELSWNVSYTQEAIHFQLLVRRLKAGVLFGMSDRGELENADLVVLWTDGDTAYFADGTVHLVYGILEEPFRSLEAINGSGLQMGLQRVQLLKPNIPEPELPSDACTMEVQAPNIQIPSQETTYWCYIKELPKGFSRHHIIKYEPIVTKGNEALVHHMEVFQCAPEMDSVPHFSGPCDSKMKPDRLNYCRHVLAAWALGAK

SEQ ID NO: 3969 - protein, 27 aa, Homo Sapiens
MAANLSRNGPALQEAYVRVVTEKSPTD

SEQ ID NO: 3970 - protein, 50 aa, Homo Sapiens
MAANLSRNGPALQEAYVRVVTEKSPTDWALFTYEGNSNDIRCCSCCRGPM

SEQ ID NO: 3971 - protein, 87 aa, Homo Sapiens
MAANLSRNGPALQEAYVRVVTEKSPTDWALFTYEGNSNDIRVAGTGDRRGRERCAEGSLCQPRQHHGQLPEGGPCDHQRTGRGGCGA

SEQ ID NO: 3972 - protein, 406 aa, Homo Sapiens
MAANLSRNGPALQEAYVRVVTEKSPTDWALFTYEGNSNDIRVAGTGEGGLEEMVEELNSGKVMYAFCRVKDPNSGLPKFVLINWGAHVTINARAEEDVEPECIMEKVAKASGANYSFHKESGRFQDVGPQAPVGSVYQKTNAVSEIKRVGKDSFWAKAEKEEENRRLEEKRRAEEAQRQLEQERRERELREAARREQRYQEQGGEASPQSRTWEQQQEVVSRNRNEQESAVHPREIFKQKERAMSTTSISSPQPGKLRSPFLQKQLTQPETHFGREPAAAISRPRADLPAEEPAPSTPPCLVQAEEEAVYEEPPEQETFYEQPPLVQQQGAGSEHIDHHIQGQGLSGQGLCARALYDYQAADDTEISFDPENLITGIEVIDEGWWRGYGPDGHFGMFPANYVELIE

SEQ ID NO: 3973 - protein, 430 aa, Homo Sapiens
MAANLSRNGPALQEAYVRVVTEKSPTDWALFTYEGNSNDIRVAGTGEGGLEEMVEELNSGKVMYAFCRVKDPNSGLPKFVLINWTGEGVNDVRKGACASHVSTMASFLKGAHVTINARAEEDVEPECIMEKVAKASGANYSFHKESGRFQDVGPQAPVGSVYQKTNAVSEIKRVGKDSFWAKAEKEEENRRLEEKRRAEEAQRQLEQERRERELREAARREQRYQEQGGEASPQRTWEQQQEVVSRNRNEQESAVHPREIFKQKERAMSTTSISSPQPGKLRSPFLQKQLTQPETHFGREPAAAISRPRADLPAEEPAPSTPPCLVQAEEEAVYEEPPEQETFYEQPPLVQQQGAGSEHIDHHIQGQGLSGQGLCARALYDYQAADDTEISFDPENLITGIEVIDEGWWRGYGPDGHFGMFPANYVELIE

SEQ ID NO: 3974 - protein, 431 aa, Homo Sapiens
MAANLSRNGPALQEAYVRVVTEKSPTDWALFTYEGNSNDIRVAGTGEGGLEEMVEELNSGKVMYAFCRVKDPNSGLPKFVLINWTGEGVNDVRKGACASHVSTMASFLKGAHVTINARAEEDVEPECIMEKVAKASGANYSFHKESGRFQDVGPQAPVGSVYQKTNAVSEIKRVGKDSFWAKAEKEEENRRLEEKRRAEEAQRQLEQERRERELREAARREQRYQEQGGEASPQSRTWEQQQEVVSRNRNEQESAVHPREIFKQKERAMSTTSISSPQPGKLRSPFLQKQLTQPETHFGREPAAAISRPRADLPAEEPAPSTPPCLVQAEEEAVYEEPPEQETFYEQPPLVQQQGAGSEHIDHHIQGQGLSGQGLCARALYDYQAADDTEISFDPENLITGIEVIDEGWWRGYGPDGHFGMFPANYVELIE

SEQ ID NO: 3975 - protein, 439 aa, Homo Sapiens
MAANLSRNGPALQEAYVRVVTEKSPTDWALFTYEGNSNDIRVAGTGEGGLEEMVEELNSGKVMYAFCRVKDPNSGLPKFVLINWTGEGVNDVRKGACASHVSTMASFLKGAHVTINARAEEDVEPECIMEKVAKASGANYSFHKESGRFQDVGPQAPVGSVYQKTNAVSEIKRVGKDSFWAKAEKEEENRRLEEKRRAEEAQRQLEQERRERELREAARREQRYQEQGGEASPQSRTWEQQQEVVSRNRNEQGSTCASLQESAVHPREIFKQKERAMSTTSISSPQPGKLRSPFLQKQLTQPETHFGREPAAAISRPRADLPAEEPAPSTPPCLVQAEEEAVYEEPPEQETFYEQPPLVQQQGAGSEHIDHHIQGQGLSGQGLCARALYDYQAADDTEISFDPENLITGIEVIDEGWWRGYGPDGHFGMFPANYVELIE

SEQ ID NO: 3976 - protein, 382 aa, Homo Sapiens
MAANLSRNGPALQEAYVRVVTEKSPTDWALFTYEGNSNDIRVAGTGEGGLEEMVEELNSGKVMYAFCRVKDPNSGLPKFVLINWTGEGVNDVRKGACASHVSTMASFLKGSVYQKTNAVSEIKRVGKDSFWAKAEKEEENRRLEEKRRAEEAQRQLEQERRERELREAARREQRYQEQGGEASPQSRTWEQQQEVVSRNRNEQESAVHPREIFKQKERAMSTTSISSPQPGKLRSPFLQKQLTQPETHFGREPAAAISRPRADLPAEEPAPSTPPCLVQAEEEAVYEEPPEQETFYEQPPLVQQQGAGSEHIDHHIQGQGLSGQGLCARALYDYQAADDTEISFDPENLITGIEVIDEGWWRGYGPDGHFGMFPANYVELIE

SEQ ID NO: 3977 - protein, 128 aa, Homo Sapiens
MAANLSRNGPALQEAYVRVVTEKSPTDWALFTYEGNSNDIRVAGTGEGGLEEMVEELNSGKVMYAFCRVKDPNSGLPKFVLINWTGEGVNDVRKGACASHVSTMASFLKVRPGGPCDHQRTGRGGCGA

SEQ ID NO: 3978 - protein, 62 aa, Homo Sapiens
MAANLSRNGPALQEAYVRVVTEKSPTDWALFTYEGNSNDIRVAGTGGGPCDHQRTGRGGCGA

SEQ ID NO: 3979 - protein, 31 aa, Homo Sapiens
MAANLSRNGPALQEAYVRVVTEKSPTDWGPM

SEQ ID NO: 3980 - protein, 40 aa, Homo Sapiens
MAANLSRNGPALQEAYVRVVTEKSPTDWWAARRARGSLYL

SEQ ID NO: 3981 - protein, 48 aa, Homo Sapiens
MAANLSRNGPALQEAYVRVVTEKSPTDWWAARRARVGPGAASGGSLYL

SEQ ID NO: 3982 - protein, 48 aa, Homo Sapiens; identical to SEQ ID NO: 3981

SEQ ID NO: 3983 - protein, 327 aa, Homo Sapiens
MASFLKGAHVTINARAEEDVEPECIMEKVAKASGANYSFHKESGRFQDVGPQAPVGSVYQKTNAVSEIKRVGKDSFWAKAEKEEENRRLEEKRRAEEAQRQLEQERRERELREAARREQRYQEQGGEASPQRTWEQQQEVVSRNRNEQESAVHPREIFKQKERAMSTTSISSPQPGKLRSPFLQKQLTQPETHFGREPAAAISRPRADLPAEEPAPSTPPCLVQAEEEAVYEEPPEQETFYEQPPLVQQQGAGSEHIDHHIQGQGLSGQGLCARALYDYQAADDTEISFDPENLITGIEVIDEGWWRGYGPDGHFGMFPANYVELIE

SEQ ID NO: 3984 - protein, 336 aa, Homo Sapiens
MKATAMTSAWLAQGGAHVTINARAEEDVEPECIMEKVAKASGANYSFHKESGRFQDVGPQAPVGSVYQKTNAVSEIKRVGKDSFWAKAEKEEENRRLEEKRRAEEAQRQLEQERRERELREAARREQRYQEQGGEASPQSRTWEQQQEVVSRNRNEQESAVHPREIFKQKERAMSTTSISSPQPGKLRSPFLQKQLTQPETHFGREPAAAISRPRADLPAEEPAPSTPPCLVQAEEEAVYEEPPEQETFYEQPPLVQQQGAGSEHIDHHIQGQGLSGQGLCARALYDYQAADDTEISFDPENLITGIEVIDEGWWRGYGPDGHFGMFPANYVELIE

SEQ ID NO: 3985 - protein, 359 aa, Homo Sapiens
  misc_feature (1)..(1): Xaa can be any naturally occurring amino acid
XATAMTSAWLAQGTGEGVNDVRKGACASHVSTMASFLKGAHVTINARAEEDVEPECIMEKVAKASGANYSFHKESGRFQDVGPQAPVGSVYQKTNAVSEIKRVGKDSFWAKAEKEEENRRLEEKRRAEEAQRQLEQERRERELREAARREQRYQEQGGEASPQRTWEQQQEVVSRNRNEQESAVHPREIFKQKERAMSTTSISSPQPGKLRSPFLQKQLTQPETHFGREPAAAISRPRADLPAEEPAPSTPPCLVQAEEEAVYEEPPEQETFYEQPPLVQQQGAGSEHIDHHIQGQGLSGQGLCARALYDYQAADDTEISFDPENLITGIEVIDEGWWRGYGPDGHFGMFPANYVELIE

SEQ ID NO: 3986 - protein, 138 aa, Homo Sapiens
  misc_feature (1)..(1): Xaa can be any naturally occurring amino acid
XKQKERAMSTTSISSPQPDLPAEEPAPSTPPCLVQAEEEAVYEEPPEQETFYEQPPLVQQQGAGSEHIDHHIQGQGLSGQGLCARALYDYQAADDTEISFDPENLITGIEVIDEGWWRGYGPDGHFGMFPANYVELIE

SEQ ID NO: 3987 - protein, 77 aa, Homo Sapiens
MRFMTLLFLTALAGALVCAYDPEAASAPGSGNHKQMDCLQLQKPPSETAKFLSSSTNLPRREKLVPSAKPPHTRGLV

SEQ ID NO: 3988 - protein, 110 aa, Homo Sapiens
MRFMTLLFLTALAGALVCAYDPEAASAPGSGNPCHEASAAQKENAGEDPGLARQAPKPRKQRSSLLEKGLDGAKKAVGGLGKLGKDAVEDLESVGKGAVHDVKDVLDSVL

SEQ ID NO: 3989 - protein, 121 aa, Homo Sapiens
MRFMTLLFLTALAGALVCAYDPEAASAPGSGNPCHEASAAQKENAGEDPGLARQAPKPRKQRSSLLEKGLDGAKKAVGGLGKLGKDAVEDLESVGKGGEERLVFGAPVNLTSIPLTSVSRP

SEQ ID NO: 3990 - protein, 100 aa, Homo Sapiens
MKATIILLLLAQVSWAGPFQQRGLFDFMLEDEASGIGPEVPDDRDFEPSLGPVCPFRCQCHLRVVQCSDLEKFGLEIPRALHLEDKSPERLKLSGWAKGE

SEQ ID NO: 3991 - protein, 98 aa, Homo Sapiens
MKATIILLLLAQVSWAGPFQQRGLFDFMLEDEASGIGPEVPDDRDFEPSLGPVCPFRCQCHLRVVQCSDLEKKYCNNLSSYNLYTTNCLILCRLFTHH

SEQ ID NO: 3992 - protein, 98 aa, Homo Sapiens; identical to SEQ ID NO: 3991

SEQ ID NO: 3993 - protein, 250 aa, Homo Sapiens
MKATIILLLLAQVSWAGPFQQRGLFDFMLEDEASGIGPEVPDDRDFEPSLGPVCPFRCQCHLRVVQCSDLELGTNPLKSSGIENGAFQGMKKLSYIRIADTNITSIPQGLPPSLTELHLDGNKISRVDAASLKGLNNLAKLGLSFNSISAVDNGSLANTPHLRELHLDNNKLTRVPGGLAEHKYIQVVYLHNNNISVVGSSDFCPPGHNTKKASYSGVSLFSNPVQYWEIQPSTFRCVYVRSAIQLGNYK

SEQ ID NO: 3994 - protein, 75 aa, Homo Sapiens
MKATIILLLLAQVSWAGPFQQRGLFDFMLEDEASGIGPEVPDDRDFEPSLGPVCPFRCQCHLRVVQCSDLGCLPS

SEQ ID NO: 3995 - protein, 119 aa, Homo Sapiens
MKATIILLLLAQVSWAGPFQQRGLFDFMLEDEASGIGPEVPDDRDFEPSLGPVCPFRCQCHLRVVQCSDLGLDKVPKDLPPDTTLLDLQNNKITEIKDGDFKNLKNLHALILVNNKISK

SEQ ID NO: 3996 - protein, 174 aa, Homo Sapiens
MKATIILLLLAQVSWAGPFQQRGLFDFMLEDEASGIGPEVPDDRDFEPSLGPVCPFRCQCHLRVVQCSDLGLDKVPKDLPPDTTLLDLQNNKITEIKDGDFKNLKNLHALILVNNKISKVSPGAFTPLVKLERLYLSKNQLKELPEKMPKTLQELRAHENEITKVRKVTFNGLN

SEQ ID NO: 3997 - protein, 178 aa, Homo Sapiens
MKATIILLLLAQVSWAGPFQQRGLFDFMLEDEASGIGPEVPDDRDFEPSLGPVCPFRCQCHLRVVQCSDLGLDKVPKDLPPDTTLLDLQNNKITEIKDGDFKNLKNLHALILVNNKISKVSPGAFTPLVKLERLYLSKNQLKELPEKMPKTLQELRAHENEITKVRKVTFNGLNQMIV

SEQ ID NO: 3998 - protein, 179 aa, Homo Sapiens
MKATIILLLLAQVSWAGPFQQRGLFDFMLEDEASGIGPEVPDDRDFEPSLGPVCPFRCQCHLRVVQCSDLGLDKVPKDLPPDTTLLDLQNNKITEIKDGDFKNLKNLHALILVNNKISKVSPGAFTPLVKLERLYLSKNQLKELPEKMPKTLQELRAHENEITKVRKVTFNGLNQMIVI

SEQ ID NO: 3999 - protein, 359 aa, Homo Sapiens
MKATIILLLLAQVSWAGPFQQRGLFDFMLEDEASGIGPEVPDDRDFEPSLGPVCPFRCQCHLRVVQCSDLGLDKVPKDLPPDTTLLDLQNNKITEIKDGDFKNLKNLHALILVNNKISKVSPGAFTPLVKLERLYLSKNQLKELPEKMPKTLQELRAHENEITKVRKVTFNGLNQMIVIELGTNPLKSSGIENGAFQGMKKLSYIRIADTNITSIPQGLPPSLTELHLDGNKISRVDAASLKGLNNLAKLGLSFNSISAVDNGSLANTPHLRELHLDNNKLTRVPGGLAEHKYIQVVYLHNNNISVVGSSDFCPPGHNTKKASYSGVSLFSNPVQYWEIQPSTFRCVYVRSAIQLGNYK

SEQ ID NO: 4000 - protein, 359 aa, Homo Sapiens; identical to SEQ ID NO: 3999

SEQ ID NO: 4001 - protein, 359 aa, Homo Sapiens; identical to SEQ ID NO: 3999

SEQ ID NO: 4002 - protein, 172 aa, Homo Sapiens
MKATIILLLLAQVSWAGPFQQRGLFDFMLEDEASGIGPEVPDDRDFEPSLGPVCPFRCQCHLRVVQCSDLGLDKVPKDLPPDTTLLDLQNNKITEIKDGDFKNLKNLHVVYLHNNNISVVGSSDFCPPGHNTKKASYSGVSLFSNPVQYWEIQPSTFRCVYVRSAIQLGNYK

SEQ ID NO: 4003 - protein, 177 aa, Homo Sapiens
MKATIILLLLAQVSWAGPFQQRGLFDFMLEDEASGIGPEVPDDRDFEPSLGPVCPFRCQCHLRVVQCSDLGLPPSLTELHLDGNKISRVDAASLKGLNNLAKLGLSFNSISAVDNGSLANTPHLRELHLDNNKLTRVPGGLAEHKYIQVVYLHNNNISVVGSSDFCPPGHNTKKASY

SEQ ID NO: 4004 - protein, 212 aa, Homo Sapiens
MKATIILLLLAQVSWAGPFQQRGLFDFMLEDEASGIGPEVPDDRDFEPSLGPVCPFRCQCHLRVVQCSDLGLPPSLTELHLDGNKISRVDAASLKGLNNLAKLGLSFNSISAVDNGSLANTPHLRELHLDNNKLTRVPGGLAEHKYIQVVYLHNNNISVVGSSDFCPPGHNTKKASYSGVSLFSNPVQYWEIQPSTFRCVYVRSAIQLGNYK

SEQ ID NO: 4005 - protein, 212 aa, Homo Sapiens; identical to SEQ ID NO: 4004

SEQ ID NO: 4006 - protein, 88 aa, Homo Sapiens
MKATIILLLLAQVSWAGPFQQRGLFDFMLEDEASGIGPEVPDDRDFEPSLGPVCPFRCQCHLRVVQCSDLVETGFHRVSQDGLDLLIS

SEQ ID NO: 4007 - protein, 52 aa, Homo Sapiens
  misc_feature (1)..(1): Xaa can be any naturally occurring amino acid
XDFCPPGHNTKKASYSGVSLFSNPVQYWEIQPSTFRCVYVRSAIQLGNYKKK

SEQ ID NO: 4008 - protein, 95 aa, Homo Sapiens
  misc_feature (1)..(1): Xaa can be any naturally occurring amino acid
XKISRVDAASLKGLNNLAKLGLSFNSISAVDNGSLANTPHLRELHLDNNKLTRVPGGLAEHKYIQVMQSHCLCEEYPKSKTPTLLMGCWEAGSSS

SEQ ID NO: 4009 - protein, 66 aa, Homo Sapiens
MNRRRKFLLASVLALQNSSFIYPSCQKCFSRIILVSKRILKTNLDKVQMPVTSYSNALTTKEKPKH

SEQ ID NO: 4010 - protein, 75 aa, Homo Sapiens
MNRRRKFLLASVLALQNSSFIYPSCQKCFSRIILVSKRSNCPKCGSTGESGNANYRYKLSLKVAESNKLFVITVF

SEQ ID NO: 4011 - protein, 76 aa, Homo Sapiens
MNRRRKFLLASVLALQNSSFIYPSCQKCFSRIILVSKRSNCPKCGSTGESGNANYRYKLSLKVAESNKLFVITVFG

SEQ ID NO: 4012 - protein, 120 aa, Homo Sapiens
MNRRRKFLLASVLALQNSSFIYPSCQKCFSRIILVSKRSNCPKCGSTGESGNANYRYKLSLKVAESNKLFVITVFGSCLDTFFGLTATGLHRILKTNLDKVQMPVTSYSNALTTKEKPKH

SEQ ID NO: 4013 - protein, 120 aa, Homo Sapiens; identical to SEQ ID NO: 4012

SEQ ID NO: 4014 - protein, 123 aa, Homo Sapiens
MNRRRKFLLASVLALQNSSFIYPSCQKCFSRIILVSKRSNCPKCGSTGESGNANYRYKLSLKVAESNKLFVITVFGSCLDTFFGLTATGLHRYIQDPNKIPETLDNDTTQNLLTKAVETCFVG

SEQ ID NO: 4015 - protein, 178 aa, Homo Sapiens
MNRRRKFLLASVLALQNSSFIYPSCQKCFSRIILVSKRSNCPKCGSTGESGNANYRYKLSLKVAESNKLFVITVFGSCLDTFFGLTATGLHRYIQDPNKIPETLDNDTTQNLLTKAVETCFVGQSFIFGVTNFENQPGQGSDASNFLQQCSDHKRKAKALVACQIVLPDPATQDAKTK

SEQ ID NO: 4016 - protein, 998 aa, Homo Sapiens
MNRRRKFLLASVLALQNSSFIYPSCQKCFSRIILVSKRSNCPKCGSTGESGNANYRYKLSLKVAESNKLFVITVFGSCLDTFFGLTATGLHRYIQDPNKIPETLDNDTTQNLLTKAVETCFVGQSFIFGVTNFENQPGQGSDASNFLQQCSDHKRKAKALVACQIVLPDPGIAGFTVIDYFHQLLQTFNFRKLQCDSQAPNNHLLALDHSNSDLSSIYTSDSTSDFFKSCSKDTFSKFWQPSLEFTCIVSQLTDNDDFSASEQSKAFGTLQQNRKSISIAEATGSSSCHDPIQDSWSLVSYMDKKSTAEKLGKELGLQAKELSAVHSSHHEIGVNDSNLFSLEMREPLESSNTKSFHSAVEIKNRSQHELPCFQHHGIDTPTSLQKRSACCPPSLLRLEETASSSQDGDPQIWDDLPFSESLNKFLAVLESEIAVTQADVSSRKHHVDNDIDKFHADHSRLSVTPQRTTGALHTPPIALRSSQVIVKANCSKDDFLFNCKGNLSPSVEKESQPDNKVEAVSVNHNGRDMSEYFLPNPYLSALSSSSKDLETIVTLKKTIRISPHRESDHSSLNNKYLNGCGEISVSEMNEKLTTLCYRKYNDVSDLCKLENKQYCRWSKNQDDSFTICRKLTYPLETLCNSPNRSTNTLKEMPWGHINNNVTQSYSIGYEGSYDASADLFDDIAKEMDIATEITKKSQDILLKWGTSLAESHPSESDFSLRSLSEDFIQPSQKLSLQSLSDSRHSRTCSPTPHFQSDSEYNFENSQDFVPCSQSTPISGFHQTRIHGINRAFKKPVFYSDLDGNYEKIRIFPENDKQQASPSCPKNIKTPSQKIRSPIVSGVSQPDVFNHYPFAECHETDSDEWVPPTTQKIFPSDMLGFQGIGLGKCLAAYHFPDQQELPRKKLKHIRQGTNKGLIKKKLKNMLAAVVTKKKTHKYNCKSSGWISKCPDIQVLAAPQLHPILGPDSCSEVKCCLPFSEKGPPSVCETRSAWSPELFS

SEQ ID NO: 4017 - protein, 998 aa, Homo Sapiens; identical to SEQ ID NO: 4016

SEQ ID NO: 4018 - protein, 225 aa, Homo Sapiens
MYQMSTLKSNKVIFQLKKNNFHQFRFFKRFIWSFALVAQAEVPWCNLGSLQPPHPRPRCEHMNRRRKFLLASVLALQNSSFIYPSCQKCFSRIILVSKRSNCPKCGSTGESGNANYRYKLSLKVAESNKLFVITVFGSCLDTFFGLTATGLHRYIQDPNKIPETLDNDTTQNLLTKAVETCFVGQSFIFGVTNFENQPGQGSDASNFLQQCSDHKRKAKALVACQ

SEQ ID NO: 4019 - protein, 439 aa, Homo Sapiens
MEPSTAARAWALFWLLLPLLGAVCASGPRTLVLLDNLNVRETHSLFFRSLKDRGFELTFKTADDPSLSLIKYGEFLYDNLIIFSPSVEDFGGNINVETISAFIDGGGSVLVAASSDIGDPLRELGSECGIEFDEEKTAVIDHHNYDISDLGQHTLIVADTENLLKAPTIVGKSSLNPILFRGVGMVADPDNPLVLDILTGSSTSYSFFPDKPITQYPHAVGKNTLLIAGLQARNNARVIFSGSLDFFSDSFFNSAVQKAAPGSQRYSQTGNYELAVALSRWVFKEEGVLRVGPVSHHRVGETAPPNAYTVTDLVEYSIVIQQLSNGKWVPFDGDDIQLEFVRIDPFVRTFLKKKGGKYSVQFKLPDVYGVFQFKVDYNRLGYTHLYSSTQVSVRPLQHTQYERFIPSAYPYYASAFSMMLGLFIFSIVFLHMKEKEKSD

SEQ ID NO: 4020 - protein, 155 aa, Homo Sapiens [sequence omitted]

SEQ ID NO: 4021 - protein, 456 aa, Homo Sapiens
MGYFRCARAGSFGRRRKMEPSTAARAWALFWLLLPLLGAVCASGPRTLVLLDNLNVRETHSLFFRSLKDRGFELTFKTADDPSLSLIKYGEFLYDNLIIFSPSVEDFGGNINVETISAFIDGGGSVLVAASSDIGDPLRELGSECGIEFDEEKTAVIDHHNYDISDLGQHTLIVADTENLLKAPTIVGKSSLNPILFRGVGMVADPDNPLVLDILTGSSTSYSFFPDKPITQYPHAVGKNTLLIAGLQARNNARVIFSGSLDFFSDSFFNSAVQKAAPGSQRYSQTGNYELAVALSRWVFKEEGVLRVGPVSHHRVGETAPPNAYTVTDLVEYSIVIQQLSNGKWVPFDGDDIQLEFVRIDPFVRTFLKKKGGKYSVQFKLPDVYGVFQFKVDYNRLGYTHLYSSTQVSVRPLQHTQYERFIPSAYPYYASAFSMMLGLFIFSIVFLHMKEKEKSD

SEQ ID NO: 4022 - protein, 456 aa, Homo Sapiens; identical to SEQ ID NO: 4021

SEQ ID NO: 4023 - protein, 41 aa, Homo Sapiens
MGPEALSSLLLLLLVASGDADMKGHFDPAKCRYALGMQDRT

SEQ ID NO: 4024 - protein, 51 aa, Homo Sapiens
MGPEALSSLLLLLLVASGDADMKGHFDPAKCRYALGMQDRTIPDSDISASS

SEQ ID NO: 4025 - protein, 51 aa, Homo Sapiens; identical to SEQ ID NO: 4024

SEQ ID NO: 4026 - protein, 55 aa, Homo Sapiens
MGPEALSSLLLLLLVASGDADMKGHFDPAKCRYALGMQDRTIPDSDISASSSWSD

SEQ ID NO: 4027 - protein, 58 aa, Homo Sapiens
MGPEALSSLLLLLLVASGDADMKGHFDPAKCRYALGMQDRTIPDSDISASSSWSDSTA

SEQ ID NO: 4028 - protein, 70 aa, Homo Sapiens
MGPEALSSLLLLLLVASGDADMKGHFDPAKCRYALGMQDRTIPDSDISASSSWSDSTAARHSRLESSDGD

SEQ ID NO: 4029 - protein, 73 aa, Homo Sapiens
MGPEALSSLLLLLLVASGDADMKGHFDPAKCRYALGMQDRTIPDSDISASSSWSDSTAARHSRLESSDGDGAW

SEQ ID NO: 4030 - protein, 78 aa, Homo Sapiens
MGPEALSSLLLLLLVASGDADMKGHFDPAKCRYALGMQDRTIPDSDISASSSWSDSTAARHSRLESSDGDGAWCPAGS

SEQ ID NO: 4031 - protein, 85 aa, Homo Sapiens
MGPEALSSLLLLLLVASGDADMKGHFDPAKCRYALGMQDRTIPDSDISASSSWSDSTAARHSRLESSDGDGAWCPAGSVFPKEEE

SEQ ID NO: 4032 - protein, 101 aa, Homo Sapiens
MGPEALSSLLLLLLVASGDADMKGHFDPAKCRYALGMQDRTIPDSDISASSSWSDSTAARHSRLESSDGDGAWCPAGSVFPKEEEYLQVDLQRLHLVALVG

SEQ ID NO: 4033 - protein, 112 aa, Homo Sapiens
MGPEALSSLLLLLLVASGDADMKGHFDPAKCRYALGMQDRTIPDSDISASSSWSDSTAARHSRLESSDGDGAWCPAGSVFPKEEEYLQVDLQRLHLVALVGTQGRHAGGLGK

SEQ ID NO: 4034 - protein, 115 aa, Homo Sapiens
MGPEALSSLLLLLLVASGDADMKGHFDPAKCRYALGMQDRTIPDSDISASSSWSDSTAARHSRLESSDGDGAWCPAGSVFPKEEEYLQVDLQRLHLVALVGTQGRHAGGLGKEFS

SEQ ID NO: 4035 - protein, 122 aa, Homo Sapiens
MGPEALSSLLLLLLVASGDADMKGHFDPAKCRYALGMQDRTIPDSDISASSSWSDSTAARHSRLESSDGDGAWCPAGSVFPKEEEYLQVDLQRLHLVALVGTQGRHAGGLGKEFSRSYRLRY

SEQ ID NO: 4036 - protein, 127 aa, Homo Sapiens
MGPEALSSLLLLLLVASGDADMKGHFDPAKCRYALGMQDRTIPDSDISASSSWSDSTAARHSRLESSDGDGAWCPAGSVFPKEEEYLQVDLQRLHLVALVGTQGRHAGGLGKEFSRSYRLRYSRDGR

SEQ ID NO: 4037 - protein, 132 aa, Homo Sapiens
MGPEALSSLLLLLLVASGDADMKGHFDPAKCRYALGMQDRTIPDSDISASSSWSDSTAARHSRLESSDGDGAWCPAGSVFPKEEEYLQVDLQRLHLVALVGTQGRHAGGLGKEFSRSYRLRYSRDGRRWMGW

SEQ ID NO: 4038 - protein, 138 aa, Homo Sapiens
MGPEALSSLLLLLLVASGDADMKGHFDPAKCRYALGMQDRTIPDSDISASSSWSDSTAARHSRLESSDGDGAWCPAGSVFPKEEEYLQVDLQRLHLVALVGTQGRHAGGLGKEFSRSYRLRYSRDGRRWMGWKDRWGQ

SEQ ID NO: 4039 - protein, 138 aa, Homo Sapiens; identical to SEQ ID NO: 4038

SEQ ID NO: 4040 - protein, 143 aa, Homo Sapiens
MGPEALSSLLLLLLVASGDADMKGHFDPAKCRYALGMQDRTIPDSDISASSSWSDSTAARHSRLESSDGDGAWCPAGSVFPKEEEYLQVDLQRLHLVALVGTQGRHAGGLGKEFSRSYRLRYSRDGRRWMGWKDRWGQEVISG

SEQ ID NO: 4041 - protein, 147 aa, Homo Sapiens
MGPEALSSLLLLLLVASGDADMKGHFDPAKCRYALGMQDRTIPDSDISASSSWSDSTAARHSRLESSDGDGAWCPAGSVFPKEEEYLQVDLQRLHLVALVGTQGRHAGGLGKEFSRSYRLRYSRDGRRWMGWKDRWGQEVISGNEDP

SEQ ID NO: 4042 - protein, 153 aa, Homo Sapiens
MGPEALSSLLLLLLVASGDADMKGHFDPAKCRYALGMQDRTIPDSDISASSSWSDSTAARHSRLESSDGDGAWCPAGSVFPKEEEYLQVDLQRLHLVALVGTQGRHAGGLGKEFSRSYRLRYSRDGRRWMGWKDRWGQEVISGNEDPEGVVLK

SEQ ID NO: 4043 - protein, 160 aa, Homo Sapiens
MGPEALSSLLLLLLVASGDADMKGHFDPAKCRYALGMQDRTIPDSDISASSSWSDSTAARHSRLESSDGDGAWCPAGSVFPKEEEYLQVDLQRLHLVALVGTQGRHAGGLGKEFSRSYRLRYSRDGRRWMGWKDRWGQEVISGNEDPEGVVLKDLGPPMV

SEQ ID NO: 4044 - protein, 170 aa, Homo Sapiens
MGPEALSSLLLLLLVASGDADMKGHFDPAKCRYALGMQDRTIPDSDISASSSWSDSTAARHSRLESSDGDGAWCPAGSVFPKEEEYLQVDLQRLHLVALVGTQGRHAGGLGKEFSRSYRLRYSRDGRRWMGWKDRWGQEVISGNEDPEGVVLKDLGPPMVARLVRFYPRA

SEQ ID NO: 4045 - protein, 243 aa, Homo Sapiens
MGPEALSSLLLLLLVASGDADMKGHFDPAKCRYALGMQDRTIPDSDISASSSWSDSTAARHSRLESSDGDGAWCPAGSVFPKEEEYLQVDLQRLHLVALVGTQGRHAGGLGKEFSRSYRLRYSRDGRRWMGWKDRWGQEVISGNEDPEGVVLKDLGPPMVARLVRFYPRADRVMSVCLRVELYGCLWRDCSMGVWASWQMVWWGWMTLGRVRSCGSGQAMTMWDGATTASPVAMWRWSLSLTG

SEQ ID NO: 4046 - protein, 243 aa, Homo Sapiens; identical to SEQ ID NO: 4045

SEQ ID NO: 4047 - protein, 209 aa, Homo Sapiens
MGPEALSSLLLLLLVASGDADMKGHFDPAKCRYALGMQDRTIPDSDISASSSWSDSTAARHSRLESSDGDGAWCPAGSVFPKEEEYLQVDLQRLHLVALVGTQGRHAGGLGKEFSRSYRLRYSRDGRRWMGWKDRWGQEVISGNEDPEGVVLKDLGPPMVARLVRFYPRADRVMSVCLRVELYGCLWRDGLLSYTAPVGQTMYLSEAVY

SEQ ID NO: 4048 - protein, 913 aa, Homo Sapiens
MGPEALSSLLLLLLVASGDADMKGHFDPAKCRYALGMQDRTIPDSDISASSSWSDSTAARHSRLESSDGDGAWCPAGSVFPKEEEYLQVDLQRLHLVALVGTQGRHAGGLGKEFSRSYRLRYSRDGRRWMGWKDRWGQEVISGNEDPEGVVLKDLGPPMVARLVRFYPRADRVMSVCLRVELYGCLWRDGLLSYTAPVGQTMYLSEAVYLNDSTYDGHTVGGLQYGGLGQLADGVVGLDDFRKSQELRVWPGYDYVGWSNHSFSSGYVEMEFEFDRLRAFQAMQVHCNNMHTLGARLPGGVECRFRRGPAMAWEGEPMRHNLGGNLGDPRARAVSVPLGGRVARFLQCRFLFAGPWLLFSEISFISDVVNNSSPALGGTFPPAPWWPPGPPPTNFSSLELEPRGQQPVAKAEGSPTAILIGCLVAIILLLLLIIALMLWRLHWRRLLSKAERRVLEEELTVHLSVPGDTILINNRPGPREPPPYQEPRPRGNPPHSAPCVPNGSALLLSNPAYRLLLATYARPPRGPGPPTPAWAKPTNTQAYSGDYMEPEKPGAPLLPPPPQNSVPHYAEADIVTLQGVTGGNTYAVPALPPGAVGDGPPRVDFPRSRLRFKEKLGEGQFGEVHLCEVDSPQDLVSLDFPLNVRKGHPLLVAVKILRPDATKNARNDFLKEVKIMSRLKDPNIIRLLGVCVQDDPLCMITDYMENGDLNQFLSAHQLEDKAAEGAPGDGQAAQGPTISYPMLLHVAAQIASGMRYLATLNFVHRDLATRNCLVGENFTIKIADFGMSRNLYAGDYYRVQGRAVLPIRWMAWECILMGKFTTASDVWAFGVTLWEVLMLCRAQPFGQLTDEQVIENAGEFFRDQGRQVYLSRPPACPQGLYELMLRCWSRESEQRPPFSQLHRFLAEDALNTV

SEQ ID NO: 4049 - protein, 876 aa, Homo Sapiens
MGPEALSSLLLLLLVASGDADMKGHFDPAKCRYALGMQDRTIPDSDISASSSWSDSTAARHSRLESSDGDGAWCPAGSVFPKEEEYLQVDLQRLHLVALVGTQGRHAGGLGKEFSRSYRLRYSRDGRRWMGWKDRWGQEVISGNEDPEGVVLKDLGPPMVARLVRFYPRADRVMSVCLRVELYGCLWRDGLLSYTAPVGQTMYLSEAVYLNDSTYDGHTVGGLQYGGLGQLADGVVGLDDFRKSQELRVWPGYDYVGWSNHSFSSGYVEMEFEFDRLRAFQAMQVHCNNMHTLGARLPGGVECRFRRGPAMAWEGEPMRHNLGGNLGDPRARAVSVPLGGRVARFLQCRFLFAGPWLLFSEISFISDVVNNSSPALGGTFPPAPWWPPGPPPTNFSSLELEPRGQQPVAKAEGSPTAILIGCLVAIILLLLLIIALMLWRLHWRRLLSKAERRVLEEELTVHLSVPGDTILINNRPGPREPPPYQEPRPRGNPPHSAPCVPNGSAYSGDYMEPEKPGAPLLPPPPQNSVPHYAEADIVTLQGVTGGNTYAVPALPPGAVGDGPPRVDFPRSRLRFKEKLGEGQFGEVHLCEVDSPQDLVSLDFPLNVRKGHPLLVAVKILRPDATKNARNDFLKEVKIMSRLKDPNIIRLLGVCVQDDPLCMITDYMENGDLNQFLSAHQLEDKAAEGAPGDGQAAQGPTISYPMLLHVAAQIASGMRYLATLNFVHRDLATRNCLVGENFTIKIADFGMSRNLYAGDYYRVQGRAVLPIRWMAWECILMGKFTTASDVWAFGVTLWEVLMLCRAQPFGQLTDEQVIENAGEFFRDQGRQVYLSRPPACPQGLYELMLRCWSRESEQRPPFSQLHRFLAEDALNTV

SEQ ID NO: 4050 - protein, 876 aa, Homo Sapiens; identical to SEQ ID NO: 4049

SEQ ID NO: 4051 - protein, 913 aa, Homo Sapiens; identical to SEQ ID NO: 4048

SEQ ID NO: 4052 - protein, 267 aa, Homo Sapiens
MGPEALSSLLLLLLVASGDADMKGHFDPAKCRYALGMQDRTIPDSDISASSSWSDSTAARHSRLESSDGDGAWCPAGSVFPKEEEYLQVDLQRLHLVALVGTQGRHAGGLGKEFSRSYRLRYSRDGRRWMGWKDRWGQEVISGNEDPEGVVLKDLGPPMVARLVRFYPRADRVMSVCLRVELYGCLWRDGLLSYTAPVGQTMYLSEAVYLNDSTYDGHTVGGLQYGGLGQLADGVVGLDDFRKSQELRVWPGYDYVGWSNHSFSSGY

SEQ ID NO: 4053 - protein, 876 aa, Homo Sapiens; identical to SEQ ID NO: 4049

SEQ ID NO: 4054 - protein, 767 aa, Homo Sapiens
MGPEALSSLLLLLLVASGDADMKGHFDPAKCRYALGMQDRTIPDSDISASSSWSDSTAARHSRLESSDGDGAWCPAGSVFPKEEEYLQVDLQRLHLVALVGTQGRHAGGLGKEFSRSYRLRYSRDGRRWMGWKDRWGQEVISGNEDPEGVVLKDLGPPMVARLVRFYPRADRVMSVCLRVELYGCLWRDGLLSYTAPVGQTMYLSEAVYLNDSTYDGHTVGGLQYGGLGQLADGVVGLDDFRKSQELRVWPGYDYVGWSNHSFSSGYVEMEFEFDRLRAFQAMQVHCNNMHTLGARLPGGVECRFRRGPAMAWEGEPMRHNLGGNLGDPRARAVSVPLGGRVARFLQCRFLFAGPWLLFSEISFISDVVNNSSPALGGTFPPAPWWPPGPPPTNFSSLELEPRGQQPVAKAEGSPTAILIGCLVAIILLLLLIIALMLWRLHWRRLLSKVLESHPRTRSPGLVGIRPTPLPVSPMALVHLCEVDSPQDLVSLDFPLNVRKGHPLLVAVKILRPDATKNARNDFLKEVKIMSRLKDPNIIRLLGVCVQDDPLCMITDYMENGDLNQFLSAHQLEDKAAEGAPGDGQAAQGPTISYPMLLHVAAQIASGMRYLATLNFVHRDLATRNCLVGENFTIKIADFGMSRNLYAGDYYRVQGRAVLPIRWMAWECILMGKFTTASDVWAFGVTLWEVLMLCRAQPFGQLTDEQVIENAGEFFRDQGRQVYLSRPPACPQGLYELMLRCWSRESEQRPPFSQLHRFLAEDALNTV

SEQ ID NO: 4055 - protein, 876 aa, Homo Sapiens; identical to SEQ ID NO: 4049

SEQ ID NO: 4056 - protein, 876 aa, Homo Sapiens; identical to SEQ ID NO: 4049

SEQ ID NO: 4057 - protein, 919 aa, Homo Sapiens
MGPEALSSLLLLLLVASGDADMKGHFDPAKCRYALGMQDRTIPDSDISASSSWSDSTAARHSRLESSDGDGAWCPAGSVFPKEEEYLQVDLQRLHLVALVGTQGRHAGGLGKEFSRSYRLRYSRDGRRWMGWKDRWGQEVISGNEDPEGVVLKDLGPPMVARLVRFYPRADRVMSVCLRVELYGCLWRDGLLSYTAPVGQTMYLSEAVYLNDSTYDGHTVGGLQYGGLGQLADGVVGLDDFRKSQELRVWPGYDYVGWSNHSFSSGYVEMEFEFDRLRAFQAMQVHCNNMHTLGARLPGGVECRFRRGPAMAWEGEPMRHNLGGNLGDPRARAVSVPLGGRVARFLQCRFLFAGPWLLFSEISFISDVVNNSSPALGGTFPPAPWWPPGPPPTNFSSLELEPRGQQPVAKAEGSPTAILIGCLVAIILLLLLIIALMLWRLHWRRLLSKAERRVLEEELTVHLSVPGDTILINNRPGPREPPPYQEPRPRGNPPHSAPCVPNGSALLLSNPAYRLLLATYARPPRGPGPPTPAWAKPTNTQAYSGDYMEPEKPGAPLLPPPPQNSVPHYAEADIVTLQGVTGGNTYAVPALPPGAVGDGPPRVDFPRSRLRFKEKLGEGQFGEVHLCEVDSPQDLVSLDFPLNVRKGHPLLVAVKILRPDATKNASFSLFSRNDFLKEVKIMSRLKDPNIIRLLGVCVQDDPLCMITDYMENGDLNQFLSAHQLEDKAAEGAPGDGQAAQGPTISYPMLLHVAAQIASGMRYLATLNFVHRDLATRNCLVGENFTIKIADFGMSRNLYAGDYYRVQGRAVLPIRWMAWECILMGKFTTASDVWAFGVTLWEVLMLCRAQPFGQLTDEQVIENAGEFFRDQGRQVYLSRPPACPQGLYELMLRCWSRESEQRPPFSQLHRFLAEDALNTV

SEQ ID NO: 4058 - protein, 286 aa, Homo Sapiens
MGPEALSSLLLLLLVASGDADMKGHFDPAKCRYALGMQDRTIPDSDISASSSWSDSTAARHSRLESSDGDGAWCPAGSVFPKEEEYLQVDLQRLHLVALVGTQGRHAGGLGKEFSRSYRLRYSRDGRRWMGWKDRWGQEVISGNEDPEGVVLKDLGPPMVARLVRFYPRADRVMSVCLRVELYGCLWRDGLLSYTAPVGQTMYLSEAVYLNDSTYDGHTVGGLQYGGLGQLADGVVGLDDFRKSQELRVWPGYDYVGWSNHSFSSGYVEMEFEFDRLRAFQAMQVH

SEQ ID NO: 4059 - protein, 913 aa, Homo Sapiens; identical to SEQ ID NO: 4048

SEQ ID NO: 4060 - protein, 35 aa, Homo Sapiens
MGPEALSSLLLLLLVASGDADMKGHFDPGPDHPRQ

SEQ ID NO: 4061 - protein, 35 aa, Homo Sapiens; identical to SEQ ID NO: 4060

SEQ ID NO: 4062 - protein, 196 aa, Homo Sapiens
MPHLASLFTASSRCCPHPLRPEGSGAMGPEALSSLLLLLLVASGDADMKGHFDPAKCRYALGMQDRTIPDSDISASSSWSDSTAARHSRLESSDGDGAWCPAGSVFPKEEEYLQVDLQRLHLVALVGTQGRHAGGLGKEFSRSYRLRYSRDGRRWMGWKDRWGQEVISGNEDPEGVVLKDLGPPMVARLVRFYPRA

SEQ ID NO: 4063 - protein, 894 aa, Homo Sapiens
MSLPRCCPHPLRPEGSGAMGPEALSSLLLLLLVASGDADMKGHFDPAKCRYALGMQDRTIPDSDISASSSWSDSTAARHSRLESSDGDGAWCPAGSVFPKEEEYLQVDLQRLHLVALVGTQGRHAGGLGKEFSRSYRLRYSRDGRRWMGWKDRWGQEVISGNEDPEGVVLKDLGPPMVARLVRFYPRADRVMSVCLRVELYGCLWRDGLLSYTAPVGQTMYLSEAVYLNDSTYDGHTVGGLQYGGLGQLADGVVGLDDFRKSQELRVWPGYDYVGWSNHSFSSGYVEMEFEFDRLRAFQAMQVHCNNMHTLGARLPGGVECRFRRGPAMAWEGEPMRHNLGGNLGDPRARAVSVPLGGRVARFLQCRFLFAGPWLLFSEISFISDVVNNSSPALGGTFPPAPWWPPGPPPTNFSSLELEPRGQQPVAKAEGSPTAILIGCLVAIILLLLLIIALMLWRLHWRRLLSKAERRVLEEELTVHLSVPGDTILINNRPGPREPPPYQEPRPRGNPPHSAPCVPNGSAYSGDYMEPEKPGAPLLPPPPQNSVPHYAEADIVTLQGVTGGNTYAVPALPPGAVGDGPPRVDFPRSRLRFKEKLGEGQFGEVHLCEVDSPQDLVSLDFPLNVRKGHPLLVAVKILRPDATKNARNDFLKEVKIMSRLKDPNIIRLLGVCVQDDPLCMITDYMENGDLNQFLSAHQLEDKAAEGAPGDGQAAQGPTISYPMLLHVAAQIASGMRYLATLNFVHRDLATRNCLVGENFTIKIADFGMSRNLYAGDYYRVQGRAVLPIRWMAWECILMGKFTTASDVWAFGVTLWEVLMLCRAQPFGQLTDEQVIENAGEFFRDQGRQVYLSRPPACPQGLYELMLRCWSRESEQRPPFSQLHRFLAEDALNTV

SEQ ID NO: 4064 - protein, 69 aa, Homo Sapiens
MVARLVRFYPRADRVMSVCLRVELYGCLWRDGLLSYTAPVGQTMYLSEAVYLNDSTYDGHTVGGLQYGG

SEQ ID NO: 4065 - protein, 493 aa, Homo Sapiens
SEAVYLNDSTYDGHTVGGLQYGGLGQLADGVVGLDDFRKSQELRVWPGYDYVGWSNHSFSSGYVEMEFEFDRLRAFQAMQVHCNNMHTLGARLPGGVECRFRRGPAMAWEGEPMRHNLGGNLGDPRARAVSVPLGGRVARFLQCRFLFAGPWLLFSEISFISDVVNNSSPALGGTFPPAPWWPPGPPPTNFSSLELEPRGQQPVAKAEGSPTAILIGCLVAIILLLLLIIALMLWRLHWRRLLSKVLESHPRTRSPGLVGIRPTPLPVSPMALRCCSPIQPTASFWPLTPVPLEARAPPHPPGPNPPTPRGVTGGNTYAVPALPPGAVGDGPPRVDFPRSRLRFKEKLGEGQFGEVHLCEVDSPQDLVSLDFPLNVRKGHPLLVAVKILRPDATKNARNDFLKEVKIMSRLKDPNIIRLLGVCVQDDPLCMITDYMENGDLNQFLSAHQLEDKAAEGAPGDGQAAQGPTISYPMLLHVAAQIASGMRYLATLN

SEQ ID NO: 4066 - protein, 172 aa, Homo Sapiens
  misc_feature (1)..(1): Xaa can be any naturally occurring amino acid
XNNRPGPREPPPYQEPRPRGNPPHSAPCVPNGSAYSGDYMEPEKPGAPLLPPPPQNSVPHYAEADIVTLQGVTGGNTYAVPALPPGAVGDGPPRVDFPRSRLRFKEKLGEGQFGEVHLCEVDSPQDLVSLDFPLNVRKGHPLLVAVKILRPDATKNASFSLFSRNDFLKEVK

SEQ ID NO: 4067 - protein, 277 aa, Homo Sapiens
  misc_feature (1)..(1): Xaa can be any naturally occurring amino acid
XRKGHPLLVAVKILRPDATKNARNDFLKEVKIMSRLKDPNIIRLLGVCVQDDPLCMITDYMENGDLNQFLSAHQLEDKAAEGAPGDGQAAQGPTISYPMLLHVAAQIASGMRYLATLNFVHRDLATRNCLVGENFTIKIADFGMSRNLYAGDYYRVQGRAVLPIRWMAWECILMGKFTTASDVWAFGVTLWEVLMLCRAQPFGQLTDEQVIENAGEFFRDQGRQVRVEEREDGSEAGDRRGRVVILETKEYLFPDSHPHCHNAGVPVPAACLPAGPI

SEQ ID NO: 4068 - protein, 196 aa, Homo Sapiens
  misc_feature (1)..(1): Xaa can be any naturally occurring amino acid
XSLLLLLLVASGDADMKGHFDPAKCRYALGMQDRTIPDSDISASSSWLESSDGDGAWCPAGSVFPKEEEYLQVDLQRLHLVALVGTQGRHAGGLGKEFSRSYRLRYSRDGRRWMGWKDRWGQEVISGNEDPEGVVLKDLGPPMVARLVRFYPRADRVMSVCLRVELYGCLWRDGLLSYTAPVGQTMYLSEAVYLND

SEQ ID NO: 4069 - protein, 166 aa, Homo Sapiens
LKVDDSNTRILIGCLVAIIFILLAIIVIILWRQFWQKMLEKASRRMLDDEMTVSLSLPSDSSMFNNNRSSSPSEQGSNSTYDRIFPLRPDYQEPSRLIRKLPEFAPGEEESGEDDVVGRVSREKPQQASGRYDTPAPSSLHLFLVSANLLRSPHSLSRFGLPLLLA

SEQ ID NO: 4070 - protein, 130 aa, Homo Sapiens
MILIPRMLLVLFLLLPILSSAKAQVNPAICRYPLGMSGGQIPDEDITASSQWSESTAAKYGRLDSEEGDGAWCPEIPVEPDDLKEFLQIDLHTLHFITLVGTQGRHAGGHGIEFAPMYKINYSRDGTRWI

SEQ ID NO: 4071 - protein, 148 aa, Homo Sapiens
MILIPRMLLVLFLLLPILSSAKAQVNPAICRYPLGMSGGQIPDEDITASSQWSESTAAKYGRLDSEEGDGAWCPEIPVEPDDLKEFLQIDLHTLHFITLVGTQGRHAGGHGIEFAPMYKINYSRDGTRWISWRNRHGKQVLDGNSNPY

SEQ ID NO: 4072 - protein, 855 aa, Homo Sapiens
MILIPRMLLVLFLLLPILSSAKAQVNPAICRYPLGMSGGQIPDEDITASSQWSESTAAKYGRLDSEEGDGAWCPEIPVEPDDLKEFLQIDLHTLHFITLVGTQGRHAGGHGIEFAPMYKINYSRDGTRWISWRNRHGKQVLDGNSNPYDIFLKDLEPPIVARFVRFIPVTDHSMNVCMRVELYGCVWLDGLVSYNAPAGQQFVLPGGSIIYLNDSVYDGAVGYSMTEGLGQLTDGVSGLDDFTQTHEYHVWPGYDYVGWRNESATNGYIEIMFEFDRIRNFTTMKVHCNNMFAKGVKIFKEVQCYFRSEASEWEPNAISFPLVLDDVNPSARFVTVPLHHRMASAIKCQYHFADTWMMFSEITFQSDAAMYNNSEALPTSPMAPTTYDPMLKVDDSNTRILIGCLVAIIFILLAIIVIILWRQFWQKMLEKASRRMLDDEMTVSLSLPSDSSMFNNNRSSSPSEQGSNSTYDRIFPLRPDYQEPSRLIRKLPEFAPGEEESGCSGVVKPVQPSGPEGVPHYAEADIVNLQGVTGGNTYSVPAVTMDLLSGKDVAVEEFPRKLLTFKEKLGEGQFGEVHLCEVEGMEKFKDKDFALDVSANQPVLVAVKMLRADANKNARNDFLKEIKIMSRLKDPNIIHLLAVCITDDPLCMITEYMENGDLNQFLSRHEPPNSSSSDVRTVSYTNLKFMATQIASGMKYLSSLNFVHRDLATRNCLVGKNYTIKIADFGMSRNLYSGDYYRIQGRAVLPIRWMSWESILLGKFTTASDVWAFGVTLWETFTFCQEQPYSQLSDEQVIENTGEFFRDQGRQTYLPQPAICPDSVYKLMLSCWRRDTKNRPSFQEIHLLLLQQGDE

SEQ ID NO: 4073 - protein, 855 aa, Homo Sapiens; identical to SEQ ID NO: 4072

SEQ ID NO: 4074 - protein, 171 aa, Homo Sapiens
  misc_feature (1)..(1): Xaa can be any naturally occurring amino acid
XIFILLAIIVIILWRQFWQKMLEKASRRMLDDEMTVSLSLPSDSSMFNNNRSSSPSEQGSNSTYDRIFPLRPDYQEPSRLIRKLPEFAPGEEESGCSGVVKPVQPSGPEGVPHYAEADIVNLQGVTGGNTYSVPAVTMDLLSGKDVAVEEFPRKLLTFKEKLGEGQFGEVS

SEQ ID NO: 4075 - protein, 166 aa, Homo Sapiens
MPFLELDTNLPANRVPAGLEKRLCAAAASILGKPADRVNVTVRPGLAMALSGSTEPCAQLSISSIGVVGTAEDNRSHSAHFFEFLTKELALGQDRFQVKFTGDSQSSERPLAWMSRHLLSGSCIAGGPQTNLEMNHLQLATSSSVNTGEKTSLPHKKRLQPKPGVL

SEQ ID NO: 4076 - protein, 118 aa, Homo Sapiens
MPFLELDTNLPANRVPAGLEKRLCAAAASILGKPADRVNVTVRPGLAMALSGSTEPCAQLSISSIGVVGTAEDNRSHSAHFFEFLTKELALGQDRILIRFFPLESWQIGKIGTVMTFL

SEQ ID NO: 4077 - protein, 118 aa, Homo Sapiens; identical to SEQ ID NO: 4076

SEQ ID NO: 4078 - protein, 107 aa, Homo Sapiens
MPFLELDTNLPANRVPAGLEKRLCAAAASILGKPADRVNVTVRPGLAMALSGSTEPCAQLSISSIGVVGTAEDNRSHSAHFFEFLTKELALGQDRQVPGEVHGRLTE

SEQ ID NO: 4079 - protein, 132 aa, Homo Sapiens
MQLFLLAVSVPLPAMPFLELDTNLPANRVPAGLEKRLCAAAASILGKPADRVNVTVRPGLAMALSGSTEPCAQLSISSIGVVGTAEDNRSHSAHFFEFLTKELALGQDRILIRFFPLESWQIGKIGTVMTFL

SEQ ID NO: 4080 - protein, 50 aa, Homo Sapiens
  misc_feature (1)..(1): Xaa can be any naturally occurring amino acid
XKDLPPPQEASATQTWRSVTELKFPLGILIRFFPLESWQIGKIGTVMTFL

SEQ ID NO: 4081 - protein, 729 aa, Homo Sapiens
LPTGFVAPILCVLLPSPTREAATVASATGDSASERESAAPAAAPTAEAPPPSVVTRPEPQALPSPAIRAPLPDLYPFGTMRGGGFGDRDRDRDRGGFGARGGGGLPPKKFGNPGERLRKKKWDLSELPKFEKNFYVEHPEVARLTPYEVDELRRKKEITVRGGDVCPKPVFAFHHANFPQYVMDVLMDQHFTEPTPIQCQGFPLALSGRDMVGIAQTGSGKTLAYLLPAIVHINHQPYLERGDGPICLVLAPTRELAQQVQQVADDYGKCSRLKSTCIYGGAPKGPQIRDLERGVEICIATPGRLIDFLESGKTNLRRCTYLVLDEADRMLDMGFEPQIRKIVDQIRPDRQTLMWSATWPKEVRQLAEDFLRDYTQINVGNLELSANHNILQIVDVCMESEKDHKLIQLMEEIMAEKENKTIIFVETKRRCDDLTRRMRRDGWPAMCIHGDKSQPERDWVLNEFRSGKAPILIATDVASRGLDVEDVKFVINYDYPNSSEDYVHRIGRTARSTNKGTAYTFFTPGNLKQARELIKVLEEANQAINPKLMQLVDHRGGGGGGGGRSRYRTTSSANNPNLMYQDECDRRLRGVKDGGRRDSASYRDRSETDRAGYANGSGYGSPNSAFGAQAGQYTYGQGTYGAAAYGTSSYTAQEYGAGTYGASSTTSTGRSSQSSSQQFSGIGRSGQQPQPLMSQQFAQPPGATNMIGYMGQTAYQYPPPPPPPPPSRK

SEQ ID NO: 4082 - protein, 731 aa, Homo Sapiens
LPTGFVAPILCVLLPSPTREAATVASATGDSASERESAAPAAAPTAEAPPPSVVTRPEPQALPSPAIRAPLPDLYPFGTMRGGGFGDRDRDRDRGGFGARGGGGLPPKKFGNPGERLRKKKWDLSELPKFEKNFYVEHPEVARLTPYEVDELRRKKEITVRGGDVCPKPVFAFHHANFPQYVMDVLMDQHFTEPTPIQCQGFPLALSGRDMVGIAQTGSGKTLAYLLPAIVHINHQPYLERGDGPICLVLAPTRELAQQVQQVADDYGKCSRLKSTCIYGGAPKGPQIRDLERGVEICIATPGRLIDFLESGKTNLRRCTYLVLDEADRMLDMGFEPQIRKIVDQIRPDRQTLMWSATWPKEVRQLAEDFLRDYTQINVGNLELSANHNILQIVDVCMESEKDHKLIQLMEEIMAEKENKTIIFVETKRRCDDLTRRMRRDGWPAMCIHGDKSQPERDWVLNEFRSGKAPILIATDVASRGLDVEDVKFVINYDYPNSSEDYVHRIGRTARSTNKGTAYTFFTPGNLKQARELIKVLEEANQAINPKLMQLVDHRGGGGGGGKGGRSRYRTTSSANNPNLMYQDECDRRLRGVKDGGRRDSASYRDRSETDRAGYANGSGYGSPNSAFGAQAGQYTYGQGTYGAAAYGTSSYTAQEYGAGTYGASSTTSTGRSSQSSSQQFSGIGRSGQQPQPLMSQQFAQPPGATNMIGYMGQTAYQYPPPPPPPPPSRK

SEQ ID NO: 4083 - protein, 729 aa, Homo Sapiens; identical to SEQ ID NO: 4081

SEQ ID NO: 4084 - protein, 731 aa, Homo Sapiens; identical to SEQ ID NO: 4082

SEQ ID NO: 4085 - protein, 56 aa, Homo Sapiens
  misc_feature (1)..(1): Xaa can be any naturally occurring amino acid
XWPAMCIHGDKSQPERDWVLNEFRSGKAPILIATDVASRGLGSPALGNQMGLQRSI

SEQ ID NO: 4086 - protein, 138 aa, Homo Sapiens
MAAAFEASGALAAVATAMPAEHVAVQVPAPEPTPGPVRILRTAQDLSSPRTRTGDVLLAEPADFESLLLSRPVLEGLRAAGFERPSPVQLKAIPLGRCGLDLIVQAKSGTGKTCVFSTIALDSLVLENLSTQAELSNS

SEQ ID NO: 4087 - protein, 824 aa, Homo Sapiens
MAAAFEASGALAAVATAMPAEHVAVQVPAPEPTPGPVRILRTAQDLSSPRTRTGDVLLAEPADFESLLLSRPVLEGLRAAGFERPSPVQLKAIPLGRCGLDLIVQAKSGTGKTCVFSTIALDSLVLENLSTQILILAPTREIAVQIHSVITAIGIKMEGLECHVFIGGTPLSQDKTRLKKCHIAVGSPGRIKQLIELDYLNPGSIRLFILDEADKLLEEGSFQEQINWIYSSLPASKQMLAVSATYPEFLANALTKYMRDPTFVRLNSSDPSLIGLKQYYKVVNSYPLAHKVFEEKTQHLQELFSRIPFNQALVFSNLHSRAQHLADILSSKGFPAECISGNMNQNQRLDAMAKLKHFHCRVLISTDLTSRGIDAEKVNLVVNLDVPLDWETYMHRIGRAGRFGTLGLTVTYCCRGEEENMMMRIAQKCNINLLPLPDPIPSGLMEECVDWDVEVKAAVHTYGIASVPNQPLKKQIQKIERTLQIQKAHGDHMASSRNNSVSGLSVKSKNNTKQKLPVKSHSECGIIEKATSPKELGCDRQSEEQMKNSVQTPVENSTNSQHQVKEALPVSLPQIPCLSSFKIHQPYTLTFAELVEDYEHYIKEGLEKPVEIIRHYTGPGDQTVNPQNGFVRNKVIEQRVPVLASSSQSGDSESDSDSYSSRTSSQSKGNKSYLEGSSDNQLKDSESTPVDDRISLEQPPNGSDTPNPEKYQESPGIQMKTRLKEGASQRAKQSRRNLPRRSSFRLQTEAQEDDWYDCHREIRLSFSDTYQDYEEYWRAYYRAWQEYYAAASHSYYWNAQRHPSWMAAYHMNTIYLQEMMHSNQ

SEQ ID NO: 4088 - protein, 432 aa, Homo Sapiens [sequence omitted]

SEQ ID NO: 4089 - protein, 191 aa, Homo Sapiens
ASVRSGASDAGGEMREGFGRGPQRETPSPPPREFSNLSQPRKNLWGIKSTAVRNIDGSINNINEDDEEDVVDLAANSLLNKLIHQSLVESSHRVEVLQKDPSSPLYSVKTFEELRLKEELLKGIYAMGFNRPSKIQEMALPMMLAHPPQNLIAQSQSGTGKTAAFVLAMLSRVNALELFPQCLCLAPTYEL

SEQ ID NO: 4090 - protein, 468 aa, Homo Sapiens
IAAMASLLWGGDAGAAESERLNSHFSNLSQPRKNLWGIKSTAVRNIDGSINNINEDDEEDVVDLAANSLLNKLIHQSLVESSHRVEVLQKDPSSPLYSVKTFEELRLKEELLKGIYAMGFNRPSKIQEMALPMMLAHPPQNLIAQSQSGTGKTAAFVLAMLSRVNALELFPQCLCLAPTYELALQTGRVVEQMGKFCVDVQVMYAIRGNRIPRGTDITKQIIIGTPGTVLDWCFKLKLIDLTKIRVFVLDEADVMIDTQGFSDHSIRIQRALPSECQMLLFSATFEDSVWHFAERIIPDPNVIKLRKEELTLNNIRQYYVLCEHRKDKYQALCNIYGSITIGQAIIFCQTRRNAKWLTVEMIQDGHQVSLLSGELTVEQRASIIQRFRDGKEKVLITTNVCARGIDVKQVTIVVNFDLPVKQGEEPDYETYLHRIGRTGRFGKKGLAFNMIEVDELPSLMKIQDHFSK

SEQ ID NO: 4091 - protein, 483 aa, Homo Sapiens
MASLLWGGDAGAAESERLNSHFSNLSQPRKNLWGIKSTAVRNIDGSINNINEDDEEDVVDLAANSLLNKLIHQSLVESSHRVEVLQKDPSSPLYSVKTFEELRLKEELLKGIYAMGFNRPSKIQEMALPMMLAHPPQNLIAQSQSGTGKTAAFVLAMLSRVNALELFPQCLCLAPTYELALQTGRVVEQMGKFCVDVQVMYAIRGNRIPRGTDITKQIIIGTPGTVLDWCFKLKLIDLTKIRVFVLDEADVMIDTQGFSDHSIRIQRALPSECQMLLFSATFEDSVWHFAERIIPDPNVIKLRKEELTLNNIRQYYVLCEHRKDKYQALCNIYGSITIGQAIIFCQTRRNAKWLTVEMIQDGHQVSLLSGELTVEQRASIIQRFRDGKEKVLITTNVCARGIDVKQVTIVVNFDLPVKQGEEPDYETYLHRIGRTGRFGKKGLAFNMIEVDELPSLMKIQDHFNSSIKQLNAEDMDEIEKIDY

SEQ ID NO: 4092 - protein, 369 aa, Homo Sapiens
MGFNRPSKIQEMALPMMLAHPPQNLIAQSQSGTGKTAAFVLAMLSRVNALELFPQCLCLAPTYELALQTGRVVEQMGKFCVDVQVMYAIRGNRIPRGTDITKQIIIGTPGTVLDWCFKLKLIDLTKIRVFVLDEADVMIDTQGFSDHSIRIQRALPSECQMLLFSATFEDSVWHFAERIIPDPNVIKLRKEELTLNNIRQYYVLCEHRKDKYQALCNIYGSITIGQAIIFCQTRRNAKWLTVEMIQDGHQVSLLSGELTVEQRASIIQRFRDGKEKVLITTNVCARGIDVKQVTIVVNFDLPVKQGEEPDYETYLHRIGRTGRFGKKGLAFNMIEVDELPSLMKIQDHFNSSIKQLNAEDMDEIEKIDY

SEQ ID NO: 4093 - protein, 197 aa, Homo Sapiens
MGFNRPSKIQEMALPMMLAHPPQNLIAQSQSGTGKTAAFVLAMLSRVNALELFPQCLCLAPTYELALQTGRVVEQMGKFCVDVQVMYAIRGNRIPRGTDITKQIIIGTPGTVLDWCFKLKLIDLTKIRVFVLDEADVMIDTQGFSDHSIRIQRIIWLLVAKETTDNFQLPSLTLELYRDIMETPHSFLLLSQGTWRI

SEQ ID NO: 4094 - protein, 67 aa, Homo Sapiens
  misc_feature (1)..(1): Xaa can be any naturally occurring amino acid
XGIDVKQVTIVVNFDLPVKQGEEPDYETYLHRIGRTGRFGKKGLAFNMIEVDELPSLMKIQDHFRKS

SEQ ID NO: 4095 - protein, 407 aa, Homo Sapiens
  misc_feature (1)..(1): Xaa can be any naturally occurring amino acid
XLVDLAANSLLNKLIHQSLVESSHRVEVLQKDPSSPLYSVKTFEELRLKEELLKGIYAMGFNRPSKIQEMALPMMLAHPPQNLIAQSQSGTGKTAAFVLAMLSRVNALELFPQCLCLAPTYELALQTGRVVEQMGKFCVDVQVMYAIRGNRNWCFKLKLIDLTKIRVFVLDEADVMIDTQGFSDHSIRIQRALPSECQMLLFSATFEDSVWHFAERIIPDPNVIKLRKEELTLNNIRQYYVLCEHRKDKYQALCNIYGSITIGQAIIFCQTRRNAKWLTVEMIQDGHQVSLLSGELTVEQRASIIQRFRDGKEKVLITTNVCARGIDVKQVTIVVNFDLPVKQGEEPDYETYLHRIGRTGRFGKKGLAFNMIEVDELPSLMKIQDHFNSSIKQLNAEDMDEIEKIDY

SEQ ID NO: 4096 - protein, 540 aa, Homo Sapiens
MALTRPVRLFSLVTRLLLAPRRGLTVRSPDEPLPVVRIPVALQRQLEQRQSRRRNLPRPVLVRPGPLLVSARRPELNQPARLTLGRWERAPLASQGWKSRRARRDHFSIERAQQEAPAVRKLSSKGSFADLGLEPRVLHALQEAAPEVVQPTTVQSSTIPSLLRGRHVVCAAETGSGKTLSYLLPLLQRLLGQPSLDSLPIPAPRGLVLVPSRELAQQVRAVAQPLGRSLGLLVRDLEGGHGMRRIRLQLSRQPSADVLVATPGALWKALKSRLISLEQLSFLVLDEADTLLDESFLELVDYILEKSHIAEGPADLEDPFNPKAQLVLVGATFPEGVGQLLNKVASPDAVTTITSSKLHCIMPHVKQTFLRLKGADKVAELVHILKHRDRAERTGPSGTVLVFCNSSSTVNWLGYILDDHKIQHLRLQGQMPALMRVGIFQSFQKSSRDILLCTDIASRGLDSTGVELVVNYDFPPTLQDYIHRAGRVGRVGSEVPGTVISFVTHPWDVSLVQKIELAARRRRSLPGLASSVKEPLPQAT

SEQ ID NO: 4097 - protein, 565 aa, Homo Sapiens
MEDSDSAAKQLGLAEAAAVAAAAAVAAAAAAAAGGEAEEPVLSRDEDSEEDADSEAERETPRVTAVAVMAAEPGHMDMGAEALPGPDEAAAAAAFAEVTTVTVANVGAAADNVFTTSVANAASISGHVLSGRTALQIGDSLNTEKATLIVVHTDGSIVETTGLKGPAAPLTPGPQSPPTPLAPGQEKGGTKYNWDPSVYDSELPVRCRNISGTLYKNRLGSGGRGRCIKQGENWYSPTEFEAMAGRASSKDWKRSIRYAGRPLQCLIQDGILNPHAASCTCAACCDDMTLSGPVRLFVPYKRRKKENELPTTPVKKDSPKNITLLPATAATTFTVTPSGQITTSGALTFDRASTVEATAVISESPAQGDVFAGATVQEASVQPPCRASHPEPHYPGYQDSCQIAPFPEAALPTSHPKIVLTSLPALAVPPPTPTKAAPPALVNGLELSEPRSWLYLEEMVNSLLNTAQQLKTLFEQAKHASTYREAATNQAKIHADAERKEQSCVNCGREAMSECTGCHKVNYCSTFCQRKDWKDHQHICGQSAAVTVQADEVHVAESVMEKVTV

SEQ ID NO: 4098 - protein, 349 aa, Homo Sapiens
  misc_feature (1)..(1): Xaa can be any naturally occurring amino acid
XLYKNRLGSGGRGRCIKQGENWYSPTEFEAMAGRASSKDWKRSIRYAGRPLQCLIQDGILNPHAASCTCAACCDDMTLSGPVRLFVPYKRRKKENELPTTPVKKDSPKNITLLPATAATTFTVTPSGQITTSGALTFDRASTVEATAVISESPAQGDVFAGATVQEASVQPPCRASHPEPHYPGYQDSCQIAPFPEAALPTSHPKIVLTSLPALAVPPPTPTKAAPPALVNGLELSEPRSWLYLEEMVNSLLNTAQQLKTLFEQAKHASTYREAATNQAKIHADAERKEQSCVNCGREAMSECTGCHKVNYCSTFCQRKRWSLTMLTSLVSISWLRAILPCQPPKVLGL

SEQ ID NO: 4099 - protein, 86 aa, Homo Sapiens
  misc_feature (1)..(1): Xaa can be any naturally occurring amino acid
XPVLSRDEDSEEDADSEAERETPRVTAVAVMAAEPGHMDMGAEALPGPDEAAAAAAFAGKCARRPLASSGSRAPTPRACPAQLSQR

SEQ ID NO: 4100 - protein, 136 aa, Homo Sapiens
MAILSLRAPGPWQAMQAHLNPFNKQSGPRQHEQGPGEEVPDVTPEEALPELPPGEPEFRCPERVMDLGLSEDHFSRPVGLFLASDVQQLRQAIEECKQVILELPEQSEKQKDAVVRLIHLRLKLQELKDPNEDEPN

SEQ ID NO: 4101 - protein, 512 aa, Homo Sapiens
MAILSLRAPGPWQAMQVWADRTLLTPHTGVTSQVLGVAAAVMTPLPGGHAAGRTREARWDAMEYDEKLARFRQAHLNPFNKQSGPRQHEQGPGEEVPDVTPEEALPELPPGEPEFRCPERVMDLGLSEDHFSRPVGLFLASDVQQLRQAIEECKQVILELPEQSEKQKDAVVRLIHLRLKLQELKDPNEDEPNIRVLLEHRFYKEKSKSVKQTCDKCNTIIWGLIQTWYTCTGCYYRCHSKCLNLISKPCVSSKVSHQAEYELNICPETGLDSQDYRCAECRAPISLRGVPSEARQCDYTGQYYCSHCHWNDLAVIPARVVHNWDFEPRKVSRCSMRYLALMVSRPVLRLREINPLLFSYVEELVEIRKLRQDILLMKPYFITCREAMEARLLLQLQDRQHFVENDEMYSVQDLLDVHAGRLGCSLTEIHTLFAKHIKLDCERCQAKGFVCELCREGDVLFPFDSHTSVCADCSAVFHRDCYYDNSTTCPKCARLSLRKQSLFQEPGPDVEA

SEQ ID NO: 4102 - protein, 125 aa, Homo Sapiens
MDLGLSEDHFSRPVGLFLASDVQQLRQAIEECKQVILELPEQSEKQKDAVVRLIHLRLKLQELKDPNEDEPNIRVLLEHRFYKEKSKSVKQTCDKCNTIIWGLIQTWYTCTGCYYRCHSKCLNLI

SEQ ID NO: 4103 - protein, 391 aa, Homo Sapiens
MDLGLSEDHFSRPVGLFLASDVQQLRQAIEECKQVILELPEQSEKQKDAVVRLIHLRLKLQELKDPNEDEPNIRVLLEHRFYKEKSKSVKQTCDKCNTIIWGLIQTWYTCTGCYYRCHSKCLNLISKPCVSSKVSHQAEYELNICPETGLDSQDYRCAECRAPISLRGVPSEARQCDYTGQYYCSHCHWNDLAVIPARVVHNWDFEPRKVSRCSMRYLALMVSRPVLRLREINPLLFSYVEELVEIRKLRQDILLMKPYFITCREAMEARLLLQLQDRQHFVENDEMYSVQDLLDVHAGRLGCSLTEIHTLFAKHIKLDCERCQAKGFVCELCREGDVLFPFDSHTSVCADCSAVFHRDCYYDNSTTCPKCARLSLRKQSLFQEPGPDVEA

SEQ ID NO: 4104 - protein, 66 aa, Homo Sapiens
MEYDEKLARFRQAHLNPFNKQSGPRQHEQGPGEEVPDVTPEEALPELPPGEPEFRCPERVMDLGLS

SEQ ID NO: 4105 - protein, 107 aa, Homo Sapiens
MEYDEKLARFRQAHLNPFNKQSGPRQHEQGPGEEVPDVTPEEALPELPPGEPEFRCPERVMDLGLSEDHFSRPVDGPLTAPAPNLGRVCSWPLTSSSCGRRSRSASR

SEQ ID NO: 4106 - protein, 106 aa, Homo Sapiens
MEYDEKLARFRQAHLNPFNKQSGPRQHEQGPGEEVPDVTPEEALPELPPGEPEFRCPERVMDLGLSEDHFSRPVGLFLASDVQQLRQAIEECKQVILELPEQSEKQ

SEQ ID NO: 4107 - protein, 134 aa, Homo Sapiens
MEYDEKLARFRQAHLNPFNKQSGPRQHEQGPGEEVPDVTPEEALPELPPGEPEFRCPERVMDLGLSEDHFSRPVGLFLASDVQQLRQAIEECKQVILELPEQSEKQKDAVVRLIHLRLKLQELKDPNEDEPNIR

SEQ ID NO: 4108 - protein, 150 aa, Homo Sapiens
MEYDEKLARFRQAHLNPFNKQSGPRQHEQGPGEEVPDVTPEEALPELPPGEPEFRCPERVMDLGLSEDHFSRPVGLFLASDVQQLRQAIEECKQVILELPEQSEKQKDAVVRLIHLRLKLQELKDPNEDEPNIRVLLEHRFYKEKSKSVK

SEQ ID NO: 4109 - protein, 451 aa, Homo Sapiens
MEYDEKLARFRQAHLNPFNKQSGPRQHEQGPGEEVPDVTPEEALPELPPGEPEFRCPERVMDLGLSEDHFSRPVGLFLASDVQQLRQAIEECKQVILELPEQSEKQKDAVVRLIHLRLKLQELKDPNEDEPNIRVLLEHRFYKEKSKSVKQTCDKCNTIIWGLIQTWYTCTGCYYRCHSKCLNLISKPCVSSKVSHQAEYELNICPETGLDSQDYRCAECRAPISLRGVPSEARQCDYTGQYYCSHCHWNDLAVIPARVVHNWDFEPRKVSRCSMRYLALMVSRPVLRLREINPLLFSYVEELVEIRKLRQDILLMKPYFITCREAMEARLLLQLQDRQHFVENDEMYSVQDLLDVHAGRLGCSLTEIHTLFAKHIKLDCERCQAKGFVCELCREGDVLFPFDSHTSVCADCSAVFHRDCYYDNSTTCPKCARLSLRKQSLFQEPGPDVEA

SEQ ID NO: 4110 - protein, 451 aa, Homo Sapiens; identical to SEQ ID NO: 4109

SEQ ID NO: 4111 - protein, 434 aa, Homo Sapiens
MEYDEKLARFRQAHLNPFNKQSGPRQHEQGPGEEVPDVTPEEALPELPPGEPEFRCPERVMDLGLSEDHFSRPVGLFLASDVQQLRQAIEECKQVILELPEQSEKQKDAVVRLIHLRLKLQELKDPNEDEPNIRVLLEHRFYKEKSKSVKQTCDKCNTIIWGLIQTWYTCTGCYYRCHSKCLNLISKPCVSSKVSHQAEYELNICPETGLDSQDYRCAECRAPISLRGVPSEARQCDYTGQYYCSHCHWNDLAVIPARVVHNWDFEPRKVSRCSMRYLALMVSRPVLRLREINPLLFSYVEELVEIRKLRQDILLMKPYFITCREAMEARLLLQDLLDVHAGRLGCSLTEIHTLFAKHIKLDCERCQAKGFVCELCREGDVLFPFDSHTSVCADCSAVFHRDCYYDNSTTCPKCARLSLRKQSLFQEPGPDVEA

SEQ ID NO: 4112 - protein, 451 aa, Homo Sapiens; identical to SEQ ID NO: 4109

SEQ ID NO: 4113 - protein, 197 aa, Homo Sapiens
MEYDEKLARFRQAHLNPFNKQSGPRQHEQGPGEEVPDVTPEEALPELPPGEPEFRCPERVMDLGLSEDHFSRPVGLFLASDVQQLRQAIEECKQVILELPEQSEKQKDAVVRLIHLRLKLQELKDPNEDEPNIRVLLEHRFYKEKSKSVKQTCDKCNTIIWGLIQTWYTCTGGPRPRRGVRNERDQSSCLRWAHIQM

SEQ ID NO: 4114 - protein, 197 aa, Homo Sapiens; identical to SEQ ID NO: 4113

SEQ ID NO: 4115 - protein, 176 aa, Homo Sapiens
MEYDEKLARFRQAHLNPFNKQSGPRQHEQGPGEEVPDVTPEEALPELPPGEPEFRCPERVMDLGLSEDHFSRPVGLFLASDVQQLRQAIEECKQVILELPEQSEKQKDAVVRLIHLRLKLQELKRCQAKGFVCELCREGDVLFPFDSHTSVCADCSAVFHRDCYYDNSTTCPKCAR

SEQ ID NO: 4116 - protein, 441 aa, Homo Sapiens
MEYDEKLARFRQAHLNPFNKQSGPRQHEQGPGEEVPDVTPEEALPELPPGEPEFRCPERVMDLGLSEDHFSRPVLRQAIEECKQVILELPEQSEKQKDAVVRLIHLRLKLQELKDPNEDEPNIRVLLEHRFYKEKSKSVKQTCDKCNTIIWGLIQTWYTCTGCYYRCHSKCLNLISKPCVSSKVSHQAEYELNICPETGLDSQDYRCAECRAPISLRGVPSEARQCDYTGQYYCSHCHWNDLAVIPARVVHNWDFEPRKVSRCSMRYLALMVSRPVLRLREINPLLFSYVEELVEIRKLRQDILLMKPYFITCREAMEARLLLQLQDRQHFVENDEMYSVQDLLDVHAGRLGCSLTEIHTLFAKHIKLDCERCQAKGFVCELCREGDVLFPFDSHTSVCADCSAVFHRDCYYDNSTTCPKCARLSLRKQSLFQEPGPDVEA

SEQ ID NO: 4117 - protein, 127 aa, Homo Sapiens
MEYDEKLARFRQAHLNPFNKQSGPRQHEQGPGEEVPDVTPEEALPELPPGEPEFRCPERVMDLGLSEDHFSRPVQLRQAIEECKQVILELPEQSEKQKDAVVRLIHLRLKLQELKDPNEDEPNIRVL

SEQ ID NO: 4118 - protein, 177 aa, Homo Sapiens
MRGGGQAHLNPFNKQSGPRQHEQGPGEEVPDVTPEEALPELPPGEPEFRCPERVMDLGLSEDHFSRPVGLFLASDVQQLRQAIEECKQVILELPEQSEKQKDAVVRLIHLRLKLQELKDPNEDEPNIRVLLEHRFYKEKSKSVKQTCDKCNTIIWGLIQTWYTCTGCYYRCHSKCLN

SEQ ID NO: 4119 - protein, 186 aa, Homo Sapiens
MRGGGQVLGVAAAVMTPLPGGHAAGRTREARWDAMEYDEKLARFRQAHLNPFNKQSGPRQHEQGPGEEVPDVTPEEALPELPPGEPEFRCPERVMDLGLSEDHFSRPVGLFLASDVQQLRQAIEECKQVILELPEQSEKQKDAVVRLIHLRLKLQELKDPNEDEPNIRVLLEHRFYKEKSKSVKQT

SEQ ID NO: 4120 - protein, 94 aa, Homo Sapiens
MRTLAILAAILLVALQAQAEPLQARADEVAAAPEQIAADIPEVVVSLAWDESLAPKHPGSRKNMACYCRIPACIAGERRYGTCIYQGRLWAFCC

SEQ ID NO: 4121 - protein, 94 aa, Homo Sapiens; identical to SEQ ID NO: 4120

SEQ ID NO: 4122 - protein, 94 aa, Homo Sapiens; identical to SEQ ID NO: 4120

SEQ ID NO: 4123 - protein, 94 aa, Homo Sapiens
MRTLAILAAILLVALQAQAEPLQARADEVAAAPEQIAADIPEVVVSLAWDESLAPKHPGSRKNMDCYCRIPACIAGERRYGTCIYQGRLWAFCC

SEQ ID NO: 4124 - protein, 97 aa, Homo Sapiens
MRIIALLAAILLVALQVRAGPLQARGDEAPGQEQRGPEDQDISISFAWDKSSALQVSGSTRGMVCSCRLVFCRRTELRVGNCLIGGVSFTYCCTRVD

SEQ ID NO: 4125 - protein, 94 aa, Homo Sapiens
MRTIAILAAILLVALQAQAESLQERADEATTQKQSGEDNQDLAISFAGNGLSALRTSGSQARATCYCRTGRCATRESLSGVCEISGRLYRLCCR

SEQ ID NO: 4126 - protein, 100 aa, Homo Sapiens
MRTLTILTAVLLVALQAKAEPLQAEDDPLQAKAYEADAQEQRGANDQDFAVSFAEDASSSLRALGSTRAFTCHCRRSCYSTEYSYGTCTVMGINHRFCCL

SEQ ID NO: 4127 - protein, 68 aa, Homo Sapiens
MRTSYLLLFTLCLLLSEMASGGNFLTGLGHRSDHYNCVSSGGQCLYSACPIFTKIQGTCYRGKAKCCK

SEQ ID NO: 4128 - protein, 67 aa, Homo Sapiens
MRIHYLLFALLFLFLVPVPGHGGIINTLQKYYCRVRGGRCAVLSCLPKEEQIGKCSTRGRKCCRRKK

SEQ ID NO: 4129 - protein, 67 aa, Homo Sapiens; identical to SEQ ID NO: 4128

SEQ ID NO: 4130 - protein, 72 aa, Homo Sapiens
MQRLVLLLAISLLLYQDLPVRSEFELDRICGYGTARCRKKCRSQEYRIGRCPNTYACCLRKWDESLLNRTKP

SEQ ID NO: 4131 - protein, 72 aa, Homo Sapiens; identical to SEQ ID NO: 4130

SEQ ID NO: 4132 - protein, 78 aa, Homo Sapiens
MALIRKTFYFLFAMFFILVQLPSGCQAGLDFSQPFPSGEFAVCESCKLGRGKCRKECLENEKPDGNCRLNFLCCRQRI

SEQ ID NO: 4133 - protein, 78 aa, Homo Sapiens; identical to SEQ ID NO: 4132

SEQ ID NO: 4134 - protein, 65 aa, Homo Sapiens
MRTFLFLFAVLFFLTPAKNAFFDEKCNKLKGTCKNNCGKNEELIALCQKSLKCCRTIQPCGSIID

SEQ ID NO: 4135 - protein, 65 aa, Homo Sapiens; identical to SEQ ID NO: 4134

SEQ ID NO: 4136 - protein, 70 aa, Homo Sapiens
MPGAMKIFVFILAALILLAQIFQARTAIHRALISKRMEGHCEAECLTFEVKIGGCRAELAPFCCKNRKKH

SEQ ID NO: 4137 - protein, 70 aa, Homo Sapiens; identical to SEQ ID NO: 4136

SEQ ID NO: 4138 - protein, 73 aa, Homo Sapiens
MRIAVLLFAIFFFMSQVLPARGKFKEICERPNGSCRDFCLETEIHVGRCLNSQPCCLPLGHQPRIESTTPKKD

SEQ ID NO: 4139 - protein, 67 aa, Homo Sapiens
MKIQLFFFILHFWVTILPAKKKYPEYGSLDLRRECRIGNGQCKNQCHENEIRIAYCIRPGTHCCLQQ

SEQ ID NO: 4140 - protein, 62 aa, Homo Sapiens
MKIQLFFFILHFWVTILPARSNFEPKYRFERCEKVRGICKTFCDDVEYDYGYCIKWRSQCCV

SEQ ID NO: 4141 - protein, 82 aa, Homo Sapiens
MKILCIFLTFVFTVSCGPSVPQKKTREVAERKRECQLVRGACKPECNSWEYVYYYCNVNPCCAVWEYQKPIINKITSKLHQK

SEQ ID NO: 4142 - protein, 69 aa, Homo Sapiens
MRIFYYLHFLCYVTFILPATCTLVNADRCTKRYGRCKRDCLESEKQIDICSLPRKICCTEKLYEEDDMF

SEQ ID NO: 4143 - protein, 88 aa, Homo Sapiens
MLPDHFSPLSGDIKLSVLALVVLVVLAQTAPDGWIRRCYYGTGRCRKSCKEIERKKEKCGEKHICCVPKEKDKLSHIHDQKETSELYI

SEQ ID NO: 4144 - protein, 102 aa, Homo Sapiens
MSVMKPCLMTIAILMILAQKTPGGLFRSHNGKSREPWNPCELYQGMCRNACREYEIQYLTCPNDQKCCLKLSVKITSSKNVKEDYDSNSNLSVTNSSSYSHI

SEQ ID NO: 4145 - protein, 123 aa, Homo Sapiens
MKLLLLALPMLVLLPQVIPAYSGEKKCWNRSGHCRKQCKDGEAVKDTCKNLRACCIPSNEDHRRVPATSPTPLSDSTPGIIDDILTVRFTTDYFEVSSKKDMVEESEAGRGTETSLPNVHHSS

SEQ ID NO: 4146 - protein, 43 aa, Homo Sapiens
MKLLYLFLAILLAIEEPVISALVRTVGCCLDTARQTPHPSMHG

SEQ ID NO: 4147 - protein, 84 aa, Homo Sapiens
MKLLYLFLAILLAIEEPVISGKRHILRCMGNSGICRASCKKNEQPYLYCRNCQSCCLQSYMRISISGKEENTDWSYEKQWPRLP

SEQ ID NO: 4148 - protein, 88 aa, Homo Sapiens
MKLLYLFLAILLAIEEPVISVECWMDGHCRLLCKDGEDSIIRCRNRKRCCVPSRYLTIQPVTIHGILGWTTPQMSTTAPKMKTNITNR

SEQ ID NO: 4149 - protein, 76 aa, Homo Sapiens
MKLLLLLLTVTLLLAQVTPVMKCWGKSGRCRTTCKESEVYYILCKTEAKCCVDPKYVPVKPKLTDTNTSLESTSAV

SEQ ID NO: 4150 - protein, 67 aa, Homo Sapiens
MKLLLLTLTVLLLLSQLTPGGTQRCWNLYGKCRYRCSKKERVYVYCINNKMCCVKPKYQPKERWWPF

SEQ ID NO: 4151 - protein, 71 aa, Homo Sapiens
MTQLLLFLVALLVLGHVPSGRSEFKRCWKGQGACQTYCTRQETYMHLCPDASLCCLSYALKPPPVPKHEYE

SEQ ID NO: 4152 - protein, 156 aa, Homo Sapiens
MNILMLTFIICGLLTRVTKGSFEPQKCWKNNVGHCRRRCLDTERYILLCRNKLSCCISIISHEYTRRPAFPVIHLEDITLDYSDVDSFTGSPVSMLNDLITFDTTKFGETMTPETNTPETTMPPSEATTPETTMPPSETATSETMPPPSQTALTHN

SEQ ID NO: 4153 - protein, 111 aa, Homo Sapiens
MKSLLFTLAVFMLLAQLVSGNWYVKKCLNDVGICKKKCKPEEMHVKNGWAMCGKQRDCCVPADRRANYPVFCVQTKTTRISTVTATTATTTLMMTTASMSSMAPTPVSPTG

SEQ ID NO: 4154 - protein, 99 aa, Homo Sapiens
MGLFMIIAILLFQKPTVTEQLKKCWNNYVQGHCRKICRVNEVPEALCENGRYCCLNIKELEACKKITKPPRPKPATLALTLQDYVTIIENFPSLKTQST

SEQ ID NO: 4155 - protein, 93 aa, Homo Sapiens
MKLFLVLIILLFEVLTDGARLKKCFNKVTGYCRKKCKVGERYEIGCLSGKLCCANDEEEKKHVSFKKPHQHSGEKLSVLQDYIILPTITIFTV

SEQ ID NO: 4156 - protein, 183 aa, Homo Sapiens
MKLLFPIFASLMLQYQVNTEFIGLRRCLMGLGRCRDHCNVDEKEIQKCKMKKCCVGPKVVKLIKNYLQYGTPNVLNEDVQEMLKPAKNSSAVIQRKHILSVLPQIKSTSFFANTNFVIIPNATPMNSATISTMTPGQITYTATSTKSNTKESRDSATASPPPAPPPPNILPTPSLELEEAEEQ

SEQ ID NO: 4157 - protein, 79 aa, Homo Sapiens
MKLHSLISVLLLFVTLIPKGKTGVIPGQKQCIALKGVCRDKLCSTLDDTIGICNEGKKCCRRWWILEPYPTPVPKGKSP

SEQ ID NO: 4158 - protein, 79 aa, Homo Sapiens; identical to SEQ ID NO: 4157

SEQ ID NO: 4159 - protein, 70 aa, Homo Sapiens
MRVLFFVFGVLSLMFTVPPARSFISNDECPSEYYHCRLKCNADEHAIRYCADFSICCKLKIIEIDGQKKW

SEQ ID NO: 4160 - protein, 70 aa, Homo Sapiens
MRVLFFVFGVLSLMSTVPPTRSFTSNDECPSEYYHCRLKCNADEHAIRYCADFSICCKLKIIQIDGQKKW

SEQ ID NO: 4161 - protein, 95 aa, Homo Sapiens
MKFLLLVLAALGFLTQVIPASAGGSKCVSNTPGYCRTCCHWGETALFMCNASRKCCISYSFLPKPDLPQLIGNHWQSRRRNTQRKDKKQQTTVTS

SEQ ID NO: 4162 - protein, 61 aa, Homo Sapiens
MKIHVFLFVLFFFLVPIATRVKCAVKDTYSCFIMRGKCRHECHDFEKPIGFCTKLNANCYM

SEQ ID NO: 4163 - protein, 66 aa, Homo Sapiens
MKPLLVVFVFLFLWDPVLAGINSLSSEMHKKCYKNGICRLECYESEMLVAYCMFQLECCVKGNPAP

SEQ ID NO: 4164 - protein, 66 aa, Homo Sapiens; identical to SEQ ID NO: 4163

SEQ ID NO: 4165 - protein, 77 aa, Homo Sapiens
MATRSVLLALVVLNLLFYVPPGRSGPNVYIQKIFASCWRLQGTCRPKCLKNEQYRILCDTIHLCCVNPKYLPILTGK

SEQ ID NO: 4166 - protein, 78 aa, Homo Sapiens
MNLCLSALLFFLVILLPSGKGMFGNDGVKVRTCTSQKAVCFFGCPPGYRWIAFCHNILSCCKNMTRFQPPQAKDPWVH

SEQ ID NO: 4167 - protein, 64 aa, Homo Sapiens
MRVLYLLFSFLFIFLMPLPGVFGGIGDPVTCLKSGAICHPVFCPRRYKQIGTCGLPGTKCCKKP

SEQ ID NO: 4168 - protein, 64 aa, Homo Sapiens; identical to SEQ ID NO: 4167

SEQ ID NO: 4169 - protein, 84 aa, Homo Sapiens
MRSRLLLSVAHLPTIRETTEEMLLGGPGQEPPPSPSLDDYVRSISRLAQPTSVLDKATAQGQPRPPHRPAQACRKGRPAVSLRD

SEQ ID NO: 4170 - protein, 212 aa, Homo Sapiens
MRSRLLLSVAHLPTIRETTEEMLLGGPGQEPPPSPSLDDYVRSISRLAQPTSVLDKATAQGQPRPPHRPAQACRKGRPAVSLRDITARFSGQQPTLPMADTVDPLDWLFGESQEKQPSQRDLPRRTGPSAGLWGPHRQMDSSKPMGAPRGRLCEARMPGHSLARPPQDGQQSSDLRSWTFGQSAQAMASRHRPRPSSVLRTLYSHLPVIHEL

SEQ ID NO: 4171 - protein, 326 aa, Homo Sapiens
MSENDNVFCAQLQCFHFPTLRHHDLHSWHAESCYEKSSFLCKRSQTCVDIKDNVVDEGFYFTPKGDDPCLSCTCHGGEPEMCVAALCERPQGCQQYRKDPKECCKFMCLDPDGNSLFDSMASGMRLVVSCISSFLILSLLLFMVHRLRQRRRERIESLIGANLHHFNLGRRIPGFDYGPDGFGTGLTPLHLSDDGEGGTFHFHDPPPPYTAYKYPDIGQPDDPPPPYEASIHPDSVFYDPADDDAFEPVEVSLPAPGDGGSEGALLRRLEQPLPTAGASLADLEDSADSSSALLVPPDPAQSGSTPAAEALPGGGRHSRSSLNTVV

SEQ ID NO: 4172 - protein, 550 aa, Homo Sapiens
MVPKADSGAFLLLFLLVLTVTEPLRPELRCNPGQFACRSGTIQCIPLPWQCDGWATCEDESDEANCPEVTGEVRPHHGKEAVDPRQGRARGGDPSHFHAVNVAQPVRFSSFLGKCPTGWHHYEGTASCYRVYLSGENYWDAAQTCQRLNGSLATFSTDQELRFVLAQEWDQPERSFGWKDQRKLWVGYQYVITGRNRSLEGRWEVAFKGSSEVFLPPDPIFASAMSENDNVFCAQLQCFHFPTLRHHDLHSWHAESCYEKSSFLCKRSQTCVDIKDNVVDEGFYFTPKGDDPCLSCTCHGGEPEMCVAALCERPQGCQQYRKDPKECCKFMCLDPDGNSLFDSMASGMRLVVSCISSFLILSLLLFMVHRLRQRRRERIESLIGANLHHFNLGRRIPGFDYGPDGFGTGLTPLHLSDDGEGGTFHFHDPPPPYTAYKYPDIGQPDDPPPPYEASIHPDSVFYDPADDDAFEPVEVSLPAPGDGGSEGALLRRLEQPLPTAGASLADLEDSADSSSALLVPPDPAQSGSTPAAEALPGGGRHSRSSLNTVV

SEQ ID NO: 4173 - protein, 550 aa, Homo Sapiens [sequence omitted]

SEQ ID NO: 4174 - protein, 509 aa, Homo Sapiens
MVPKADSGAFLLLFLLVLTVTEPLRPEVTGEVRPHHGKEAVDPRQGRARGGDPSHFHAVNVAQPVRFSSFLGKCPTGWHHYEGTASCYRVYLSGENYWDAAQTCQRLNGSLATFSTDQELRFVLAQEWDQPERSFGWKDQRKLWVGYQYVITGRNRSLEGRWEVAFKGSSEVFLPPDPIFASAMSENDNVFCAQLQCFHFPTLRHHDLHSWHAESCYEKSSFLCKRSQTCVDIKDNVVDEGFYFTPKGDDPCLSCTCHGGEPEMCVAALCERPQGCQQYRKDPKECCKFMCLDPDGNSLFDSMASGMRLVVSCISSFLILSLLLFMVHRLRQRRRERIESLIGANLHHFNLGRRIPGFDYGPDGFGTGLTPLHLSDDGEGGTFHFHDPPPPYTAYKYPDIGQPDDPPPPYEASIHPDSVFYDPADDDAFEPVEVSLPAPGDGGSEGALLRRLEQPLPTAGASLADLEDSADSSSALLVPPDPAQSGSTPAAEALPGGGRHSRSSLNTVV

SEQ ID NO: 4175 - protein, 396 aa, Homo Sapiens
MALLTNLLPLCCLALLALPAQSCGPGRGPVGRRRYARKQLVPLLYKQFVPGVPERTLGASGPAEGRVARGSERFRDLVPNYNPDIIFKDEENSGADRLMTERCKERVNALAIAVMNMWPGVRLRVTEGWDEDGHHAQDSLHYEGRALDITTSDRDRNKYGLLARLAVEAGFDWVYYESRNHVHVSVKADNSLAVRAGGCFPGNATVRLWSGERKGLRELHRGDWVLAADASGRVVPTPVLLFLDRDLQRRASFVAVETEWPPRKLLLTPWHLVFAARGPAPAPGDFAPVFARRLRAGDSVLAPGGDALRPARVARVAREEAVGVFAPLTAHGTLLVNDVLASCYAVLESHQWAHRAFAPLRLLHALGALLPGGAVQPTGMHWYSRLLYRLAEELLG

SEQ ID NO: 4176 - protein, 155 aa, Homo Sapiens
MHKAGLLGLCARAWNSVRMASSGMTRRDPLANKVALVTASTDGIGFAIARRLAQDGAHVVVSSRKQQNVDQAVATLQGEGLSVTGTVCHVGKAEDRERLVATAVKLHGGIDILVSNAAVNPFFGSIMDVTEEVWDKLWMDKEKEESMKETLRIRR

SEQ ID NO: 4177 - protein, 192 aa, Homo Sapiens
MHKAGLLGLCARAWNSVRMASSGMTRRDPLANKVALVTASTDGIGFAIARRLAQDGAHVVVSSRKQQNVDQAVATLQGEGLSVTGTVCHVGKAEDRERLVATAVKLHGGIDILVSNAAVNPFFGSIMDVTEEVWDKLWMDKEKEESMKETLRIRRLGEPEDCAGIVSFLCSEDASYITGETVVVGGGTPSRL

SEQ ID NO: 4178 - protein, 188 aa, Homo Sapiens
MHKAGLLGLCARAWNSVRMASSGMTRRDPLANKVALVTASTDGIGFAIARRLAQDGAHVVVSSRKQQNVDQAVATLQGEGLSVTGTVCHVGKAEDRERLVATAVKLHGGIDILVSNAAVNPFFGSIMDVTEEVWDKRRLSGDRVFHSSLQSISSLDGQGKRGKHERNPADKKVRRARGLCWHRVFPVL

SEQ ID NO: 4179 - protein, 278 aa, Homo Sapiens
MHKAGLLGLCARAWNSVRMASSGMTRRDPLANKVALVTASTDGIGFAIARRLAQDGAHVVVSSRKQQNVDQAVATLQGEGLSVTGTVCHVGKAEDRERLVATAVKLHGGIDILVSNAAVNPFFGSIMDVTEEVWDKTLDINVKAPALMTKAVVPEMEKRGGGSVVIVSSIAAFSPSPGFSPYNVSKTALLGLTKTLAIELAPRNIRVNCLAPGLIKTSFSRMLWMDKEKEESMKETLRIRRLGEPEDCAGIVSFLCSEDASYITGETVVVGGGTPSRL

SEQ ID NO: 4180 - protein, 158 aa, Homo Sapiens
MHKAGLLGLCARAWNSVRMASSGMTRRDPLANKVALVTASTDGIGFAIARRLAQDGAHVVVSSRKQQNVDQAVATLQGEGLSVTGTVCHVGKAEDRERLVATLWMDKEKEESMKETLRIRRLGEPEDCAGIVSFLCSEDASYITGETVVVGGGTPSRL

SEQ ID NO: 4181 - protein, 244 aa, Homo Sapiens
MHKAGLLGLCARAWNSVRMASSGMTRRDPLANKVALVTASTDGIGFAIARRLAQDGAHVVVSSRKQQNVDQAVATLQGEGLSVTGTVCHVGKAEDRERLVATTLDINVKAPALMTKAVVPEMEKRGGGSVVIVSSIAAFSPSPGFSPYNVSKTALLGLTKTLAIELAPRNIRVNCLAPGLIKTSFSRMLWMDKEKEESMKETLRIRRLGEPEDCAGIVSFLCSEDASYITGETVVVGGGTPSRL

SEQ ID NO: 4182 - protein, 199 aa, Homo Sapiens
MHKAGLLGLCARAWNSVRMASSGMTRRDPLANKVALVTASTDGIGFAIARRLAQDGAHVVVSSRKQQNVDQAVATLQGEGLSVTGTVCHVGKAEDRERLVATTLDINVKAPALMTKAVVPEMEKRGGGSVVIVSSIAAFSPSPLWMDKEKEESMKETLRIRRLGEPEDCAGIVSFLCSEDASYITGETVVVGGGTPSRL

SEQ ID NO: 4183 - protein, 61 aa, Homo Sapiens
RNIRVNCLAPGLIKTSFSRMLWMDKEKEESMKETLRIRRPRIHKHYHYSDLSKKSASLSKG

SEQ ID NO: 4184 - protein, 90 aa, Homo Sapiens
MAVKLHGGIDILVSNAAVNPFFGSLMDVTEEVWDKGFSPYNVSKTALLGLNNTLAIELAPRNIRVNCLHLDLSRLASAGCSGWTRKKRKA

SEQ ID NO: 4185 - protein, 131 aa, Homo Sapiens
MAVKLHGGIDILVSNAAVNPFFGSLMDVTEEVWDKTLDINVKAPALMTKAVVPEMEKRGGGSVVIVSSIAAFSPSPGFSPYNVSKTALLGLNNTLAIELAPRNIRVNCLHLDLSRLASAGCSGWTRKKRKA

SEQ ID NO: 4186 - protein, 49 aa, Homo Sapiens
MDVTEEVWDKTLDINVKAPALMTKAVVPEMEKRGGGSVVIVSSIAAFSP

SEQ ID NO: 4187 - protein, 215 aa, Homo Sapiens
MPFPCLSLPSSWDYRIGFAIARRLAQDRAHVVVSSRKQQNVDQAVATLQGEGLSVTGTVCHVGKAEDRERLVAMTLDINVKAPALMTKAVVPEMEKRGGGSVVIVSSIAAFSPSPGFSPYNVSKTALLGLNNTLAIELAPRNIRVNCLPGLIKTSFSRMLWMDKEKEESMKETLRIRRLGEPEDCAGIVSFLCSEDASYITGETVVVGGGTPSRL

SEQ ID NO: 4188 - protein, 192 aa, Homo Sapiens
MQMARLLGLCAWARKSVRMASSRMTRRDPLTNKVALVTASTDGIGFAIARRLAQDRAHVVVSSRKQQNVDQAVATLQGEGLSVTGTVCHVGKAEDRERLVAMAVKLHGGIDILVSNAAVNPFFGSLMDVTEEVWDKLWMDKEKEESMKETLRIRRLGEPEDCAGIVSFLCSEDASYITGETVVVGGGTPSRL

SEQ ID NO: 4189 - protein, 232 aa, Homo Sapiens
MQMARLLGLCAWARKSVRMASSRMTRRDPLTNKVALVTASTDGIGFAIARRLAQDRAHVVVSSRKQQNVDQAVATLQGEGLSVTGTVCHVGKAEDRERLVAMAVKLHGGIDILVSNAAVNPFFGSLMDVTEEVWDKTLDINVKAPALMTKAVVPEMEKRGGGSVVIVSSIAAFSPSPGFSPYNVSKTALLGLNNTLAIELAPRNIRVNCLHLDLSRLASAGCSGWTRKKRKA

SEQ ID NO: 4190 - protein, 242 aa, Homo Sapiens
MQMARLLGLCAWARKSVRMASSRMTRRDPLTNKVALVTASTDGIGFAIARRLAQDRAHVVVSSRKQQNVDQAVATLQGEGLSVTGTVCHVGKAEDRERLVAMAVKLHGGIDILVSNAAVNPFFGSLMDVTEEVWDKTLDINVKAPALMTKAVVPEMEKRGGGSVVIVSSIAAFSPSPGFSPYNVSKTALLGLNNTLAIELAPRNIRVNCLHLDLSRLASAGWLGEPEDCAGIVSFLCSEDAS

SEQ ID NO: 4191 - protein, 157 aa, Homo Sapiens
MQMARLLGLCAWARKSVRMASSRMTRRDPLTNKVALVTASTDGIGFAIARRLAQDRAHVVVSSRKQQNVDQAVATLQGEGLSVTGTVCHVGKAEDRERLVAMGFSPYNVSKTALLGLNNTLAIELAPRNIRVNCLHLDLSRLASAGCSGWTRKKRKA

SEQ ID NO: 4192 - protein, 157 aa, Homo Sapiens; identical to SEQ ID NO: 4191

SEQ ID NO: 4193 - protein, 109 aa, Homo Sapiens
  misc_feature (1)..(1): Xaa can be any naturally occurring amino acid
XSLMDVTEEVWDKTLDINVKAPALMTKAVVPEMEKRGGGSVVIVSSIAAFSPSPGFSPYNVSKTALLGLNNTLAIELAPRNIRVNCLHLDLSRLASAGCSGWTRKKRKA

SEQ ID NO: 4194 - protein, 61 aa, Homo Sapiens
MNWELLLWLLVLCALLLLLVQLLRFLRADGDLTLLWAEWQGRRPEWELTDMVVWVTGASSG

SEQ ID NO: 4195 - protein, 339 aa, Homo Sapiens
MNWELLLWLLVLCALLLLLVQLLRFLRADGDLTLLWAEWQGRRPEWELTDMVVWVTGASSGIGEELAYQLSKLGVSLVLSARRVHELERVKRRCLENGNLKEKDILVLPLDLTDTGSHEAATKAVLQEFGRIDILVNNGGMSQRSLCMDTSLDVYRKLIELNYLGTVSLTKCVLPHMIERKQGKIVTVNSILGIISVPLSIGYCASKHALRGFFNGLRTELATYPGIIVSNICPGPVQSNIVENSLAGEVTKTIGNNGDQSHKMTTSRCVRLMLISMANDLKEVWISEQPFLLVTYLWQYMPTWAWWITNKMGKKRIENFKSGVDADSSYFKIFKTKHD

SEQ ID NO: 4196 - protein, 339 aa, Homo Sapiens; identical to SEQ ID NO: 4195

SEQ ID NO: 4197 - protein, 376 aa, Homo Sapiens
MNWELLLWLLVLCALLLLLVQLLRFLRADGDLTLLWAEWQGRRPEWELTDMVVWVTGASSGIGEELAYQLSKLGVSLVLSARRVHELERVKRRCLENGNLKEKDILVLPLDLTDTGSHEAATKAVLQEFGRIDILVNNGGMSQRSLCMDTSLDVYRKLIELNYLGTVSLTKCVLPHMIERKQGKIVTVNSILGIISVPLSIGYCASKHALRGFFNGLRTELATYPGIIVSNICPGPVQSNIVENSLAGEVTKTIGNNGDQSHKMTTSRCVRLMLISMANDLKEVWISEQPFLLVTYLWQYMPTWAWWITTRWGRKGLRTLRVVWMQTLLILKSLRQNMTEKSTCTFQATGGRNGKHENSNLLMLLNNQRLICDFTF

SEQ ID NO: 4198 - protein, 289 aa, Homo Sapiens
MVVWVTGASSGIGEELAYQLSKLGVSLVLSARRVHELERVKRRCLENGNLKEKDILVLPLDLTDTGSHEAATKAVLQEFGRIDILVNNGGMSQRSLCMDTSLDVYRKLIELNYLGTVSLTKCVLPHMIERKQGKIVTVNSILGIISVPLSIGYCASKHALRGFFNGLRTELATYPGIIVSNICPGPVQSNIVENSLAGEVTKTIGNNGDQSHKMTTSRCVRLMLISMANDLKEVWISEQPFLLVTYLWQYMPTWAWWITNKMGKKRIENFKSGVDADSSYFKIFKTKHD

SEQ ID NO: 4199 - protein, 212 aa, Homo Sapiens
  misc_feature (1)..(1): Xaa can be any naturally occurring amino acid
XILVNNGGMSQRSLCMDTSLDVYRKLIELNYLGTVSLTKCVLPHMIERKQGKIVTVNSILGIISVPLSIGYCASKHALRGFFNGLRTELATYPGIIVSNICPGPVQSNIVENSLAGEVTKTIGNNGDQSHKMTTSRCVRLMLISMANDLKEVWISEQPFLMQTLLILKSLRQNMTEKSTCTFQATGGRNGKHENSNLLMLLNNQRLICDFTF

SEQ ID NO: 4200 - protein, 399 aa, Homo Sapiens
  misc_feature (1)..(1): Xaa can be any naturally occurring amino acid
XLWLLVLCALLLLLVQLLRFLRADGDLTLLWAEWQGRRPEWELTDMVVWVTGASSGIGEELAYQLSKLGVSLVLSARRVHELERVKRRCLENGNLKEKDILVLPLDLTDTGSHEAATKAVLQEFGRIDILVNNGGMSQRSLCMDTSLDVYRKLIELNYLGTVSLTKCVLPHMIERKQGKIVTVNSILGIISVPLSIGYCASKHALRGFFNGLRTELATYPGIIVSNICPGPVQSNIVENSLAGEVTKTIGNNGDQSHKMTTSRCVRLMLISMANDLKEVWISEQPFLLVTYLWQYMPTWAWWITNKMGKKRIENFKSGVVRPISKFLNSMYQSCRKVQNFPVFKKLSGWVQWLMSVIPALWEAKADHLRPGVQDQPGQHSETPSLLKIQKVAGHGGACL

SEQ ID NO: 4201 - protein, 160 aa, Homo Sapiens
  misc_feature (1)..(1): Xaa can be any naturally occurring amino acid
XNWELLLWLLVLCALLLLLVQLLRFLRADGDLTLLWAEWQGRRPEWELTDMVVWVTGASSGIGEELAYQLSKLGVSLVLSARRVHELERVKRRCLENGNLKEKDILVLPLDLTDTGSHEAATKAVLQEFGRGFFNGLRTELATYPGIIVSNICPGPVQSN

SEQ ID NO: 4202 - protein, 312 aa, Homo Sapiens
MGVMAMLMLPLLLLGISGLLFIYQEVSRLWSKSAVQNKVVVITDAISGLGKECARVFHTGGARLVLCGKNWERLENLYDALISVADPSKQTFTPKLVLLDLSDISCVPDVAKEVLDCYGCVDILINNASVKVKGPAHKISLELDKKIMDANYFGPITLTKALLPNMISRRTGQIVLVNNIQGKFGIPFRTTYAASKHAALGFFDCLRAEVEEYDVVISTVSPTFIRSYHVYPEQGNWEASIWKFFFRKLTYGVHPVEVAEEVMRTVRRKKQEVFMANPIPKAAVYVRTFFPEFFFAVVACGVKEKLNVPEEG

SEQ ID NO: 4203 - protein, 311 aa, Homo Sapiens
MGVMAMLMLPLLLLGISGLLFIYQEVSRLWSKSAVQNKVVVITDAISGLGKECARVFHTGGARLVLCGKNWERLENLYDALISVADPSKTFTPKLVLLDLSDISCVPDVAKEVLDCYGCVDILINNASVKVKGPAHKISLELDKKIMDANYFGPITLTKALLPNMISRRTGQIVLVNNIQGKFGIPFRTTYAASKHAALGFFDCLRAEVEEYDVVISTVSPTFIRSYHVYPEQGNWEASIWKFFFRKLTYGVHPVEVAEEVMRTVRRKKQEVFMANPIPKAAVYVRTFFPEFFFAVVACGVKEKLNVPEEG

SEQ ID NO: 4204 - protein, 132 aa, Homo Sapiens
SVKVKGPAHKISLELDKKIMDANYFGPITLTKALLPNMISRRTGQIVLVNNIQGKFGIPFRTTFFFRKLTYGVHPVEVAEEVMRTVRRKKQEVFMANPIPKAAVYVRTFFPEFFFAVVACGVKEKLNVPEEG

SEQ ID NO: 4205 - protein, 66 aa, Homo Sapiens
MLFWVLGLLILCGFLWTRKGKLKIEDITDKYIFITGCDSGFGNLAARTFDKKGFHVIAACLTESGS

SEQ ID NO: 4206 - protein, 319 aa, Homo Sapiens
MLFWVLGLLILCGFLWTRKGKLKIEDITDKYIFITGCDSGFGNLAARTFDKKGFHVIAACLTESGSTALKAETSERLRTVLLDVTDPENVKRTAQWVKNQVGEKGLWGLINNAGVPGVLAPTDWLTLEDYREPIEVNLFGLISVTLNMLPLVKKAQGRVINVSSVGGRLAIVGGGYTPSKYAVEGFNDSLRRDMKAFGVHVSCIEPGLFKTNLADPVKVIEKKLAIWEQLSPDIKQQYGEGYIEKSLDKLKGNKSYVNMDLSPVVECMDHALTSLFPKTHYAAGKDAKIFWIPLSHMPAALQDFLLLKQKAELANPKAV

SEQ ID NO: 4207 - protein, 319 aa, Homo Sapiens; identical to SEQ ID NO: 4206

SEQ ID NO: 4208 - protein, 319 aa, Homo Sapiens; identical to SEQ ID NO: 4206

SEQ ID NO: 4209 - protein, 319 aa, Homo Sapiens; identical to SEQ ID NO: 4206

SEQ ID NO: 4210 - protein, 319 aa, Homo Sapiens; identical to SEQ ID NO: 4206

SEQ ID NO: 4211 - protein, 172 aa, Homo Sapiens
MLPLVKKAQGRVINVSSVGGRLAIVGGGYTPSKYAVEGFNDSLRRDMKAFGVHVSCIEPGLFKTNLADPVKVIEKKLAIWEQLSPDIKQQYGEGYIEKSLDKLKGNKSYVNMDLSPVVECMDHALTSLFPKTHYAAGKDAKIFWIPLSHMPAALQDFLLLKQKAELANPKAV

SEQ ID NO: 4212 - protein, 379 aa, Homo Sapiens
MPEGRSHCACSITSLTLLVSLTRVTLDILQKLDPPQPAHWRHHLLVLYKKGVYLSHTGGKMLFWVLGLLILCGFLWTRKGKLKIEDITDKYIFITGCDSGFGNLAARTFDKKGFHVIAACLTESGSTALKAETSERLRTVLLDVTDPENVKRTAQWVKNQVGEKGLWGLINNAGVPGVLAPTDWLTLEDYREPIEVNLFGLISVTLNMLPLVKKAQGRVINVSSVGGRLAIVGGGYTPSKYAVEGFNDSLRRDMKAFGVHVSCIEPGLFKTNLADPVKVIEKKLAIWEQLSPDIKQQYGEGYIEKSLDKLKGNKSYVNMDLSPVVECMDHALTSLFPKTHYAAGKDAKIFWIPLSHMPAALQDFLLLKQKAELANPKAV

SEQ ID NO: 4213 - protein, 122 aa, Homo Sapiens
MHVIIAGNNDSKAKQVVSKIKEETLNDKVEFLYCDLASMTSIRQFVQKFKMKKIPLHVLINNAGVMMVPQRKTRDGFEEHFGLNYLGHFLLTNLLLDTLKESGSPGHSARVVTVSSATHYVA

SEQ ID NO: 4214 - protein, 63 aa, Homo Sapiens
MPVFPPRPDRVAIVTGGTDGIGYSTAKHLARLGMHVIIAGNNDSKAKQVVSKIKEETLNDKET

SEQ ID NO: 4215 - protein, 330 aa, Homo Sapiens
MSPLSAARAALRVYAVGAAVILAQLLRRCRGGFLEPVFPPRPDRVAIVTGGTDGIGYSTAKHLARLGMHVIIAGNNDSKAKQVVSKIKEETLNDKVEFLYCDLASMTSIRQFVQKFKMKKIPLHVLINNAGVMMVPQRKTRDGFEEHFGLNYLGHFLLTNLLLDTLKESGSPGHSARVVTVSSATHYVAELNMDDLQSSACYSPHAAYAQSKLALVLFTYHLQRLLAAEGSHVTANVVDPGVVNTDVYKHVFWATRLAKKLLGWLLFKTPDEGAWTSIYAAVTPELEGVGGHYLYNEKETKSLHVTYNQKLQQQLWSKSCEMTGVLDVTL

SEQ ID NO: 4216 - protein, 232 aa, Homo Sapiens
MSPLSAARAALRVYAVGAAVILAQLLRRCRGGFLEPVFPPRPDRVAIVTGGTDGIGYSTAKHLARLGMHVIIVEFLYCDLASMTSIRQFVQKFKMKKIPLHVLINNAGVMMVPQRKTRDGFEEHFGLNYLGHFLLTNLLLDTLKESGSPGHSARVVTVSSATHYVAELNMDDLQSSACYSPHAAYAQSKLALVLFTYHLQRLLAAEGSHVTANVVDPGVVNTDVYKHVFWAT

SEQ ID NO: 4217 - protein, 154 aa, Homo Sapiens
  misc_feature (1)..(1): Xaa can be any naturally occurring amino acid
XPARPGPTLPSPRVWPPRLSRVGLQPSSPRAAAPPRTLTPPGHGRGPGGSHAPRPRHQAALPAACGRPVTARPRQAPEGRSGRPRDLDPYPPQVFPPRPDRVAIVTGGTDGIGYSTAKHLARLGMHVIIAGNNDSKAKQVVSKIKEETLNDKET

SEQ ID NO: 4218 - protein, 1369 aa, Homo Sapiens
MGGKNKKHKAPAAAVVRAAVSASRAKSAEAGIAGEAQSKKPVSRPATAAAAAAGSREPRVKQGPKIYSFNSTNDSSGPANLDKSILKVVINNKLEQRIIGVINEHKKQNNDKGMISGRLTAKKLQDLYMALQAFSFKTKDIEDAMTNTLLYGGDLHSALDWLCLNLSDDALPEGFSQEFEEQQPKSRPKFQSPQIQATISPPLQPKTKTYEEDPKSKPKKEEKNMEVNMKEWILRYAEQQNEEEKNENSKSLEEEEKFDPNERYLHLAAKLLDAKEQAATFKLEKNKQGQKEAQEKIRKFQREMETLEDHPVFNPAMKISHQQNERKKPPVATEGESALNFNLFEKSAAATEEEKDKKKEPHDVRNFDYTARSWTGKSPKQFLIDWVRKNLPKSPNPSFEKVPVGRYWKCRVRVIKSEDDVLVVCPTILTEDGMQAQHLGATLALYRLVKGQSVHQLLPPTYRDVWLEWSDAEKKREELNKMETNKPRDLFIAKLLNKLKQQQQQQQQHSENKRENSEDPEESWENLVSDEDFSALSLESANVEDLEPVRNLFRKLQSTPKYQKLLKERQQLPVFKHRDSIVETLKRHRVVVVAGETGSGKSTQVPHFLLEDLLLNEWEASKCNIVCTQPRRISAVSLANRVCDELGCENGPGGRNSLCGYQIRMESRACESTRLLYCTTGVLLRKLQEDGLLSNVSHVIVDEVHERSVQSDFLLIILKEILQKRSDLHLILMSATVDSEKFSTYFTHCPILRISGRSYPVEVFHLEDIIEETGFVLEKDSEYCQKFLEEEEEVTINVTSKAGGIKKYQEYIPVQTGAHADLNPFYQKYSSRTQHAILYMNPHKINLDLILELLAYLDKSPQFRNIEGAVLIFLPGLAHIQQLYDLLSNDRRFYSERYKVIALHSILSTQDQAAAFTLPPPGVRKIVLATNIAETGITIPDVVFVIDTGRTKENKYHESSQMSSLVETFVSKASALQRQGRAGRVRDGFCFRMYTRERFEGFMDYSVPEILRVPLEELCLHIMKCNLGSPEDFLSKALDPPQLQVISNAMNLLRKIGACELNEPKLTPLGQHLAALPVNVKIGKMLIFGAIFGCLDPVATLAAVMTEKSPFTTPIGRKDEADLAKSALAMADSDHLTIYNAYLGWKKARQEGGYRSEITYCRRNFLNRTSLLTLEDVKQELIKLVKAAGFSSSTTSTSWEGNRASQTLSFQEIALLKAVLVAGLYDNVGKIIYTKSVDVTEKLACIVETAQGKAQVHPSSVNRDLQTHGWLLYQEKIRYARVYLRETTLITPFPVLLFGGDIEVQHRERLLSIDGWIYFQAPVKIAVIFKQLRVLIDSVLRKKLENPKMSLENDKILQIITELIKTENN

SEQ ID NO: 4219 - protein, 1370 aa, Homo Sapiens
MGGKNKKHKAPAAAVVRAAVSASRAKSAEAGIAGEAQSKKPVSRPATAAAAAAGSREPRVKQGPKIYSFNSTNDSSGPANLDKSILKVVINNKLEQRIIGVINEHKKQNNDKGMISGRLTAKKLQDLYMALQAFSFKTKDIEDAMTNTLLYGGDLHSALDWLCLNLSDDALPEGFSQEFEEQQPKSRPKFQSPQIQATISPPLQPKTKTYEEDPKSKPKKEEKNMEVNMKEWILRYAEQQNEEEKNENSKSLEEEEKFDPNERYLHLAAKLLDAKEQAATFKLEKNKQGQKEAQEKIRKFQREMETLEDHPVFNPAMKISHQQNERKKPPVATEGESALNFNLFEKSAAATEEEKGKKKEPHDVRNFDYTARSWTGKSPKQFLIDWVRKNLPKSPNPSFEKVPVGRYWKCRVRVIKSEDDVLVVCPTILTEDGMQAQHLGATLALYRLVKGQSVHQLLPPTYRDVWLEWSDAEKKREELNKMETNKPRDLFIAKLLNKLKQQQQQQQQHSENKRENSEDPEESWENLVSDEDFSALSLESANVEDLEPVRNLFRKLQSTPKYQKLLKERQQLPVFKHRDSIVETLKRHRVVVVAGETGSGKSTQVPHFLLEDLLLNEWEASKCNIVCTQPRRISAVSLANRVCDELGCENGPGGRNSLCGYQIRMESRACESTRLLYCTTGVLLRKLQEDGLLSNVSHVIVDEVHERSVQSDFLLIILKEILQKRSDLHLILMSATVDSEKFSTYFTHCPILRISGRSYPVEVFHLEDIIEETGFVLEKDSEYCQKFLEEEEEVTINVTSKAGGIKKYQEYIPVQTGAHADLNPFYQKYSSRTQHAILYMNPHKINLDLILELLAYLDKSPQFRNIEGAVLIFLPGLAHIQQLYDLLSNDRRFYSERYKVIALHSILSTQDQAAAFTLPPPGVRKIVLATNIAETGITIPDVVFVIDTGRTKENKYHESSQMSSLVETFVSKASALQRQGRAGRVRDGFCFRMYTRERFEGFMDYSVPEILRVPLEELCLHIMKCNLGSPEDFLSKALDPPQLQVISNAMNLLRKIGACELNEPKLTPLGQHLAALPVNVKIGKMLIFGAIFGCLDPVATLAAVMTEKSPFTTPIGRKDEADLAKSALAMADSDHLTIYNAYLGWKKARQEGGYRSEITYCRRNFLNRTSLLTLEDVKQELIKLVKAAGFSSSTTSTSWEGNRASQTLSFQEIALLKAVLVAGLYDNVGKIIYTKSVDVTEKLACIVETAQGKAQVHPSSVNRDLQTHGWLLYQEKIRYARVYLRETTLITPFPVLLFGGDIEVQHRERLLSIDGWIYFQAPVKIAVIFKQLRVLIDSVLRKKLENPKMSLENDKILQIITELIKTENNN

SEQ ID NO: 4220 - protein, 160 aa, Homo Sapiens
  misc_feature (1)..(1): Xaa can be any naturally occurring amino acid
XRPRWSGPPCLLPEPNLPRLELPGRPKARSQCPGRPPLPLPLPAPGSPVSSKVVINNKLEQRIIGVINEHKKQNNDKGMISGRLTAKKLQDLYMALQAFSFKTKDIEDAMTNTLLYGGDLHSALDWLCLNLSDDALPEGFSQEFEEQQPKSRPKFQSPQI

SEQ ID NO: 4221 - protein, 1222 aa, Homo Sapiens
MAAARRLMALAAGISPRLQPLGPRAAGRQGRSRGFSSSCAHPDHTKEAAEAESGMAPGGPGEGDGSLVNASRDLLKEFPQPKNLLNSVIGRALGISHAKDKLVYVHTNGPKKKKVTLHIKWPKSVEVEGYGSKKIDAERQAAAAACQLFKGWGLLGPRNELFDAAKYRVLADRFGSPADSWWRPEPTMPPTSWRQLNPESIRPGGPGGLSRSLGREEEEDEEEELEEGTIDVTDFLSMTQQDSHAPLRDSRGSSFEMTDDDSAIRALTQFPLPKNLLAKVIQIATSSSTAKNLMQFHTVGTKTKLSTLTLLWPCPMTFVAKGRRKAEAENKAAALACKKLKSLGLVDRNNEPLTHAMYNLASLRELGETQRRPCTIQVPEPILRKIETFLNHYPVESSWIAPELRLQSDDILPLGKDSGPLSDPITGKPYVPLLEAEEVRLSQSLLELWRRRGPVWQEAPQLPVDPHRDTILNAIEQHPVVVISGDTGCGKTTRIPQLLLERYVTEGRGARCNVIITQPRRISAVSVAQRVSHELGPSLRRNVGFQVRLESKPPSRGGALLFCTVGILLRKLQSNPSLEGVSHVIVDEVHERDVNTDFLLILLKGLQRLNPALRLVLMSATGDNERFSRYFGGCPVIKVPGFMYPVKEHYLEDILAKLGKHQYLHRHRHHESEDECALDLDLVTDLVLHIDARGEPGGILCFLPGWQEIKGVQQRLQEALGMHESKYLILPVHSNIPMMDQKAIFQQPPVGVRKIVLATNIAETSITINDIVHVVDSGLHKEERYDLKTKVSCLETVWVSRANVIQRRGRAGRCQSGFAYHLFPRSRLEKMVPFQVPEILRTPLENLVLQAKIHMPEKTAVEFLSKAVDSPNIKAVDEAVILLQEIGVLDQREYLTTLGQRLAHISTDPRLAKAIVLAAIFRCLHPLLVVVSCLTRDPFSSSLQNRAEVDKVKALLSHDSGSDHLAFVRAVAGWEEVLRWQDRSSRENYLEENLLYAPSLRFIHGLIKQFSENIYEAFLVGKPSDCTLASAQCNEYSEEEELVKGVLMAGLYPNLIQVRQGKVTRQGKFKPNSVTYRTKSGNILLHKSTINREATRLRSRWLTYFMAVKSNGSVFVRDSSQVHPLAVLLLTDGDVHIRDDGRRATISLSDSDLLRLEGDSRTVRLLKELRRALGRMVERSLRSELAALPPSVQEEHGQLLALLAELLRGPCGSFDVRKTADD

SEQ ID NO: 4222 - protein, 1155 aa, Homo Sapiens
MAASRDLLKEFPQPKNLLNSVIGRALGISHAKDKLVYVHTNGPKKKKVTLHIKWPKSVEVEGYGSKKIDAERQAAAAACQLFKGWGLLGPRNELFDAAKYRVLADRFGSPADSWWRPEPTMPPTSWRQLNPESIRPGGPGGLSRSLGREEEEDEEEELEEGTIDVTDFLSMTQQDSHAPLRDSRGSSFEMTDDDSAIRALTQFPLPKNLLAKVIQIATSSSTAKNLMQFHTVGTKTKLSTLTLLWPCPMTFVAKGRRKAEAENKAAALACKKLKSLGLVDRNNEPLTHAMYNLASLRELGETQRRPCTIQVPEPILRKIETFLNHYPVESSWIAPELRLQSDDILPLGKDSGPLSDPITGKPYVPLLEAEEVRLSQSLLELWRRRGPVWQEAPQLPVDPHRDTILNAIEQHPVVVISGDTGCGKTTRIPQLLLERYVTEGRGARCNVIITQPRRISAVSVAQRVSHELGPSLRRNVGFQVRLESKPPSRGGALLFCTVGILLRKLQSNPSLEGVSHVIVDEVHERDVNTDFLLILLKGLQRLNPALRLVLMSATGDNERFSRYFGGCPVIKVPGFMYPVKEHYLEDILAKLGKHQYLHRHRHHESEDECALDLDLVTDLVLHIDARGEPGGILCFLPGWQEIKGVQQRLQEALGMHESKYLILPVHSNIPMMDQKAIFQQPPVGVRKIVLATNIAETSITINDIVHVVDSGLHKEERYDLKTKVSCLETVWVSRANVIQRRGRAGRCQSGFAYHLFPRSRLEKMVPFQVPEILRTPLENLVLQAKIHMPEKTAVEFLSKAVDSPNIKAVDEAVILLQEIGVLDQREYLTTLGQRLAHISTDPRLAKAIVLAAIFRCLHPLLVVVSCLTRDPFSSSLQNRAEVDKVKALLSHDSGSDHLAFVRAVAGWEEVLRWQDRSSRENYLEENLLYAPSLRFIHGLIKQFSENIYEAFLVGKPSDCTLASAQCNEYSEEEELVKGVLMAGLYPNLIQVRQGKVTRQGKFKPNSVTYRTKSGNILLHKSTINREATRLRSRWLTYFMAVKSNGSVFVRDSSQVHPLAVLLLTDGDVHIRDDGRRATISLSDSDLLRLEGDSRTVRLLKELRRALGRMVERSLRSELAALPPSVQEEHGQLLALLAELLRGPCGSFDVRKTADD

SEQ ID NO: 4223 - protein, 1166 aa, Homo Sapiens
MCVNPTPGGTISRASRDLLKEFPQPKNLLNSVIGRALGISHAKDKLVYVHTNGPKKKKVTLHIKWPKSVEVEGYGSKKIDAERQAAAAACQLFKGWGLLGPRNELFDAAKYRVLADRFGSPADSWWRPEPTMPPTSWRQLNPESIRPGGPGGLSRSLGREEEEDEEEELEEGTIDVTDFLSMTQQDSHAPLRDSRGSSFEMTDDDSAIRALTQFPLPKNLLAKVIQIATSSSTAKNLMQFHTVGTKTKLSTLTLLWPCPMTFVAKGRRKAEAENKAAALACKKLKSLGLVDRNNEPLTHAMYNLASLRELGETQRRPCTIQVPEPILRKIETFLNHYPVESSWIAPELRLQSDDILPLGKDSGPLSDPITGKPYVPLLEAEEVRLSQSLLELWRRRGPVWQEAPQLPVDPHRDTILNAIEQHPVVVISGDTGCGKTTRIPQLLLERYVTEGRGARCNVIITQPRRISAVSVAQRVSHELGPSLRRNVGFQVRLESKPPSRGGALLFCTVGILLRKLQSNPSLEGVSHVIVDEVHERDVNTDFLLILLKGLQRLNPALRLVLMSATGDNERFSRYFGGCPVIKVPGFMYPVKEHYLEDILAKLGKHQYLHRHRHHESEDECALDLDLVTDLVLHIDARGEPGGILCFLPGWQEIKGVQQRLQEALGMHESKYLILPVHSNIPMMDQKAIFQQPPVGVRKIVLATNIAETSITINDIVHVVDSGLHKEERYDLKTKVSCLETVWVSRANVIQRRGRAGRCQSGFAYHLFPRSRLEKMVPFQVPEILRTPLENLVLQAKIHMPEKTAVEFLSKAVDSPNIKAVDEAVILLQEIGVLDQREYLTTLGQRLAHISTDPRLAKAIVLAAIFRCLHPLLVVVSCLTRDPFSSSLQNRAEVDKVKALLSHDSGSDHLAFVRAVAGWEEVLRWQDRSSRENYLEENLLYAPSLRFIHGLIKQFSENIYEAFLVGKPSDCTLASAQCNEYSEEEELVKGVLMAGLYPNLIQVRQGKVTRQGKFKPNSVTYRTKSGNILLHKSTINREATRLRSRWLTYFMAVKSNGSVFVRDSSQVHPLAVLLLTDGDVHIRDDGRRATISLSDSDLLRLEGDSRTVRLLKELRRALGRMVERSLRSELAALPPSVQEEHGQLLALLAELLRGPCGSFDVRKTADD

SEQ ID NO: 4224 - protein, 1194 aa, Homo Sapiens
MFSLDSFRKDRAQHRQRQCKLPPPRLPPMCVNPTPGGTISRASRDLLKEFPQPKNLLNSVIGRALGISHAKDKLVYVHTNGPKKKKVTLHIKWPKSVEVEGYGSKKIDAERQAAAAACQLFKGWGLLGPRNELFDAAKYRVLADRFGSPADSWWRPEPTMPPTSWRQLNPESIRPGGPGGLSRSLGREEEEDEEEELEEGTIDVTDFLSMTQQDSHAPLRDSRGSSFEMTDDDSAIRALTQFPLPKNLLAKVIQIATSSSTAKNLMQFHTVGTKTKLSTLTLLWPCPMTFVAKGRRKAEAENKAAALACKKLKSLGLVDRNNEPLTHAMYNLASLRELGETQRRPCTIQVPEPILRKIETFLNHYPVESSWIAPELRLQSDDILPLGKDSGPLSDPITGKPYVPLLEAEEVRLSQSLLELWRRRGPVWQEAPQLPVDPHRDTILNAIEQHPVVVISGDTGCGKTTRIPQLLLERYVTEGRGARCNVIITQPRRISAVSVAQRVSHELGPSLRRNVGFQVRLESKPPSRGGALLFCTVGILLRKLQSNPSLEGVSHVIVDEVHERDVNTDFLLILLKGLQRLNPALRLVLMSATGDNERFSRYFGGCPVIKVPGFMYPVKEHYLEDILAKLGKHQYLHRHRHHESEDECALDLDLVTDLVLHIDARGEPGGILCFLPGWQEIKGVQQRLQEALGMHESKYLILPVHSNIPMMDQKAIFQQPPVGVRKIVLATNIAETSITINDIVHVVDSGLHKEERYDLKTKVSCLETVWVSRANVIQRRGRAGRCQSGFAYHLFPRSRLEKMVPFQVPEILRTPLENLVLQAKIHMPEKTAVEFLSKAVDSPNIKAVDEAVILLQEIGVLDQREYLTTLGQRLAHISTDPRLAKAIVLAAIFRCLHPLLVVVSCLTRDPFSSSLQNRAEVDKVKALLSHDSGSDHLAFVRAVAGWEEVLRWQDRSSRENYLEENLLYAPSLRFIHGLIKQFSENIYEAFLVGKPSDCTLASAQCNEYSEEEELVKGVLMAGLYPNLIQVRQGKVTRQGKFKPNSVTYRTKSGNILLHKSTINREATRLRSRWLTYFMAVKSNGSVFVRDSSQVHPLAVLLLTDGDVHIRDDGRRATISLSDSDLLRLEGDSRTVRLLKELRRALGRMVERSLRSELAALPPSVQEEHGQLLALLAELLRGPCGSFDVRKTADD

SEQ ID NO: 4225 - protein, 1194 aa, Homo Sapiens; identical to SEQ ID NO: 4224

SEQ ID NO: 4226 - protein, 42 aa, Homo Sapiens
MFSLDSFRKDRAQHRQRQCKLPPPRLPPMCVNPTPGGTISRG

SEQ ID NO: 4227 - protein, 42 aa, Homo Sapiens; identical to SEQ ID NO: 4226

SEQ ID NO: 4228 - protein, 42 aa, Homo Sapiens; identical to SEQ ID NO: 4226

SEQ ID NO: 4229 - protein, 138 aa, Homo Sapiens
KAKFHQTEGDHLTLLAVYNSWKNNKFSNPWCYENFIQARSLRRAQDIRKQMLGIMDRHKLDVVSCGKSTVRVQKAICSGFFRNAAKKDPQEGYRTLIDQQVVYIHPSSALFNRQPEWDLYSRFSEWKSGTNCSSLSGT

SEQ ID NO: 4230 - protein, 1220 aa, Homo Sapiens [sequence omitted]

(The sequence listing continues in the following parts.)

What is claimed is:

1. A non-naturally occurring chimeric stimulatory receptor (CSR) comprising:
(a) an ectodomain comprising a activation component, wherein the activation component is isolated or derived from a first protein;
(b) a transmembrane domain; and
(c) an endodomain comprising at least one signal transduction domain, wherein the at least one signal transduction domain is isolated or derived from a second protein;
wherein the first protein and the second protein are not identical.

2. The CSR of claim 1, wherein the activation component comprises a portion of one or more of a component of a T-cell Receptor (TCR), a component of a TCR complex, a component of a TCR co-receptor, a component of a TCR co-stimulatory protein, a component of a TCR inhibitory protein, a cytokine receptor, and a chemokine receptor to which an agonist of the activation component binds.

3. The CSR of claim 1, wherein the activation component comprises a CD2 extracellular domain or a portion thereof to which an agonist binds.

4. The CSR of claim 1, wherein the signal transduction domain comprises one or more of a component of a human signal transduction domain, T-cell Receptor (TCR), a component of a TCR complex, a component of a TCR co-receptor, a component of a TCR co-stimulatory protein, a component of a TCR inhibitory protein, a cytokine receptor, and a chemokine receptor.

5. The CSR of claim 1, wherein the signal transduction domain comprises a CD3 protein or a portion thereof.

6. The CSR of claim 5, wherein the CD3 protein comprises a CD3ζ protein or a portion thereof.

7. The CSR of claim 1, wherein the endodomain further comprises a cytoplasmic domain.

8. The CSR of claim 7, wherein the cytoplasmic domain is isolated or derived from a third protein.

9. The CSR of claim 8, wherein the first protein and the third protein are identical.

10. The CSR of claim 1, wherein the ectodomain further comprises a signal peptide.

11. The CSR of claim 10, wherein the signal peptide is derived from a fourth protein.

12. The CSR of claim 11, wherein the first protein and the fourth protein are identical.

13. The CSR of claim 1, wherein the transmembrane domain is isolated or derived from a fifth protein.

14. The CSR of claim 13, wherein the first protein and the fifth protein are identical.

15. The CSR of claim 1, wherein the activation component does not bind a naturally-occurring molecule.

16. The CSR of claim 1, wherein the CSR does not transduce a signal upon binding of the activation component to a naturally-occurring molecule.

17. The CSR of claim 1, wherein the activation component binds to a non-naturally occurring molecule.

18. The CSR of claim 1, wherein the CSR selectively transduces a signal upon binding of the activation component to a non-naturally occurring molecule.

19. A non-naturally occurring chimeric stimulatory receptor (CSR) comprising:
(a) an ectodomain comprising a signal peptide and an activation component, wherein the signal peptide comprises a CD2 signal peptide or a portion thereof and wherein the activation component comprises a CD2 extracellular domain or a portion thereof to which an agonist binds;
(b) a transmembrane domain, wherein the transmembrane domain comprises a CD2 transmembrane domain or a portion thereof; and
(c) an endodomain comprising a cytoplasmic domain and at least one signal transduction domain, wherein the cytoplasmic domain comprises a CD2 cytoplasmic domain or a portion thereof and wherein the at least one signal transduction domain comprises a CD3ζ protein or a portion thereof.

20. The CSR of claim 19 comprising an amino acid sequence at least 80% identical to SEQ ID NO:17062.

21. The CSR of claim 19 comprising an amino acid sequence at least 90% identical to SEQ ID NO:17062.

22. The CSR of claim 19 comprising an amino acid sequence at least 95% identical to SEQ ID NO:17062.

23. The CSR of claim 19 comprising an amino acid sequence at least 990% identical to SEQ ID NO:17062.

24. The CSR of claim 19 comprising an amino acid sequence of SEQ ID NO:17062.

25. The CSR of claim 1, wherein the ectodomain comprises a modification.

26. The CSR of claim 25, wherein the modification comprises a mutation or a truncation of the amino acid sequence of the activation component or the first protein when compared to a wild type sequence of the activation component or the first protein.

27. The CSR of claim 26, wherein the mutation or a truncation of the amino acid sequence of the activation component comprises a mutation or truncation of a CD2 extracellular domain or a portion thereof to which an agonist binds.

28. The CSR of claim 27, wherein the CSR comprising a mutation or truncation of a CD2 extracellular domain or a portion thereof to which an agonist binds does not bind CD58.

29. The CSR of claim 27, wherein the CD2 extracellular cellular domain comprising the mutation or truncation comprises an amino acid sequence at least 80% identical to SEQ ID NO:17119.

30. The CSR of claim 27, wherein the CD2 extracellular cellular domain comprising the mutation or truncation comprises an amino acid sequence at least 90% identical to SEQ ID NO:17119.

31. The CSR of claim 27, wherein the CD2 extracellular cellular domain comprising the mutation or truncation comprises an amino acid sequence at least 95% identical to SEQ ID NO:17119.

32. The CSR of claim 27, wherein the CD2 extracellular cellular domain comprising the mutation or truncation comprises an amino acid sequence at least 99% identical to SEQ ID NO:17119.

33. The CSR of claim 27, wherein the CD2 extracellular cellular domain comprising the mutation or truncation comprises an amino acid sequence of SEQ ID NO: 17119.

34. A non-naturally occurring chimeric stimulatory receptor (CSR) comprising:
(a) an ectodomain comprising a signal peptide and an activation component, wherein the signal peptide comprises a CD2 signal peptide or a portion thereof and wherein the activation component comprises a CD2 extracellular domain or a portion thereof to which an agonist binds and wherein the CD2 extracellular domain or a portion thereof to which an agonist binds comprises a mutation or truncation;
(b) a transmembrane domain, wherein the transmembrane domain comprises a CD2 transmembrane domain or a portion thereof; and
(c) an endodomain comprising a cytoplasmic domain and at least one signal transduction domain, wherein the cytoplasmic domain comprises a CD2 cytoplasmic domain or a portion thereof and wherein the at least one signal transduction domain comprises a CD3ζ protein or a portion thereof.

35. The CSR of claim 34 comprising an amino acid sequence at least 800% identical to SEQ ID NO:17118.

36. The CSR of claim 34 comprising an amino acid sequence at least 90% identical to SEQ ID NO: 17118.

37. The CSR of claim 34 comprising an amino acid sequence at least 95% identical to SEQ ID NO: 17118.

38. The CSR of claim 34 comprising an amino acid sequence at least 99% identical to SEQ ID NO:17118.

39. The CSR of claim 34 comprising an amino acid sequence of SEQ ID NO: 17118.

40. A nucleic acid sequence encoding the CSR of any one of claims 1-39.

41. A vector comprising the nucleic acid sequence of claim 40.

42. A transposon comprising the nucleic acid sequence of claim 40.

43. A cell comprising the CSR of any one of claims 1-39.

44. A cell comprising the nucleic acid of claim 40.

45. A cell comprising the vector of claim 41.

46. A cell comprising the transposon of claim 42.

47. The cell of any one of claims 43-46, wherein the cell is an allogeneic cell.

48. The cell of any one of claims 43-46, wherein the cell is an autologous cell.

49. A composition comprising the CSR of any one of claims 1-39.

50. A composition comprising the nucleic acid sequence of claim 40.

51. A composition comprising the vector of claim 41.

52. A composition comprising the transposon of claim 42.

53. A composition comprising the cell of any one of claims 43-46.

54. A composition comprising a plurality of cells of any one of claims 43-46.

55. A modified T lymphocyte (T-cell), comprising:
(a) a modification of an endogenous sequence encoding a T-cell Receptor (TCR), wherein the modification reduces or eliminates a level of expression or activity of the TCR; and
(b) a chimeric stimulatory receptor (CSR) comprising:
(i) an ectodomain comprising an activation component, wherein the activation component is isolated or derived from a first protein;
(ii) a transmembrane domain; and
(iii) an endodomain comprising at least one signal transduction domain, wherein the at least one signal transduction domain is isolated or derived from a second protein; wherein the first protein and the second protein are not identical.

56. The modified T-cell of claim 55, further comprising an inducible proapoptotic polypeptide.

57. The modified T-cell of claim 55, further comprising a modification of an endogenous sequence encoding Beta-2-Microglobulin (B2M), wherein the modification reduces or eliminates a level of expression or activity of a major histocompatibility complex (MHC) class I (MHC-I).

58. The modified T-cell of claim 55, further comprising a non-naturally occurring polypeptide comprising an HLA class I histocompatibility antigen, alpha chain E (HLA-E) polypeptide.

59. The modified T-cell of claim 58, wherein the non-naturally occurring polypeptide comprising a HLA-E further comprises a B2M signal peptide.

60. The modified T-cell of claim 59, wherein the non-naturally occurring polypeptide comprising an HLA-E further comprises a B2M polypeptide.

61. The modified T-cell of claim 60, wherein the non-naturally occurring polypeptide comprising an HLA-E further comprises a linker, wherein the linker is positioned between the B2M polypeptide and the HLA-E polypeptide.

62. The modified T-cell of claim 61, wherein the non-naturally occurring polypeptide comprising an HLA-E further comprises a peptide and a B2M polypeptide.

63. The modified T-cell of claim 62, wherein the non-naturally occurring polypeptide comprising an HLA-E further comprises
a first linker positioned between the B2M signal peptide and the peptide, and
a second linker positioned between the B2M polypeptide and the peptide encoding the HLA-E.

64. The modified T-cell of claim 55, further comprising a non-naturally occurring antigen receptor, a sequence encoding a therapeutic polypeptide, or a combination thereof.

65. The modified T-cell of claim 64, wherein the non-naturally occurring antigen receptor comprises a chimeric antigen receptor (CAR).

66. The modified T-cell of claim 55, wherein the CSR is transiently expressed in the modified T-cell.

67. The modified T-cell of claim 55, wherein the CSR is stably expressed in the modified T-cell.

68. The modified T-cell of claim 58, wherein the polypeptide comprising the HLA-E polypeptide is transiently expressed in the modified T-cell.

69. The modified T-cell of claim 58, wherein the polypeptide comprising the HLA-E polypeptide is stably expressed in the modified T-cell.

70. The modified T-cell of claim 56, wherein the inducible proapoptotic polypeptide is stably expressed in the modified T-cell.

71. The modified T-cell of claim 64, wherein the non-naturally occurring antigen receptor or a sequence encoding a therapeutic protein is stably expressed in the modified T-cell.

72. The modified T-cell of claim 55, wherein the modified T-cell is an allogeneic cell.

73. The modified T-cell of claim 55, wherein the modified T-cell is an autologous cell.

74. The modified T-cell of claim 55, wherein the modified T-cell is an early memory T cell, a stem cell-like T cell, a stem memory T cell (T_{SCM}), a central memory T cell (T_{CM}) or a stem cell-like T cell.

75. A composition comprising a modified T-cell according to any one of claims 55-74.

76. A composition comprising a population of modified T-cells, wherein a plurality of the modified T-cells of the population comprise the CSR according to any one of claims 1-39.

77. A composition comprising a population of modified T-cells, wherein a plurality of the modified T-cells of the population comprise the modified T-cell according to any one of claims 55-74.

78. The composition of claim 76 or 77, wherein at least 25% of the plurality of modified T-cells of the population expresses one or more cell-surface marker(s) of a stem memory T cell (T_{SCM}) or a T_{SCM}-like cell; and wherein the one or more cell-surface marker(s) comprise CD45RA and CD62L.

79. The composition of claim 76 or 77, wherein at least 50% of the plurality of modified T-cells of the population expresses one or more cell-surface marker(s) of a central memory T cell (T_{CM}) or a T_{CM}-like cell; and wherein the one or more cell-surface marker(s) comprise CD45RO and CD62L.

80. The composition of claim 76 or 77, wherein at least 75% of the plurality of modified T-cells of the population expresses one or more cell-surface marker(s) of a central memory T cell (T_{CM}) or a T_{CM}-like cell; and wherein the one or more cell-surface marker(s) comprise CD45RO and CD62L.

81. The composition according to any one of claim 76 or 77 for use in the treatment of a disease or disorder.

82. The use of a composition according to any one of claim 76 or 77 for the treatment of a disease or disorder.

83. A method of treating a disease or disorder comprising administering to a subject in need thereof a therapeutically-effective amount of a composition according to any one of claim 76 or 77.

84. A method of treating a disease or disorder comprising administering to a subject in need thereof a therapeutically-effective amount of a composition according to any one of claim 76 or 77 and at least one non-naturally occurring molecule that binds the CSR.

85. A method of producing a population of modified T-cells comprising introducing into a plurality of primary human T-cells a composition comprising the CSR of claims 1-39 or a sequence encoding the same to produce a plurality of modified T-cells under conditions that stably express the CSR within the plurality of modified T-cells and preserve desirable stem-like properties of the plurality of modified T-cells.

86. The method of claim 85, wherein at least 25% of the plurality of modified T-cells of the population expresses one or more cell-surface marker(s) of a stem memory T cell (T_{SCM}) or a T_{SCM}-like cell; and wherein the one or more cell-surface marker(s) comprise CD45RA and CD62L.

87. The method of claim 85, wherein at least 50% of the plurality of modified T-cells of the population expresses one or more cell-surface marker(s) of a central memory T cell (T_{CM}) or a T_{CM}-like cell; and wherein the one or more cell-surface marker(s) comprise CD45RO and CD62L.

88. The method of claim 85, wherein at least 75% of the plurality of modified T-cells of the population expresses one or more cell-surface marker(s) of a central memory T cell (T_{CM}) or a T_{CM}-like cell; and wherein the one or more cell-surface marker(s) comprise CD45RO and CD62L.

89. A composition comprising a population of modified T-cells produced by the method of claim 85.

90. The composition of claim 89 for use in the treatment of a disease or disorder.

91. The use of a composition of claim 89 for the treatment of a disease or disorder.

92. A method of treating a disease or disorder comprising administering to a subject in need thereof a therapeutically-effective amount of the composition of claim 89.

93. The method of claim 92, further comprising administering an activator composition to the subject to activate the population of modified T-cells in vivo, to induce cell division of the population of modified T-cells in vivo, or a combination thereof.

94. A method of producing a population of modified T-cells comprising introducing into a plurality of primary human T-cells a composition comprising the CSR of claims 1-39 or a sequence encoding the same to produce a plurality of modified T-cells under conditions that transiently express the CSR within the plurality of modified T-cells and preserve desirable stem-like properties of the plurality of modified T-cells.

95. The method of claim 94, wherein at least 25% of the plurality of modified T-cells of the population expresses one or more cell-surface marker(s) of a stem memory T cell (T_{SCM}) or a T_{SCM}-like cell; and wherein the one or more cell-surface marker(s) comprise CD45RA and CD62L.

96. The method of claim 94, wherein at least 50% of the plurality of modified T-cells of the population expresses one or more cell-surface marker(s) of a central memory T cell (T_{CM}) or a T_{CM}-like cell; and wherein the one or more cell-surface marker(s) comprise CD45RO and CD62L.

97. The method of claim 94, wherein at least 75% of the plurality of modified T-cells of the population expresses one or more cell-surface marker(s) of a central memory T cell (T_{CM}) or a T_{CM}-like cell; and wherein the one or more cell-surface marker(s) comprise CD45RO and CD62L.

98. A composition comprising a population of modified T-cells produced by the method of claim 94.

99. The composition of claim 98 for use in the treatment of a disease or disorder.

100. The use of a composition of claim 98 for the treatment of a disease or disorder.

101. A method of treating a disease or disorder comprising administering to a subject in need thereof a therapeutically-effective amount of the composition of claim 98.

102. A method of claim 101, wherein the modified T-cells within the population of modified T-cells administered to the subject no longer express the CSR.

103. A method of expanding a population of modified T-cells comprising introducing into a plurality of primary human T-cells a composition comprising the CSR of claims 1-39 or a sequence encoding the same to produce a plurality of modified T-cells under conditions that stably express the CSR within the plurality of modified T-cells and preserve desirable stem-like properties of the plurality of modified T-cells and contacting the cells with an activator composition to produce a plurality of activated modified T-cells, wherein expansion of the plurality of modified T-cells is at least two fold higher than the expansion of a plurality of wild-type T-cells not stably expressing the CSR under the same conditions.

104. The method of claim 103, wherein at least 25% of the plurality of modified T-cells of the population expresses one or more cell-surface marker(s) of a stem memory T cell (T_{SCM}) or a T_{SCM}-like cell; and wherein the one or more cell-surface marker(s) comprise CD45RA and CD62L.

105. The method of claim 103, wherein at least 50% of the plurality of modified T-cells of the population expresses one or more cell-surface marker(s) of a central memory T cell (T_{CM}) or a T_{CM}-like cell; and wherein the one or more cell-surface marker(s) comprise CD45RO and CD62L.

106. The method of claim 103, wherein at least 75% of the plurality of modified T-cells of the population expresses one or more cell-surface marker(s) of a central memory T cell (T_{CM}) or a T_{CM}-like cell; and wherein the one or more cell-surface marker(s) comprise CD45RO and CD62L.

107. A composition comprising a population of modified T-cells expanded by the method of claim 103.

108. The composition of claim 107 for use in the treatment of a disease or disorder.

109. The use of a composition of claim 107 for the treatment of a disease or disorder.

110. A method of treating a disease or disorder comprising administering to a subject in need thereof a therapeutically-effective amount of the composition of claim 107.

111. The method of claim 110, further comprising administering an activator composition to the subject to activate the population of modified T-cells in vivo, to induce cell division of the population of modified T-cells in vivo, or a combination thereof.

112. A method of expanding a population of modified T-cells comprising introducing into a plurality of primary human T-cells a composition comprising the CSR of claims 1-39 or a sequence encoding the same to produce a plurality of modified T-cells under conditions that transiently express the CSR within the plurality of modified T-cells and preserve desirable stem-like properties of the plurality of modified T-cells and contacting the cells with an activator composition to produce a plurality of activated modified T-cells, wherein expansion of the plurality of modified T-cells is at least two fold higher than the expansion of a plurality of wild-type T-cells not transiently expressing the CSR under the same conditions.

113. The method of claim 112, wherein at least 25% of the plurality of modified T-cells of the population expresses one or more cell-surface marker(s) of a stem memory T cell (T_{SCM}) or a T_{SCM}-like cell; and wherein the one or more cell-surface marker(s) comprise CD45RA and CD62L.

114. The method of claim 112, wherein at least 50% of the plurality of modified T-cells of the population expresses one or more cell-surface marker(s) of a central memory T cell (T_{CM}) or a T_{CM}-like cell; and wherein the one or more cell-surface marker(s) comprise CD45RO and CD62L.

115. The method of claim 112, wherein at least 75% of the plurality of modified T-cells of the population expresses one or more cell-surface marker(s) of a central memory T cell (T_{CM}) or a T_{CM}-like cell; and wherein the one or more cell-surface marker(s) comprise CD45RO and CD62L.

116. A composition comprising a population of modified T-cells expanded by the method of claim 112.

117. The composition of claim 116 for use in the treatment of a disease or disorder.

118. The use of a composition of claim 116 for the treatment of a disease or disorder.

119. A method of treating a disease or disorder comprising administering to a subject in need thereof a therapeutically-effective amount of the composition of claim 116.

120. A method of claim 119, wherein the modified T-cells within the population of modified T-cells administered to the subject no longer express the CSR.
